United States Patent Application Publication US 2007/0214517 A1 - sequence listing, part 22

SEQ ID NO: 26995 - protein, 115 aa, Arabidopsis thaliana
  peptide (1)..(115): Ceres Seq. ID no. 12323565
  misc_feature (1)..(111): Homolog of NCBI NO: 21358275 NR Description: CG9922-PA [Drosophila melanogaster]
  misc_feature (1)..(105): Homolog of NCBI NO: 6841494 NR Description: HSPC136 [Homo sapiens]
  misc_feature (1)..(105): Homolog of NCBI NO: 3329429 NR Description: huntingtin interacting protein HYPK [Homo sapiens]
  misc_feature (1)..(105): Homolog of NCBI NO: 27734984 NR Description: Huntingtin interacting protein K; hypothetical
  misc_feature (1)..(105): Homolog of NCBI NO: 34856780 NR Description: similar to RIKEN cDNA 2310003F16 [Rattus
  misc_feature (1)..(105): Homolog of NCBI NO: 27229055 NR Description: RIKEN cDNA 2310003F16 [Mus musculus]
  misc_feature (1)..(105): Homolog of NCBI NO: 7020527 NR Description: unnamed protein product [Homo sapiens]
  misc_feature (1)..(115): Homolog of NCBI NO: 18397632 NR Description: expressed protein
  misc_feature (1)..(105): Homolog of NCBI NO: 3329429 NR Description: huntingtin interacting protein HYPK [Homo sapiens]
  misc_feature (1)..(105): Homolog of NCBI NO: 27734984 NR Description: Huntingtin interacting protein K; hypothetical
  misc_feature (1)..(105): Homolog of NCBI NO: 34856780 NR Description: similar to RIKEN cDNA 2310003F16 [Rattus
  misc_feature (1)..(105): Homolog of NCBI NO: 27229055 NR Description: RIKEN cDNA 2310003F16 [Mus musculus]
  misc_feature (1)..(105): Homolog of NCBI NO: 7020527 NR Description: unnamed protein product [Homo sapiens]
  misc_feature (1)..(115): Homolog of NCBI NO: 18397632 NR Description: expressed protein
  misc_feature (1)..(111): Homolog of NCBI NO: 21358275 NR Description: CG9922-PA [Drosophila melanogaster]
  misc_feature (1)..(105): Homolog of NCBI NO: 6841494 NR Description: HSPC136 [Homo sapiens]
MEGAEEAGAEIAVDSKDLQQQSKAFDKLTDRVEDRQLDSSRVQSAMASIAASREADLNAKRLREKELASVKINPADVEFIVNELEIEKNVAERTLREHKGDAVAATRQLLSRYPL

SEQ ID NO: 26996 - protein, 70 aa, Arabidopsis thaliana
  peptide (1)..(70): Ceres Seq. ID no. 12323566
  misc_feature (1)..(66): Homolog of NCBI NO: 21358275 NR Description: CG9922-PA [Drosophila melanogaster]
  misc_feature (1)..(60): Homolog of NCBI NO: 6841494 NR Description: HSPC136 [Homo sapiens]
  misc_feature (1)..(60): Homolog of NCBI NO: 3329429 NR Description: huntingtin interacting protein HYPK [Homo sapiens]
  misc_feature (1)..(60): Homolog of NCBI NO: 27734984 NR Description: Huntingtin interacting protein K; hypothetical
  misc_feature (1)..(60): Homolog of NCBI NO: 34856780 NR Description: similar to RIKEN cDNA 2310003F16 [Rattus
  misc_feature (1)..(60): Homolog of NCBI NO: 27229055 NR Description: RIKEN cDNA 2310003F16 [Mus musculus]
  misc_feature (1)..(60): Homolog of NCBI NO: 7020527 NR Description: unnamed protein product [Homo sapiens]
  misc_feature (1)..(70): Homolog of NCBI NO: 18397632 NR Description: expressed protein
  misc_feature (1)..(66): Homolog of NCBI NO: 21358275 NR Description: CG9922-PA [Drosophila melanogaster]
  misc_feature (1)..(60): Homolog of NCBI NO: 6841494 NR Description: HSPC136 [Homo sapiens]
  misc_feature (1)..(60): Homolog of NCBI NO: 3329429 NR Description: huntingtin interacting protein HYPK [Homo sapiens]
  misc_feature (1)..(60): Homolog of NCBI NO: 27734984 NR Description: Huntingtin interacting protein K; hypothetical
  misc_feature (1)..(60): Homolog of NCBI NO: 34856780 NR Description: similar to RIKEN cDNA 2310003F16 [Rattus
  misc_feature (1)..(60): Homolog of NCBI NO: 27229055 NR Description: RIKEN cDNA 2310003F16 [Mus musculus]
  misc_feature (1)..(60): Homolog of NCBI NO: 7020527 NR Description: unnamed protein product [Homo sapiens]
  misc_feature (1)..(70): Homolog of NCBI NO: 18397632 NR Description: expressed protein
MASIAASREADLNAKRLREKELASVKINPADVEFIVNELEIEKNVAERTLREHKGDAVAATRQLLSRYPL

SEQ ID NO: 26997 - DNA, 773 bp, Arabidopsis thaliana
  misc_feature (1)..(773): Ceres Seq. ID no. 12466393
  misc_feature: MA Experiment ID: 108435 Result: Up-regulated in Transcription
  misc_feature: MA Experiment 108435 PARAMETER Experiment Name: At_stm_Mutants_cDNA_P Parameter: Plant Line Value: wt Landsburg vs stm
  misc_feature: MA Experiment 108435 PARAMETER Experiment Name: At_stm_Mutants_cDNA_P Parameter: Tissue Value: Shoot Apical Meristem Region
  misc_feature: MA Experiment ID: 108461 Result: Up-regulated in Transcription
  misc_feature: MA Experiment 108461 PARAMETER Experiment Name: At_Germinating_Seeds_cDNA_P Parameter: Age (day) Value: 1 vs. 0
  misc_feature: MA Experiment 108461 PARAMETER Experiment Name: At_Germinating_Seeds_cDNA_P Parameter: Tissue Value: Germinating Seeds
  misc_feature: MA Experiment ID: 108473 Result: Down-regulated in Transcription
  misc_feature: MA Experiment 108473 PARAMETER Experiment Name: At_Drought_Flowers_cDNA_P Parameter: Timepoint (hr) Value: 7 d
  misc_feature: MA Experiment 108473 PARAMETER Experiment Name: At_Drought_Flowers_cDNA_P Parameter: Tissue Value: Flower
  misc_feature: MA Experiment 108473 PARAMETER Experiment Name: At_Drought_Flowers_cDNA_P Parameter: Treatment Value: Drought vs. No Drought
  misc_feature: MA Experiment ID: 108577 Result: Down-regulated in Transcription
  misc_feature: MA Experiment 108577 PARAMETER Experiment Name: At_42deg_Heat_cDNA_P Parameter: Temperature (deg C) Value: 42 vs. 22
  misc_feature: MA Experiment 108577 PARAMETER Experiment Name: At_42deg_Heat_cDNA_P Parameter: Timepoint (hr) Value: 6
  misc_feature: MA Experiment 108577 PARAMETER Experiment Name: At_42deg_Heat_cDNA_P Parameter: Tissue Value: Aerial
  misc_feature: MA Experiment ID: 20000112 Result: Down-regulated in Transcription
  misc_feature: MA Experiment 20000112 PARAMETER Experiment Name: At_42deg_Heat_cDNA_P Parameter: Temperature (deg C) Value: 42 vs. 22
  misc_feature: MA Experiment 20000112 PARAMETER Experiment Name: At_42deg_Heat_cDNA_P Parameter: Timepoint (hr) Value: 2
  misc_feature: MA Experiment 20000112 PARAMETER Experiment Name: At_42deg_Heat_cDNA_P Parameter: Tissue Value: Aerial
  misc_feature: MA Experiment ID: 20000113 Result: Down-regulated in Transcription
  misc_feature: MA Experiment 20000113 PARAMETER Experiment Name: At_42deg_Heat_cDNA_P Parameter: Temperature (deg C) Value: 42 vs. 22
  misc_feature: MA Experiment 20000113 PARAMETER Experiment Name: At_42deg_Heat_cDNA_P Parameter: Timepoint (hr) Value: 8
  misc_feature: MA Experiment 20000113 PARAMETER Experiment Name: At_42deg_Heat_cDNA_P Parameter: Tissue Value: Aerial
  misc_feature: MA Experiment ID: 20000144 Result: Down-regulated in Transcription
  misc_feature: MA Experiment 20000144 PARAMETER Experiment Name: At_42deg_Heat_cDNA_P Parameter: Temperature (deg C) Value: 42 vs. 22
  misc_feature: MA Experiment 20000144 PARAMETER Experiment Name: At_42deg_Heat_cDNA_P Parameter: Timepoint (hr) Value: 1
  misc_feature: MA Experiment 20000144 PARAMETER Experiment Name: At_42deg_Heat_cDNA_P Parameter: Tissue Value: Aerial
  misc_feature: MA Experiment ID: 20000173 Result: Down-regulated in Transcription
  misc_feature: MA Experiment 20000173 PARAMETER Experiment Name: At_42deg_Heat_P Parameter: Age (day) Value: 14
  misc_feature: MA Experiment 20000173 PARAMETER Experiment Name: At_42deg_Heat_P Parameter: Organism Value: A. thaliana
  misc_feature: MA Experiment 20000173 PARAMETER Experiment Name: At_42deg_Heat_P Parameter: Plant Line Value: WS
  misc_feature: MA Experiment 20000173 PARAMETER Experiment Name: At_42deg_Heat_P Parameter: Temperature (deg C) Value: 42 vs. 22
  misc_feature: MA Experiment 20000173 PARAMETER Experiment Name: At_42deg_Heat_P Parameter: Timepoint (hr) Value: 6
  misc_feature: MA Experiment 20000173 PARAMETER Experiment Name: At_42deg_Heat_P Parameter: Tissue Value: Aerial
  misc_feature: MA Experiment ID: 20000180 Result: Up-regulated in Transcription
  misc_feature: MA Experiment 20000180 PARAMETER Experiment Name: At_Germinating_Seeds_P Parameter: Age (hr) Value: 24 vs. 0
  misc_feature: MA Experiment 20000180 PARAMETER Experiment Name: At_Germinating_Seeds_P Parameter: Tissue Value: Germinating Seeds
  misc_feature: MA Experiment ID: 20000184 Result: Up-regulated in Transcription
  misc_feature: MA Experiment 20000184 PARAMETER Experiment Name: At_Shoots__P Parameter: Age (day) Value: 7
  misc_feature: MA Experiment 20000184 PARAMETER Experiment Name: At_Shoots__P Parameter: Tissue Value: Shoots vs. Whole Plant
  misc_feature: MA Experiment ID: 20000227 Result: Down-regulated in Transcription
  misc_feature: MA Experiment 20000227 PARAMETER Experiment Name: At_Root-Tips-vs-Tops_P Parameter: Tissue Value: Root Tips vs. Root Tops
  misc_feature: MA Experiment ID: 20000234 Result: Up-regulated in Transcription
  misc_feature: MA Experiment 20000234 PARAMETER Experiment Name: At_Siliques_P Parameter: Age (day) Value: 21
  misc_feature: MA Experiment 20000234 PARAMETER Experiment Name: At_Siliques_P Parameter: Organism Value: A. thaliana
  misc_feature: MA Experiment 20000234 PARAMETER Experiment Name: At_Siliques_P Parameter: Plant Line Value: WS
  misc_feature: MA Experiment 20000234 PARAMETER Experiment Name: At_Siliques_P Parameter: Tissue Value: Less Than 5mm Siliques vs. Whole Plant
  misc_feature: MA Experiment ID: 20000264 Result: Up-regulated in Transcription
  misc_feature: MA Experiment 20000264 PARAMETER Experiment Name: At_Open_Flower_P Parameter: Age (day) Value: 21
  misc_feature: MA Experiment 20000264 PARAMETER Experiment Name: At_Open_Flower_P Parameter: Plant Line Value: WS
  misc_feature: MA Experiment 20000264 PARAMETER Experiment Name: At_Open_Flower_P Parameter: Tissue Value: Open Flower vs. Whole Plant
  misc_feature: MA Experiment ID: 20000265 Result: Up-regulated in Transcription
  misc_feature: MA Experiment 20000265 PARAMETER Experiment Name: At_Open_Flower_P Parameter: Age (day) Value: 21
  misc_feature: MA Experiment 20000265 PARAMETER Experiment Name: At_Open_Flower_P Parameter: Plant Line Value: WS
  misc_feature: MA Experiment 20000265 PARAMETER Experiment Name: At_Open_Flower_P Parameter: Tissue Value: Closed Flower vs. Whole Plant
  misc_feature: MA Experiment ID: 20000437 Result: Down-regulated in Transcription
  misc_feature: MA Experiment 20000437 PARAMETER Experiment Name: At_Drought_P Parameter: Age (day) Value: 8
  misc_feature: MA Experiment 20000437 PARAMETER Experiment Name: At_Drought_P Parameter: Organism Value: A. thaliana
  misc_feature: MA Experiment 20000437 PARAMETER Experiment Name: At_Drought_P Parameter: Plant Line Value: WS
  misc_feature: MA Experiment 20000437 PARAMETER Experiment Name: At_Drought_P Parameter: Timepoint (hr) Value: 24
  misc_feature: MA Experiment 20000437 PARAMETER Experiment Name: At_Drought_P Parameter: Tissue Value: Whole Plant
  misc_feature: MA Experiment 20000437 PARAMETER Experiment Name: At_Drought_P Parameter: Treatment Value: Drought vs. No Drought
  misc_feature: MA Experiment ID: 20000445 Result: Down-regulated in Transcription
  misc_feature: MA Experiment 20000445 PARAMETER Experiment Name: At_100uM_NAA__P Parameter: Age (day) Value: 14
  misc_feature: MA Experiment 20000445 PARAMETER Experiment Name: At_100uM_NAA__P Parameter: Organism Value: A. thaliana
  misc_feature: MA Experiment 20000445 PARAMETER Experiment Name: At_100uM_NAA__P Parameter: Plant Line Value: WS
  misc_feature: MA Experiment 20000445 PARAMETER Experiment Name: At_100uM_NAA__P Parameter: Timepoint (hr) Value: 6
  misc_feature: MA Experiment 20000445 PARAMETER Experiment Name: At_100uM_NAA__P Parameter: Tissue Value: Aerial
  misc_feature: MA Experiment 20000445 PARAMETER Experiment Name: At_100uM_NAA__P Parameter: Treatment Value: 100uM NAA vs. No Treatment
  misc_feature: MA Experiment ID: 20000495 Result: Up-regulated in Transcription
  misc_feature: MA Experiment 20000495 PARAMETER Experiment Name: At_Guard_Cells_P Parameter: Harvest Date Value: 8/2/2002
  misc_feature: MA Experiment 20000495 PARAMETER Experiment Name: At_Guard_Cells_P Parameter: Organism Value: A. thaliana
  misc_feature: MA Experiment 20000495 PARAMETER Experiment Name: At_Guard_Cells_P Parameter: Tissue Value: Guard Cells vs. Leaves
  misc_feature: MA Experiment ID: 20000794 Result: Down-regulated in Transcription
  misc_feature: MA Experiment 20000794 PARAMETER Experiment Name: At_Petals_P Parameter: Age (day) Value: 23-25 days
  misc_feature: MA Experiment 20000794 PARAMETER Experiment Name: At_Petals_P Parameter: Plant Line Value: WS
  misc_feature: MA Experiment 20000794 PARAMETER Experiment Name: At_Petals_P Parameter: Tissue Value: Petals vs. Whole plant
  misc_feature: MA Experiment ID: 20001450 Result: Down-regulated in Transcription
  misc_feature: MA Experiment 20001450 PARAMETER Experiment Name: At_Far-red-induction_P Parameter: Age (day) Value: 7
  misc_feature: MA Experiment 20001450 PARAMETER Experiment Name: At_Far-red-induction_P Parameter: Light Value: Far-red vs. White
  misc_feature: MA Experiment 20001450 PARAMETER Experiment Name: At_Far-red-induction_P Parameter: Organism Value: A. thaliana
  misc_feature: MA Experiment 20001450 PARAMETER Experiment Name: At_Far-red-induction_P Parameter: Plant Line Value: Columbia
  misc_feature: MA Experiment 20001450 PARAMETER Experiment Name: At_Far-red-induction_P Parameter: Timepoint (hr) Value: 8
  misc_feature: MA Experiment 20001450 PARAMETER Experiment Name: At_Far-red-induction_P Parameter: Tissue Value: Whole Plant
  misc_feature: MA Experiment ID: 20001555 Result: Down-regulated in Transcription
  misc_feature: MA Experiment 20001555 PARAMETER Experiment Name: At_Drought_Soil_Dry_P Parameter: Age (day) Value: 24
  misc_feature: MA Experiment 20001555 PARAMETER Experiment Name: At_Drought_Soil_Dry_P Parameter: Organism Value: A. thaliana
  misc_feature: MA Experiment 20001555 PARAMETER Experiment Name: At_Drought_Soil_Dry_P Parameter: Plant Line Value: WS
  misc_feature: MA Experiment 20001555 PARAMETER Experiment Name: At_Drought_Soil_Dry_P Parameter: Post Timepoint (hr) Value: None
  misc_feature: MA Experiment 20001555 PARAMETER Experiment Name: At_Drought_Soil_Dry_P Parameter: Post-Treatment Value: None
  misc_feature: MA Experiment 20001555 PARAMETER Experiment Name: At_Drought_Soil_Dry_P Parameter: Timepoint (day) Value: 10
  misc_feature: MA Experiment 20001555 PARAMETER Experiment Name: At_Drought_Soil_Dry_P Parameter: Treatment Value: Drought vs. No Drought
  misc_feature: MA Experiment ID: 20001556 Result: Down-regulated in Transcription
  misc_feature: MA Experiment 20001556 PARAMETER Experiment Name: At_Drought_Soil_Dry_P Parameter: Age (day) Value: 26
  misc_feature: MA Experiment 20001556 PARAMETER Experiment Name: At_Drought_Soil_Dry_P Parameter: Organism Value: A. thaliana
  misc_feature: MA Experiment 20001556 PARAMETER Experiment Name: At_Drought_Soil_Dry_P Parameter: Plant Line Value: WS
  misc_feature: MA Experiment 20001556 PARAMETER Experiment Name: At_Drought_Soil_Dry_P Parameter: Post Timepoint (hr) Value: None
  misc_feature: MA Experiment 20001556 PARAMETER Experiment Name: At_Drought_Soil_Dry_P Parameter: Post-Treatment Value: None
  misc_feature: MA Experiment 20001556 PARAMETER Experiment Name: At_Drought_Soil_Dry_P Parameter: Timepoint (day) Value: 12
  misc_feature: MA Experiment 20001556 PARAMETER Experiment Name: At_Drought_Soil_Dry_P Parameter: Treatment Value: Drought vs. No Drought
  misc_feature: MA Experiment ID: 20001557 Result: Down-regulated in Transcription
  misc_feature: MA Experiment 20001557 PARAMETER Experiment Name: At_Drought_Soil_Dry_P Parameter: Age (day) Value: 27
  misc_feature: MA Experiment 20001557 PARAMETER Experiment Name: At_Drought_Soil_Dry_P Parameter: Organism Value: A. thaliana
  misc_feature: MA Experiment 20001557 PARAMETER Experiment Name: At_Drought_Soil_Dry_P Parameter: Plant Line Value: WS
  misc_feature: MA Experiment 20001557 PARAMETER Experiment Name: At_Drought_Soil_Dry_P Parameter: Post Timepoint (hr) Value: 3
  misc_feature: MA Experiment 20001557 PARAMETER Experiment Name: At_Drought_Soil_Dry_P Parameter: Post-Treatment Value: Re-Water vs. No Drought
  misc_feature: MA Experiment 20001557 PARAMETER Experiment Name: At_Drought_Soil_Dry_P Parameter: Timepoint (day) Value: 13
  misc_feature: MA Experiment 20001557 PARAMETER Experiment Name: At_Drought_Soil_Dry_P Parameter: Treatment Value: Drought vs. No Drought
  misc_feature: MA Experiment ID: 20001558 Result: Down-regulated in Transcription
  misc_feature: MA Experiment 20001558 PARAMETER Experiment Name: At_Drought_Soil_Dry_P Parameter: Age (day) Value: 27
  misc_feature: MA Experiment 20001558 PARAMETER Experiment Name: At_Drought_Soil_Dry_P Parameter: Organism Value: A. thaliana
  misc_feature: MA Experiment 20001558 PARAMETER Experiment Name: At_Drought_Soil_Dry_P Parameter: Plant Line Value: WS
  misc_feature: MA Experiment 20001558 PARAMETER Experiment Name: At_Drought_Soil_Dry_P Parameter: Post Timepoint (hr) Value: 6
  misc_feature: MA Experiment 20001558 PARAMETER Experiment Name: At_Drought_Soil_Dry_P Parameter: Post-Treatment Value: Re-Water vs. No Drought
  misc_feature: MA Experiment 20001558 PARAMETER Experiment Name: At_Drought_Soil_Dry_P Parameter: Timepoint (day) Value: 13
  misc_feature: MA Experiment 20001558 PARAMETER Experiment Name: At_Drought_Soil_Dry_P Parameter: Treatment Value: Drought vs. No Drought
  misc_feature: MA Experiment ID: 20001560 Result: Up-regulated in Transcription
  misc_feature: MA Experiment 20001560 PARAMETER Experiment Name: At_Drought_Soil_Dry_P Parameter: Age (day) Value: 28
  misc_feature: MA Experiment 20001560 PARAMETER Experiment Name: At_Drought_Soil_Dry_P Parameter: Organism Value: A. thaliana
  misc_feature: MA Experiment 20001560 PARAMETER Experiment Name: At_Drought_Soil_Dry_P Parameter: Plant Line Value: WS
  misc_feature: MA Experiment 20001560 PARAMETER Experiment Name: At_Drought_Soil_Dry_P Parameter: Post Timepoint (hr) Value: None
  misc_feature: MA Experiment 20001560 PARAMETER Experiment Name: At_Drought_Soil_Dry_P Parameter: Post-Treatment Value: None
  misc_feature: MA Experiment 20001560 PARAMETER Experiment Name: At_Drought_Soil_Dry_P Parameter: Timepoint (day) Value: 14
  misc_feature: MA Experiment 20001560 PARAMETER Experiment Name: At_Drought_Soil_Dry_P Parameter: Treatment Value: Drought vs. No Drought
  misc_feature: MA Experiment ID: 20001911 Result: Down-regulated in Transcription
  misc_feature: MA Experiment 20001911 PARAMETER Experiment Name: At_Drought_Reproduction_P Parameter: Age (day) Value: 40
  misc_feature: MA Experiment 20001911 PARAMETER Experiment Name: At_Drought_Reproduction_P Parameter: Organism Value: A. thaliana
  misc_feature: MA Experiment 20001911 PARAMETER Experiment Name: At_Drought_Reproduction_P Parameter: Plant Line Value: WS
  misc_feature: MA Experiment 20001911 PARAMETER Experiment Name: At_Drought_Reproduction_P Parameter: Timepoint (day) Value: 10
  misc_feature: MA Experiment 20001911 PARAMETER Experiment Name: At_Drought_Reproduction_P Parameter: Tissue Value: Flowers
  misc_feature: MA Experiment 20001911 PARAMETER Experiment Name: At_Drought_Reproduction_P Parameter: Treatment Value: Drought vs. No Drought
acaattcgcaagctatcttcctttcttcttcgcaatctcaaaatccaaaattttctgcaacccgaatcagaaacctccaacatcgtcatgggtttaattcctcaaccacaagaatcgatccaagaatctcattactacacacataaactcttcctcactgcaaactacgtcctcctcggtgcatcgtcaagctgcatcttcctcactctctctctccgtctaatcccttcactctgcggtttcttcctcatcctccttcacgccaccacgatcgcagccgccgtctcaggctgtgcagccgcatcttatggtaagaaccggtggtacgcagctcacatgatcgcaactgtccttaccgccattttccaaggctcagtctctgttctcatctttaccaacacttcgaatttcctcgagagccttaactcttacgtccgtgagaaagaagcgtctatgatcttgaaactagctggtgggctctgtgttgtaatcttttgccttgagtggatcgttcttgttctcgcctttttcttgaagtactacgcttatgtcgatggtgataacaatggagttgctatgaaaaggactggtaaggttcagagtgaagagactctcaaaaattccccatgggcgttccaagtttgaagaaaaattcacttcttgtaatgattttgtttaagagaagagaggttgtatcaaatgttagtttgatctgtgtttcagggtttggtttatatgtattgaagaattgaattggttgattactttgttga

SEQ ID NO: 26998 - protein, 214 aa, Arabidopsis thaliana
  peptide (1)..(214): Ceres Seq. ID no. 12466394
  misc_feature (46)..(179): Homolog of NCBI NO: 34907616 NR Description: contains EST C27797(C52876)~unknown protein
  misc_feature (32)..(214): Homolog of NCBI NO: 38345379 NR Description: OSJNBa0067K08.8 [Oryza sativa (japonica
  misc_feature (47)..(214): Homolog of NCBI NO: 15239407 NR Description: putative protein; protein id: At5g36800.1
  misc_feature (9)..(214): Homolog of NCBI NO: 15239379 NR Description: putative protein; protein id: At5g36710.1
  misc_feature (30)..(214): Homolog of NCBI NO: 21703131 NR Description: AT5g16250/T21H19_170 [Arabidopsis thaliana]
  misc_feature (30)..(214): Homolog of NCBI NO: 15237310 NR Description: putative protein
  misc_feature (30)..(214): Homolog of NCBI NO: 21553926 NR Description: unknown [Arabidopsis thaliana]
  misc_feature (30)..(214): Homolog of NCBI NO: 18396262 NR Description: expressed protein
TIRKLSSFLLRNLKIQNFLQPESETSNIVMGLIPQPQESIQESHYYTHKLFLTANYVLLGASSSCIFLTLSLRLIPSLCGFFLILLHATTIAAAVSGCAAASYGKNRWYAAHMIATVLTAIFQGSVSVLIFTNTSNFLESLNSYVREKEASMILKLAGGLCVVIFCLEWIVLVLAFFLKYYAYVDGDNNGVAMKRTGKVQSEETLKNSPWAFQV

SEQ ID NO: 26999 - protein, 185 aa, Arabidopsis thaliana
  peptide (1)..(185): Ceres Seq. ID no. 12466395
  misc_feature (17)..(150): Homolog of NCBI NO: 34907616 NR Description: contains EST C27797(C52876)~unknown protein
  misc_feature (3)..(185): Homolog of NCBI NO: 38345379 NR Description: OSJNBa0067K08.8 [Oryza sativa (japonica
  misc_feature (18)..(185): Homolog of NCBI NO: 15239407 NR Description: putative protein; protein id: At5g36800.1
  misc_feature (1)..(185): Homolog of NCBI NO: 15239379 NR Description: putative protein; protein id: At5g36710.1
  misc_feature (1)..(185): Homolog of NCBI NO: 21703131 NR Description: AT5g16250/T21H19_170 [Arabidopsis thaliana]
  misc_feature (1)..(185): Homolog of NCBI NO: 15237310 NR Description: putative protein
  misc_feature (1)..(185): Homolog of NCBI NO: 21553926 NR Description: unknown [Arabidopsis thaliana]
  misc_feature (1)..(185): Homolog of NCBI NO: 18396262 NR Description: expressed protein
MGLIPQPQESIQESHYYTHKLFLTANYVLLGASSSCIFLTLSLRLIPSLCGFFLILLHATTIAAAVSGCAAASYGKNRWYAAHMIATVLTAIFQGSVSVLIFTNTSNFLESLNSYVREKEASMILKLAGGLCVVIFCLEWIVLVLAFFLKYYAYVDGDNNGVAMKRTGKVQSEETLKNSPWAFQV

SEQ ID NO: 27000 - DNA, 664 bp, Arabidopsis thaliana
  misc_feature (1)..(664): Ceres Seq. ID no. 13492620
  misc_feature: MA Experiment ID: 108434 Result: Up-regulated in Transcription
  misc_feature: MA Experiment 108434 PARAMETER Experiment Name: At_Root_Tips_cDNA_P Parameter: Tissue Value: Root Tips
  misc_feature: MA Experiment ID: 108488 Result: Down-regulated in Transcription
  misc_feature: MA Experiment ID: 20000093 Result: Down-regulated in Transcription
  misc_feature: MA Experiment 20000093 PARAMETER Experiment Name: At_42deg_Heat_cDNA_P Parameter: Temperature (deg C) Value: 42 vs. 22
  misc_feature: MA Experiment 20000093 PARAMETER Experiment Name: At_42deg_Heat_cDNA_P Parameter: Timepoint (hr) Value: 0.5
  misc_feature: MA Experiment 20000093 PARAMETER Experiment Name: At_42deg_Heat_cDNA_P Parameter: Tissue Value: Aerial
gttaatttcgtcaagaaaaaaattcgatttttttgcgctctttgtgggttgttgttgttgaaaatggctggtcgtggaaaaactcttggatccggtggggcgaagaaagctacatctcggagtagcaaagccggtcttcaattcccggtgggtcgtatcgctcgtttcttaaaagccggtaaatacgccgaacgtgttggtgccggtgctccggtttatctcgccgccgttctcgaatatttggccgccgaggttcttgaattagctggaaacgcagcaagagacaacaagaagacacgtattgttcctcgtcacattcagcttgcggtcagaaacgatgaggagctaagcaagcttcttggagatgtgacgattgctaatggaggagtgatgcctaacatccacaatctccttctccctaagaaggctggtgcttcaaagcctcaggaagattaggtcttttaacacaatgatatagaacacgtctctcttttggctttagatctaataacctaataactagctagatgttttcactttttgtatctttgctttttttaattcctttagggatttgtttctttccgtttctgtttcgacatgttgtttctgtttttgtgaatatatgaaagtattttgcgaaaaatgaatgataatgtctttc

SEQ ID NO: 27001 - protein, 151 aa, Arabidopsis thaliana
  peptide (1)..(151): Ceres Seq. ID no. 13492621
  misc_feature (25)..(142): Pfam Name: Core histone H2A/H2B/H3/H4 Pfam Description: Core histone H2A/H2B/H3/H4
  misc_feature (22)..(147): Homolog of NCBI NO: 7439702 NR Description: histone H2A (clone TH254) - wheat
  misc_feature (22)..(147): Homolog of NCBI NO: 34393263 NR Description: histone H2A [Oryza sativa (japonica
  misc_feature (22)..(146): Homolog of NCBI NO: 34393264 NR Description: putative histone H2A [Oryza sativa (japonica
  misc_feature (22)..(147): Homolog of NCBI NO: 2130105 NR Description: histone H2A.4 - wheat
  misc_feature (22)..(146): Homolog of NCBI NO: 29837243 NR Description: putative histone H2A [Oryza sativa (japonica
  misc_feature (22)..(151): Homolog of NCBI NO: 15232330 NR Description: histone H2A, putative [Arabidopsis thaliana]
  misc_feature (22)..(151): Homolog of NCBI NO: 21617982 NR Description: histone H2A-like protein [Arabidopsis thaliana]
  misc_feature (22)..(151): Homolog of NCBI NO: 15223708 NR Description: histone H2A, putative [Arabidopsis thaliana]
  misc_feature (22)..(151): Homolog of NCBI NO: 15237024 NR Description: histone H2A, putative [Arabidopsis thaliana]
  misc_feature (22)..(151): Homolog of NCBI NO: 15239697 NR Description: histone H2A [Arabidopsis thaliana]
VNFVKKKIRFFCALCGLLLLKMAGRGKTLGSGGAKKATSRSSKAGLQFPVGRIARFLKAGKYAERVGAGAPVYLAAVLEYLAAEVLELAGNAARDNKKTRIVPRHIQLAVRNDEELSKLLGDVTIANGGVMPNIHNLLLPKKAGASKPQED

SEQ ID NO: 27002 - protein, 130 aa, Arabidopsis thaliana
  peptide (1)..(130): Ceres Seq. ID no. 13492622
  misc_feature (4)..(121): Pfam Name: Core histone H2A/H2B/H3/H4 Pfam Description: Core histone H2A/H2B/H3/H4
  misc_feature (1)..(126): Homolog of NCBI NO: 7439702 NR Description: histone H2A (clone TH254) - wheat
  misc_feature (1)..(126): Homolog of NCBI NO: 34393263 NR Description: histone H2A [Oryza sativa (japonica
  misc_feature (1)..(125): Homolog of NCBI NO: 34393264 NR Description: putative histone H2A [Oryza sativa (japonica
  misc_feature (1)..(126): Homolog of NCBI NO: 2130105 NR Description: histone H2A.4 - wheat
  misc_feature (1)..(125): Homolog of NCBI NO: 29837243 NR Description: putative histone H2A [Oryza sativa (japonica
  misc_feature (1)..(130): Homolog of NCBI NO: 15232330 NR Description: histone H2A, putative [Arabidopsis thaliana]
  misc_feature (1)..(130): Homolog of NCBI NO: 21617982 NR Description: histone H2A-like protein [Arabidopsis thaliana]
  misc_feature (1)..(130): Homolog of NCBI NO: 15223708 NR Description: histone H2A, putative [Arabidopsis thaliana]
  misc_feature (1)..(130): Homolog of NCBI NO: 15237024 NR Description: histone H2A, putative [Arabidopsis thaliana]
  misc_feature (1)..(130): Homolog of NCBI NO: 15239697 NR Description: histone H2A [Arabidopsis thaliana]
MAGRGKTLGSGGAKKATSRSSKAGLQFPVGRIARFLKAGKYAERVGAGAPVYLAAVLEYLAAEVLELAGNAARDNKKTRIVPRHIQLAVRNDEELSKLLGDVTIANGGVMPNIHNLLLPKKAGASKPQED

SEQ ID NO: 27003 - DNA, 658 bp, Arabidopsis thaliana
  misc_feature (1)..(658): Ceres Seq. ID no. 12331423
  misc_feature: MA Experiment ID: 108462 Result: Down-regulated in Transcription
  misc_feature: MA Experiment 108462 PARAMETER Experiment Name: At_Germinating_Seeds_cDNA_P Parameter: Age (day) Value: 2 vs. 0
  misc_feature: MA Experiment 108462 PARAMETER Experiment Name: At_Germinating_Seeds_cDNA_P Parameter: Tissue Value: Germinating Seeds
  misc_feature: MA Experiment ID: 108463 Result: Down-regulated in Transcription
  misc_feature: MA Experiment 108463 PARAMETER Experiment Name: At_Germinating_Seeds_cDNA_P Parameter: Age (day) Value: 3 vs. 0
  misc_feature: MA Experiment 108463 PARAMETER Experiment Name: At_Germinating_Seeds_cDNA_P Parameter: Tissue Value: Germinating Seeds
  misc_feature: MA Experiment ID: 108488 Result: Down-regulated in Transcription
  misc_feature: MA Experiment ID: 108577 Result: Down-regulated in Transcription
  misc_feature: MA Experiment 108577 PARAMETER Experiment Name: At_42deg_Heat_cDNA_P Parameter: Temperature (deg C) Value: 42 vs. 22
  misc_feature: MA Experiment 108577 PARAMETER Experiment Name: At_42deg_Heat_cDNA_P Parameter: Timepoint (hr) Value: 6
  misc_feature: MA Experiment 108577 PARAMETER Experiment Name: At_42deg_Heat_cDNA_P Parameter: Tissue Value: Aerial
  misc_feature: MA Experiment ID: 20000184 Result: Down-regulated in Transcription
  misc_feature: MA Experiment 20000184 PARAMETER Experiment Name: At_Shoots__P Parameter: Age (day) Value: 7
  misc_feature: MA Experiment 20000184 PARAMETER Experiment Name: At_Shoots__P Parameter: Tissue Value: Shoots vs. Whole Plant
  misc_feature: MA Experiment ID: 20000224 Result: Up-regulated in Transcription
agtaaaaaaaaatatcctctctcttgttctttctcgcgttctgctctctcgatttcagccaagagatgtcggcatacgacaatgttattggtgggaagctaaagctaaaagggaaggctttggatgtgaaagcaggtggagtaaagaagaagaagaaacataagagacaggaagaacaagctcttaaaattactgatcatgaactcatagaaggagaaagcactgaagcattgggtaaattgattgaaggagaagaaggagatgaagaaatgaacaggagtgaaaaggcaagcgaggatgcgaagttgcagcagcagctcgatgatgatgatcacttaacgccagcagaaaggcgatacatagagcagaaacaaagattggatgtgcagaagctagctaaggaagcgaacaagtctcaccgtaacaggattgaggatttcaatcagtatctggctaacatgagtgagcactacgatatccctaaagtcggacctggttaatataattctttcttgtctttgttttactctgcttatctattttgcatcgttaaacgactactttggatgtctgttatgtttagtccctttaacttttgaatgatgtgatcgcaaatctgtaatgtcaaaaacacattttcttggaatatttcttctgc

SEQ ID NO: 27004 - protein, 144 aa, Arabidopsis thaliana
  peptide (1)..(144): Ceres Seq. ID no. 12331424
  misc_feature (19)..(144): Homolog of NCBI NO: 19114925 NR Description: hypothetical protein [Schizosaccharomyces pombe]
  misc_feature (89)..(141): Homolog of NCBI NO: 13325257 NR Description: Similar to CG15432 gene product [Homo sapiens]
  misc_feature (67)..(141): Homolog of NCBI NO: 7661696 NR Description: DKFZP586O0120 protein [Homo sapiens]
  misc_feature (67)..(141): Homolog of NCBI NO: 7512937 NR Description: hypothetical protein DKFZp586O0120.1 - human
  misc_feature (67)..(141): Homolog of NCBI NO: 21165518 NR Description: hypothetical protein [Mus musculus]
  misc_feature (67)..(141): Homolog of NCBI NO: 13385950 NR Description: RIKEN cDNA 2510049I19 [Mus musculus]
  misc_feature (1)..(144): Homolog of NCBI NO: 40746298 NR Description: hypothetical protein AN0678.2 [Aspergillus
  misc_feature (5)..(144): Homolog of NCBI NO: 23509013 NR Description: hypothetical protein, conserved [Plasmodium
  misc_feature (88)..(144): Homolog of NCBI NO: 20269115 NR Description: CGI-144-like protein [Lycopersicon esculentum]
  misc_feature (1)..(144): Homolog of NCBI NO: 18394403 NR Description: expressed protein
MSAYDNVIGGKLKLKGKALDVKAGGVKKKKKHKRQEEQALKITDHELIEGESTEALGKLIEGEEGDEEMNRSEKASEDAKLQQQLDDDDHLTPAERRYIEQKQRLDVQKLAKEANKSHRNRIEDFNQYLANMSEHYDIPKVGPG

SEQ ID NO: 27005 - protein, 76 aa, Arabidopsis thaliana
  peptide (1)..(76): Ceres Seq. ID no. 12331425
  misc_feature (1)..(76): Homolog of NCBI NO: 19114925 NR Description: hypothetical protein [Schizosaccharomyces pombe]
  misc_feature (21)..(73): Homolog of NCBI NO: 13325257 NR Description: Similar to CG15432 gene product [Homo sapiens]
  misc_feature (1)..(73): Homolog of NCBI NO: 7661696 NR Description: DKFZP586O0120 protein [Homo sapiens]
  misc_feature (1)..(73): Homolog of NCBI NO: 7512937 NR Description: hypothetical protein DKFZp586O0120.1 - human
  misc_feature (1)..(73): Homolog of NCBI NO: 21165518 NR Description: hypothetical protein [Mus musculus]
  misc_feature (1)..(73): Homolog of NCBI NO: 13385950 NR Description: RIKEN cDNA 2510049I19 [Mus musculus]
  misc_feature (1)..(76): Homolog of NCBI NO: 40746298 NR Description: hypothetical protein AN0678.2 [Aspergillus
  misc_feature (1)..(76): Homolog of NCBI NO: 23509013 NR Description: hypothetical protein, conserved [Plasmodium
  misc_feature (20)..(76): Homolog of NCBI NO: 20269115 NR Description: CGI-144-like protein [Lycopersicon esculentum]
  misc_feature (1)..(76): Homolog of NCBI NO: 18394403 NR Description: expressed protein
MNRSEKASEDAKLQQQLDDDDHLTPAERRYIEQKQRLDVQKLAKEANKSHRNRIEDFNQYLANMSEHYDIPKVGPG

SEQ ID NO: 27006 - DNA, 790 bp, Arabidopsis thaliana
  misc_feature (1)..(790): Ceres Seq. ID no. 12330008
  misc_feature: MA Experiment ID: 108573 Result: Up-regulated in Transcription
  misc_feature: MA Experiment 108573 PARAMETER Experiment Name: At_Drought_cDNA_P Parameter: Timepoint (hr) Value: 6
  misc_feature: MA Experiment 108573 PARAMETER Experiment Name: At_Drought_cDNA_P Parameter: Tissue Value: Aerial
  misc_feature: MA Experiment 108573 PARAMETER Experiment Name: At_Drought_cDNA_P Parameter: Treatment Value: Drought vs. No Drought
  misc_feature: MA Experiment ID: 108579 Result: Down-regulated in Transcription
  misc_feature: MA Experiment 108579 PARAMETER Experiment Name: At_4deg_Cold_cDNA_P Parameter: Temperature (deg C) Value: 4 vs. 22
  misc_feature: MA Experiment 108579 PARAMETER Experiment Name: At_4deg_Cold_cDNA_P Parameter: Timepoint (hr) Value: 6
  misc_feature: MA Experiment 108579 PARAMETER Experiment Name: At_4deg_Cold_cDNA_P Parameter: Tissue Value: Aerial
  misc_feature: MA Experiment ID: 108585 Result: Up-regulated in Transcription
  misc_feature: MA Experiment 108585 PARAMETER Experiment Name: At_5mM_NaNP_cDNA_P Parameter: Timepoint (hr) Value: 6
  misc_feature: MA Experiment 108585 PARAMETER Experiment Name: At_5mM_NaNP_cDNA_P Parameter: Tissue Value: Aerial
  misc_feature: MA Experiment 108585 PARAMETER Experiment Name: At_5mM_NaNP_cDNA_P Parameter: Treatment Value: null
  misc_feature: MA Experiment ID: 108594 Result: Down-regulated in Transcription
  misc_feature: MA Experiment 108594 PARAMETER Experiment Name: At_Ler-rhl_Root_cDNA_P Parameter: Plant Line Value: null
  misc_feature: MA Experiment ID: 108668 Result: Up-regulated in Transcription
  misc_feature: MA Experiment 108668 PARAMETER Experiment Name: At_2mM_SA_cDNA_P Parameter: Plant Line Value: WS
  misc_feature: MA Experiment 108668 PARAMETER Experiment Name: At_2mM_SA_cDNA_P Parameter: Timepoint (hr) Value: 6
  misc_feature: MA Experiment 108668 PARAMETER Experiment Name: At_2mM_SA_cDNA_P Parameter: Treatment Value: 2mM SA vs. No Treatment
  misc_feature: MA Experiment ID: 20000182 Result: Up-regulated in Transcription
  misc_feature: MA Experiment 20000182 PARAMETER Experiment Name: At_2mM_SA_P Parameter: Age (day) Value: 14
  misc_feature: MA Experiment 20000182 PARAMETER Experiment Name: At_2mM_SA_P Parameter: Organism Value: A. thaliana
  misc_feature: MA Experiment 20000182 PARAMETER Experiment Name: At_2mM_SA_P Parameter: Plant Line Value: WS
  misc_feature: MA Experiment 20000182 PARAMETER Experiment Name: At_2mM_SA_P Parameter: Timepoint (hr) Value: 6
  misc_feature: MA Experiment 20000182 PARAMETER Experiment Name: At_2mM_SA_P Parameter: Tissue Value: Aerial
  misc_feature: MA Experiment 20000182 PARAMETER Experiment Name: At_2mM_SA_P Parameter: Treatment Value: 2mM SA vs. No Treatment
  misc_feature: MA Experiment ID: 20000234 Result: Down-regulated in Transcription
  misc_feature: MA Experiment 20000234 PARAMETER Experiment Name: At_Siliques_P Parameter: Age (day) Value: 21
  misc_feature: MA Experiment 20000234 PARAMETER Experiment Name: At_Siliques_P Parameter: Organism Value: A. thaliana
  misc_feature: MA Experiment 20000234 PARAMETER Experiment Name: At_Siliques_P Parameter: Plant Line Value: WS
  misc_feature: MA Experiment 20000234 PARAMETER Experiment Name: At_Siliques_P Parameter: Tissue Value: Less Than 5mm Siliques vs. Whole Plant
  misc_feature: MA Experiment ID: 20000235 Result: Down-regulated in Transcription
  misc_feature: MA Experiment 20000235 PARAMETER Experiment Name: At_Siliques_P Parameter: Age (day) Value: 21
  misc_feature: MA Experiment 20000235 PARAMETER Experiment Name: At_Siliques_P Parameter: Organism Value: A. thaliana
  misc_feature: MA Experiment 20000235 PARAMETER Experiment Name: At_Siliques_P Parameter: Plant Line Value: WS
  misc_feature: MA Experiment 20000235 PARAMETER Experiment Name: At_Siliques_P Parameter: Tissue Value: 5-10mm Siliques vs. Whole Plant
  misc_feature: MA Experiment ID: 20000265 Result: Down-regulated in Transcription
  misc_feature: MA Experiment 20000265 PARAMETER Experiment Name: At_Open_Flower_P Parameter: Age (day) Value: 21
  misc_feature: MA Experiment 20000265 PARAMETER Experiment Name: At_Open_Flower_P Parameter: Plant Line Value: WS
  misc_feature: MA Experiment 20000265 PARAMETER Experiment Name: At_Open_Flower_P Parameter: Tissue Value: Closed Flower vs. Whole Plant
  misc_feature: MA Experiment ID: 20000286 Result: Down-regulated in Transcription
  misc_feature: MA Experiment 20000286 PARAMETER Experiment Name: At_Open_Flower_P Parameter: Age (day) Value: 21
  misc_feature: MA Experiment 20000286 PARAMETER Experiment Name: At_Open_Flower_P Parameter: Plant Line Value: WS
  misc_feature: MA Experiment 20000286 PARAMETER Experiment Name: At_Open_Flower_P Parameter: Tissue Value: Half Open vs. Whole Plant
  misc_feature: MA Experiment ID: 20001248 Result: Up-regulated in Transcription
  misc_feature: MA Experiment 20001248 PARAMETER Experiment Name: At_Far-red-induction_P Parameter: Age (day) Value: 7
  misc_feature: MA Experiment 20001248 PARAMETER Experiment Name: At_Far-red-induction_P Parameter: Light Value: Far-red vs. White
  misc_feature: MA Experiment 20001248 PARAMETER Experiment Name: At_Far-red-induction_P Parameter: Organism Value: A. thaliana
  misc_feature: MA Experiment 20001248 PARAMETER Experiment Name: At_Far-red-induction_P Parameter: Plant Line Value: Columbia
  misc_feature: MA Experiment 20001248 PARAMETER Experiment Name: At_Far-red-induction_P Parameter: Timepoint (hr) Value: 4
  misc_feature: MA Experiment 20001248 PARAMETER Experiment Name: At_Far-red-induction_P Parameter: Tissue Value: Whole Plant
  misc_feature: MA Experiment ID: 20001450 Result: Up-regulated in Transcription
  misc_feature: MA Experiment 20001450 PARAMETER Experiment Name: At_Far-red-induction_P Parameter: Age (day) Value: 7
  misc_feature: MA Experiment 20001450 PARAMETER Experiment Name: At_Far-red-induction_P Parameter: Light Value: Far-red vs. White
  misc_feature: MA Experiment 20001450 PARAMETER Experiment Name: At_Far-red-induction_P Parameter: Organism Value: A. thaliana
  misc_feature: MA Experiment 20001450 PARAMETER Experiment Name: At_Far-red-induction_P Parameter: Plant Line Value: Columbia
  misc_feature: MA Experiment 20001450 PARAMETER Experiment Name: At_Far-red-induction_P Parameter: Timepoint (hr) Value: 8
  misc_feature: MA Experiment 20001450 PARAMETER Experiment Name: At_Far-red-induction_P Parameter: Tissue Value: Whole Plant
  misc_feature: MA Experiment ID: 20001451 Result: Up-regulated in Transcription
  misc_feature: MA Experiment 20001451 PARAMETER Experiment Name: At_Far-red-induction_P Parameter: Age (day) Value: 7
  misc_feature: MA Experiment 20001451 PARAMETER Experiment Name: At_Far-red-induction_P Parameter: Light Value: Far-red vs. White
  misc_feature: MA Experiment 20001451 PARAMETER Experiment Name: At_Far-red-induction_P Parameter: Organism Value: A. thaliana
  misc_feature: MA Experiment 20001451 PARAMETER Experiment Name: At_Far-red-induction_P Parameter: Plant Line Value: Columbia
  misc_feature: MA Experiment 20001451 PARAMETER Experiment Name: At_Far-red-induction_P Parameter: Timepoint (hr) Value: 24
  misc_feature: MA Experiment 20001451 PARAMETER Experiment Name: At_Far-red-induction_P Parameter: Tissue Value: Whole Plant
  misc_feature: MA Experiment ID: 20001557 Result: Down-regulated in Transcription
  misc_feature: MA Experiment 20001557 PARAMETER Experiment Name: At_Drought_Soil_Dry_P Parameter: Age (day) Value: 27
  misc_feature: MA Experiment 20001557 PARAMETER Experiment Name: At_Drought_Soil_Dry_P Parameter: Organism Value: A. thaliana
  misc_feature: MA Experiment 20001557 PARAMETER Experiment Name: At_Drought_Soil_Dry_P Parameter: Plant Line Value: WS
  misc_feature: MA Experiment 20001557 PARAMETER Experiment Name: At_Drought_Soil_Dry_P Parameter: Post Timepoint (hr) Value: 3
  misc_feature: MA Experiment 20001557 PARAMETER Experiment Name: At_Drought_Soil_Dry_P Parameter: Post-Treatment Value: Re-Water vs. No Drought
  misc_feature: MA Experiment 20001557 PARAMETER Experiment Name: At_Drought_Soil_Dry_P Parameter: Timepoint (day) Value: 13
  misc_feature: MA Experiment 20001557 PARAMETER Experiment Name: At_Drought_Soil_Dry_P Parameter: Treatment Value: Drought vs. No Drought
  misc_feature: MA Experiment ID: 20001560 Result: Down-regulated in Transcription
  misc_feature: MA Experiment 20001560 PARAMETER Experiment Name: At_Drought_Soil_Dry_P Parameter: Age (day) Value: 28
  misc_feature: MA Experiment 20001560 PARAMETER Experiment Name: At_Drought_Soil_Dry_P Parameter: Organism Value: A. thaliana
  misc_feature: MA Experiment 20001560 PARAMETER Experiment Name: At_Drought_Soil_Dry_P Parameter: Plant Line Value: WS
  misc_feature: MA Experiment 20001560 PARAMETER Experiment Name: At_Drought_Soil_Dry_P Parameter: Post Timepoint (hr) Value: None
  misc_feature: MA Experiment 20001560 PARAMETER Experiment Name: At_Drought_Soil_Dry_P Parameter: Post-Treatment Value: None
  misc_feature: MA Experiment 20001560 PARAMETER Experiment Name: At_Drought_Soil_Dry_P Parameter: Timepoint (day) Value: 14
  misc_feature: MA Experiment 20001560 PARAMETER Experiment Name: At_Drought_Soil_Dry_P Parameter: Treatment Value: Drought vs. No Drought
aagtctcttttctcctcgtctctgcctagccgataaattcgccgttctccatcggtaaacgcagctgaggagctagataattctctgatatctgcgttacgccggtgtggaagcaaaatttaggttaatcggatctcaattatggacgaagaggcagcaaaacctagagactccaccgtgaatcagcaacatcaatactattacggaacgtttcaaggcgttgcgaattttcctactcctgctccaccaccgcaatttatgcaaccacagcatccgattactacgtttcctggacatgcttaccaaaatctccaaggtcatggtggtggtgtgaattatgctcaaggattcccagttgttgttcctgattatacagtggttgaggtgagaccaatgatagagcatgaacttccttgttgtggcttgggcatgggctggtttctgtttatcatgggcttcttgttcggtgggatcccttggtacctcggtgcttttattgttctagtcacatctgttgatcaccgcgagaaagctggttacgttgcctgttcaatcgcatccgttgtctatttgattgccgtcatgctcgggatgactggggatattaacatctggtgaaactactccccagccaaaaccaaactcaatcttgtatatatatctacatatatactcgaaaacgtagatatatatcaatatcatttacaccagttattgctgattttagtgagttacagaagggaaatatttgtaactttgtgttgaattttatatcataactaaatattgt

SEQ ID NO: 27007 - protein, 158 aa, Arabidopsis thaliana
  peptide (1)..(158): Ceres Seq. ID no. 12330009
  misc_feature (43)..(158): Homolog of NCBI NO: 21554784 NR Description: unknown [Arabidopsis thaliana]
  misc_feature (43)..(158): Homolog of NCBI NO: 18400450 NR Description: Expressed protein
  misc_feature (21)..(158): Homolog of NCBI NO: 18404524 NR Description: expressed protein
  misc_feature (21)..(158): Homolog of NCBI NO: 21554011 NR Description: unknown [Arabidopsis thaliana]
  misc_feature (14)..(158): Homolog of NCBI NO: 18394436 NR Description: expressed protein
  misc_feature (1)..(145): Homolog of NCBI NO: 25518134 NR Description: probable 60S ribosomal protein L18A - Arabidopsis
  misc_feature (1)..(158): Homolog of NCBI NO: 18397305 NR Description: 60S ribosomal protein L18A, putative
  misc_feature (1)..(158): Homolog of NCBI NO: 21593837 NR Description: 60S ribosomal protein L18A, putative [Arabidopsis
MDEEAAKPRDSTVNQQHQYYYGTFQGVANFPTPAPPPQFMQPQHPITTFPGHAYQNLQGHGGGVNYAQGFPVVVPDYTVVEVRPMIEHELPCCGLGMGWFLFIMGFLFGGIPWYLGAFIVLVTSVDHREKAGYVACSIASVVYLIAVMLGMTGDINIW

SEQ ID NO: 27008 - protein, 119 aa, Arabidopsis thaliana
  peptide (1)..(119): Ceres Seq. ID no. 12330010
  misc_feature (4)..(119): Homolog of NCBI NO: 21554784 NR Description: unknown [Arabidopsis thaliana]
  misc_feature (4)..(119): Homolog of NCBI NO: 18400450 NR Description: Expressed protein
  misc_feature (1)..(119): Homolog of NCBI NO: 18404524 NR Description: expressed protein
  misc_feature (1)..(119): Homolog of NCBI NO: 21554011 NR Description: unknown [Arabidopsis thaliana]
  misc_feature (1)..(119): Homolog of NCBI NO: 18394436 NR Description: expressed protein
  misc_feature (1)..(106): Homolog of NCBI NO: 25518134 NR Description: probable 60S ribosomal protein L18A - Arabidopsis
  misc_feature (1)..(119): Homolog of NCBI NO: 18397305 NR Description: 60S ribosomal protein L18A, putative
  misc_feature (1)..(119): Homolog of NCBI NO: 21593837 NR Description: 60S ribosomal protein L18A, putative [Arabidopsis
MQPQHPITTFPGHAYQNLQGHGGGVNYAQGFPVVVPDYTVVEVRPMIEHELPCCGLGMGWFLFIMGFLFGGIPWYLGAFIVLVTSVDHREKAGYVACSIASVVYLIAVMLGMTGDINIW

SEQ ID NO: 27009 - DNA, 663 bp, Arabidopsis thaliana
  misc_feature (1)..(663): Ceres Seq. ID no. 12673973
  misc_feature: MA Experiment ID: 108577 Result: Down-regulated in Transcription
  misc_feature: MA Experiment 108577 PARAMETER Experiment Name: At_42deg_Heat_cDNA_P Parameter: Temperature (deg C) Value: 42 vs. 22
  misc_feature: MA Experiment 108577 PARAMETER Experiment Name: At_42deg_Heat_cDNA_P Parameter: Timepoint (hr) Value: 6
  misc_feature: MA Experiment 108577 PARAMETER Experiment Name: At_42deg_Heat_cDNA_P Parameter: Tissue Value: Aerial
  misc_feature: MA Experiment ID: 108605 Result: Up-regulated in Transcription
  misc_feature: MA Experiment 108605 PARAMETER Experiment Name: At_100uM_ABA_cDNA_P Parameter: Timepoint (hr) Value: 6
  misc_feature: MA Experiment 108605 PARAMETER Experiment Name: At_100uM_ABA_cDNA_P Parameter: Tissue Value: Aerial
  misc_feature: MA Experiment 108605 PARAMETER Experiment Name: At_100uM_ABA_cDNA_P Parameter: Treatment Value: 100uM ABA vs. No Treatment
  misc_feature: MA Experiment ID: 108607 Result: Up-regulated in Transcription
  misc_feature: MA Experiment 108607 PARAMETER Experiment Name: At_100uM_ABA_cDNA_P Parameter: Timepoint (hr) Value: 4
  misc_feature: MA Experiment 108607 PARAMETER Experiment Name: At_100uM_ABA_cDNA_P Parameter: Tissue Value: Aerial
  misc_feature: MA Experiment 108607 PARAMETER Experiment Name: At_100uM_ABA_cDNA_P Parameter: Treatment Value: 100uM ABA vs. No Treatment
  misc_feature: MA Experiment ID: 20000111 Result: Down-regulated in Transcription
  misc_feature: MA Experiment 20000111 PARAMETER Experiment Name: At_42deg_Heat_cDNA_P Parameter: Temperature (deg C) Value: 42 vs. 22
  misc_feature: MA Experiment 20000111 PARAMETER Experiment Name: At_42deg_Heat_cDNA_P Parameter: Timepoint (hr) Value: 6
  misc_feature: MA Experiment 20000111 PARAMETER Experiment Name: At_42deg_Heat_cDNA_P Parameter: Tissue Value: Aerial
  misc_feature: MA Experiment ID: 20000166 Result: Up-regulated in Transcription
  misc_feature: MA Experiment 20000166 PARAMETER Experiment Name: At_100uM_ABA_P Parameter: Age (day) Value: 14
  misc_feature: MA Experiment 20000166 PARAMETER Experiment Name: At_100uM_ABA_P Parameter: Organism Value: A. thaliana
  misc_feature: MA Experiment 20000166 PARAMETER Experiment Name: At_100uM_ABA_P Parameter: Plant Line Value: WS
  misc_feature: MA Experiment 20000166 PARAMETER Experiment Name: At_100uM_ABA_P Parameter: Timepoint (hr) Value: 1
  misc_feature: MA Experiment 20000166 PARAMETER Experiment Name: At_100uM_ABA_P Parameter: Tissue Value: Aerial
  misc_feature: MA Experiment 20000166 PARAMETER Experiment Name: At_100uM_ABA_P Parameter: Treatment Value: 100uM ABA vs. No Treatment
  misc_feature: MA Experiment ID: 20000224 Result: Up-regulated in Transcription
  misc_feature: MA Experiment ID: 20000265 Result: Up-regulated in Transcription
  misc_feature: MA Experiment 20000265 PARAMETER Experiment Name: At_Open_Flower_P Parameter: Age (day) Value: 21
  misc_feature: MA Experiment 20000265 PARAMETER Experiment Name: At_Open_Flower_P Parameter: Plant Line Value: WS
  misc_feature: MA Experiment 20000265 PARAMETER Experiment Name: At_Open_Flower_P Parameter: Tissue Value: Closed Flower vs. Whole Plant
  misc_feature: MA Experiment ID: 20000495 Result: Down-regulated in Transcription
  misc_feature: MA Experiment 20000495 PARAMETER Experiment Name: At_Guard_Cells_P Parameter: Harvest Date Value: 8/2/2002
  misc_feature: MA Experiment 20000495 PARAMETER Experiment Name: At_Guard_Cells_P Parameter: Organism Value: A. thaliana
  misc_feature: MA Experiment 20000495 PARAMETER Experiment Name: At_Guard_Cells_P Parameter: Tissue Value: Guard Cells vs. Leaves
  misc_feature: MA Experiment ID: 20000573 Result: Down-regulated in Transcription
  misc_feature: MA Experiment 20000573 PARAMETER Experiment Name: At_100uM_ABA_Mutants__P Parameter: Organism Value: A. thaliana
  misc_feature: MA Experiment 20000573 PARAMETER Experiment Name: At_100uM_ABA_Mutants__P Parameter: Plant Line Value: CS22 vs. Ler wt
  misc_feature: MA Experiment 20000573 PARAMETER Experiment Name: At_100uM_ABA_Mutants__P Parameter: Timepoint (hr) Value: N/A
  misc_feature: MA Experiment 20000573 PARAMETER Experiment Name: At_100uM_ABA_Mutants__P Parameter: Tissue Value: Whole Plant
  misc_feature: MA Experiment 20000573 PARAMETER Experiment Name: At_100uM_ABA_Mutants__P Parameter: Treatment Value: None
  misc_feature: MA Experiment ID: 20000574 Result: Down-regulated in Transcription
  misc_feature: MA Experiment 20000574 PARAMETER Experiment Name: At_100uM_ABA_Mutants__P Parameter: Organism Value: A. thaliana
  misc_feature: MA Experiment 20000574 PARAMETER Experiment Name: At_100uM_ABA_Mutants__P Parameter: Plant Line Value: CS23 vs. Ler wt
  misc_feature: MA Experiment 20000574 PARAMETER Experiment Name: At_100uM_ABA_Mutants__P Parameter: Timepoint (hr) Value: N/A
  misc_feature: MA Experiment 20000574 PARAMETER Experiment Name: At_100uM_ABA_Mutants__P Parameter: Tissue Value: Whole Plant
  misc_feature: MA Experiment 20000574 PARAMETER Experiment Name: At_100uM_ABA_Mutants__P Parameter: Treatment Value: None
  misc_feature: MA Experiment ID: 20000794 Result: Down-regulated in Transcription
  misc_feature: MA Experiment 20000794 PARAMETER Experiment Name: At_Petals_P Parameter: Age (day) Value: 23-25 days
  misc_feature: MA Experiment 20000794 PARAMETER Experiment Name: At_Petals_P Parameter: Plant Line Value: WS
  misc_feature: MA Experiment 20000794 PARAMETER Experiment Name: At_Petals_P Parameter: Tissue Value: Petals vs. Whole plant
  misc_feature: MA Experiment ID: 20001248 Result: Down-regulated in Transcription
  misc_feature: MA Experiment 20001248 PARAMETER Experiment Name: At_Far-red-induction_P Parameter: Age (day) Value: 7
  misc_feature: MA Experiment 20001248 PARAMETER Experiment Name: At_Far-red-induction_P Parameter: Light Value: Far-red vs. White
  misc_feature: MA Experiment 20001248 PARAMETER Experiment Name: At_Far-red-induction_P Parameter: Organism Value: A. thaliana
  misc_feature: MA Experiment 20001248 PARAMETER Experiment Name: At_Far-red-induction_P Parameter: Plant Line Value: Columbia
  misc_feature: MA Experiment 20001248 PARAMETER Experiment Name: At_Far-red-induction_P Parameter: Timepoint (hr) Value: 4
  misc_feature: MA Experiment 20001248 PARAMETER Experiment Name: At_Far-red-induction_P Parameter: Tissue Value: Whole Plant
  misc_feature: MA Experiment ID: 20001450 Result: Down-regulated in Transcription
  misc_feature: MA Experiment 20001450 PARAMETER Experiment Name: At_Far-red-induction_P Parameter: Age (day) Value: 7
  misc_feature: MA Experiment 20001450 PARAMETER Experiment Name: At_Far-red-induction_P Parameter: Light Value: Far-red vs. White
  misc_feature: MA Experiment 20001450 PARAMETER Experiment Name: At_Far-red-induction_P Parameter: Organism Value: A. thaliana
  misc_feature: MA Experiment 20001450 PARAMETER Experiment Name: At_Far-red-induction_P Parameter: Plant Line Value: Columbia
  misc_feature: MA Experiment 20001450 PARAMETER Experiment Name: At_Far-red-induction_P Parameter: Timepoint (hr) Value: 8
  misc_feature: MA Experiment 20001450 PARAMETER Experiment Name: At_Far-red-induction_P Parameter: Tissue Value: Whole Plant
  misc_feature: MA Experiment ID: 20001451 Result: Down-regulated in Transcription
  misc_feature: MA Experiment 20001451 PARAMETER Experiment Name: At_Far-red-induction_P Parameter: Age (day) Value: 7
  misc_feature: MA Experiment 20001451 PARAMETER Experiment Name: At_Far-red-induction_P Parameter: Light Value: Far-red vs. White
  misc_feature: MA Experiment 20001451 PARAMETER Experiment Name: At_Far-red-induction_P Parameter: Organism Value: A. thaliana
  misc_feature: MA Experiment 20001451 PARAMETER Experiment Name: At_Far-red-induction_P Parameter: Plant Line Value: Columbia
  misc_feature: MA Experiment 20001451 PARAMETER Experiment Name: At_Far-red-induction_P Parameter: Timepoint (hr) Value: 24
  misc_feature: MA Experiment 20001451 PARAMETER Experiment Name: At_Far-red-induction_P Parameter: Tissue Value: Whole Plant
  misc_feature: MA Experiment ID: 20001558 Result: Up-regulated in Transcription
  misc_feature: MA Experiment 20001558 PARAMETER Experiment Name: At_Drought_Soil_Dry_P Parameter: Age (day) Value: 27
  misc_feature: MA Experiment 20001558 PARAMETER Experiment Name: At_Drought_Soil_Dry_P Parameter: Organism Value: A. thaliana
  misc_feature: MA Experiment 20001558 PARAMETER Experiment Name: At_Drought_Soil_Dry_P Parameter: Plant Line Value: WS
  misc_feature: MA Experiment 20001558 PARAMETER Experiment Name: At_Drought_Soil_Dry_P Parameter: Post Timepoint (hr) Value: 6
  misc_feature: MA Experiment 20001558 PARAMETER Experiment Name: At_Drought_Soil_Dry_P Parameter: Post-Treatment Value: Re-Water vs. No Drought
  misc_feature: MA Experiment 20001558 PARAMETER Experiment Name: At_Drought_Soil_Dry_P Parameter: Timepoint (day) Value: 13
  misc_feature: MA Experiment 20001558 PARAMETER Experiment Name: At_Drought_Soil_Dry_P Parameter: Treatment Value: Drought vs. No Drought
aaacctaagagacagagagatcttaacacaaaacaaagcaaacaccaaaaaaaacagagatgggtttggttacagatgaagtgagagctagggcagagaaatacacaggagatgagatatgccgtgagaagacaaaggagtttctcaaggaagtttctatgcctaatggtttattgccattgaaggacattgaagaagttggttacgacagagagacaggtattgtctggctgaagcagaagaagagcatcacccacaagtttgaagccattggtaaacttgtctcttacgccaccgaggtcattgcacaggtggaggtcggaaagatcaagaagcttaccggtgttaaggccaaggagcttcttatttgggtcactctcaatgagcttgtcttggagcagccgacaagttcagggaagatcaatttcaggacaccaactggtctgtccaggactttcccagtgtctgctttcgttgttcctgaagttgagaagcctgcaacggagaagaacaatggaaccactgaggtcaaagaagctgttgcagtcacagatgcttagtctctctaatcttattaatcttatccttccaatcatgaattactttctgctatttgctgcttaatttccttttatcaataagatgatacaatttcagatttgg

SEQ ID NO: 27010 - protein, 166 aa, Arabidopsis thaliana
  peptide (1)..(166): Ceres Seq. ID no. 12673974
  misc_feature (3)..(149): Pfam Name: Protein of unknown function, DUF538 Pfam Description: Protein of unknown function, DUF538
  misc_feature (1)..(166): Homolog of NCBI NO: 18405887 NR Description: expressed protein
  misc_feature (9)..(142): Homolog of NCBI NO: 34915378 NR Description: hypothetical protein~similar to Oryza sativa
  misc_feature (9)..(143): Homolog of NCBI NO: 34915418 NR Description: hypothetical protein~similar to Arabidopsis
  misc_feature (9)..(142): Homolog of NCBI NO: 34915422 NR Description: hypothetical protein~similar to Arabidopsis
  misc_feature (9)..(142): Homolog of NCBI NO: 33146557 NR Description: unknown protein [Oryza sativa (japonica
  misc_feature (9)..(142): Homolog of NCBI NO: 34915426 NR Description: hypothetical protein~similar to Arabidopsis
  misc_feature (9)..(142): Homolog of NCBI NO: 34915376 NR Description: hypothetical protein~similar to Oryza sativa
  misc_feature (9)..(142): Homolog of NCBI NO: 34915410 NR Description: hypothetical protein~similar to Arabidopsis
  misc_feature (9)..(138): Homolog of NCBI NO: 34903866 NR Description: unnamed protein product [Oryza sativa (japonica
  misc_feature (1)..(166): Homolog of NCBI NO: 18391006 NR Description: expressed protein
MGLVTDEVRARAEKYTGDEICREKTKEFLKEVSMPNGLLPLKDIEEVGYDRETGIVWLKQKKSITHKFEAIGKLVSYATEVIAQVEVGKIKKLTGVKAKELLIWVTLNELVLEQPTSSGKINFRTPTGLSRTFPVSAFVVPEVEKPATEKNNGTTEVKEAVAVTDA

SEQ ID NO: 27011 - protein, 133 aa, Arabidopsis thaliana
  peptide (1)..(133): Ceres Seq. ID no. 12673975
  misc_feature (1)..(116): Pfam Name: Protein of unknown function, DUF538 Pfam Description: Protein of unknown function, DUF538
  misc_feature (1)..(109): Homolog of NCBI NO: 34915378 NR Description: hypothetical protein~similar to Oryza sativa
  misc_feature (1)..(110): Homolog of NCBI NO: 34915418 NR Description: hypothetical protein~similar to Arabidopsis
  misc_feature (1)..(109): Homolog of NCBI NO: 34915422 NR Description: hypothetical protein~similar to Arabidopsis
  misc_feature (1)..(109): Homolog of NCBI NO: 33146557 NR Description: unknown protein [Oryza sativa (japonica
  misc_feature (1)..(109): Homolog of NCBI NO: 34915426 NR Description: hypothetical protein~similar to Arabidopsis
  misc_feature (1)..(109): Homolog of NCBI NO: 34915376 NR Description: hypothetical protein~similar to Oryza sativa
  misc_feature (1)..(109): Homolog of NCBI NO: 34915410 NR Description: hypothetical protein~similar to Arabidopsis
  misc_feature (1)..(105): Homolog of NCBI NO: 34903866 NR Description: unnamed protein product [Oryza sativa (japonica
  misc_feature (1)..(133): Homolog of NCBI NO: 18391006 NR Description: expressed protein
  misc_feature (1)..(133): Homolog of NCBI NO: 18405887 NR Description: expressed protein
MPNGLLPLKDIEEVGYDRETGIVWLKQKKSITHKFEAIGKLVSYATEVIAQVEVGKIKKLTGVKAKELLIWVTLNELVLEQPTSSGKINFRTPTGLSRTFPVSAFVVPEVEKPATEKNNGTTEVKEAVAVTDA

SEQ ID NO: 27012 - DNA, 992 bp, Arabidopsis thaliana
  misc_feature (1)..(992): Ceres Seq. ID no. 12340249
  misc_feature: MA Experiment ID: 108573 Result: Up-regulated in Transcription
  misc_feature: MA Experiment 108573 PARAMETER Experiment Name: At_Drought_cDNA_P Parameter: Timepoint (hr) Value: 6
  misc_feature: MA Experiment 108573 PARAMETER Experiment Name: At_Drought_cDNA_P Parameter: Tissue Value: Aerial
  misc_feature: MA Experiment 108573 PARAMETER Experiment Name: At_Drought_cDNA_P Parameter: Treatment Value: Drought vs. No Drought
  misc_feature: MA Experiment ID: 20000224 Result: Up-regulated in Transcription
ataagcttgagaacacttgaaaagacaagattcgcgagttcttcgttcttcgttctgccttttttttttttttgtgtgttcgagagatgtctgcctttgaagacgattccttcgtcatactcaacgatgatgcgtctgagtctgttccagtctcaggctcttttgacgccactgaatctttctcagctttcgacggctcactccaagtcgaggactccgtcgacgatgtttttgcagcgccgtcttctgactacggtgcttactccaacggtgacggcatcttcggatccaacggggatcacgacggtcctatcttgccaccaccgtcggagatggaatcagatgagggatttgctcttagagaatggagaagacaaaatgcaattcaacttgaggagaaggagaagagagaaaaggaattgttgaagcaaattattgaggaagctgatcaatacaaagaagagtttcataagaagattgaagtaacttgtgaaaacaacaaagcagctaacagagagaaggaaaagctgtatctggagaaccaagagaagttctacgcggaatccagcaagaattactggaaggcaatagcagagctagttcctaaagaagttccaacaatagagaaaaggagaggaaaaaaagagcaacaagatcctaagaagccaacagtctctgtgattcaaggtccaaagcccggtaagccaaccgatctaacaagaatgagacaaatattggtgaagctcaaacacaacccaccttctcacctgaaactcacttctcaacctccatcggaggaggcggctgctcctccaaagaatgttcccgaaaccaagcccactgaggcagttactgctgcttaaaaacctcttttgttttcttattcgttgcttacatctgtgtgaattcagtctttgcatttcattatgtgttataaacagctgagagattttatggttcatgtgtgttattaacataattatgtcatattg

SEQ ID NO: 27013 - protein, 258 aa, Arabidopsis thaliana
  peptide (1)..(258): Ceres Seq. ID no. 12340250
  misc_feature (2)..(226): Pfam Name: Clathrin light chain Pfam Description: Clathrin light chain
  misc_feature (20)..(258): Homolog of NCBI NO: 34394059 NR Description: hypothetical protein [Oryza sativa (japonica
  misc_feature (83)..(248): Homolog of NCBI NO: 21617999 NR Description: unknown [Arabidopsis thaliana]
  misc_feature (13)..(240): Homolog of NCBI NO: 32487391 NR Description: OSJNBb0017I01.5 [Oryza sativa (japonica
  misc_feature (23)..(248): Homolog of NCBI NO: 11291712 NR Description: hypothetical protein [imported] - Arabidopsis
  misc_feature (36)..(239): Homolog of NCBI NO: 18399468 NR Description: expressed protein
  misc_feature (36)..(254): Homolog of NCBI NO: 21536711 NR Description: unknown [Arabidopsis thaliana]
  misc_feature (23)..(248): Homolog of NCBI NO: 18409442 NR Description: putative protein
  misc_feature (1)..(258): Homolog of NCBI NO: 18405251 NR Description: expressed protein
  misc_feature (1)..(258): Homolog of NCBI NO: 21593842 NR Description: unknown [Arabidopsis thaliana]
MSAFEDDSFVILNDDASESVPVSGSFDATESFSAFDGSLQVEDSVDDVFAAPSSDYGAYSNGDGIFGSNGDHDGPILPPPSEMESDEGFALREWRRQNAIQLEEKEKREKELLKQIIEEADQYKEEFHKKIEVTCENNKAANREKEKLYLENQEKFYAESSKNYWKAIAELVPKEVPTIEKRRGKKEQQDPKKPTVSVIQGPKPGKPTDLTRMRQILVKLKHNPPSHLKLTSQPPSEEAAAPPKNVPETKPTEAVTAA

SEQ ID NO: 27014 - protein, 176 aa, Arabidopsis thaliana
  peptide (1)..(176): Ceres Seq. ID no. 12340251
  misc_feature (1)..(144): Pfam Name: Clathrin light chain Pfam Description: Clathrin light chain
  misc_feature (1)..(176): Homolog of NCBI NO: 34394059 NR Description: hypothetical protein [Oryza sativa (japonica
  misc_feature (1)..(166): Homolog of NCBI NO: 21617999 NR Description: unknown [Arabidopsis thaliana]
  misc_feature (1)..(158): Homolog of NCBI NO: 32487391 NR Description: OSJNBb0017I01.5 [Oryza sativa (japonica
  misc_feature (1)..(166): Homolog of NCBI NO: 11291712 NR Description: hypothetical protein [imported] - Arabidopsis
  misc_feature (1)..(157): Homolog of NCBI NO: 18399468 NR Description: expressed protein
  misc_feature (1)..(172): Homolog of NCBI NO: 21536711 NR Description: unknown [Arabidopsis thaliana]
  misc_feature (1)..(166): Homolog of NCBI NO: 18409442 NR Description: putative protein
  misc_feature (1)..(176): Homolog of NCBI NO: 18405251 NR Description: expressed protein
  misc_feature (1)..(176): Homolog of NCBI NO: 21593842 NR Description: unknown [Arabidopsis thaliana]
MESDEGFALREWRRQNAIQLEEKEKREKELLKQIIEEADQYKEEFHKKIEVTCENNKAANREKEKLYLENQEKFYAESSKNYWKAIAELVPKEVPTIEKRRGKKEQQDPKKPTVSVIQGPKPGKPTDLTRMRQILVKLKHNPPSHLKLTSQPPSEEAAAPPKNVPETKPTEAVTAA

SEQ ID NO: 27015 - protein, 141 aa, Arabidopsis thaliana
  peptide (1)..(141): Ceres Seq. ID no. 12340252
ISLRTLEKTRFASSSFFVLPFFFFCVFERCLPLKTIPSSYSTMMRLSLFQSQALLTPLNLSQLSTAHSKSRTPSTMFLQRRLLTTVLTPTVTASSDPTGITTVLSCHHRRRWNQMRDLLLENGEDKMQFNLRRRRREKRNC

SEQ ID NO: 27016 - DNA, 628 bp, Arabidopsis thaliana
  misc_feature (1)..(628): Ceres Seq. ID no. 12384747
  misc_feature: MA Experiment ID: 108577 Result: Down-regulated in Transcription
  misc_feature: MA Experiment 108577 PARAMETER Experiment Name: At_42deg_Heat_cDNA_P Parameter: Temperature (deg C) Value: 42 vs. 22
  misc_feature: MA Experiment 108577 PARAMETER Experiment Name: At_42deg_Heat_cDNA_P Parameter: Timepoint (hr) Value: 6
  misc_feature: MA Experiment 108577 PARAMETER Experiment Name: At_42deg_Heat_cDNA_P Parameter: Tissue Value: Aerial
  misc_feature: MA Experiment ID: 108579 Result: Down-regulated in Transcription
  misc_feature: MA Experiment 108579 PARAMETER Experiment Name: At_4deg_Cold_cDNA_P Parameter: Temperature (deg C) Value: 4 vs. 22
  misc_feature: MA Experiment 108579 PARAMETER Experiment Name: At_4deg_Cold_cDNA_P Parameter: Timepoint (hr) Value: 6
  misc_feature: MA Experiment 108579 PARAMETER Experiment Name: At_4deg_Cold_cDNA_P Parameter: Tissue Value: Aerial
  misc_feature: MA Experiment ID: 20000179 Result: Up-regulated in Transcription
  misc_feature: MA Experiment 20000179 PARAMETER Experiment Name: At_Germinating_Seeds_P Parameter: Age (hr) Value: 6 vs. 0
  misc_feature: MA Experiment 20000179 PARAMETER Experiment Name: At_Germinating_Seeds_P Parameter: Tissue Value: Germinating Seeds
  misc_feature: MA Experiment ID: 20000184 Result: Down-regulated in Transcription
  misc_feature: MA Experiment 20000184 PARAMETER Experiment Name: At_Shoots__P Parameter: Age (day) Value: 7
  misc_feature: MA Experiment 20000184 PARAMETER Experiment Name: At_Shoots__P Parameter: Tissue Value: Shoots vs. Whole Plant
  misc_feature: MA Experiment ID: 20001450 Result: Up-regulated in Transcription
  misc_feature: MA Experiment 20001450 PARAMETER Experiment Name: At_Far-red-induction_P Parameter: Age (day) Value: 7
  misc_feature: MA Experiment 20001450 PARAMETER Experiment Name: At_Far-red-induction_P Parameter: Light Value: Far-red vs. White
  misc_feature: MA Experiment 20001450 PARAMETER Experiment Name: At_Far-red-induction_P Parameter: Organism Value: A. thaliana
  misc_feature: MA Experiment 20001450 PARAMETER Experiment Name: At_Far-red-induction_P Parameter: Plant Line Value: Columbia
  misc_feature: MA Experiment 20001450 PARAMETER Experiment Name: At_Far-red-induction_P Parameter: Timepoint (hr) Value: 8
  misc_feature: MA Experiment 20001450 PARAMETER Experiment Name: At_Far-red-induction_P Parameter: Tissue Value: Whole Plant
aaaaagatctgaaagaaataaaaaacgaatcggaagagagagagagagagagagattggagctagttggagatgggaataaggttcatattgatggtgaacaagcaaggccagactcgtcttgctcagtactacgaatggctcactctcgaggaacgtcgcgctctcgaaggcgaaatcgtccgtaaatgcctcgctcgcaacgaccaacagtgttcgtttgtcgagcatcgcaactacaagatagtctacaggcgttacgcatctctcttcttcatggttggggttgatgacgatgaaaacgagctggcgattctagagttcatacatcttttggtcgagacaatggacaagcattttggaaatgtgtgtgagctagacataatgttccatctggagaaagctcatttcatgctggaagaaatggtgatgaatggttgcattgtggagacaagcaaagccaacatactttcacctatacaacttatggacaaagcccattaatgctaaacaccctgtttctatttctgttaatccgtttcatcactttgttacacacttcttcttgtattattattaacgatgcttcaaagagaggataatacaaaagaagcaggaaatcgaaaagt

SEQ ID NO: 27017 - protein, 143 aa, Arabidopsis thaliana
  peptide (1)..(143): Ceres Seq. ID no. 12384748
  misc_feature (2)..(143): Pfam Name: Clathrin adaptor complex small chain Pfam Description: Clathrin adaptor complex small chain
  misc_feature (3)..(140): Homolog of NCBI NO: 12005732 NR Description: DC22 [Homo sapiens]
  misc_feature (1)..(136): Homolog of NCBI NO: 19114322 NR Description: putative clathrin-associated protein (AP)
  misc_feature (3)..(141): Homolog of NCBI NO: 26788038 NR Description: SI:dZ234G15.5 (novel protein similar to human
  misc_feature (3)..(141): Homolog of NCBI NO: 17998681 NR Description: adaptor-related protein complex AP-4, sigma 1
  misc_feature (3)..(141): Homolog of NCBI NO: 23482798 NR Description: putative clathrin assembly protein [Plasmodium
  misc_feature (3)..(141): Homolog of NCBI NO: 13431288 NR Description: Adapter-related protein complex 4 sigma 1 subunit
  misc_feature (3)..(141): Homolog of NCBI NO: 23510210 NR Description: clathrin assembly protein, putative [Plasmodium
  misc_feature (1)..(141): Homolog of NCBI NO: 37533546 NR Description: putative clathrin assembly protein
  misc_feature (1)..(141): Homolog of NCBI NO: 40253273 NR Description: putative clathrin coat assembly protein AP17
  misc_feature (1)..(143): Homolog of NCBI NO: 15224841 NR Description: putative clathrin assembly protein
MGIRFILMVNKQGQTRLAQYYEWLTLEERRALEGEIVRKCLARNDQQCSFVEHRNYKIVYRRYASLFFMVGVDDDENELAILEFIHLLVETMDKHFGNVCELDIMFHLEKAHFMLEEMVMNGCIVETSKANILSPIQLMDKAH

SEQ ID NO: 27018 - protein, 136 aa, Arabidopsis thaliana
  peptide (1)..(136): Ceres Seq. ID no. 12384749
  misc_feature (1)..(136): Pfam Name: Clathrin adaptor complex small chain Pfam Description: Clathrin adaptor complex small chain
  misc_feature (1)..(133): Homolog of NCBI NO: 12005732 NR Description: DC22 [Homo sapiens]
  misc_feature (1)..(129): Homolog of NCBI NO: 19114322 NR Description: putative clathrin-associated protein (AP)
  misc_feature (1)..(134): Homolog of NCBI NO: 26788038 NR Description: SI:dZ234G15.5 (novel protein similar to human
  misc_feature (1)..(134): Homolog of NCBI NO: 17998681 NR Description: adaptor-related protein complex AP-4, sigma 1
  misc_feature (1)..(134): Homolog of NCBI NO: 23482798 NR Description: putative clathrin assembly protein [Plasmodium
  misc_feature (1)..(134): Homolog of NCBI NO: 13431288 NR Description: Adapter-related protein complex 4 sigma 1 subunit
  misc_feature (1)..(134): Homolog of NCBI NO: 23510210 NR Description: clathrin assembly protein, putative [Plasmodium
  misc_feature (1)..(134): Homolog of NCBI NO: 37533546 NR Description: putative clathrin assembly protein
  misc_feature (1)..(134): Homolog of NCBI NO: 40253273 NR Description: putative clathrin coat assembly protein AP17
  misc_feature (1)..(136): Homolog of NCBI NO: 15224841 NR Description: putative clathrin assembly protein
MVNKQGQTRLAQYYEWLTLEERRALEGEIVRKCLARNDQQCSFVEHRNYKIVYRRYASLFFMVGVDDDENELAILEFIHLLVETMDKHFGNVCELDIMFHLEKAHFMLEEMVMNGCIVETSKANILSPIQLMDKAH

SEQ ID NO: 27019 - protein, 75 aa, Arabidopsis thaliana
  peptide (1)..(75): Ceres Seq. ID no. 12384750
  misc_feature (1)..(75): Pfam Name: Clathrin adaptor complex small chain Pfam Description: Clathrin adaptor complex small chain
  misc_feature (1)..(72): Homolog of NCBI NO: 12005732 NR Description: DC22 [Homo sapiens]
  misc_feature (1)..(68): Homolog of NCBI NO: 19114322 NR Description: putative clathrin-associated protein (AP)
  misc_feature (1)..(73): Homolog of NCBI NO: 26788038 NR Description: SI:dZ234G15.5 (novel protein similar to human
  misc_feature (1)..(73): Homolog of NCBI NO: 17998681 NR Description: adaptor-related protein complex AP-4, sigma 1
  misc_feature (1)..(73): Homolog of NCBI NO: 23482798 NR Description: putative clathrin assembly protein [Plasmodium
  misc_feature (1)..(73): Homolog of NCBI NO: 13431288 NR Description: Adapter-related protein complex 4 sigma 1 subunit
  misc_feature (1)..(73): Homolog of NCBI NO: 23510210 NR Description: clathrin assembly protein, putative [Plasmodium
  misc_feature (1)..(73): Homolog of NCBI NO: 37533546 NR Description: putative clathrin assembly protein
  misc_feature (1)..(73): Homolog of NCBI NO: 40253273 NR Description: putative clathrin coat assembly protein AP17
  misc_feature (1)..(75): Homolog of NCBI NO: 15224841 NR Description: putative clathrin assembly protein
MVGVDDDENELAILEFIHLLVETMDKHFGNVCELDIMFHLEKAHFMLEEMVMNGCIVETSKANILSPIQLMDKAH

SEQ ID NO: 27020 - DNA, 853 bp, Arabidopsis thaliana
  misc_feature (1)..(853): Ceres Seq. ID no. 13645771
  misc_feature: MA Experiment ID: 108473 Result: Down-regulated in Transcription
  misc_feature: MA Experiment 108473 PARAMETER Experiment Name: At_Drought_Flowers_cDNA_P Parameter: Timepoint (hr) Value: 7 d
  misc_feature: MA Experiment 108473 PARAMETER Experiment Name: At_Drought_Flowers_cDNA_P Parameter: Tissue Value: Flower
  misc_feature: MA Experiment 108473 PARAMETER Experiment Name: At_Drought_Flowers_cDNA_P Parameter: Treatment Value: Drought vs. No Drought
  misc_feature: MA Experiment ID: 108474 Result: Up-regulated in Transcription
  misc_feature: MA Experiment 108474 PARAMETER Experiment Name: At_Drought_Flowers_cDNA_P Parameter: Timepoint (hr) Value: null
  misc_feature: MA Experiment 108474 PARAMETER Experiment Name: At_Drought_Flowers_cDNA_P Parameter: Treatment Value: Drought vs. No Drought
  misc_feature: MA Experiment ID: 108501 Result: Down-regulated in Transcription
  misc_feature: MA Experiment 108501 PARAMETER Experiment Name: At_ap2_floral_buds_cDNA_P Parameter: Plant Line Value: ap2 (Ler.)
  misc_feature: MA Experiment 108501 PARAMETER Experiment Name: At_ap2_floral_buds_cDNA_P Parameter: Tissue Value: Closed Flower
  misc_feature: MA Experiment ID: 108573 Result: Down-regulated in Transcription
  misc_feature: MA Experiment 108573 PARAMETER Experiment Name: At_Drought_cDNA_P Parameter: Timepoint (hr) Value: 6
  misc_feature: MA Experiment 108573 PARAMETER Experiment Name: At_Drought_cDNA_P Parameter: Tissue Value: Aerial
  misc_feature: MA Experiment 108573 PARAMETER Experiment Name: At_Drought_cDNA_P Parameter: Treatment Value: Drought vs. No Drought
  misc_feature: MA Experiment ID: 108595 Result: Up-regulated in Transcription
  misc_feature: MA Experiment 108595 PARAMETER Experiment Name: At_Ler-pi_Ovule_cDNA_P Parameter: Plant Line Value: null
  misc_feature: MA Experiment ID: 20000087 Result: Up-regulated in Transcription
  misc_feature: MA Experiment 20000087 PARAMETER Experiment Name: At_100uM_ABA_Mutants_cDNA_P Parameter: Plant Line Value: WS
  misc_feature: MA Experiment 20000087 PARAMETER Experiment Name: At_100uM_ABA_Mutants_cDNA_P Parameter: Timepoint (hr) Value: 6
  misc_feature: MA Experiment 20000087 PARAMETER Experiment Name: At_100uM_ABA_Mutants_cDNA_P Parameter: Tissue Value: Aerial
  misc_feature: MA Experiment 20000087 PARAMETER Experiment Name: At_100uM_ABA_Mutants_cDNA_P Parameter: Treatment Value: 100uM ABA vs. No Treatment
  misc_feature: MA Experiment ID: 20000117 Result: Up-regulated in Transcription
  misc_feature: MA Experiment 20000117 PARAMETER Experiment Name: At_100uM_ABA_Mutants_cDNA_P Parameter: Plant Line Value: Columbia
  misc_feature: MA Experiment 20000117 PARAMETER Experiment Name: At_100uM_ABA_Mutants_cDNA_P Parameter: Timepoint (hr) Value: 6
  misc_feature: MA Experiment 20000117 PARAMETER Experiment Name: At_100uM_ABA_Mutants_cDNA_P Parameter: Tissue Value: Aerial
  misc_feature: MA Experiment 20000117 PARAMETER Experiment Name: At_100uM_ABA_Mutants_cDNA_P Parameter: Treatment Value: 100uM ABA vs. No Treatment
  misc_feature: MA Experiment ID: 20000314 Result: Down-regulated in Transcription
  misc_feature: MA Experiment 20000314 PARAMETER Experiment Name: At_14day_Shoots-Roots_Sub_P Parameter: Age (day) Value: 14
  misc_feature: MA Experiment 20000314 PARAMETER Experiment Name: At_14day_Shoots-Roots_Sub_P Parameter: Organism Value: A. thaliana
  misc_feature: MA Experiment 20000314 PARAMETER Experiment Name: At_14day_Shoots-Roots_Sub_P Parameter: Plant Line Value: WS
  misc_feature: MA Experiment 20000314 PARAMETER Experiment Name: At_14day_Shoots-Roots_Sub_P Parameter: Tissue Value: Roots vs. Whole Plant
  misc_feature: MA Experiment ID: 20000315 Result: Down-regulated in Transcription
  misc_feature: MA Experiment 20000315 PARAMETER Experiment Name: At_14day_Shoots-Roots_Sub_P Parameter: Age (day) Value: 14
  misc_feature: MA Experiment 20000315 PARAMETER Experiment Name: At_14day_Shoots-Roots_Sub_P Parameter: Organism Value: A. thaliana
  misc_feature: MA Experiment 20000315 PARAMETER Experiment Name: At_14day_Shoots-Roots_Sub_P Parameter: Plant Line Value: WS
  misc_feature: MA Experiment 20000315 PARAMETER Experiment Name: At_14day_Shoots-Roots_Sub_P Parameter: Tissue Value: Shoots vs. Whole Plant
  misc_feature: MA Experiment ID: 20000328 Result: Down-regulated in Transcription
  misc_feature: MA Experiment 20000328 PARAMETER Experiment Name: At_42deg_Heat_Sub_P Parameter: Age (day) Value: 14
  misc_feature: MA Experiment 20000328 PARAMETER Experiment Name: At_42deg_Heat_Sub_P Parameter: Organism Value: A. thaliana
  misc_feature: MA Experiment 20000328 PARAMETER Experiment Name: At_42deg_Heat_Sub_P Parameter: Plant Line Value: WS
  misc_feature: MA Experiment 20000328 PARAMETER Experiment Name: At_42deg_Heat_Sub_P Parameter: Temperature (deg C) Value: 42 vs. 22
  misc_feature: MA Experiment 20000328 PARAMETER Experiment Name: At_42deg_Heat_Sub_P Parameter: Timepoint (hr) Value: 6
  misc_feature: MA Experiment 20000328 PARAMETER Experiment Name: At_42deg_Heat_Sub_P Parameter: Tissue Value: Aerial
  misc_feature: MA Experiment ID: 20000440 Result: Up-regulated in Transcription
  misc_feature: MA Experiment 20000440 PARAMETER Experiment Name: At_Closed-Flower__Sub_P Parameter: Tissue Value: Closed Flower vs. Whole Plant
ctcaaaagagattctcacgatcgagcaagagagagatggatggtcgattacctgacaaaggcattctcaagagcgaggctctaaaacagtacatcatggaaacaacagcgtatccaagagaacacgaattgcttaaagaacttcgagaagctacaatccagagatatggaaatttaagcgagatgggagttccggttgatgaaagtctatttttatcgatgcttgtaaagatcatcaacgcgaaaaacactatcgagatcggtgtgttcaccggttactcacttttcaccgtagctcttgctttgcctgaagatggccgtattactgcgatagacattgatcaagcaggttacaatttgggactagagtttatgaagaaagcaggtgttgatcacaagatcaatttcattcaatctgatgctgttagaggcttagaccaattattgaacggggagaaacaagagtatgattttgcatttgtggatgctgacaagacgaactacgtttacttccttgagaagctccttaagttagtgaaggttggaggaatcattgccttcgacaacactttatggtttggtactctaattcagaaggaaaacgaagttccaggccatatgagagcttatagagaggcacttttagagttcaataagatattggctcgggatcctcgagtcgaaatcgctcaaatatccatcggagatggtctcacgctatgtagacgtcttatatgataaacctatagtaaataatgttatatggttcaataataactttggcctttgtttgtaatgttatatgctactataatgactcttcatcttcctaataaaactcctctttcaattcc

SEQ ID NO: 27021 - protein, 244 aa, Arabidopsis thaliana
  peptide (1)..(244): Ceres Seq. ID no. 13645772
  misc_feature (32)..(243): Pfam Name: O-methyltransferase Pfam Description: O-methyltransferase
  misc_feature (32)..(243): Pfam Name: O-methyltransferase Pfam Description: O-methyltransferase
  misc_feature (19)..(243): Homolog of NCBI NO: 30580334 NR Description: Caffeoyl-CoA O-methyltransferase 2
  misc_feature (19)..(243): Homolog of NCBI NO: 30580341 NR Description: Caffeoyl-CoA O-methyltransferase
  misc_feature (59)..(244): Homolog of NCBI NO: 15221807 NR Description: caffeoyl-CoA 3-O-methyltransferase, putative
  misc_feature (15)..(243): Homolog of NCBI NO: 37720881 NR Description: O-methyltransferase [Mesembryanthemum
  misc_feature (16)..(243): Homolog of NCBI NO: 3023432 NR Description: Caffeoyl-CoA O-methyltransferase
  misc_feature (15)..(243): Homolog of NCBI NO: 37720881 NR Description: O-methyltransferase [Mesembryanthemum
  misc_feature (32)..(244): Homolog of NCBI NO: 682728 NR Description: S-adenosyl-L-methionine:trans-caffeoyl-Coenzyme A
  misc_feature (12)..(244): Homolog of NCBI NO: 30580369 NR Description: Putative caffeoyl-CoA O-methyltransferase
  misc_feature (59)..(244): Homolog of NCBI NO: 15221807 NR Description: caffeoyl-CoA 3-O-methyltransferase, putative
  misc_feature (19)..(243): Homolog of NCBI NO: 30580341 NR Description: Caffeoyl-CoA O-methyltransferase
  misc_feature (19)..(243): Homolog of NCBI NO: 30580334 NR Description: Caffeoyl-CoA O-methyltransferase 2
  misc_feature (12)..(244): Homolog of NCBI NO: 18408913 NR Description: caffeoyl-CoA 3-O-methyltransferase, putative
  misc_feature (12)..(244): Homolog of NCBI NO: 30580370 NR Description: Putative caffeoyl-CoA O-methyltransferase
  misc_feature (32)..(244): Homolog of NCBI NO: 18408911 NR Description: caffeoyl-CoA 3-O-methyltransferase, putative
  misc_feature (16)..(243): Homolog of NCBI NO: 3023432 NR Description: Caffeoyl-CoA O-methyltransferase
  misc_feature (32)..(244): Homolog of NCBI NO: 682728 NR Description: S-adenosyl-L-methionine:trans-caffeoyl-Coenzyme A
  misc_feature (32)..(244): Homolog of NCBI NO: 18408911 NR Description: caffeoyl-CoA 3-O-methyltransferase, putative
  misc_feature (12)..(244): Homolog of NCBI NO: 30580369 NR Description: Putative caffeoyl-CoA O-methyltransferase
  misc_feature (12)..(244): Homolog of NCBI NO: 30580370 NR Description: Putative caffeoyl-CoA O-methyltransferase
  misc_feature (12)..(244): Homolog of NCBI NO: 18408913 NR Description: caffeoyl-CoA 3-O-methyltransferase, putative
QKRFSRSSKREMDGRLPDKGILKSEALKQYIMETTAYPREHELLKELREATIQRYGNLSEMGVPVDESLFLSMLVKIINAKNTIEIGVFTGYSLFTVALALPEDGRITAIDIDQAGYNLGLEFMKKAGVDHKINFIQSDAVRGLDQLLNGEKQEYDFAFVDADKTNYVYFLEKLLKLVKVGGIIAFDNTLWFGTLIQKENEVPGHMRAYREALLEFNKILARDPRVEIAQISIGDGLTLCRRLI

SEQ ID NO: 27022 - protein, 233 aa, Arabidopsis thaliana
  peptide (1)..(233): Ceres Seq. ID no. 13645773
  misc_feature (21)..(232): Pfam Name: O-methyltransferase Pfam Description: O-methyltransferase
  misc_feature (21)..(232): Pfam Name: O-methyltransferase Pfam Description: O-methyltransferase
  misc_feature (8)..(232): Homolog of NCBI NO: 30580334 NR Description: Caffeoyl-CoA O-methyltransferase 2
  misc_feature (8)..(232): Homolog of NCBI NO: 30580341 NR Description: Caffeoyl-CoA O-methyltransferase
  misc_feature (48)..(233): Homolog of NCBI NO: 15221807 NR Description: caffeoyl-CoA 3-O-methyltransferase, putative
  misc_feature (4)..(232): Homolog of NCBI NO: 37720881 NR Description: O-methyltransferase [Mesembryanthemum
  misc_feature (5)..(232): Homolog of NCBI NO: 3023432 NR Description: Caffeoyl-CoA O-methyltransferase
  misc_feature (8)..(232): Homolog of NCBI NO: 30580334 NR Description: Caffeoyl-CoA O-methyltransferase 2
  misc_feature (48)..(233): Homolog of NCBI NO: 15221807 NR Description: caffeoyl-CoA 3-O-methyltransferase, putative
  misc_feature (5)..(232): Homolog of NCBI NO: 3023432 NR Description: Caffeoyl-CoA O-methyltransferase
  misc_feature (1)..(233): Homolog of NCBI NO: 18408913 NR Description: caffeoyl-CoA 3-O-methyltransferase, putative
  misc_feature (1)..(233): Homolog of NCBI NO: 30580370 NR Description: Putative caffeoyl-CoA O-methyltransferase
  misc_feature (1)..(233): Homolog of NCBI NO: 30580369 NR Description: Putative caffeoyl-CoA O-methyltransferase
  misc_feature (21)..(233): Homolog of NCBI NO: 18408911 NR Description: caffeoyl-CoA 3-O-methyltransferase, putative
  misc_feature (21)..(233): Homolog of NCBI NO: 682728 NR Description: S-adenosyl-L-methionine:trans-caffeoyl-Coenzyme A
  misc_feature (4)..(232): Homolog of NCBI NO: 37720881 NR Description: O-methyltransferase [Mesembryanthemum
  misc_feature (8)..(232): Homolog of NCBI NO: 30580341 NR Description: Caffeoyl-CoA O-methyltransferase
  misc_feature (21)..(233): Homolog of NCBI NO: 682728 NR Description: S-adenosyl-L-methionine:trans-caffeoyl-Coenzyme A
  misc_feature (21)..(233): Homolog of NCBI NO: 18408911 NR Description: caffeoyl-CoA 3-O-methyltransferase, putative
  misc_feature (1)..(233): Homolog of NCBI NO: 30580369 NR Description: Putative caffeoyl-CoA O-methyltransferase
  misc_feature (1)..(233): Homolog of NCBI NO: 30580370 NR Description: Putative caffeoyl-CoA O-methyltransferase
  misc_feature (1)..(233): Homolog of NCBI NO: 18408913 NR Description: caffeoyl-CoA 3-O-methyltransferase, putative
MDGRLPDKGILKSEALKQYIMETTAYPREHELLKELREATIQRYGNLSEMGVPVDESLFLSMLVKIINAKNTIEIGVFTGYSLFTVALALPEDGRITAIDIDQAGYNLGLEFMKKAGVDHKINFIQSDAVRGLDQLLNGEKQEYDFAFVDADKTNYVYFLEKLLKLVKVGGIIAFDNTLWFGTLIQKENEVPGHMRAYREALLEFNKILARDPRVEIAQISIGDGLTLCRRLI

SEQ ID NO: 27023 - protein, 213 aa, Arabidopsis thaliana
  peptide (1)..(213): Ceres Seq. ID no. 13645774
  misc_feature (1)..(212): Pfam Name: O-methyltransferase Pfam Description: O-methyltransferase
  misc_feature (1)..(212): Pfam Name: O-methyltransferase Pfam Description: O-methyltransferase
  misc_feature (1)..(212): Homolog of NCBI NO: 30580334 NR Description: Caffeoyl-CoA O-methyltransferase 2
  misc_feature (1)..(212): Homolog of NCBI NO: 30580341 NR Description: Caffeoyl-CoA O-methyltransferase
  misc_feature (28)..(213): Homolog of NCBI NO: 15221807 NR Description: caffeoyl-CoA 3-O-methyltransferase, putative
  misc_feature (1)..(212): Homolog of NCBI NO: 37720881 NR Description: O-methyltransferase [Mesembryanthemum
  misc_feature (1)..(212): Homolog of NCBI NO: 3023432 NR Description: Caffeoyl-CoA O-methyltransferase
  misc_feature (1)..(212): Homolog of NCBI NO: 30580334 NR Description: Caffeoyl-CoA O-methyltransferase 2
  misc_feature (28)..(213): Homolog of NCBI NO: 15221807 NR Description: caffeoyl-CoA 3-O-methyltransferase, putative
  misc_feature (1)..(212): Homolog of NCBI NO: 3023432 NR Description: Caffeoyl-CoA O-methyltransferase
  misc_feature (1)..(213): Homolog of NCBI NO: 18408913 NR Description: caffeoyl-CoA 3-O-methyltransferase, putative
  misc_feature (1)..(213): Homolog of NCBI NO: 30580370 NR Description: Putative caffeoyl-CoA O-methyltransferase
  misc_feature (1)..(213): Homolog of NCBI NO: 30580369 NR Description: Putative caffeoyl-CoA O-methyltransferase
  misc_feature (1)..(213): Homolog of NCBI NO: 18408911 NR Description: caffeoyl-CoA 3-O-methyltransferase, putative
  misc_feature (1)..(213): Homolog of NCBI NO: 682728 NR Description: S-adenosyl-L-methionine:trans-caffeoyl-Coenzyme A
  misc_feature (1)..(212): Homolog of NCBI NO: 37720881 NR Description: O-methyltransferase [Mesembryanthemum
  misc_feature (1)..(212): Homolog of NCBI NO: 30580341 NR Description: Caffeoyl-CoA O-methyltransferase
  misc_feature (1)..(213): Homolog of NCBI NO: 682728 NR Description: S-adenosyl-L-methionine:trans-caffeoyl-Coenzyme A
  misc_feature (1)..(213): Homolog of NCBI NO: 18408911 NR Description: caffeoyl-CoA 3-O-methyltransferase, putative
  misc_feature (1)..(213): Homolog of NCBI NO: 30580369 NR Description: Putative caffeoyl-CoA O-methyltransferase
  misc_feature (1)..(213): Homolog of NCBI NO: 30580370 NR Description: Putative caffeoyl-CoA O-methyltransferase
  misc_feature (1)..(213): Homolog of NCBI NO: 18408913 NR Description: caffeoyl-CoA 3-O-methyltransferase, putative
METTAYPREHELLKELREATIQRYGNLSEMGVPVDESLFLSMLVKIINAKNTIEIGVFTGYSLFTVALALPEDGRITAIDIDQAGYNLGLEFMKKAGVDHKINFIQSDAVRGLDQLLNGEKQEYDFAFVDADKTNYVYFLEKLLKLVKVGGIIAFDNTLWFGTLIQKENEVPGHMRAYREALLEFNKILARDPRVEIAQISIGDGLTLCRRLI

SEQ ID NO: 27024 - DNA, 1870 bp, Arabidopsis thaliana
  misc_feature (1)..(1870): Ceres Seq. ID no. 12328430
  misc_feature: MA Experiment ID: 108435 Result: Down-regulated in Transcription
  misc_feature: MA Experiment 108435 PARAMETER Experiment Name: At_stm_Mutants_cDNA_P Parameter: Plant Line Value: wt Landsburg vs stm
  misc_feature: MA Experiment 108435 PARAMETER Experiment Name: At_stm_Mutants_cDNA_P Parameter: Tissue Value: Shoot Apical Meristem Region
  misc_feature: MA Experiment ID: 108461 Result: Up-regulated in Transcription
  misc_feature: MA Experiment 108461 PARAMETER Experiment Name: At_Germinating_Seeds_cDNA_P Parameter: Age (day) Value: 1 vs. 0
  misc_feature: MA Experiment 108461 PARAMETER Experiment Name: At_Germinating_Seeds_cDNA_P Parameter: Tissue Value: Germinating Seeds
  misc_feature: MA Experiment ID: 108462 Result: Up-regulated in Transcription
  misc_feature: MA Experiment 108462 PARAMETER Experiment Name: At_Germinating_Seeds_cDNA_P Parameter: Age (day) Value: 2 vs. 0
  misc_feature: MA Experiment 108462 PARAMETER Experiment Name: At_Germinating_Seeds_cDNA_P Parameter: Tissue Value: Germinating Seeds
  misc_feature: MA Experiment ID: 108463 Result: Up-regulated in Transcription
  misc_feature: MA Experiment 108463 PARAMETER Experiment Name: At_Germinating_Seeds_cDNA_P Parameter: Age (day) Value: 3 vs. 0
  misc_feature: MA Experiment 108463 PARAMETER Experiment Name: At_Germinating_Seeds_cDNA_P Parameter: Tissue Value: Germinating Seeds
  misc_feature: MA Experiment ID: 108464 Result: Up-regulated in Transcription
  misc_feature: MA Experiment 108464 PARAMETER Experiment Name: At_Germinating_Seeds_cDNA_P Parameter: Age (day) Value: 4 vs. 0
  misc_feature: MA Experiment 108464 PARAMETER Experiment Name: At_Germinating_Seeds_cDNA_P Parameter: Tissue Value: Germinating Seeds
  misc_feature: MA Experiment ID: 108595 Result: Down-regulated in Transcription
  misc_feature: MA Experiment 108595 PARAMETER Experiment Name: At_Ler-pi_Ovule_cDNA_P Parameter: Plant Line Value: null
  misc_feature: MA Experiment ID: 20000087 Result: Down-regulated in Transcription
  misc_feature: MA Experiment 20000087 PARAMETER Experiment Name: At_100uM_ABA_Mutants_cDNA_P Parameter: Plant Line Value: WS
  misc_feature: MA Experiment 20000087 PARAMETER Experiment Name: At_100uM_ABA_Mutants_cDNA_P Parameter: Timepoint (hr) Value: 6
  misc_feature: MA Experiment 20000087 PARAMETER Experiment Name: At_100uM_ABA_Mutants_cDNA_P Parameter: Tissue Value: Aerial
  misc_feature: MA Experiment 20000087 PARAMETER Experiment Name: At_100uM_ABA_Mutants_cDNA_P Parameter: Treatment Value: 100uM ABA vs. No Treatment
  misc_feature: MA Experiment ID: 20000179 Result: Up-regulated in Transcription
  misc_feature: MA Experiment 20000179 PARAMETER Experiment Name: At_Germinating_Seeds_P Parameter: Age (hr) Value: 6 vs. 0
  misc_feature: MA Experiment 20000179 PARAMETER Experiment Name: At_Germinating_Seeds_P Parameter: Tissue Value: Germinating Seeds
  misc_feature: MA Experiment ID: 20000180 Result: Up-regulated in Transcription
  misc_feature: MA Experiment 20000180 PARAMETER Experiment Name: At_Germinating_Seeds_P Parameter: Age (hr) Value: 24 vs. 0
  misc_feature: MA Experiment 20000180 PARAMETER Experiment Name: At_Germinating_Seeds_P Parameter: Tissue Value: Germinating Seeds
  misc_feature: MA Experiment ID: 20000185 Result: Down-regulated in Transcription
  misc_feature: MA Experiment 20000185 PARAMETER Experiment Name: At_Roots__P Parameter: Age (day) Value: 7 vs. 21
  misc_feature: MA Experiment 20000185 PARAMETER Experiment Name: At_Roots__P Parameter: Organism Value: A. thaliana
  misc_feature: MA Experiment 20000185 PARAMETER Experiment Name: At_Roots__P Parameter: Tissue Value: Roots vs. Whole Plant
  misc_feature: MA Experiment ID: 20000439 Result: Down-regulated in Transcription
  misc_feature: MA Experiment 20000439 PARAMETER Experiment Name: At_Roots__P Parameter: Age (day) Value: 14 vs. 21
  misc_feature: MA Experiment 20000439 PARAMETER Experiment Name: At_Roots__P Parameter: Organism Value: A. thaliana
  misc_feature: MA Experiment 20000439 PARAMETER Experiment Name: At_Roots__P Parameter: Tissue Value: Roots vs. Whole Plant
  misc_feature: MA Experiment ID: 20000451 Result: Up-regulated in Transcription
  misc_feature: MA Experiment 20000451 PARAMETER Experiment Name: At_CS6879_Shoots-Roots_P Parameter: Age (day) Value: 14
  misc_feature: MA Experiment 20000451 PARAMETER Experiment Name: At_CS6879_Shoots-Roots_P Parameter: Organism Value: A. thaliana
  misc_feature: MA Experiment 20000451 PARAMETER Experiment Name: At_CS6879_Shoots-Roots_P Parameter: Plant Line Value: CS6879 vs. WS
  misc_feature: MA Experiment 20000451 PARAMETER Experiment Name: At_CS6879_Shoots-Roots_P Parameter: Tissue Value: Roots
  misc_feature: MA Experiment ID: 20000495 Result: Down-regulated in Transcription
  misc_feature: MA Experiment 20000495 PARAMETER Experiment Name: At_Guard_Cells_P Parameter: Harvest Date Value: 8/2/2002
  misc_feature: MA Experiment 20000495 PARAMETER Experiment Name: At_Guard_Cells_P Parameter: Organism Value: A. thaliana
  misc_feature: MA Experiment 20000495 PARAMETER Experiment Name: At_Guard_Cells_P Parameter: Tissue Value: Guard Cells vs. Leaves
  misc_feature: MA Experiment ID: 20000794 Result: Down-regulated in Transcription
  misc_feature: MA Experiment 20000794 PARAMETER Experiment Name: At_Petals_P Parameter: Age (day) Value: 23-25 days
  misc_feature: MA Experiment 20000794 PARAMETER Experiment Name: At_Petals_P Parameter: Plant Line Value: WS
  misc_feature: MA Experiment 20000794 PARAMETER Experiment Name: At_Petals_P Parameter: Tissue Value: Petals vs. Whole plant
  misc_feature: MA Experiment ID: 20001248 Result: Down-regulated in Transcription
  misc_feature: MA Experiment 20001248 PARAMETER Experiment Name: At_Far-red-induction_P Parameter: Age (day) Value: 7
  misc_feature: MA Experiment 20001248 PARAMETER Experiment Name: At_Far-red-induction_P Parameter: Light Value: Far-red vs. White
  misc_feature: MA Experiment 20001248 PARAMETER Experiment Name: At_Far-red-induction_P Parameter: Organism Value: A. thaliana
  misc_feature: MA Experiment 20001248 PARAMETER Experiment Name: At_Far-red-induction_P Parameter: Plant Line Value: Columbia
  misc_feature: MA Experiment 20001248 PARAMETER Experiment Name: At_Far-red-induction_P Parameter: Timepoint (hr) Value: 4
  misc_feature: MA Experiment 20001248 PARAMETER Experiment Name: At_Far-red-induction_P Parameter: Tissue Value: Whole Plant
  misc_feature: MA Experiment ID: 20001450 Result: Down-regulated in Transcription
  misc_feature: MA Experiment 20001450 PARAMETER Experiment Name: At_Far-red-induction_P Parameter: Age (day) Value: 7
  misc_feature: MA Experiment 20001450 PARAMETER Experiment Name: At_Far-red-induction_P Parameter: Light Value: Far-red vs. White
  misc_feature: MA Experiment 20001450 PARAMETER Experiment Name: At_Far-red-induction_P Parameter: Organism Value: A. thaliana
  misc_feature: MA Experiment 20001450 PARAMETER Experiment Name: At_Far-red-induction_P Parameter: Plant Line Value: Columbia
  misc_feature: MA Experiment 20001450 PARAMETER Experiment Name: At_Far-red-induction_P Parameter: Timepoint (hr) Value: 8
  misc_feature: MA Experiment 20001450 PARAMETER Experiment Name: At_Far-red-induction_P Parameter: Tissue Value: Whole Plant
  misc_feature: MA Experiment ID: 20001451 Result: Down-regulated in Transcription
  misc_feature: MA Experiment 20001451 PARAMETER Experiment Name: At_Far-red-induction_P Parameter: Age (day) Value: 7
  misc_feature: MA Experiment 20001451 PARAMETER Experiment Name: At_Far-red-induction_P Parameter: Light Value: Far-red vs. White
  misc_feature: MA Experiment 20001451 PARAMETER Experiment Name: At_Far-red-induction_P Parameter: Organism Value: A. thaliana
  misc_feature: MA Experiment 20001451 PARAMETER Experiment Name: At_Far-red-induction_P Parameter: Plant Line Value: Columbia
  misc_feature: MA Experiment 20001451 PARAMETER Experiment Name: At_Far-red-induction_P Parameter: Timepoint (hr) Value: 24
  misc_feature: MA Experiment 20001451 PARAMETER Experiment Name: At_Far-red-induction_P Parameter: Tissue Value: Whole Plant
aatcacaagacaaccacaaaactctcactccaaaactctcaattttgccttcctttgatcgaatactacaatggcgtctgtatctgcaattggagttctcaaggtacctcctgcttcgacttccaattccaccggaaaagccacggaggcggttcccacgaggactctttctttctcctcctctgttacttcatccgacgacaagatttcactcaaatccaccgtctcccgtctttgtaaatctgttgttcgcaggaatccgatcatcgtctctcccaaagccgtctcagattctcaaaactctcaaacttgtctcgatcctgatgctagcagcagtgttttggggataatcttaggaggtggagctggaactcgtctttatccacttacgaagaagagagcgaaaccagctgtgcctcttggtgctaactataggcttattgatattcctgtgagcaactgtttgaatagcaacatatccaagatctatgttcttactcagttcaattccgcgtctttgaatcgtcatctttcacgagcttatgctagtaacatgggaggttataagaatgaaggattcgttgaagttctcgctgctcaacagagtcctgaaaaccccaactggttccaggggacagctgatgccgtcaggcaatacttgtggttgttcgaggagcataatgtcttggagtatctcattcttgctggggatcatttgtatagaatggactatgagaagtttattcaagcacatagggagactgatgctgatatcacagtagctgcattaccaatggacgagcaacgagccactgcttttgggctgatgaagattgatgaggaaggacgtattattgaatttgctgaaaaaccaaaaggggagcacctaaaggccatgaaggttgacacaacaattctaggtcttgatgatcagagagccaaggagatgcctttcattgctagtatgggtatttatgttgtaagcagagatgtaatgctagacttactacggaatcagtttcctggagctaatgactttggaagtgaagtcattcccggtgccacttcccttggactgagggtgcaagcttacctatatgatggttactgggaagacattggtactatagaggcattttataacgctaatcttggaatcaccaagaaaccagttcctgattttagtttctatgaccgttctgctccgatctacacacagccgcgttatttaccaccgtctaagatgcttgatgctgatgttactgacagtgtcatcggagagggctgtgttatcaagaactgcaaaattcatcactctgtggttggactccgttcctgcatatcagaaggtgctattattgaagattcgttattaatgggagctgattattacgagactgctacggaaaagagcctcttaagcgcgaaaggaagtgtacccataggtattgggaaaaactcgcacatcaaaagggccatcatcgacaaaaacgcacgtatcggtgacaatgtcaagatcataaacagcgacaacgtgcaagaggcagcgagagagactgatggatatttcataaagagcggaattgtaacggttatcaaagacgccttaatcccaaccggcactgtcatctgaagtacacataatgctcctttgtttatttcttcatctttctaatgccctatcaataagttttctttatggctttttaagccccaataaatctactactagttgtaatgctgcttacgaaagagattacgaaatcatgttttcacaataccattgtctcttttgagaaaaaaagaagaccctatgaatttcactaaatttatcttttgtagcttattatcaataaaattaagtttctcc

SEQ ID NO: 27025 - protein, 520 aa, Arabidopsis thaliana
  peptide (1)..(520): Ceres Seq. ID no. 12328431
  misc_feature (91)..(366): Pfam Name: Nucleotidyl transferase Pfam Description: Nucleotidyl transferase
  misc_feature (91)..(366): Pfam Name: Nucleotidyl transferase Pfam Description: Nucleotidyl transferase
  misc_feature (5)..(520): Homolog of NCBI NO: 17865461 NR Description: Glucose-1-phosphate adenylyltransferase small chloroplast precursor (ADP-glucose synthase) (ADP-glucose
  misc_feature (1)..(520): Homolog of NCBI NO: 29421116 NR Description: ADP-glucose pyrophosphorylase small subunit
  misc_feature (4)..(520): Homolog of NCBI NO: 1707944 NR Description: Glucose-1-phosphate adenylyltransferase small
  misc_feature (5)..(520): Homolog of NCBI NO: 232164 NR Description: Glucose-1-phosphate adenylyltransferase small chloroplast precursor (ADP-glucose synthase) (ADP-glucose
  misc_feature (1)..(520): Homolog of NCBI NO: 1237080 NR Description: ADP-glucose pyrophosphorylase [Pisum sativum]
  misc_feature (5)..(520): Homolog of NCBI NO: 17865461 NR Description: Glucose-1-phosphate adenylyltransferase small chloroplast precursor (ADP-glucose synthase) (ADP-glucose
  misc_feature (4)..(520): Homolog of NCBI NO: 1707944 NR Description: Glucose-1-phosphate adenylyltransferase small
  misc_feature (1)..(520): Homolog of NCBI NO: 1237080 NR Description: ADP-glucose pyrophosphorylase [Pisum sativum]
  misc_feature (1)..(520): Homolog of NCBI NO: 15238933 NR Description: ADPG pyrophosphorylase small subunit (gb
  misc_feature (1)..(520): Homolog of NCBI NO: 1575754 NR Description: ADP glucose pyrophosphorylase small subunit
  misc_feature (1)..(520): Homolog of NCBI NO: 17865468 NR Description: Glucose-1-phosphate adenylyltransferase small chloroplast precursor (ADP-glucose synthase) (ADP-glucose
  misc_feature (1)..(520): Homolog of NCBI NO: 13487787 NR Description: ADP-glucose pyrophosphorylase small subunit
  misc_feature (5)..(520): Homolog of NCBI NO: 1071859 NR Description: glucose-1-phosphate adenylyltransferase (EC
  misc_feature (5)..(520): Homolog of NCBI NO: 232164 NR Description: Glucose-1-phosphate adenylyltransferase small chloroplast precursor (ADP-glucose synthase) (ADP-glucose
  misc_feature (1)..(520): Homolog of NCBI NO: 29421116 NR Description: ADP-glucose pyrophosphorylase small subunit
  misc_feature (5)..(520): Homolog of NCBI NO: 1071859 NR Description: glucose-1-phosphate adenylyltransferase (EC
  misc_feature (1)..(520): Homolog of NCBI NO: 13487787 NR Description: ADP-glucose pyrophosphorylase small subunit
  misc_feature (1)..(520): Homolog of NCBI NO: 17865468 NR Description: Glucose-1-phosphate adenylyltransferase small chloroplast precursor (ADP-glucose synthase) (ADP-glucose
  misc_feature (1)..(520): Homolog of NCBI NO: 1575754 NR Description: ADP glucose pyrophosphorylase small subunit
  misc_feature (1)..(520): Homolog of NCBI NO: 15238933 NR Description: ADPG pyrophosphorylase small subunit (gb
MASVSAIGVLKVPPASTSNSTGKATEAVPTRTLSFSSSVTSSDDKISLKSTVSRLCKSVVRRNPIIVSPKAVSDSQNSQTCLDPDASSSVLGIILGGGAGTRLYPLTKKRAKPAVPLGANYRLIDIPVSNCLNSNISKIYVLTQFNSASLNRHLSRAYASNMGGYKNEGFVEVLAAQQSPENPNWFQGTADAVRQYLWLFEEHNVLEYLILAGDHLYRMDYEKFIQAHRETDADITVAALPMDEQRATAFGLMKIDEEGRIIEFAEKPKGEHLKAMKVDTTILGLDDQRAKEMPFIASMGIYVVSRDVMLDLLRNQFPGANDFGSEVIPGATSLGLRVQAYLYDGYWEDIGTIEAFYNANLGITKKPVPDFSFYDRSAPIYTQPRYLPPSKMLDADVTDSVIGEGCVIKNCKIHHSVVGLRSCISEGAIIEDSLLMGADYYETATEKSLLSAKGSVPIGIGKNSHIKRAIIDKNARIGDNVKIINSDNVQEAARETDGYFIKSGIVTVIKDALIPTGTVI

SEQ ID NO: 27026 - protein, 359 aa, Arabidopsis thaliana
  peptide (1)..(359): Ceres Seq. ID no. 12328432
  misc_feature (1)..(205): Pfam Name: Nucleotidyl transferase Pfam Description: Nucleotidyl transferase
  misc_feature (1)..(205): Pfam Name: Nucleotidyl transferase Pfam Description: Nucleotidyl transferase
  misc_feature (1)..(359): Homolog of NCBI NO: 17865461 NR Description: Glucose-1-phosphate adenylyltransferase small chloroplast precursor (ADP-glucose synthase) (ADP-glucose
  misc_feature (1)..(359): Homolog of NCBI NO: 29421116 NR Description: ADP-glucose pyrophosphorylase small subunit
  misc_feature (1)..(359): Homolog of NCBI NO: 1707944 NR Description: Glucose-1-phosphate adenylyltransferase small
  misc_feature (1)..(359): Homolog of NCBI NO: 232164 NR Description: Glucose-1-phosphate adenylyltransferase small chloroplast precursor (ADP-glucose synthase) (ADP-glucose
  misc_feature (1)..(359): Homolog of NCBI NO: 1237080 NR Description: ADP-glucose pyrophosphorylase [Pisum sativum]
  misc_feature (1)..(359): Homolog of NCBI NO: 17865461 NR Description: Glucose-1-phosphate adenylyltransferase small chloroplast precursor (ADP-glucose synthase) (ADP-glucose
  misc_feature (1)..(359): Homolog of NCBI NO: 1707944 NR Description: Glucose-1-phosphate adenylyltransferase small
  misc_feature (1)..(359): Homolog of NCBI NO: 1237080 NR Description: ADP-glucose pyrophosphorylase [Pisum sativum]
  misc_feature (1)..(359): Homolog of NCBI NO: 15238933 NR Description: ADPG pyrophosphorylase small subunit (gb
  misc_feature (1)..(359): Homolog of NCBI NO: 1575754 NR Description: ADP glucose pyrophosphorylase small subunit
  misc_feature (1)..(359): Homolog of NCBI NO: 17865468 NR Description: Glucose-1-phosphate adenylyltransferase small chloroplast precursor (ADP-glucose synthase) (ADP-glucose
  misc_feature (1)..(359): Homolog of NCBI NO: 13487787 NR Description: ADP-glucose pyrophosphorylase small subunit
  misc_feature (1)..(359): Homolog of NCBI NO: 1071859 NR Description: glucose-1-phosphate adenylyltransferase (EC
  misc_feature (1)..(359): Homolog of NCBI NO: 232164 NR Description: Glucose-1-phosphate adenylyltransferase small chloroplast precursor (ADP-glucose synthase) (ADP-glucose
  misc_feature (1)..(359): Homolog of NCBI NO: 29421116 NR Description: ADP-glucose pyrophosphorylase small subunit
  misc_feature (1)..(359): Homolog of NCBI NO: 1071859 NR Description: glucose-1-phosphate adenylyltransferase (EC
  misc_feature (1)..(359): Homolog of NCBI NO: 13487787 NR Description: ADP-glucose pyrophosphorylase small subunit
  misc_feature (1)..(359): Homolog of NCBI NO: 17865468 NR Description: Glucose-1-phosphate adenylyltransferase small chloroplast precursor (ADP-glucose synthase) (ADP-glucose
  misc_feature (1)..(359): Homolog of NCBI NO: 1575754 NR Description: ADP glucose pyrophosphorylase small subunit
  misc_feature (1)..(359): Homolog of NCBI NO: 15238933 NR Description: ADPG pyrophosphorylase small subunit (gb
MGGYKNEGFVEVLAAQQSPENPNWFQGTADAVRQYLWLFEEHNVLEYLILAGDHLYRMDYEKFIQAHRETDADITVAALPMDEQRATAFGLMKIDEEGRIIEFAEKPKGEHLKAMKVDTTILGLDDQRAKEMPFIASMGIYVVSRDVMLDLLRNQFPGANDFGSEVIPGATSLGLRVQAYLYDGYWEDIGTIEAFYNANLGITKKPVPDFSFYDRSAPIYTQPRYLPPSKMLDADVTDSVIGEGCVIKNCKIHHSVVGLRSCISEGAIIEDSLLMGADYYETATEKSLLSAKGSVPIGIGKNSHIKRAIIDKNARIGDNVKIINSDNVQEAARETDGYFIKSGIVTVIKDALIPTGTVI

SEQ ID NO: 27027 - protein, 302 aa, Arabidopsis thaliana
  peptide (1)..(302): Ceres Seq. ID no. 12328433
  misc_feature (1)..(148): Pfam Name: Nucleotidyl transferase Pfam Description: Nucleotidyl transferase
  misc_feature (1)..(148): Pfam Name: Nucleotidyl transferase Pfam Description: Nucleotidyl transferase
  misc_feature (1)..(302): Homolog of NCBI NO: 17865461 NR Description: Glucose-1-phosphate adenylyltransferase small chloroplast precursor (ADP-glucose synthase) (ADP-glucose
  misc_feature (1)..(302): Homolog of NCBI NO: 29421116 NR Description: ADP-glucose pyrophosphorylase small subunit
  misc_feature (1)..(302): Homolog of NCBI NO: 1707944 NR Description: Glucose-1-phosphate adenylyltransferase small
  misc_feature (1)..(302): Homolog of NCBI NO: 232164 NR Description: Glucose-1-phosphate adenylyltransferase small chloroplast precursor (ADP-glucose synthase) (ADP-glucose
  misc_feature (1)..(302): Homolog of NCBI NO: 1237080 NR Description: ADP-glucose pyrophosphorylase [Pisum sativum]
  misc_feature (1)..(302): Homolog of NCBI NO: 17865461 NR Description: Glucose-1-phosphate adenylyltransferase small chloroplast precursor (ADP-glucose synthase) (ADP-glucose
  misc_feature (1)..(302): Homolog of NCBI NO: 1707944 NR Description: Glucose-1-phosphate adenylyltransferase small
  misc_feature (1)..(302): Homolog of NCBI NO: 1237080 NR Description: ADP-glucose pyrophosphorylase [Pisum sativum]
  misc_feature (1)..(302): Homolog of NCBI NO: 15238933 NR Description: ADPG pyrophosphorylase small subunit (gb
  misc_feature (1)..(302): Homolog of NCBI NO: 1575754 NR Description: ADP glucose pyrophosphorylase small subunit
  misc_feature (1)..(302): Homolog of NCBI NO: 17865468 NR Description: Glucose-1-phosphate adenylyltransferase small chloroplast precursor (ADP-glucose synthase) (ADP-glucose
  misc_feature (1)..(302): Homolog of NCBI NO: 13487787 NR Description: ADP-glucose pyrophosphorylase small subunit
  misc_feature (1)..(302): Homolog of NCBI NO: 1071859 NR Description: glucose-1-phosphate adenylyltransferase (EC
  misc_feature (1)..(302): Homolog of NCBI NO: 232164 NR Description: Glucose-1-phosphate adenylyltransferase small chloroplast precursor (ADP-glucose synthase) (ADP-glucose
  misc_feature (1)..(302): Homolog of NCBI NO: 29421116 NR Description: ADP-glucose pyrophosphorylase small subunit
  misc_feature (1)..(302): Homolog of NCBI NO: 1071859 NR Description: glucose-1-phosphate adenylyltransferase (EC
  misc_feature (1)..(302): Homolog of NCBI NO: 13487787 NR Description: ADP-glucose pyrophosphorylase small subunit
  misc_feature (1)..(302): Homolog of NCBI NO: 17865468 NR Description: Glucose-1-phosphate adenylyltransferase small chloroplast precursor (ADP-glucose synthase) (ADP-glucose
  misc_feature (1)..(302): Homolog of NCBI NO: 1575754 NR Description: ADP glucose pyrophosphorylase small subunit
  misc_feature (1)..(302): Homolog of NCBI NO: 15238933 NR Description: ADPG pyrophosphorylase small subunit (gb
MDYEKFIQAHRETDADITVAALPMDEQRATAFGLMKIDEEGRIIEFAEKPKGEHLKAMKVDTTILGLDDQRAKEMPFIASMGIYVVSRDVMLDLLRNQFPGANDFGSEVIPGATSLGLRVQAYLYDGYWEDIGTIEAFYNANLGITKKPVPDFSFYDRSAPIYTQPRYLPPSKMLDADVTDSVIGEGCVIKNCKIHHSVVGLRSCISEGAIIEDSLLMGADYYETATEKSLLSAKGSVPIGIGKNSHIKRAIIDKNARIGDNVKIINSDNVQEAARETDGYFIKSGIVTVIKDALIPTGTVI

SEQ ID NO: 27028 - DNA, 485 bp, Arabidopsis thaliana
  misc_feature (1)..(485): Ceres Seq. ID no. 12676418
  misc_feature: MA Experiment ID: 108434 Result: Up-regulated in Transcription
  misc_feature: MA Experiment 108434 PARAMETER Experiment Name: At_Root_Tips_cDNA_P Parameter: Tissue Value: Root Tips
  misc_feature: MA Experiment ID: 108462 Result: Down-regulated in Transcription
  misc_feature: MA Experiment 108462 PARAMETER Experiment Name: At_Germinating_Seeds_cDNA_P Parameter: Age (day) Value: 2 vs. 0
  misc_feature: MA Experiment 108462 PARAMETER Experiment Name: At_Germinating_Seeds_cDNA_P Parameter: Tissue Value: Germinating Seeds
  misc_feature: MA Experiment ID: 108463 Result: Down-regulated in Transcription
  misc_feature: MA Experiment 108463 PARAMETER Experiment Name: At_Germinating_Seeds_cDNA_P Parameter: Age (day) Value: 3 vs. 0
  misc_feature: MA Experiment 108463 PARAMETER Experiment Name: At_Germinating_Seeds_cDNA_P Parameter: Tissue Value: Germinating Seeds
  misc_feature: MA Experiment ID: 108464 Result: Down-regulated in Transcription
  misc_feature: MA Experiment 108464 PARAMETER Experiment Name: At_Germinating_Seeds_cDNA_P Parameter: Age (day) Value: 4 vs. 0
  misc_feature: MA Experiment 108464 PARAMETER Experiment Name: At_Germinating_Seeds_cDNA_P Parameter: Tissue Value: Germinating Seeds
  misc_feature: MA Experiment ID: 108573 Result: Down-regulated in Transcription
  misc_feature: MA Experiment 108573 PARAMETER Experiment Name: At_Drought_cDNA_P Parameter: Timepoint (hr) Value: 6
  misc_feature: MA Experiment 108573 PARAMETER Experiment Name: At_Drought_cDNA_P Parameter: Tissue Value: Aerial
  misc_feature: MA Experiment 108573 PARAMETER Experiment Name: At_Drought_cDNA_P Parameter: Treatment Value: Drought vs. No Drought
  misc_feature: MA Experiment ID: 20000087 Result: Up-regulated in Transcription
  misc_feature: MA Experiment 20000087 PARAMETER Experiment Name: At_100uM_ABA_Mutants_cDNA_P Parameter: Plant Line Value: WS
  misc_feature: MA Experiment 20000087 PARAMETER Experiment Name: At_100uM_ABA_Mutants_cDNA_P Parameter: Timepoint (hr) Value: 6
  misc_feature: MA Experiment 20000087 PARAMETER Experiment Name: At_100uM_ABA_Mutants_cDNA_P Parameter: Tissue Value: Aerial
  misc_feature: MA Experiment 20000087 PARAMETER Experiment Name: At_100uM_ABA_Mutants_cDNA_P Parameter: Treatment Value: 100uM ABA vs. No Treatment
  misc_feature: MA Experiment ID: 20000090 Result: Up-regulated in Transcription
  misc_feature: MA Experiment ID: 20000180 Result: Down-regulated in Transcription
  misc_feature: MA Experiment 20000180 PARAMETER Experiment Name: At_Germinating_Seeds_P Parameter: Age (hr) Value: 24 vs. 0
  misc_feature: MA Experiment 20000180 PARAMETER Experiment Name: At_Germinating_Seeds_P Parameter: Tissue Value: Germinating Seeds
  misc_feature: MA Experiment ID: 20000184 Result: Down-regulated in Transcription
  misc_feature: MA Experiment 20000184 PARAMETER Experiment Name: At_Shoots__P Parameter: Age (day) Value: 7
  misc_feature: MA Experiment 20000184 PARAMETER Experiment Name: At_Shoots__P Parameter: Tissue Value: Shoots vs. Whole Plant
  misc_feature: MA Experiment ID: 20000227 Result: Up-regulated in Transcription
  misc_feature: MA Experiment 20000227 PARAMETER Experiment Name: At_Root-Tips-vs-Tops_P Parameter: Tissue Value: Root Tips vs. Root Tops
  misc_feature: MA Experiment ID: 20000495 Result: Up-regulated in Transcription
  misc_feature: MA Experiment 20000495 PARAMETER Experiment Name: At_Guard_Cells_P Parameter: Harvest Date Value: 8/2/2002
  misc_feature: MA Experiment 20000495 PARAMETER Experiment Name: At_Guard_Cells_P Parameter: Organism Value: A. thaliana
  misc_feature: MA Experiment 20000495 PARAMETER Experiment Name: At_Guard_Cells_P Parameter: Tissue Value: Guard Cells vs. Leaves
  misc_feature: MA Experiment ID: 20000496 Result: Up-regulated in Transcription
  misc_feature: MA Experiment 20000496 PARAMETER Experiment Name: At_Guard_Cells_P Parameter: Harvest Date Value: 7/19/2002
  misc_feature: MA Experiment 20000496 PARAMETER Experiment Name: At_Guard_Cells_P Parameter: Organism Value: Canola
  misc_feature: MA Experiment 20000496 PARAMETER Experiment Name: At_Guard_Cells_P Parameter: Tissue Value: Guard Cells vs. Leaves
  misc_feature: MA Experiment ID: 20001558 Result: Up-regulated in Transcription
  misc_feature: MA Experiment 20001558 PARAMETER Experiment Name: At_Drought_Soil_Dry_P Parameter: Age (day) Value: 27
  misc_feature: MA Experiment 20001558 PARAMETER Experiment Name: At_Drought_Soil_Dry_P Parameter: Organism Value: A. thaliana
  misc_feature: MA Experiment 20001558 PARAMETER Experiment Name: At_Drought_Soil_Dry_P Parameter: Plant Line Value: WS
  misc_feature: MA Experiment 20001558 PARAMETER Experiment Name: At_Drought_Soil_Dry_P Parameter: Post Timepoint (hr) Value: 6
  misc_feature: MA Experiment 20001558 PARAMETER Experiment Name: At_Drought_Soil_Dry_P Parameter: Post-Treatment Value: Re-Water vs. No Drought
  misc_feature: MA Experiment 20001558 PARAMETER Experiment Name: At_Drought_Soil_Dry_P Parameter: Timepoint (day) Value: 13
  misc_feature: MA Experiment 20001558 PARAMETER Experiment Name: At_Drought_Soil_Dry_P Parameter: Treatment Value: Drought vs. No Drought
aagcctttgttgtgttctttacctctcttcacgaaatcccatttgagaaagtactgctaaaaaaatggcttctcctattcccgtcggcgttactaaggaacaggcgtttagtatggcacaaacggagatggagtatcgcgtggaactctttaacaagcttgctcaaacatgctttaataaatgtgtggataaaaggtacaaggaagctgagctaaacatgggtgagaatagttgcatcgaccgttgtgtttccaagtactggcaggtaaatggaatggttggacagcttctaagtgctggcaagcctcccgtgtaatccagtttaaaggcaattattacagaccaaaaagctcatggagggaacacaactctgttctttgtttttctaaagtttaaggcaatcttgtttttattgtcaagaaagttgcatcacatttttggcgctgatttggacaaattatgcaattccatgtgaacccattatt

SEQ ID NO: 27029 - protein, 83 aa, Arabidopsis thaliana
  peptide (1)..(83): Ceres Seq. ID no. 12676419
  misc_feature (13)..(79): Pfam Name: Tim10/DDP family zinc finger Pfam Description: Tim10/DDP family zinc finger
  misc_feature (18)..(77): Homolog of NCBI NO: 7305575 NR Description: translocase of inner mitochondrial membrane 13
  misc_feature (18)..(77): Homolog of NCBI NO: 6912708 NR Description: translocase of inner mitochondrial membrane 10
  misc_feature (13)..(74): Homolog of NCBI NO: 19114054 NR Description: putative mitochondrial intermembrane protein
  misc_feature (9)..(74): Homolog of NCBI NO: 12230195 NR Description: Mitochondrial import inner membrane translocase
  misc_feature (9)..(74): Homolog of NCBI NO: 6321793 NR Description: May act cooperatively with Mrs5p in mitochondrial
  misc_feature (2)..(69): Homolog of NCBI NO: 34897366 NR Description: putative zinc finger protein [Oryza sativa]
  misc_feature (7)..(82): Homolog of NCBI NO: 38175439 NR Description: small zinc finger-like protein
  misc_feature (5)..(81): Homolog of NCBI NO: 5107180 NR Description: small zinc finger-like protein [Lycopersicon
  misc_feature (1)..(83): Homolog of NCBI NO: 5107088 NR Description: small zinc finger-like protein [Pinus taeda]
  misc_feature (1)..(83): Homolog of NCBI NO: 18402072 NR Description: expressed protein
MASPIPVGVTKEQAFSMAQTEMEYRVELFNKLAQTCFNKCVDKRYKEAELNMGENSCIDRCVSKYWQVNGMVGQLLSAGKPPV

SEQ ID NO: 27030 - protein, 70 aa, Arabidopsis thaliana
  peptide (1)..(70): Ceres Seq. ID no. 12676420
AFVVFFTSLHEIPFEKVLLKKWLLLFPSALLRNRRLVWHKRRWSIAWNSLTSLLKHALINVWIKGTRKLS

SEQ ID NO: 27031 - protein, 67 aa, Arabidopsis thaliana
  peptide (1)..(67): Ceres Seq. ID no. 12676421
  misc_feature (1)..(63): Pfam Name: Tim10/DDP family zinc finger Pfam Description: Tim10/DDP family zinc finger
  misc_feature (1)..(58): Homolog of NCBI NO: 12230195 NR Description: Mitochondrial import inner membrane translocase
  misc_feature (1)..(58): Homolog of NCBI NO: 6321793 NR Description: May act cooperatively with Mrs5p in mitochondrial
  misc_feature (1)..(53): Homolog of NCBI NO: 34897366 NR Description: putative zinc finger protein [Oryza sativa]
  misc_feature (1)..(66): Homolog of NCBI NO: 38175439 NR Description: small zinc finger-like protein
  misc_feature (2)..(61): Homolog of NCBI NO: 6912708 NR Description: translocase of inner mitochondrial membrane 10
  misc_feature (1)..(58): Homolog of NCBI NO: 19114054 NR Description: putative mitochondrial intermembrane protein
  misc_feature (2)..(61): Homolog of NCBI NO: 7305575 NR Description: translocase of inner mitochondrial membrane 13
  misc_feature (1)..(65): Homolog of NCBI NO: 5107180 NR Description: small zinc finger-like protein [Lycopersicon
  misc_feature (1)..(67): Homolog of NCBI NO: 5107088 NR Description: small zinc finger-like protein [Pinus taeda]
  misc_feature (1)..(67): Homolog of NCBI NO: 18402072 NR Description: expressed protein
MAQTEMEYRVELFNKLAQTCFNKCVDKRYKEAELNMGENSCIDRCVSKYWQVNGMVGQLLSAGKPPV

SEQ ID NO: 27032 - DNA, 656 bp, Arabidopsis thaliana
  misc_feature (1)..(656): Ceres Seq. ID no. 12330054
  misc_feature: MA Experiment ID: 108595 Result: Up-regulated in Transcription
  misc_feature: MA Experiment 108595 PARAMETER Experiment Name: At_Ler-pi_Ovule_cDNA_P Parameter: Plant Line Value: null
  misc_feature: MA Experiment ID: 20000111 Result: Down-regulated in Transcription
  misc_feature: MA Experiment 20000111 PARAMETER Experiment Name: At_42deg_Heat_cDNA_P Parameter: Temperature (deg C) Value: 42 vs. 22
  misc_feature: MA Experiment 20000111 PARAMETER Experiment Name: At_42deg_Heat_cDNA_P Parameter: Timepoint (hr) Value: 6
  misc_feature: MA Experiment 20000111 PARAMETER Experiment Name: At_42deg_Heat_cDNA_P Parameter: Tissue Value: Aerial
  misc_feature: MA Experiment ID: 20000184 Result: Down-regulated in Transcription
  misc_feature: MA Experiment 20000184 PARAMETER Experiment Name: At_Shoots__P Parameter: Age (day) Value: 7
  misc_feature: MA Experiment 20000184 PARAMETER Experiment Name: At_Shoots__P Parameter: Tissue Value: Shoots vs. Whole Plant
  misc_feature: MA Experiment ID: 20001557 Result: Down-regulated in Transcription
  misc_feature: MA Experiment 20001557 PARAMETER Experiment Name: At_Drought_Soil_Dry_P Parameter: Age (day) Value: 27
  misc_feature: MA Experiment 20001557 PARAMETER Experiment Name: At_Drought_Soil_Dry_P Parameter: Organism Value: A. thaliana
  misc_feature: MA Experiment 20001557 PARAMETER Experiment Name: At_Drought_Soil_Dry_P Parameter: Plant Line Value: WS
  misc_feature: MA Experiment 20001557 PARAMETER Experiment Name: At_Drought_Soil_Dry_P Parameter: Post Timepoint (hr) Value: 3
  misc_feature: MA Experiment 20001557 PARAMETER Experiment Name: At_Drought_Soil_Dry_P Parameter: Post-Treatment Value: Re-Water vs. No Drought
  misc_feature: MA Experiment 20001557 PARAMETER Experiment Name: At_Drought_Soil_Dry_P Parameter: Timepoint (day) Value: 13
  misc_feature: MA Experiment 20001557 PARAMETER Experiment Name: At_Drought_Soil_Dry_P Parameter: Treatment Value: Drought vs. No Drought
aagctgctgctttgatcatcatcttcctcttatagcttccgagagatttatatcaatcaccatgtcgaggatcttcgccattcttcctctcgctgctgtttttcttctcctccttgtttcaccgattgtagccatcgatgtccattactgtgaagagaacgcagagtatgaagttaaagtgaaagaggttgatatatctcctaatcctatagcaccaggcgagccagctactttcaccatctctgccgacacaggccgtgagatttcgtttgggaagctggtgattgaagtttcatactttggatggcatgttcactctgagactcatgacctctgcactgagactagttgtcctatacaaaccggagatttcttggttgcacactctcaagttcttcctggttatactcctcctggttcatacttgctgaaaatgaagatgcttgatgcaaagaagaaggagttaacatgcatcaaattctcgttcgacattggactcagagcatctgtggctgacatttagagcagcttcacctgtattggtgattgtagagatagtttaggaaaattgttaattctttctatatcagttatgtcagaccctgaatgtgaaggtgatcttattttttggacaccaatgtgaatgtgctttctcc

SEQ ID NO: 27033 - protein, 173 aa, Arabidopsis thaliana
  peptide (1)..(173): Ceres Seq. ID no. 12330055
  misc_feature (43)..(164): Pfam Name: ML domain Pfam Description: ML domain
  misc_feature (33)..(170): Homolog of NCBI NO: 18397991 NR Description: Expressed protein
  misc_feature (33)..(170): Homolog of NCBI NO: 21618166 NR Description: unknown [Arabidopsis thaliana]
  misc_feature (47)..(158): Homolog of NCBI NO: 6320157 NR Description: Niemann Pick Type C Gene corresponding to
  misc_feature (47)..(159): Homolog of NCBI NO: 4322563 NR Description: phosphatidylglycerol/phosphatidylinositol
  misc_feature (29)..(170): Homolog of NCBI NO: 15229872 NR Description: putative protein
  misc_feature (27)..(173): Homolog of NCBI NO: 34899866 NR Description: OJ1714_H10.15 [Oryza sativa (japonica
  misc_feature (21)..(173): Homolog of NCBI NO: 21554315 NR Description: unknown [Arabidopsis thaliana]
  misc_feature (21)..(173): Homolog of NCBI NO: 18399355 NR Description: expressed protein
  misc_feature (21)..(173): Homolog of NCBI NO: 15240063 NR Description: putative protein
  misc_feature (21)..(173): Homolog of NCBI NO: 21593850 NR Description: unknown [Arabidopsis thaliana]
SCCFDHHLPLIASERFISITMSRIFAILPLAAVFLLLLVSPIVAIDVHYCEENAEYEVKVKEVDISPNPIAPGEPATFTISADTGREISFGKLVIEVSYFGWHVHSETHDLCTETSCPIQTGDFLVAHSQVLPGYTPPGSYLLKMKMLDAKKKELTCIKFSFDIGLRASVADI

SEQ ID NO: 27034 - protein, 153 aa, Arabidopsis thaliana
  peptide (1)..(153): Ceres Seq. ID no. 12330056
  misc_feature (23)..(144): Pfam Name: ML domain Pfam Description: ML domain
  misc_feature (13)..(150): Homolog of NCBI NO: 18397991 NR Description: Expressed protein
  misc_feature (13)..(150): Homolog of NCBI NO: 21618166 NR Description: unknown [Arabidopsis thaliana]
  misc_feature (27)..(138): Homolog of NCBI NO: 6320157 NR Description: Niemann Pick Type C Gene corresponding to
  misc_feature (27)..(139): Homolog of NCBI NO: 4322563 NR Description: phosphatidylglycerol/phosphatidylinositol
  misc_feature (9)..(150): Homolog of NCBI NO: 15229872 NR Description: putative protein
  misc_feature (7)..(153): Homolog of NCBI NO: 34899866 NR Description: OJ1714_H10.15 [Oryza sativa (japonica
  misc_feature (1)..(153): Homolog of NCBI NO: 21554315 NR Description: unknown [Arabidopsis thaliana]
  misc_feature (1)..(153): Homolog of NCBI NO: 18399355 NR Description: expressed protein
  misc_feature (1)..(153): Homolog of NCBI NO: 15240063 NR Description: putative protein
  misc_feature (1)..(153): Homolog of NCBI NO: 21593850 NR Description: unknown [Arabidopsis thaliana]
MSRIFAILPLAAVFLLLLVSPIVAIDVHYCEENAEYEVKVKEVDISPNPIAPGEPATFTISADTGREISFGKLVIEVSYFGWHVHSETHDLCTETSCPIQTGDFLVAHSQVLPGYTPPGSYLLKMKMLDAKKKELTCIKFSFDIGLRASVADI

SEQ ID NO: 27035 - DNA, 988 bp, Arabidopsis thaliana
  misc_feature (1)..(988): Ceres Seq. ID no. 12327444
  misc_feature: MA Experiment ID: 108434 Result: Down-regulated in Transcription
  misc_feature: MA Experiment 108434 PARAMETER Experiment Name: At_Root_Tips_cDNA_P Parameter: Tissue Value: Root Tips
  misc_feature: MA Experiment ID: 108461 Result: Up-regulated in Transcription
  misc_feature: MA Experiment 108461 PARAMETER Experiment Name: At_Germinating_Seeds_cDNA_P Parameter: Age (day) Value: 1 vs. 0
  misc_feature: MA Experiment 108461 PARAMETER Experiment Name: At_Germinating_Seeds_cDNA_P Parameter: Tissue Value: Germinating Seeds
  misc_feature: MA Experiment ID: 108462 Result: Up-regulated in Transcription
  misc_feature: MA Experiment 108462 PARAMETER Experiment Name: At_Germinating_Seeds_cDNA_P Parameter: Age (day) Value: 2 vs. 0
  misc_feature: MA Experiment 108462 PARAMETER Experiment Name: At_Germinating_Seeds_cDNA_P Parameter: Tissue Value: Germinating Seeds
  misc_feature: MA Experiment ID: 108463 Result: Up-regulated in Transcription
  misc_feature: MA Experiment 108463 PARAMETER Experiment Name: At_Germinating_Seeds_cDNA_P Parameter: Age (day) Value: 3 vs. 0
  misc_feature: MA Experiment 108463 PARAMETER Experiment Name: At_Germinating_Seeds_cDNA_P Parameter: Tissue Value: Germinating Seeds
  misc_feature: MA Experiment ID: 108464 Result: Up-regulated in Transcription
  misc_feature: MA Experiment 108464 PARAMETER Experiment Name: At_Germinating_Seeds_cDNA_P Parameter: Age (day) Value: 4 vs. 0
  misc_feature: MA Experiment 108464 PARAMETER Experiment Name: At_Germinating_Seeds_cDNA_P Parameter: Tissue Value: Germinating Seeds
  misc_feature: MA Experiment ID: 108488 Result: Down-regulated in Transcription
  misc_feature: MA Experiment ID: 20000111 Result: Down-regulated in Transcription
  misc_feature: MA Experiment 20000111 PARAMETER Experiment Name: At_42deg_Heat_cDNA_P Parameter: Temperature (deg C) Value: 42 vs. 22
  misc_feature: MA Experiment 20000111 PARAMETER Experiment Name: At_42deg_Heat_cDNA_P Parameter: Timepoint (hr) Value: 6
  misc_feature: MA Experiment 20000111 PARAMETER Experiment Name: At_42deg_Heat_cDNA_P Parameter: Tissue Value: Aerial
  misc_feature: MA Experiment ID: 20000113 Result: Down-regulated in Transcription
  misc_feature: MA Experiment 20000113 PARAMETER Experiment Name: At_42deg_Heat_cDNA_P Parameter: Temperature (deg C) Value: 42 vs. 22
  misc_feature: MA Experiment 20000113 PARAMETER Experiment Name: At_42deg_Heat_cDNA_P Parameter: Timepoint (hr) Value: 8
  misc_feature: MA Experiment 20000113 PARAMETER Experiment Name: At_42deg_Heat_cDNA_P Parameter: Tissue Value: Aerial
  misc_feature: MA Experiment ID: 20000180 Result: Up-regulated in Transcription
  misc_feature: MA Experiment 20000180 PARAMETER Experiment Name: At_Germinating_Seeds_P Parameter: Age (hr) Value: 24 vs. 0
  misc_feature: MA Experiment 20000180 PARAMETER Experiment Name: At_Germinating_Seeds_P Parameter: Tissue Value: Germinating Seeds
  misc_feature: MA Experiment ID: 20000184 Result: Down-regulated in Transcription
  misc_feature: MA Experiment 20000184 PARAMETER Experiment Name: At_Shoots__P Parameter: Age (day) Value: 7
  misc_feature: MA Experiment 20000184 PARAMETER Experiment Name: At_Shoots__P Parameter: Tissue Value: Shoots vs. Whole Plant
  misc_feature: MA Experiment ID: 20000185 Result: Up-regulated in Transcription
  misc_feature: MA Experiment 20000185 PARAMETER Experiment Name: At_Roots__P Parameter: Age (day) Value: 7 vs. 21
  misc_feature: MA Experiment 20000185 PARAMETER Experiment Name: At_Roots__P Parameter: Organism Value: A. thaliana
  misc_feature: MA Experiment 20000185 PARAMETER Experiment Name: At_Roots__P Parameter: Tissue Value: Roots vs. Whole Plant
  misc_feature: MA Experiment ID: 20000264 Result: Up-regulated in Transcription
  misc_feature: MA Experiment 20000264 PARAMETER Experiment Name: At_Open_Flower_P Parameter: Age (day) Value: 21
  misc_feature: MA Experiment 20000264 PARAMETER Experiment Name: At_Open_Flower_P Parameter: Plant Line Value: WS
  misc_feature: MA Experiment 20000264 PARAMETER Experiment Name: At_Open_Flower_P Parameter: Tissue Value: Open Flower vs. Whole Plant
  misc_feature: MA Experiment ID: 20000794 Result: Up-regulated in Transcription
  misc_feature: MA Experiment 20000794 PARAMETER Experiment Name: At_Petals_P Parameter: Age (day) Value: 23-25 days
  misc_feature: MA Experiment 20000794 PARAMETER Experiment Name: At_Petals_P Parameter: Plant Line Value: WS
  misc_feature: MA Experiment 20000794 PARAMETER Experiment Name: At_Petals_P Parameter: Tissue Value: Petals vs. Whole plant
  misc_feature: MA Experiment ID: 20001557 Result: Down-regulated in Transcription
  misc_feature: MA Experiment 20001557 PARAMETER Experiment Name: At_Drought_Soil_Dry_P Parameter: Age (day) Value: 27
  misc_feature: MA Experiment 20001557 PARAMETER Experiment Name: At_Drought_Soil_Dry_P Parameter: Organism Value: A. thaliana
  misc_feature: MA Experiment 20001557 PARAMETER Experiment Name: At_Drought_Soil_Dry_P Parameter: Plant Line Value: WS
  misc_feature: MA Experiment 20001557 PARAMETER Experiment Name: At_Drought_Soil_Dry_P Parameter: Post Timepoint (hr) Value: 3
  misc_feature: MA Experiment 20001557 PARAMETER Experiment Name: At_Drought_Soil_Dry_P Parameter: Post-Treatment Value: Re-Water vs. No Drought
  misc_feature: MA Experiment 20001557 PARAMETER Experiment Name: At_Drought_Soil_Dry_P Parameter: Timepoint (day) Value: 13
  misc_feature: MA Experiment 20001557 PARAMETER Experiment Name: At_Drought_Soil_Dry_P Parameter: Treatment Value: Drought vs. No Drought
  misc_feature: MA Experiment ID: 20001904 Result: Up-regulated in Transcription
  misc_feature: MA Experiment 20001904 PARAMETER Experiment Name: At_Drought_Reproduction_P Parameter: Age (day) Value: 37
  misc_feature: MA Experiment 20001904 PARAMETER Experiment Name: At_Drought_Reproduction_P Parameter: Organism Value: A. thaliana
  misc_feature: MA Experiment 20001904 PARAMETER Experiment Name: At_Drought_Reproduction_P Parameter: Plant Line Value: WS
  misc_feature: MA Experiment 20001904 PARAMETER Experiment Name: At_Drought_Reproduction_P Parameter: Timepoint (day) Value: 7
  misc_feature: MA Experiment 20001904 PARAMETER Experiment Name: At_Drought_Reproduction_P Parameter: Tissue Value: Rosettes
  misc_feature: MA Experiment 20001904 PARAMETER Experiment Name: At_Drought_Reproduction_P Parameter: Treatment Value: Drought vs. No Drought
  misc_feature: MA Experiment ID: 20001905 Result: Up-regulated in Transcription
  misc_feature: MA Experiment 20001905 PARAMETER Experiment Name: At_Drought_Reproduction_P Parameter: Age (day) Value: 40
  misc_feature: MA Experiment 20001905 PARAMETER Experiment Name: At_Drought_Reproduction_P Parameter: Organism Value: A. thaliana
  misc_feature: MA Experiment 20001905 PARAMETER Experiment Name: At_Drought_Reproduction_P Parameter: Plant Line Value: WS
  misc_feature: MA Experiment 20001905 PARAMETER Experiment Name: At_Drought_Reproduction_P Parameter: Timepoint (day) Value: 10
  misc_feature: MA Experiment 20001905 PARAMETER Experiment Name: At_Drought_Reproduction_P Parameter: Tissue Value: Rosettes
  misc_feature: MA Experiment 20001905 PARAMETER Experiment Name: At_Drought_Reproduction_P Parameter: Treatment Value: Drought vs. No Drought
attttcttgtcttcgtatagaatcaaaaaaaaagtaacgacgatgcaaatatactatatattacataggtttcaccagatcatctcgaatcttaatcacattattaatacaattacatagaaggagcaattaaatctctatatataaaaggaagcgtgtgtttcgccttctcttttcaccattttcagttactttctctctttcatcttttaccattctcttcttcttttttttctctcattctgatcatggcttcctctatttccactggagtgaaatttgttccagaagaagataatttcttgcagagacatgtcgcttttttcgataggaacaaagatggtatcgtttatccctcggagacatttcaaggatttagagcaattgggtgtggatatttgttgtcagcagtcgcttctgtgttcataaacataggtctcagcagcaaaactcgtccgggtaaaggattctctatctggtttcctatagaggttaagaatattcaccttgccaaacacggaagcgattcaggcgtttacgacaaagatggacggtttgttgcttcgaagtttgaggagatatttacgaagcatgcacacacacatcgcgatgctttgaccaacgaggaactcaaacaactcctaaaggcaaacaaagaacctaatgatcgtaaaggatggcttgcagggtatacggagtggaaggtattgcattatttgtgtaaagacaagaatggtttgttgcacaaagacacagtgagagctgcctacgatggttctcttttcgaaaaactcgagaaacaaagatcttctaaaacttctaagaaacatccataaatccttatttaaatataatcaagctctcctgcatgcttgtggatctgtttatttttaaaactattacttcaatgttatagtgaatatttatggtgtgaagattgtaatgagttttaacaacaataaaaaaaacatgtaatgtgtttaattat

SEQ ID NO: 27036 - protein, 195 aa, Arabidopsis thaliana
  peptide (1)..(195): Ceres Seq. ID no. 12327445
  misc_feature (11)..(184): Pfam Name: Caleosin related protein Pfam Description: Caleosin related protein
  misc_feature (16)..(193): Homolog of NCBI NO: 6478218 NR Description: caleosin [Sesamum indicum]
  misc_feature (41)..(192): Homolog of NCBI NO: 15220688 NR Description: Ca2+-binding EF-hand common family protein,
  misc_feature (19)..(188): Homolog of NCBI NO: 34902470 NR Description: Putative abscisic acid-induced protein - rice
  misc_feature (6)..(192): Homolog of NCBI NO: 37652831 NR Description: calcium binding protein [Fagus sylvatica]
  misc_feature (1)..(192): Homolog of NCBI NO: 9295714 NR Description: F26F24.9 [Arabidopsis thaliana]
  misc_feature (19)..(192): Homolog of NCBI NO: 15220687 NR Description: pollen coat EF-hand protein
  misc_feature (1)..(190): Homolog of NCBI NO: 21617961 NR Description: unknown [Arabidopsis thaliana]
  misc_feature (1)..(190): Homolog of NCBI NO: 18409651 NR Description: Ca2+-binding EF-hand common family protein,
  misc_feature (1)..(195): Homolog of NCBI NO: 21593851 NR Description: unknown [Arabidopsis thaliana]
  misc_feature (1)..(195): Homolog of NCBI NO: 18409649 NR Description: Ca2+-binding EF-hand common family protein,
MASSISTGVKFVPEEDNFLQRHVAFFDRNKDGIVYPSETFQGFRAIGCGYLLSAVASVFINIGLSSKTRPGKGFSIWFPIEVKNIHLAKHGSDSGVYDKDGRFVASKFEEIFTKHAHTHRDALTNEELKQLLKANKEPNDRKGWLAGYTEWKVLHYLCKDKNGLLHKDTVRAAYDGSLFEKLEKQRSSKTSKKHP

SEQ ID NO: 27037 - DNA, 1195 bp, Arabidopsis thaliana
  misc_feature (1)..(1195): Ceres Seq. ID no. 12370669
  misc_feature: MA Experiment ID: 108579 Result: Down-regulated in Transcription
  misc_feature: MA Experiment 108579 PARAMETER Experiment Name: At_4deg_Cold_cDNA_P Parameter: Temperature (deg C) Value: 4 vs. 22
  misc_feature: MA Experiment 108579 PARAMETER Experiment Name: At_4deg_Cold_cDNA_P Parameter: Timepoint (hr) Value: 6
  misc_feature: MA Experiment 108579 PARAMETER Experiment Name: At_4deg_Cold_cDNA_P Parameter: Tissue Value: Aerial
  misc_feature: MA Experiment ID: 20000111 Result: Down-regulated in Transcription
  misc_feature: MA Experiment 20000111 PARAMETER Experiment Name: At_42deg_Heat_cDNA_P Parameter: Temperature (deg C) Value: 42 vs. 22
  misc_feature: MA Experiment 20000111 PARAMETER Experiment Name: At_42deg_Heat_cDNA_P Parameter: Timepoint (hr) Value: 6
  misc_feature: MA Experiment 20000111 PARAMETER Experiment Name: At_42deg_Heat_cDNA_P Parameter: Tissue Value: Aerial
  misc_feature: MA Experiment ID: 20001905 Result: Down-regulated in Transcription
  misc_feature: MA Experiment 20001905 PARAMETER Experiment Name: At_Drought_Reproduction_P Parameter: Age (day) Value: 40
  misc_feature: MA Experiment 20001905 PARAMETER Experiment Name: At_Drought_Reproduction_P Parameter: Organism Value: A. thaliana
  misc_feature: MA Experiment 20001905 PARAMETER Experiment Name: At_Drought_Reproduction_P Parameter: Plant Line Value: WS
  misc_feature: MA Experiment 20001905 PARAMETER Experiment Name: At_Drought_Reproduction_P Parameter: Timepoint (day) Value: 10
  misc_feature: MA Experiment 20001905 PARAMETER Experiment Name: At_Drought_Reproduction_P Parameter: Tissue Value: Rosettes
  misc_feature: MA Experiment 20001905 PARAMETER Experiment Name: At_Drought_Reproduction_P Parameter: Treatment Value: Drought vs. No Drought
gttccgattaggaacttcctctccggcgactgaactttttctggaaatggatagtgaaggagcttcaagcgagtcttcttcttctggagatcagctcgagaagtggacagaagagcaggatgagctgaagaagaaactgatcgcgtacgatgacttcacatggaagttatcttcatcaacggaactgtctcagggatcggagatacttaagtatgttggaggtgtagacatgagcttttgcaaagaagattcttccgtcgcatgcgcttgtctcgtcgttcttgagcttccttctctccgtgtagtccaccatgacttctctcttctccgcctccatgttccttatgtccctggatttcttgcctttcgtgaggctccggttcttttgcagattctgcagaagatgagagatgagaagcatccattctatcctcaggtactgatggtggatggaaatggaatacttcatccacgaggatttggcttggcgtgtcatttaggtgttcttgctcacctaccaaccattggggtcggaaagaatctgcatcatgtggatggtctgaatcaatctgaggttaaacagtcgcttcagctccaaataaacgagcatgagcaaactatcactttggtaggaaactctggaattacatggggagtaggatttaggccaactctgagttctctaaagcccatatatgtatcggttggccatcgcatatcactggactctgccgttgaagttgtcaagataacctgcaagtaccgtgttccagaacctattagacaggcagatattagatcaagagcatatctccagaagcatcaaactgagtcttttaaagaactggcagtgcgaccaccggatcagactgaaccttaatccctcaagcaaccaagaacactattccacattacatagaaactctccaaagtctttaccaaagattgttaaatggacagattcaggcactgaagatccgccccaattatctccttcatttatctcactgacttgaagattgcaagctaaccaaggtaatcatgttatatccgatacattggaatttcctttccatacataccttaaacaagtgtaaatagaaaggctaggcaactggtaatttggttgtttgggcactgtatattggaagattttggggttctcgacaaacaattctatagctttgggtttggc

SEQ ID NO: 27038 - protein, 292 aa, Arabidopsis thaliana
  peptide (1)..(292): Ceres Seq. ID no. 12370670
  misc_feature (30)..(102): Homolog of NCBI NO: 40555767 NR Description: Unknown (protein for MGC:74455) [Homo sapiens]
  misc_feature (145)..(273): Homolog of NCBI NO: 40555767 NR Description: Unknown (protein for MGC:74455) [Homo sapiens]
  misc_feature (108)..(292): Homolog of NCBI NO: 28893575 NR Description: RIKEN cDNA A730011L01 gene [Mus musculus]
  misc_feature (34)..(278): Homolog of NCBI NO: 34875599 NR Description: similar to chromosome 17 open reading frame 27
  misc_feature (30)..(273): Homolog of NCBI NO: 31542775 NR Description: hypothetical protein FLJ35220 [Homo sapiens]
  misc_feature (207)..(272): Homolog of NCBI NO: 28828773 NR Description: similar to Arabidopsis thaliana (Mouse-ear
  misc_feature (30)..(208): Homolog of NCBI NO: 28828773 NR Description: similar to Arabidopsis thaliana (Mouse-ear
  misc_feature (16)..(146): Homolog of NCBI NO: 7486498 NR Description: hypothetical protein F6E21.70 - Arabidopsis
  misc_feature (145)..(289): Homolog of NCBI NO: 7486498 NR Description: hypothetical protein F6E21.70 - Arabidopsis
  misc_feature (16)..(292): Homolog of NCBI NO: 18417747 NR Description: putative protein
FRLGTSSPATELFLEMDSEGASSESSSSGDQLEKWTEEQDELKKKLIAYDDFTWKLSSSTELSQGSEILKYVGGVDMSFCKEDSSVACACLVVLELPSLRVVHHDFSLLRLHVPYVPGFLAFREAPVLLQILQKMRDEKHPFYPQVLMVDGNGILHPRGFGLACHLGVLAHLPTIGVGKNLHHVDGLNQSEVKQSLQLQINEHEQTITLVGNSGITWGVGFRPTLSSLKPIYVSVGHRISLDSAVEVVKITCKYRVPEPIRQADIRSRAYLQKHQTESFKELAVRPPDQTEP

SEQ ID NO: 27039 - protein, 277 aa, Arabidopsis thaliana
  peptide (1)..(277): Ceres Seq. ID no. 12370671
  misc_feature (15)..(87): Homolog of NCBI NO: 40555767 NR Description: Unknown (protein for MGC:74455) [Homo sapiens]
  misc_feature (130)..(258): Homolog of NCBI NO: 40555767 NR Description: Unknown (protein for MGC:74455) [Homo sapiens]
  misc_feature (93)..(277): Homolog of NCBI NO: 28893575 NR Description: RIKEN cDNA A730011L01 gene [Mus musculus]
  misc_feature (19)..(263): Homolog of NCBI NO: 34875599 NR Description: similar to chromosome 17 open reading frame 27
  misc_feature (15)..(258): Homolog of NCBI NO: 31542775 NR Description: hypothetical protein FLJ35220 [Homo sapiens]
  misc_feature (192)..(257): Homolog of NCBI NO: 28828773 NR Description: similar to Arabidopsis thaliana (Mouse-ear
  misc_feature (15)..(193): Homolog of NCBI NO: 28828773 NR Description: similar to Arabidopsis thaliana (Mouse-ear
  misc_feature (1)..(131): Homolog of NCBI NO: 7486498 NR Description: hypothetical protein F6E21.70 - Arabidopsis
  misc_feature (130)..(274): Homolog of NCBI NO: 7486498 NR Description: hypothetical protein F6E21.70 - Arabidopsis
  misc_feature (1)..(277): Homolog of NCBI NO: 18417747 NR Description: putative protein
MDSEGASSESSSSGDQLEKWTEEQDELKKKLIAYDDFTWKLSSSTELSQGSEILKYVGGVDMSFCKEDSSVACACLVVLELPSLRVVHHDFSLLRLHVPYVPGFLAFREAPVLLQILQKMRDEKHPFYPQVLMVDGNGILHPRGFGLACHLGVLAHLPTIGVGKNLHHVDGLNQSEVKQSLQLQINEHEQTITLVGNSGITWGVGFRPTLSSLKPIYVSVGHRISLDSAVEVVKITCKYRVPEPIRQADIRSRAYLQKHQTESFKELAVRPPDQTEP

SEQ ID NO: 27040 - protein, 216 aa, Arabidopsis thaliana
  peptide (1)..(216): Ceres Seq. ID no. 12370672
  misc_feature (1)..(26): Homolog of NCBI NO: 40555767 NR Description: Unknown (protein for MGC:74455) [Homo sapiens]
  misc_feature (69)..(197): Homolog of NCBI NO: 40555767 NR Description: Unknown (protein for MGC:74455) [Homo sapiens]
  misc_feature (32)..(216): Homolog of NCBI NO: 28893575 NR Description: RIKEN cDNA A730011L01 gene [Mus musculus]
  misc_feature (1)..(202): Homolog of NCBI NO: 34875599 NR Description: similar to chromosome 17 open reading frame 27
  misc_feature (1)..(197): Homolog of NCBI NO: 31542775 NR Description: hypothetical protein FLJ35220 [Homo sapiens]
  misc_feature (131)..(196): Homolog of NCBI NO: 28828773 NR Description: similar to Arabidopsis thaliana (Mouse-ear
  misc_feature (1)..(132): Homolog of NCBI NO: 28828773 NR Description: similar to Arabidopsis thaliana (Mouse-ear
  misc_feature (1)..(70): Homolog of NCBI NO: 7486498 NR Description: hypothetical protein F6E21.70 - Arabidopsis
  misc_feature (69)..(213): Homolog of NCBI NO: 7486498 NR Description: hypothetical protein F6E21.70 - Arabidopsis
  misc_feature (1)..(216): Homolog of NCBI NO: 18417747 NR Description: putative protein
MSFCKEDSSVACACLVVLELPSLRVVHHDFSLLRLHVPYVPGFLAFREAPVLLQILQKMRDEKHPFYPQVLMVDGNGILHPRGFGLACHLGVLAHLPTIGVGKNLHHVDGLNQSEVKQSLQLQINEHEQTITLVGNSGITWGVGFRPTLSSLKPIYVSVGHRISLDSAVEVVKITCKYRVPEPIRQADIRSRAYLQKHQTESFKELAVRPPDQTEP

SEQ ID NO: 27041 - DNA, 1356 bp, Arabidopsis thaliana
  misc_feature (1)..(1356): Ceres Seq. ID no. 12331465
  misc_feature: MA Experiment ID: 108434 Result: Down-regulated in Transcription
  misc_feature: MA Experiment 108434 PARAMETER Experiment Name: At_Root_Tips_cDNA_P Parameter: Tissue Value: Root Tips
  misc_feature: MA Experiment ID: 108464 Result: Up-regulated in Transcription
  misc_feature: MA Experiment 108464 PARAMETER Experiment Name: At_Germinating_Seeds_cDNA_P Parameter: Age (day) Value: 4 vs. 0
  misc_feature: MA Experiment 108464 PARAMETER Experiment Name: At_Germinating_Seeds_cDNA_P Parameter: Tissue Value: Germinating Seeds
  misc_feature: MA Experiment ID: 20000179 Result: Up-regulated in Transcription
  misc_feature: MA Experiment 20000179 PARAMETER Experiment Name: At_Germinating_Seeds_P Parameter: Age (hr) Value: 6 vs. 0
  misc_feature: MA Experiment 20000179 PARAMETER Experiment Name: At_Germinating_Seeds_P Parameter: Tissue Value: Germinating Seeds
  misc_feature: MA Experiment ID: 20000180 Result: Up-regulated in Transcription
  misc_feature: MA Experiment 20000180 PARAMETER Experiment Name: At_Germinating_Seeds_P Parameter: Age (hr) Value: 24 vs. 0
  misc_feature: MA Experiment 20000180 PARAMETER Experiment Name: At_Germinating_Seeds_P Parameter: Tissue Value: Germinating Seeds
  misc_feature: MA Experiment ID: 20000185 Result: Up-regulated in Transcription
  misc_feature: MA Experiment 20000185 PARAMETER Experiment Name: At_Roots__P Parameter: Age (day) Value: 7 vs. 21
  misc_feature: MA Experiment 20000185 PARAMETER Experiment Name: At_Roots__P Parameter: Organism Value: A. thaliana
  misc_feature: MA Experiment 20000185 PARAMETER Experiment Name: At_Roots__P Parameter: Tissue Value: Roots vs. Whole Plant
  misc_feature: MA Experiment ID: 20000286 Result: Up-regulated in Transcription
  misc_feature: MA Experiment 20000286 PARAMETER Experiment Name: At_Open_Flower_P Parameter: Age (day) Value: 21
  misc_feature: MA Experiment 20000286 PARAMETER Experiment Name: At_Open_Flower_P Parameter: Plant Line Value: WS
  misc_feature: MA Experiment 20000286 PARAMETER Experiment Name: At_Open_Flower_P Parameter: Tissue Value: Half Open vs. Whole Plant
  misc_feature: MA Experiment ID: 20000439 Result: Up-regulated in Transcription
  misc_feature: MA Experiment 20000439 PARAMETER Experiment Name: At_Roots__P Parameter: Age (day) Value: 14 vs. 21
  misc_feature: MA Experiment 20000439 PARAMETER Experiment Name: At_Roots__P Parameter: Organism Value: A. thaliana
  misc_feature: MA Experiment 20000439 PARAMETER Experiment Name: At_Roots__P Parameter: Tissue Value: Roots vs. Whole Plant
  misc_feature: MA Experiment ID: 20001757 Result: Down-regulated in Transcription
  misc_feature: MA Experiment 20001757 PARAMETER Experiment Name: At_50mM_NH4NO3_L-to-H_P Parameter: Timepoint (hr) Value: 6
  misc_feature: MA Experiment 20001757 PARAMETER Experiment Name: At_50mM_NH4NO3_L-to-H_P Parameter: Tissue Value: Leaf
  misc_feature: MA Experiment 20001757 PARAMETER Experiment Name: At_50mM_NH4NO3_L-to-H_P Parameter: Treatment Value: 50mM NH4NO3 vs 100mM Mannitol
aaacctctctcttctctcacttcccagctacttctctctctcgcgctctctctttcttttttggcaatggctactggatcaacaaccgattccgccaggtctccttcctcaggtgttctccaaaagctgttattactattctctgtctgtatagctgcttcaacttataaagcaatccagcctcctccatcaaagctatgtggctctcctgatggtccatccatcacaggaccaaggattaagctaagagacggaggcagttagcttacaaagagcatggagttcctagagatgaagctactcataaaatcatcgttgtccatggatctgatagttgcagacatgataatgctttcgcagctctactatcaccggatattaaggaaggactaggtgtgtatatggtttcatttgatagacctggttatgcagagagtgatcctgacccaaaccgtactcctaaaagcttggctttggacattgaagagcttgctgatcagttgagtctaggatcgaagttctatgtcatcggttactcgatgggaggacaagctacatgggcatgccttaaatacattcctcacaggttggctggagtaacgcttgttgctccagtggtgaactattggtggaagaactttccatcagagatctcaaccgaagcttttaaccaacaagggagaaatgaccaatgggcggttcgtgttgcacactatgctccttggcttactcattggtggaactcccagagctggttccctggatcaagtgttgtggctcgcaatctcggtatgttgtccaaagcagacaaagagatcatgtttaagctcggtgctgcaaggagccaacatgaggcacaaataaggcaacaaggaacacacgagacattgcaccgtgacatgattgttggatttggaagggagttcgatccaatggagctcgagaatctgttcccgaacaatgaaggatcagtgcacttgtggcagggagatgatgatgtgcttgtccctgtgactctgcaacgttacattgcgaagaagctgccatggatccattaccatgagattcctggagcagggcatttgttcccgtttgctccaggtatggttaataacattgttaaaacgctcttaaccaatgatggagtgaagaagtaaacgatgtcttctctctcaaaaagttggctagttttggttttgtaacatgcattgctatgatattttgaaccgggatcagagagattcatgagaatctcaagtttctcttggttgctgatatatattgtgggtgattagtaaagagttctggtacctatgtaaaacattctcagcattcatctcaaaaagctgtttctgg

SEQ ID NO: 27042 - protein, 251 aa, Arabidopsis thaliana
  peptide (1)..(251): Ceres Seq. ID no. 12331466
  misc_feature (1)..(242): Pfam Name: alpha/beta hydrolase fold Pfam Description: alpha/beta hydrolase fold
  misc_feature (1)..(244): Homolog of NCBI NO: 37536164 NR Description: putative alpha/beta hydrolase
  misc_feature (1)..(243): Homolog of NCBI NO: 37536162 NR Description: putative alpha/beta hydrolase
  misc_feature (1)..(247): Homolog of NCBI NO: 15228377 NR Description: putative protein
  misc_feature (1)..(247): Homolog of NCBI NO: 15221193 NR Description: unknown protein; protein id: At1g74290.1
  misc_feature (1)..(247): Homolog of NCBI NO: 18410575 NR Description: expressed protein
  misc_feature (1)..(250): Homolog of NCBI NO: 21537089 NR Description: unknown [Arabidopsis thaliana]
  misc_feature (1)..(246): Homolog of NCBI NO: 18410582 NR Description: expressed protein
  misc_feature (1)..(246): Homolog of NCBI NO: 21592662 NR Description: unknown [Arabidopsis thaliana]
  misc_feature (1)..(251): Homolog of NCBI NO: 18404095 NR Description: expressed protein
  misc_feature (1)..(251): Homolog of NCBI NO: 28416665 NR Description: At2g36290 [Arabidopsis thaliana]
MVSFDRPGYAESDPDPNRTPKSLALDIEELADQLSLGSKFYVIGYSMGGQATWACLKYIPHRLAGVTLVAPVVNYWWKNFPSEISTEAFNQQGRNDQWAVRVAHYAPWLTHWWNSQSWFPGSSVVARNLGMLSKADKEIMFKLGAARSQHEAQIRQQGTHETLHRDMIVGFGREFDPMELENLFPNNEGSVHLWQGDDDVLVPVTLQRYIAKKLPWIHYHEIPGAGHLFPFAPGMVNNIVKTLLTNDGVKK

SEQ ID NO: 27043 - protein, 205 aa, Arabidopsis thaliana
  peptide (1)..(205): Ceres Seq. ID no. 12331467
  misc_feature (1)..(196): Pfam Name: alpha/beta hydrolase fold Pfam Description: alpha/beta hydrolase fold
  misc_feature (1)..(198): Homolog of NCBI NO: 37536164 NR Description: putative alpha/beta hydrolase
  misc_feature (1)..(197): Homolog of NCBI NO: 37536162 NR Description: putative alpha/beta hydrolase
  misc_feature (1)..(201): Homolog of NCBI NO: 15228377 NR Description: putative protein
  misc_feature (1)..(201): Homolog of NCBI NO: 15221193 NR Description: unknown protein; protein id: At1g74290.1
  misc_feature (1)..(201): Homolog of NCBI NO: 18410575 NR Description: expressed protein
  misc_feature (1)..(204): Homolog of NCBI NO: 21537089 NR Description: unknown [Arabidopsis thaliana]
  misc_feature (1)..(200): Homolog of NCBI NO: 18410582 NR Description: expressed protein
  misc_feature (1)..(200): Homolog of NCBI NO: 21592662 NR Description: unknown [Arabidopsis thaliana]
  misc_feature (1)..(205): Homolog of NCBI NO: 18404095 NR Description: expressed protein
  misc_feature (1)..(205): Homolog of NCBI NO: 28416665 NR Description: At2g36290 [Arabidopsis thaliana]
MGGQATWACLKYIPHRLAGVTLVAPVVNYWWKNFPSEISTEAFNQQGRNDQWAVRVAHYAPWLTHWWNSQSWFPGSSVVARNLGMLSKADKEIMFKLGAARSQHEAQIRQQGTHETLHRDMIVGFGREFDPMELENLFPNNEGSVHLWQGDDDVLVPVTLQRYIAKKLPWIHYHEIPGAGHLFPFAPGMVNNIVKTLLTNDGVKK

SEQ ID NO: 27044 - DNA, 1427 bp, Arabidopsis thaliana
  misc_feature (1)..(1427): Ceres Seq. ID no. 13489694
  misc_feature: MA Experiment ID: 108579 Result: Down-regulated in Transcription
  misc_feature: MA Experiment 108579 PARAMETER Experiment Name: At_4deg_Cold_cDNA_P Parameter: Temperature (deg C) Value: 4 vs. 22
  misc_feature: MA Experiment 108579 PARAMETER Experiment Name: At_4deg_Cold_cDNA_P Parameter: Timepoint (hr) Value: 6
  misc_feature: MA Experiment 108579 PARAMETER Experiment Name: At_4deg_Cold_cDNA_P Parameter: Tissue Value: Aerial
  misc_feature: MA Experiment ID: 20000184 Result: Up-regulated in Transcription
  misc_feature: MA Experiment 20000184 PARAMETER Experiment Name: At_Shoots__P Parameter: Age (day) Value: 7
  misc_feature: MA Experiment 20000184 PARAMETER Experiment Name: At_Shoots__P Parameter: Tissue Value: Shoots vs. Whole Plant
  misc_feature: MA Experiment ID: 20000224 Result: Down-regulated in Transcription
  misc_feature: MA Experiment ID: 20001248 Result: Up-regulated in Transcription
  misc_feature: MA Experiment 20001248 PARAMETER Experiment Name: At_Far-red-induction_P Parameter: Age (day) Value: 7
  misc_feature: MA Experiment 20001248 PARAMETER Experiment Name: At_Far-red-induction_P Parameter: Light Value: Far-red vs. White
  misc_feature: MA Experiment 20001248 PARAMETER Experiment Name: At_Far-red-induction_P Parameter: Organism Value: A. thaliana
  misc_feature: MA Experiment 20001248 PARAMETER Experiment Name: At_Far-red-induction_P Parameter: Plant Line Value: Columbia
  misc_feature: MA Experiment 20001248 PARAMETER Experiment Name: At_Far-red-induction_P Parameter: Timepoint (hr) Value: 4
  misc_feature: MA Experiment 20001248 PARAMETER Experiment Name: At_Far-red-induction_P Parameter: Tissue Value: Whole Plant
acagtagtaggcacacacacattctcttctattttggcgaatttcgccttttgtgcattctctctctctctctcccggagtctcaggctttctcttaacttctcattctctccttggttgatgaaactggatcgatttgatagaacccagatcaaatctgttgacatttttccagatttcgatgcttttttgagattgggtttctctttcttttgatgaaacttatcactttcagcgttgcccagttttggccacaaggtgtttgttgaaattccggagagagagagaagctcgaaattgggaattctgtaaggaaaaaaaaatgagagattttccttcttgctctggtgaaaatggtgttcagattgcggactcttcgtcttcctcgagcgctggaagaaatgctcagaatttggtaatatgcatctaccgttgccgcatccgaggtaggacttgcttgatcacagtcacatggactaagaatctgatgggtcagtgtgttaccgtgggggttgatgattcttgcaaccgaagtctgtgtaaagtcgagattaagccgtggctcttcactaaacgaaaagggtccaagactctagaggcgtatgcctgtaatatcgatgttttctgggatctctcgtctgctaaatttggatccagccctgaacctttaggagggttctatgttggagttgttgttgacaaagagatggttcttcttcttggtgatatgaagaaagaagcttttaaaaagacgaatgctgcaccttcttcatctttaggtgctgtgttcattgctaagaaagagcatgtctttggcaagagaacgtttgcaactaaagctcagttttcaggtgatggcaaaactcatgatcttgtgatcgagtgtgacactagtctcagtgatccttgtctcattgttcgtgtcgatggaaagatcttgatgcaagtgcagcggcttcattggaagttccgtggcaacgataccataattgtcaatagaatctctgtggaagttctctgggatgtccacagttggttctttgggttgccatcatcaccaggaaatgcagtgtttatgttcaggacttgtcaatctgttgaaaagacctggtctttcacacaggtccccacgagctcaaaatctcaaagttttgggttttcattgattctgtatgcttggaagaacgagtagagaagaagagttttgagagttcttttgtttctcttgagtgctaactaaaggttaaaaaggaactgttgattcttgtcaatttattttatcatatgatcaattggtttcaattatagttttctcgtaaaatgttcgaaccggatcattgaagtatatatcagtttcatatgtcaaaagtttttacttgagacttgtaaagacttttgttcaaagccgattactttagccctgtatc

SEQ ID NO: 27045 - protein, 289 aa, Arabidopsis thaliana
  peptide (1)..(289): Ceres Seq. ID no. 13489695
  misc_feature (25)..(288): Pfam Name: Plant protein of unknown function (DUF868) Pfam Description: Plant protein of unknown function (DUF868)
  misc_feature (1)..(289): Homolog of NCBI NO: 18397034 NR Description: expressed protein [Arabidopsis thaliana]
  misc_feature (22)..(254): Homolog of NCBI NO: 15238927 NR Description: hypothetical protein [Arabidopsis thaliana]
  misc_feature (26)..(254): Homolog of NCBI NO: 15228105 NR Description: hypothetical protein [Arabidopsis thaliana]
  misc_feature (26)..(289): Homolog of NCBI NO: 15235452 NR Description: expressed protein [Arabidopsis thaliana]
  misc_feature (5)..(75): Homolog of NCBI NO: 20804936 NR Description: P0456E05.14 [Oryza sativa (japonica
  misc_feature (63)..(289): Homolog of NCBI NO: 20804936 NR Description: P0456E05.14 [Oryza sativa (japonica
  misc_feature (1)..(289): Homolog of NCBI NO: 34394221 NR Description: unknown protein [Oryza sativa (japonica
  misc_feature (1)..(289): Homolog of NCBI NO: 30102999 NR Description: hypothetical protein [Oryza sativa (japonica
  misc_feature (1)..(289): Homolog of NCBI NO: 15241702 NR Description: expressed protein [Arabidopsis thaliana]
  misc_feature (1)..(289): Homolog of NCBI NO: 21593854 NR Description: unknown [Arabidopsis thaliana]
MRDFPSCSGENGVQIADSSSSSSAGRNAQNLVICIYRCRIRGRTCLITVTWTKNLMGQCVTVGVDDSCNRSLCKVEIKPWLFTKRKGSKTLEAYACNIDVFWDLSSAKFGSSPEPLGGFYVGVVVDKEMVLLLGDMKKEAFKKTNAAPSSSLGAVFIAKKEHVFGKRTFATKAQFSGDGKTHDLVIECDTSLSDPCLIVRVDGKILMQVQRLHWKFRGNDTIIVNRISVEVLWDVHSWFFGLPSSPGNAVFMFRTCQSVEKTWSFTQVPTSSKSQSFGFSLILYAWKNE

SEQ ID NO: 27046 - protein, 234 aa, Arabidopsis thaliana
  peptide (1)..(234): Ceres Seq. ID no. 13489696
  misc_feature (1)..(233): Pfam Name: Plant protein of unknown function (DUF868) Pfam Description: Plant protein of unknown function (DUF868)
  misc_feature (1)..(199): Homolog of NCBI NO: 15238927 NR Description: hypothetical protein [Arabidopsis thaliana]
  misc_feature (1)..(199): Homolog of NCBI NO: 15228105 NR Description: hypothetical protein [Arabidopsis thaliana]
  misc_feature (1)..(234): Homolog of NCBI NO: 15235452 NR Description: expressed protein [Arabidopsis thaliana]
  misc_feature (1)..(20): Homolog of NCBI NO: 20804936 NR Description: P0456E05.14 [Oryza sativa (japonica
  misc_feature (8)..(234): Homolog of NCBI NO: 20804936 NR Description: P0456E05.14 [Oryza sativa (japonica
  misc_feature (1)..(234): Homolog of NCBI NO: 34394221 NR Description: unknown protein [Oryza sativa (japonica
  misc_feature (1)..(234): Homolog of NCBI NO: 30102999 NR Description: hypothetical protein [Oryza sativa (japonica
  misc_feature (1)..(234): Homolog of NCBI NO: 15241702 NR Description: expressed protein [Arabidopsis thaliana]
  misc_feature (1)..(234): Homolog of NCBI NO: 21593854 NR Description: unknown [Arabidopsis thaliana]
  misc_feature (1)..(234): Homolog of NCBI NO: 18397034 NR Description: expressed protein [Arabidopsis thaliana]
MGQCVTVGVDDSCNRSLCKVEIKPWLFTKRKGSKTLEAYACNIDVFWDLSSAKFGSSPEPLGGFYVGVVVDKEMVLLLGDMKKEAFKKTNAAPSSSLGAVFIAKKEHVFGKRTFATKAQFSGDGKTHDLVIECDTSLSDPCLIVRVDGKILMQVQRLHWKFRGNDTIIVNRISVEVLWDVHSWFFGLPSSPGNAVFMFRTCQSVEKTWSFTQVPTSSKSQSFGFSLILYAWKNE

SEQ ID NO: 27047 - protein, 161 aa, Arabidopsis thaliana
  peptide (1)..(161): Ceres Seq. ID no. 13489697
  misc_feature (1)..(160): Pfam Name: Plant protein of unknown function (DUF868) Pfam Description: Plant protein of unknown function (DUF868)
  misc_feature (1)..(159): Homolog of NCBI NO: 14719318 NR Description: hypothetical protein [Oryza sativa]
  misc_feature (1)..(126): Homolog of NCBI NO: 15238927 NR Description: hypothetical protein [Arabidopsis thaliana]
  misc_feature (1)..(126): Homolog of NCBI NO: 15228105 NR Description: hypothetical protein [Arabidopsis thaliana]
  misc_feature (1)..(161): Homolog of NCBI NO: 15235452 NR Description: expressed protein [Arabidopsis thaliana]
  misc_feature (1)..(161): Homolog of NCBI NO: 20804936 NR Description: P0456E05.14 [Oryza sativa (japonica
  misc_feature (1)..(161): Homolog of NCBI NO: 34394221 NR Description: unknown protein [Oryza sativa (japonica
  misc_feature (1)..(161): Homolog of NCBI NO: 30102999 NR Description: hypothetical protein [Oryza sativa (japonica
  misc_feature (1)..(161): Homolog of NCBI NO: 15241702 NR Description: expressed protein [Arabidopsis thaliana]
  misc_feature (1)..(161): Homolog of NCBI NO: 21593854 NR Description: unknown [Arabidopsis thaliana]
  misc_feature (1)..(161): Homolog of NCBI NO: 18397034 NR Description: expressed protein [Arabidopsis thaliana]
MVLLLGDMKKEAFKKTNAAPSSSLGAVFIAKKEHVFGKRTFATKAQFSGDGKTHDLVIECDTSLSDPCLIVRVDGKILMQVQRLHWKFRGNDTIIVNRISVEVLWDVHSWFFGLPSSPGNAVFMFRTCQSVEKTWSFTQVPTSSKSQSFGFSLILYAWKNE

SEQ ID NO: 27048 - DNA, 1227 bp, Arabidopsis thaliana
  misc_feature (1)..(1227): Ceres Seq. ID no. 12324143
  misc_feature: MA Experiment ID: 108434 Result: Down-regulated in Transcription
  misc_feature: MA Experiment 108434 PARAMETER Experiment Name: At_Root_Tips_cDNA_P Parameter: Tissue Value: Root Tips
  misc_feature: MA Experiment ID: 108464 Result: Up-regulated in Transcription
  misc_feature: MA Experiment 108464 PARAMETER Experiment Name: At_Germinating_Seeds_cDNA_P Parameter: Age (day) Value: 4 vs. 0
  misc_feature: MA Experiment 108464 PARAMETER Experiment Name: At_Germinating_Seeds_cDNA_P Parameter: Tissue Value: Germinating Seeds
  misc_feature: MA Experiment ID: 20000184 Result: Down-regulated in Transcription
  misc_feature: MA Experiment 20000184 PARAMETER Experiment Name: At_Shoots__P Parameter: Age (day) Value: 7
  misc_feature: MA Experiment 20000184 PARAMETER Experiment Name: At_Shoots__P Parameter: Tissue Value: Shoots vs. Whole Plant
  misc_feature: MA Experiment ID: 20000439 Result: Up-regulated in Transcription
  misc_feature: MA Experiment 20000439 PARAMETER Experiment Name: At_Roots__P Parameter: Age (day) Value: 14 vs. 21
  misc_feature: MA Experiment 20000439 PARAMETER Experiment Name: At_Roots__P Parameter: Organism Value: A. thaliana
  misc_feature: MA Experiment 20000439 PARAMETER Experiment Name: At_Roots__P Parameter: Tissue Value: Roots vs. Whole Plant
  misc_feature: MA Experiment ID: 20000495 Result: Up-regulated in Transcription
  misc_feature: MA Experiment 20000495 PARAMETER Experiment Name: At_Guard_Cells_P Parameter: Harvest Date Value: 8/2/2002
  misc_feature: MA Experiment 20000495 PARAMETER Experiment Name: At_Guard_Cells_P Parameter: Organism Value: A. thaliana
  misc_feature: MA Experiment 20000495 PARAMETER Experiment Name: At_Guard_Cells_P Parameter: Tissue Value: Guard Cells vs. Leaves
  misc_feature: MA Experiment ID: 20001906 Result: Down-regulated in Transcription
  misc_feature: MA Experiment 20001906 PARAMETER Experiment Name: At_Drought_Reproduction_P Parameter: Age (day) Value: 35
  misc_feature: MA Experiment 20001906 PARAMETER Experiment Name: At_Drought_Reproduction_P Parameter: Organism Value: A. thaliana
  misc_feature: MA Experiment 20001906 PARAMETER Experiment Name: At_Drought_Reproduction_P Parameter: Plant Line Value: WS
  misc_feature: MA Experiment 20001906 PARAMETER Experiment Name: At_Drought_Reproduction_P Parameter: Timepoint (day) Value: 5
  misc_feature: MA Experiment 20001906 PARAMETER Experiment Name: At_Drought_Reproduction_P Parameter: Tissue Value: Siliques
  misc_feature: MA Experiment 20001906 PARAMETER Experiment Name: At_Drought_Reproduction_P Parameter: Treatment Value: Drought vs. No Drought
aacaaacccaacaatctttgaaaacaaatcaccctttcgtttttatttaaatttcttgggtcgtttcttaaatttgtatgtgtttattaatggagatcaacaataatgccaacaatactaatactactattgataatcacaaggcaaagatgagccttgtgttgtcaacggatgctaagccaaggttgaaatggacttgtgatcttcatcacaaattcatcgaagccgttaatcaacttggaggacctaacaaagcaacacctaagggtttgatgaaggttatggagattcctgggcttaccttataccatctcaagagccatttacagaaatatcggttagggaagagcatgaagttcgatgataacaagctagaagtttcctctgcatcagagaatcaagaagttgagagtaaaaacgattcaagagatctccgaggctgcagtgtcaccgaagaaaacagcaatccagctaaagacagagggctacaaatcacagaggctttacaaatgcagatggaagttcagaagaaacttcatgaacaaatcgaagttcagaggcatttgcaggtgaagattgaggcacaaggaaagtatctacagtccgttttaatgaaagctcaacaaactctcgctggctactcatcttcaaatctcggcatggattttgcgaggaccgagctctctagattagcttcaatggtgaacagaggctgtccaagcacttcgttctcagagctaacgcaagtagaagaagaagaagaagcagaagaaggtttcttgtggtacaagaaaccagaaaacagaggaattagtcagctgagatgttcagtagagagctcgttgacatcttcagagacctcagagacaaaactggatactgacaataaccttaataaatcgattgaacttccgttgatggagatcaactcggaagtgatgaaggggaagaagagaagcataaacgacgtcgtttgcgtggagcagcctctaatgaagagagcttttggagttgatgatgatgagcatttgaagttgagtttgaatacttacaagaaagacatggaggcgtgtacgaacataggactagggtttaattaaaaaaaaaaacattttactaaagttatataaaaatgttttaaaagaatccagtaatatatatgcgtagatttctatcgattattgtagagattttgtgagtaagtcgtggtgaagaagaacgcatggg

SEQ ID NO: 27049 - protein, 340 aa, Arabidopsis thaliana
  peptide (1)..(340): Ceres Seq. ID no. 12324144
  misc_feature (36)..(87): Pfam Name: Myb-like DNA-binding domain Pfam Description: Myb-like DNA-binding domain
  misc_feature (27)..(185): Homolog of NCBI NO: 34394528 NR Description: transfactor-like protein [Oryza sativa (japonica
  misc_feature (20)..(225): Homolog of NCBI NO: 30686726 NR Description: transfactor-related protein [Arabidopsis
  misc_feature (20)..(225): Homolog of NCBI NO: 22330835 NR Description: transfactor-like
  misc_feature (27)..(258): Homolog of NCBI NO: 18404044 NR Description: transfactor, putative
  misc_feature (7)..(259): Homolog of NCBI NO: 18414049 NR Description: putative protein
  misc_feature (20)..(272): Homolog of NCBI NO: 15238770 NR Description: transfactor-like protein
  misc_feature (20)..(272): Homolog of NCBI NO: 28059694 NR Description: transfactor-like protein [Arabidopsis thaliana]
  misc_feature (20)..(272): Homolog of NCBI NO: 14596181 NR Description: transfactor-like protein [Arabidopsis thaliana]
  misc_feature (20)..(271): Homolog of NCBI NO: 6223653 NR Description: transfactor-like [Arabidopsis thaliana]
  misc_feature (5)..(340): Homolog of NCBI NO: 15222366 NR Description: transfactor, putative; protein id: At1g69580.1
MCLLMEINNNANNTNTTIDNHKAKMSLVLSTDAKPRLKWTCDLHHKFIEAVNQLGGPNKATPKGLMKVMEIPGLTLYHLKSHLQKYRLGKSMKFDDNKLEVSSASENQEVESKNDSRDLRGCSVTEENSNPAKDRGLQITEALQMQMEVQKKLHEQIEVQRHLQVKIEAQGKYLQSVLMKAQQTLAGYSSSNLGMDFARTELSRLASMVNRGCPSTSFSELTQVEEEEEAEEGFLWYKKPENRGISQLRCSVESSLTSSETSETKLDTDNNLNKSIELPLMEINSEVMKGKKRSINDVVCVEQPLMKRAFGVDDDEHLKLSLNTYKKDMEACTNIGLGFN

SEQ ID NO: 27050 - protein, 336 aa, Arabidopsis thaliana
  peptide (1)..(336): Ceres Seq. ID no. 12324145
  misc_feature (32)..(83): Pfam Name: Myb-like DNA-binding domain Pfam Description: Myb-like DNA-binding domain
  misc_feature (23)..(181): Homolog of NCBI NO: 34394528 NR Description: transfactor-like protein [Oryza sativa (japonica
  misc_feature (16)..(221): Homolog of NCBI NO: 30686726 NR Description: transfactor-related protein [Arabidopsis
  misc_feature (16)..(221): Homolog of NCBI NO: 22330835 NR Description: transfactor-like
  misc_feature (23)..(254): Homolog of NCBI NO: 18404044 NR Description: transfactor, putative
  misc_feature (3)..(255): Homolog of NCBI NO: 18414049 NR Description: putative protein
  misc_feature (16)..(268): Homolog of NCBI NO: 28059694 NR Description: transfactor-like protein [Arabidopsis thaliana]
  misc_feature (16)..(268): Homolog of NCBI NO: 15238770 NR Description: transfactor-like protein
  misc_feature (16)..(268): Homolog of NCBI NO: 14596181 NR Description: transfactor-like protein [Arabidopsis thaliana]
  misc_feature (16)..(267): Homolog of NCBI NO: 6223653 NR Description: transfactor-like [Arabidopsis thaliana]
  misc_feature (1)..(336): Homolog of NCBI NO: 15222366 NR Description: transfactor, putative; protein id: At1g69580.1
MEINNNANNTNTTIDNHKAKMSLVLSTDAKPRLKWTCDLHHKFIEAVNQLGGPNKATPKGLMKVMEIPGLTLYHLKSHLQKYRLGKSMKFDDNKLEVSSASENQEVESKNDSRDLRGCSVTEENSNPAKDRGLQITEALQMQMEVQKKLHEQIEVQRHLQVKIEAQGKYLQSVLMKAQQTLAGYSSSNLGMDFARTELSRLASMVNRGCPSTSFSELTQVEEEEEAEEGFLWYKKPENRGISQLRCSVESSLTSSETSETKLDTDNNLNKSIELPLMEINSEVMKGKKRSINDVVCVEQPLMKRAFGVDDDEHLKLSLNTYKKDMEACTNIGLGFN

SEQ ID NO: 27051 - protein, 316 aa, Arabidopsis thaliana
  peptide (1)..(316): Ceres Seq. ID no. 12324146
  misc_feature (12)..(63): Pfam Name: Myb-like DNA-binding domain Pfam Description: Myb-like DNA-binding domain
  misc_feature (3)..(161): Homolog of NCBI NO: 34394528 NR Description: transfactor-like protein [Oryza sativa (japonica
  misc_feature (1)..(201): Homolog of NCBI NO: 30686726 NR Description: transfactor-related protein [Arabidopsis
  misc_feature (1)..(201): Homolog of NCBI NO: 22330835 NR Description: transfactor-like
  misc_feature (3)..(234): Homolog of NCBI NO: 18404044 NR Description: transfactor, putative
  misc_feature (1)..(235): Homolog of NCBI NO: 18414049 NR Description: putative protein
  misc_feature (1)..(248): Homolog of NCBI NO: 15238770 NR Description: transfactor-like protein
  misc_feature (1)..(248): Homolog of NCBI NO: 28059694 NR Description: transfactor-like protein [Arabidopsis thaliana]
  misc_feature (1)..(248): Homolog of NCBI NO: 14596181 NR Description: transfactor-like protein [Arabidopsis thaliana]
  misc_feature (1)..(247): Homolog of NCBI NO: 6223653 NR Description: transfactor-like [Arabidopsis thaliana]
  misc_feature (1)..(316): Homolog of NCBI NO: 15222366 NR Description: transfactor, putative; protein id: At1g69580.1
MSLVLSTDAKPRLKWTCDLHHKFIEAVNQLGGPNKATPKGLMKVMEIPGLTLYHLKSHLQKYRLGKSMKFDDNKLEVSSASENQEVESKNDSRDLRGCSVTEENSNPAKDRGLQITEALQMQMEVQKKLHEQIEVQRHLQVKIEAQGKYLQSVLMKAQQTLAGYSSSNLGMDFARTELSRLASMVNRGCPSTSFSELTQVEEEEEAEEGFLWYKKPENRGISQLRCSVESSLTSSETSETKLDTDNNLNKSIELPLMEINSEVMKGKKRSINDVVCVEQPLMKRAFGVDDDEHLKLSLNTYKKDMEACTNIGLGFN

SEQ ID NO: 27052 - DNA, 639 bp, Arabidopsis thaliana; identical to SEQ ID NO: 22252
  misc_feature (1)..(639): Ceres Seq. ID no. 13580410
  misc_feature: MA Experiment ID: 108434 Result: Up-regulated in Transcription
  misc_feature: MA Experiment 108434 PARAMETER Experiment Name: At_Root_Tips_cDNA_P Parameter: Tissue Value: Root Tips
  misc_feature: MA Experiment ID: 108461 Result: Up-regulated in Transcription
  misc_feature: MA Experiment 108461 PARAMETER Experiment Name: At_Germinating_Seeds_cDNA_P Parameter: Age (day) Value: 1 vs. 0
  misc_feature: MA Experiment 108461 PARAMETER Experiment Name: At_Germinating_Seeds_cDNA_P Parameter: Tissue Value: Germinating Seeds
  misc_feature: MA Experiment ID: 108462 Result: Up-regulated in Transcription
  misc_feature: MA Experiment 108462 PARAMETER Experiment Name: At_Germinating_Seeds_cDNA_P Parameter: Age (day) Value: 2 vs. 0
  misc_feature: MA Experiment 108462 PARAMETER Experiment Name: At_Germinating_Seeds_cDNA_P Parameter: Tissue Value: Germinating Seeds
  misc_feature: MA Experiment ID: 108473 Result: Down-regulated in Transcription
  misc_feature: MA Experiment 108473 PARAMETER Experiment Name: At_Drought_Flowers_cDNA_P Parameter: Timepoint (hr) Value: 7 d
  misc_feature: MA Experiment 108473 PARAMETER Experiment Name: At_Drought_Flowers_cDNA_P Parameter: Tissue Value: Flower
  misc_feature: MA Experiment 108473 PARAMETER Experiment Name: At_Drought_Flowers_cDNA_P Parameter: Treatment Value: Drought vs. No Drought
  misc_feature: MA Experiment ID: 20000069 Result: Down-regulated in Transcription
  misc_feature: MA Experiment 20000069 PARAMETER Experiment Name: At_100uM_ABA_Mutants_cDNA_P Parameter: Plant Line Value: CS23
  misc_feature: MA Experiment 20000069 PARAMETER Experiment Name: At_100uM_ABA_Mutants_cDNA_P Parameter: Timepoint (hr) Value: 6
  misc_feature: MA Experiment 20000069 PARAMETER Experiment Name: At_100uM_ABA_Mutants_cDNA_P Parameter: Tissue Value: Aerial
  misc_feature: MA Experiment 20000069 PARAMETER Experiment Name: At_100uM_ABA_Mutants_cDNA_P Parameter: Treatment Value: 100uM ABA vs. No Treatment
  misc_feature: MA Experiment ID: 20000111 Result: Down-regulated in Transcription
  misc_feature: MA Experiment 20000111 PARAMETER Experiment Name: At_42deg_Heat_cDNA_P Parameter: Temperature (deg C) Value: 42 vs. 22
  misc_feature: MA Experiment 20000111 PARAMETER Experiment Name: At_42deg_Heat_cDNA_P Parameter: Timepoint (hr) Value: 6
  misc_feature: MA Experiment 20000111 PARAMETER Experiment Name: At_42deg_Heat_cDNA_P Parameter: Tissue Value: Aerial
  misc_feature: MA Experiment ID: 20000112 Result: Down-regulated in Transcription
  misc_feature: MA Experiment 20000112 PARAMETER Experiment Name: At_42deg_Heat_cDNA_P Parameter: Temperature (deg C) Value: 42 vs. 22
  misc_feature: MA Experiment 20000112 PARAMETER Experiment Name: At_42deg_Heat_cDNA_P Parameter: Timepoint (hr) Value: 2
  misc_feature: MA Experiment 20000112 PARAMETER Experiment Name: At_42deg_Heat_cDNA_P Parameter: Tissue Value: Aerial
  misc_feature: MA Experiment ID: 20000113 Result: Down-regulated in Transcription
  misc_feature: MA Experiment 20000113 PARAMETER Experiment Name: At_42deg_Heat_cDNA_P Parameter: Temperature (deg C) Value: 42 vs. 22
  misc_feature: MA Experiment 20000113 PARAMETER Experiment Name: At_42deg_Heat_cDNA_P Parameter: Timepoint (hr) Value: 8
  misc_feature: MA Experiment 20000113 PARAMETER Experiment Name: At_42deg_Heat_cDNA_P Parameter: Tissue Value: Aerial
  misc_feature: MA Experiment ID: 20000117 Result: Down-regulated in Transcription
  misc_feature: MA Experiment 20000117 PARAMETER Experiment Name: At_100uM_ABA_Mutants_cDNA_P Parameter: Plant Line Value: Columbia
  misc_feature: MA Experiment 20000117 PARAMETER Experiment Name: At_100uM_ABA_Mutants_cDNA_P Parameter: Timepoint (hr) Value: 6
  misc_feature: MA Experiment 20000117 PARAMETER Experiment Name: At_100uM_ABA_Mutants_cDNA_P Parameter: Tissue Value: Aerial
  misc_feature: MA Experiment 20000117 PARAMETER Experiment Name: At_100uM_ABA_Mutants_cDNA_P Parameter: Treatment Value: 100uM ABA vs. No Treatment
  misc_feature: MA Experiment ID: 20000144 Result: Down-regulated in Transcription
  misc_feature: MA Experiment 20000144 PARAMETER Experiment Name: At_42deg_Heat_cDNA_P Parameter: Temperature (deg C) Value: 42 vs. 22
  misc_feature: MA Experiment 20000144 PARAMETER Experiment Name: At_42deg_Heat_cDNA_P Parameter: Timepoint (hr) Value: 1
  misc_feature: MA Experiment 20000144 PARAMETER Experiment Name: At_42deg_Heat_cDNA_P Parameter: Tissue Value: Aerial
  misc_feature: MA Experiment ID: 20000173 Result: Down-regulated in Transcription
  misc_feature: MA Experiment 20000173 PARAMETER Experiment Name: At_42deg_Heat_P Parameter: Age (day) Value: 14
  misc_feature: MA Experiment 20000173 PARAMETER Experiment Name: At_42deg_Heat_P Parameter: Organism Value: A. thaliana
  misc_feature: MA Experiment 20000173 PARAMETER Experiment Name: At_42deg_Heat_P Parameter: Plant Line Value: WS
  misc_feature: MA Experiment 20000173 PARAMETER Experiment Name: At_42deg_Heat_P Parameter: Temperature (deg C) Value: 42 vs. 22
  misc_feature: MA Experiment 20000173 PARAMETER Experiment Name: At_42deg_Heat_P Parameter: Timepoint (hr) Value: 6
  misc_feature: MA Experiment 20000173 PARAMETER Experiment Name: At_42deg_Heat_P Parameter: Tissue Value: Aerial
  misc_feature: MA Experiment ID: 20000179 Result: Up-regulated in Transcription
  misc_feature: MA Experiment 20000179 PARAMETER Experiment Name: At_Germinating_Seeds_P Parameter: Age (hr) Value: 6 vs. 0
  misc_feature: MA Experiment 20000179 PARAMETER Experiment Name: At_Germinating_Seeds_P Parameter: Tissue Value: Germinating Seeds
  misc_feature: MA Experiment ID: 20000180 Result: Up-regulated in Transcription
  misc_feature: MA Experiment 20000180 PARAMETER Experiment Name: At_Germinating_Seeds_P Parameter: Age (hr) Value: 24 vs. 0
  misc_feature: MA Experiment 20000180 PARAMETER Experiment Name: At_Germinating_Seeds_P Parameter: Tissue Value: Germinating Seeds
  misc_feature: MA Experiment ID: 20000227 Result: Up-regulated in Transcription
  misc_feature: MA Experiment 20000227 PARAMETER Experiment Name: At_Root-Tips-vs-Tops_P Parameter: Tissue Value: Root Tips vs. Root Tops
  misc_feature: MA Experiment ID: 20000234 Result: Up-regulated in Transcription
  misc_feature: MA Experiment 20000234 PARAMETER Experiment Name: At_Siliques_P Parameter: Age (day) Value: 21
  misc_feature: MA Experiment 20000234 PARAMETER Experiment Name: At_Siliques_P Parameter: Organism Value: A. thaliana
  misc_feature: MA Experiment 20000234 PARAMETER Experiment Name: At_Siliques_P Parameter: Plant Line Value: WS
  misc_feature: MA Experiment 20000234 PARAMETER Experiment Name: At_Siliques_P Parameter: Tissue Value: Less Than 5mm Siliques vs. Whole Plant
  misc_feature: MA Experiment ID: 20000264 Result: Up-regulated in Transcription
  misc_feature: MA Experiment 20000264 PARAMETER Experiment Name: At_Open_Flower_P Parameter: Age (day) Value: 21
  misc_feature: MA Experiment 20000264 PARAMETER Experiment Name: At_Open_Flower_P Parameter: Plant Line Value: WS
  misc_feature: MA Experiment 20000264 PARAMETER Experiment Name: At_Open_Flower_P Parameter: Tissue Value: Open Flower vs. Whole Plant
  misc_feature: MA Experiment ID: 20000265 Result: Up-regulated in Transcription
  misc_feature: MA Experiment 20000265 PARAMETER Experiment Name: At_Open_Flower_P Parameter: Age (day) Value: 21
  misc_feature: MA Experiment 20000265 PARAMETER Experiment Name: At_Open_Flower_P Parameter: Plant Line Value: WS
  misc_feature: MA Experiment 20000265 PARAMETER Experiment Name: At_Open_Flower_P Parameter: Tissue Value: Closed Flower vs. Whole Plant
  misc_feature: MA Experiment ID: 20000437 Result: Down-regulated in Transcription
  misc_feature: MA Experiment 20000437 PARAMETER Experiment Name: At_Drought_P Parameter: Age (day) Value: 8
  misc_feature: MA Experiment 20000437 PARAMETER Experiment Name: At_Drought_P Parameter: Organism Value: A. thaliana
  misc_feature: MA Experiment 20000437 PARAMETER Experiment Name: At_Drought_P Parameter: Plant Line Value: WS
  misc_feature: MA Experiment 20000437 PARAMETER Experiment Name: At_Drought_P Parameter: Timepoint (hr) Value: 24
  misc_feature: MA Experiment 20000437 PARAMETER Experiment Name: At_Drought_P Parameter: Tissue Value: Whole Plant
  misc_feature: MA Experiment 20000437 PARAMETER Experiment Name: At_Drought_P Parameter: Treatment Value: Drought vs. No Drought
  misc_feature: MA Experiment ID: 20000438 Result: Up-regulated in Transcription
  misc_feature: MA Experiment 20000438 PARAMETER Experiment Name: At_Shoots__P Parameter: Age (day) Value: 14
  misc_feature: MA Experiment 20000438 PARAMETER Experiment Name: At_Shoots__P Parameter: Tissue Value: Shoots vs. Whole Plant
  misc_feature: MA Experiment ID: 20000794 Result: Down-regulated in Transcription
  misc_feature: MA Experiment 20000794 PARAMETER Experiment Name: At_Petals_P Parameter: Age (day) Value: 23-25 days
  misc_feature: MA Experiment 20000794 PARAMETER Experiment Name: At_Petals_P Parameter: Plant Line Value: WS
  misc_feature: MA Experiment 20000794 PARAMETER Experiment Name: At_Petals_P Parameter: Tissue Value: Petals vs. Whole plant
  misc_feature: MA Experiment ID: 20001248 Result: Down-regulated in Transcription
  misc_feature: MA Experiment 20001248 PARAMETER Experiment Name: At_Far-red-induction_P Parameter: Age (day) Value: 7
  misc_feature: MA Experiment 20001248 PARAMETER Experiment Name: At_Far-red-induction_P Parameter: Light Value: Far-red vs. White
  misc_feature: MA Experiment 20001248 PARAMETER Experiment Name: At_Far-red-induction_P Parameter: Organism Value: A. thaliana
  misc_feature: MA Experiment 20001248 PARAMETER Experiment Name: At_Far-red-induction_P Parameter: Plant Line Value: Columbia
  misc_feature: MA Experiment 20001248 PARAMETER Experiment Name: At_Far-red-induction_P Parameter: Timepoint (hr) Value: 4
  misc_feature: MA Experiment 20001248 PARAMETER Experiment Name: At_Far-red-induction_P Parameter: Tissue Value: Whole Plant
  misc_feature: MA Experiment ID: 20001450 Result: Down-regulated in Transcription
  misc_feature: MA Experiment 20001450 PARAMETER Experiment Name: At_Far-red-induction_P Parameter: Age (day) Value: 7
  misc_feature: MA Experiment 20001450 PARAMETER Experiment Name: At_Far-red-induction_P Parameter: Light Value: Far-red vs. White
  misc_feature: MA Experiment 20001450 PARAMETER Experiment Name: At_Far-red-induction_P Parameter: Organism Value: A. thaliana
  misc_feature: MA Experiment 20001450 PARAMETER Experiment Name: At_Far-red-induction_P Parameter: Plant Line Value: Columbia
  misc_feature: MA Experiment 20001450 PARAMETER Experiment Name: At_Far-red-induction_P Parameter: Timepoint (hr) Value: 8
  misc_feature: MA Experiment 20001450 PARAMETER Experiment Name: At_Far-red-induction_P Parameter: Tissue Value: Whole Plant
  misc_feature: MA Experiment ID: 20001554 Result: Down-regulated in Transcription
  misc_feature: MA Experiment 20001554 PARAMETER Experiment Name: At_Drought_Soil_Dry_P Parameter: Age (day) Value: 21
  misc_feature: MA Experiment 20001554 PARAMETER Experiment Name: At_Drought_Soil_Dry_P Parameter: Organism Value: A. thaliana
  misc_feature: MA Experiment 20001554 PARAMETER Experiment Name: At_Drought_Soil_Dry_P Parameter: Plant Line Value: WS
  misc_feature: MA Experiment 20001554 PARAMETER Experiment Name: At_Drought_Soil_Dry_P Parameter: Post Timepoint (hr) Value: None
  misc_feature: MA Experiment 20001554 PARAMETER Experiment Name: At_Drought_Soil_Dry_P Parameter: Post-Treatment Value: None
  misc_feature: MA Experiment 20001554 PARAMETER Experiment Name: At_Drought_Soil_Dry_P Parameter: Timepoint (day) Value: 7
  misc_feature: MA Experiment 20001554 PARAMETER Experiment Name: At_Drought_Soil_Dry_P Parameter: Treatment Value: Drought vs. No Drought
  misc_feature: MA Experiment ID: 20001555 Result: Down-regulated in Transcription
  misc_feature: MA Experiment 20001555 PARAMETER Experiment Name: At_Drought_Soil_Dry_P Parameter: Age (day) Value: 24
  misc_feature: MA Experiment 20001555 PARAMETER Experiment Name: At_Drought_Soil_Dry_P Parameter: Organism Value: A. thaliana
  misc_feature: MA Experiment 20001555 PARAMETER Experiment Name: At_Drought_Soil_Dry_P Parameter: Plant Line Value: WS
  misc_feature: MA Experiment 20001555 PARAMETER Experiment Name: At_Drought_Soil_Dry_P Parameter: Post Timepoint (hr) Value: None
  misc_feature: MA Experiment 20001555 PARAMETER Experiment Name: At_Drought_Soil_Dry_P Parameter: Post-Treatment Value: None
  misc_feature: MA Experiment 20001555 PARAMETER Experiment Name: At_Drought_Soil_Dry_P Parameter: Timepoint (day) Value: 10
  misc_feature: MA Experiment 20001555 PARAMETER Experiment Name: At_Drought_Soil_Dry_P Parameter: Treatment Value: Drought vs. No Drought
  misc_feature: MA Experiment ID: 20001556 Result: Down-regulated in Transcription
  misc_feature: MA Experiment 20001556 PARAMETER Experiment Name: At_Drought_Soil_Dry_P Parameter: Age (day) Value: 26
  misc_feature: MA Experiment 20001556 PARAMETER Experiment Name: At_Drought_Soil_Dry_P Parameter: Organism Value: A. thaliana
  misc_feature: MA Experiment 20001556 PARAMETER Experiment Name: At_Drought_Soil_Dry_P Parameter: Plant Line Value: WS
  misc_feature: MA Experiment 20001556 PARAMETER Experiment Name: At_Drought_Soil_Dry_P Parameter: Post Timepoint (hr) Value: None
  misc_feature: MA Experiment 20001556 PARAMETER Experiment Name: At_Drought_Soil_Dry_P Parameter: Post-Treatment Value: None
  misc_feature: MA Experiment 20001556 PARAMETER Experiment Name: At_Drought_Soil_Dry_P Parameter: Timepoint (day) Value: 12
  misc_feature: MA Experiment 20001556 PARAMETER Experiment Name: At_Drought_Soil_Dry_P Parameter: Treatment Value: Drought vs. No Drought
  misc_feature: MA Experiment ID: 20001557 Result: Down-regulated in Transcription
  misc_feature: MA Experiment 20001557 PARAMETER Experiment Name: At_Drought_Soil_Dry_P Parameter: Age (day) Value: 27
  misc_feature: MA Experiment 20001557 PARAMETER Experiment Name: At_Drought_Soil_Dry_P Parameter: Organism Value: A. thaliana
  misc_feature: MA Experiment 20001557 PARAMETER Experiment Name: At_Drought_Soil_Dry_P Parameter: Plant Line Value: WS
  misc_feature: MA Experiment 20001557 PARAMETER Experiment Name: At_Drought_Soil_Dry_P Parameter: Post Timepoint (hr) Value: 3
  misc_feature: MA Experiment 20001557 PARAMETER Experiment Name: At_Drought_Soil_Dry_P Parameter: Post-Treatment Value: Re-Water vs. No Drought
  misc_feature: MA Experiment 20001557 PARAMETER Experiment Name: At_Drought_Soil_Dry_P Parameter: Timepoint (day) Value: 13
  misc_feature: MA Experiment 20001557 PARAMETER Experiment Name: At_Drought_Soil_Dry_P Parameter: Treatment Value: Drought vs. No Drought
  misc_feature: MA Experiment ID: 20001560 Result: Up-regulated in Transcription
  misc_feature: MA Experiment 20001560 PARAMETER Experiment Name: At_Drought_Soil_Dry_P Parameter: Age (day) Value: 28
  misc_feature: MA Experiment 20001560 PARAMETER Experiment Name: At_Drought_Soil_Dry_P Parameter: Organism Value: A. thaliana
  misc_feature: MA Experiment 20001560 PARAMETER Experiment Name: At_Drought_Soil_Dry_P Parameter: Plant Line Value: WS
  misc_feature: MA Experiment 20001560 PARAMETER Experiment Name: At_Drought_Soil_Dry_P Parameter: Post Timepoint (hr) Value: None
  misc_feature: MA Experiment 20001560 PARAMETER Experiment Name: At_Drought_Soil_Dry_P Parameter: Post-Treatment Value: None
  misc_feature: MA Experiment 20001560 PARAMETER Experiment Name: At_Drought_Soil_Dry_P Parameter: Timepoint (day) Value: 14
  misc_feature: MA Experiment 20001560 PARAMETER Experiment Name: At_Drought_Soil_Dry_P Parameter: Treatment Value: Drought vs. No Drought
  misc_feature: MA Experiment ID: 20001904 Result: Down-regulated in Transcription
  misc_feature: MA Experiment 20001904 PARAMETER Experiment Name: At_Drought_Reproduction_P Parameter: Age (day) Value: 37
  misc_feature: MA Experiment 20001904 PARAMETER Experiment Name: At_Drought_Reproduction_P Parameter: Organism Value: A. thaliana
  misc_feature: MA Experiment 20001904 PARAMETER Experiment Name: At_Drought_Reproduction_P Parameter: Plant Line Value: WS
  misc_feature: MA Experiment 20001904 PARAMETER Experiment Name: At_Drought_Reproduction_P Parameter: Timepoint (day) Value: 7
  misc_feature: MA Experiment 20001904 PARAMETER Experiment Name: At_Drought_Reproduction_P Parameter: Tissue Value: Rosettes
  misc_feature: MA Experiment 20001904 PARAMETER Experiment Name: At_Drought_Reproduction_P Parameter: Treatment Value: Drought vs. No Drought
  misc_feature: MA Experiment ID: 20001905 Result: Down-regulated in Transcription
  misc_feature: MA Experiment 20001905 PARAMETER Experiment Name: At_Drought_Reproduction_P Parameter: Age (day) Value: 40
  misc_feature: MA Experiment 20001905 PARAMETER Experiment Name: At_Drought_Reproduction_P Parameter: Organism Value: A. thaliana
  misc_feature: MA Experiment 20001905 PARAMETER Experiment Name: At_Drought_Reproduction_P Parameter: Plant Line Value: WS
  misc_feature: MA Experiment 20001905 PARAMETER Experiment Name: At_Drought_Reproduction_P Parameter: Timepoint (day) Value: 10
  misc_feature: MA Experiment 20001905 PARAMETER Experiment Name: At_Drought_Reproduction_P Parameter: Tissue Value: Rosettes
  misc_feature: MA Experiment 20001905 PARAMETER Experiment Name: At_Drought_Reproduction_P Parameter: Treatment Value: Drought vs. No Drought
  misc_feature: MA Experiment ID: 20001911 Result: Down-regulated in Transcription
  misc_feature: MA Experiment 20001911 PARAMETER Experiment Name: At_Drought_Reproduction_P Parameter: Age (day) Value: 40
  misc_feature: MA Experiment 20001911 PARAMETER Experiment Name: At_Drought_Reproduction_P Parameter: Organism Value: A. thaliana
  misc_feature: MA Experiment 20001911 PARAMETER Experiment Name: At_Drought_Reproduction_P Parameter: Plant Line Value: WS
  misc_feature: MA Experiment 20001911 PARAMETER Experiment Name: At_Drought_Reproduction_P Parameter: Timepoint (day) Value: 10
  misc_feature: MA Experiment 20001911 PARAMETER Experiment Name: At_Drought_Reproduction_P Parameter: Tissue Value: Flowers
  misc_feature: MA Experiment 20001911 PARAMETER Experiment Name: At_Drought_Reproduction_P Parameter: Treatment Value: Drought vs. No Drought

SEQ ID NO: 27053 - protein, 136 aa, Arabidopsis thaliana; identical to SEQ ID NO: 8709
  peptide (1)..(136): Ceres Seq. ID no. 13580411
  misc_feature (17)..(135): Pfam Name: Core histone H2A/H2B/H3/H4 Pfam Description: Core histone H2A/H2B/H3/H4
  misc_feature (17)..(135): Pfam Name: Core histone H2A/H2B/H3/H4 Pfam Description: Core histone H2A/H2B/H3/H4
  misc_feature (17)..(135): Pfam Name: Core histone H2A/H2B/H3/H4 Pfam Description: Core histone H2A/H2B/H3/H4
  misc_feature (1)..(136): Homolog of NCBI NO: 7305139 NR Description: histone 1, H3f; histone H3; histone gene complex
  misc_feature (1)..(136): Homolog of NCBI NO: 122070 NR Description: Histone H3
  misc_feature (1)..(136): Homolog of NCBI NO: 34876396 NR Description: similar to H3 histone family, member I [Rattus
  misc_feature (1)..(136): Homolog of NCBI NO: 37546835 NR Description: similar to histone protein Hist2h3c1 [Homo
  misc_feature (2)..(136): Homolog of NCBI NO: 122083 NR Description: Histone H3
  misc_feature (1)..(136): Homolog of NCBI NO: 7305139 NR Description: histone 1, H3f; histone H3; histone gene complex
  misc_feature (1)..(136): Homolog of NCBI NO: 34876396 NR Description: similar to H3 histone family, member I [Rattus
  misc_feature (2)..(136): Homolog of NCBI NO: 122083 NR Description: Histone H3
  misc_feature (2)..(136): Homolog of NCBI NO: 70753 NR Description: histone H3 - garden pea (tentative sequence)
  misc_feature (2)..(136): Homolog of NCBI NO: 122083 NR Description: Histone H3
  misc_feature (1)..(136): Homolog of NCBI NO: 37546835 NR Description: similar to histone protein Hist2h3c1 [Homo
  misc_feature (1)..(136): Homolog of NCBI NO: 34876396 NR Description: similar to H3 histone family, member I [Rattus
  misc_feature (1)..(136): Homolog of NCBI NO: 15232146 NR Description: histone H3 [Arabidopsis thaliana]
  misc_feature (1)..(136): Homolog of NCBI NO: 122087 NR Description: Histone H3
  misc_feature (1)..(136): Homolog of NCBI NO: 1362108 NR Description: histone H3 homolog - common tobacco
  misc_feature (1)..(136): Homolog of NCBI NO: 166384 NR Description: histone H3 (H3-1.1)
  misc_feature (2)..(136): Homolog of NCBI NO: 70753 NR Description: histone H3 - garden pea (tentative sequence)
  misc_feature (1)..(136): Homolog of NCBI NO: 122070 NR Description: Histone H3
  misc_feature (1)..(136): Homolog of NCBI NO: 7305139 NR Description: histone 1, H3f; histone H3; histone gene complex
  misc_feature (1)..(136): Homolog of NCBI NO: 15232146 NR Description: histone H3 [Arabidopsis thaliana]
  misc_feature (1)..(136): Homolog of NCBI NO: 122087 NR Description: Histone H3
  misc_feature (1)..(136): Homolog of NCBI NO: 1362108 NR Description: histone H3 homolog - common tobacco
  misc_feature (1)..(136): Homolog of NCBI NO: 166384 NR Description: histone H3 (H3-1.1)
  misc_feature (1)..(136): Homolog of NCBI NO: 37546835 NR Description: similar to histone protein Hist2h3c1 [Homo
  misc_feature (1)..(136): Homolog of NCBI NO: 122070 NR Description: Histone H3
  misc_feature (2)..(136): Homolog of NCBI NO: 70753 NR Description: histone H3 - garden pea (tentative sequence)
  misc_feature (1)..(136): Homolog of NCBI NO: 166384 NR Description: histone H3 (H3-1.1)
  misc_feature (1)..(136): Homolog of NCBI NO: 1362108 NR Description: histone H3 homolog - common tobacco
  misc_feature (1)..(136): Homolog of NCBI NO: 122087 NR Description: Histone H3
  misc_feature (1)..(136): Homolog of NCBI NO: 15232146 NR Description: histone H3 [Arabidopsis thaliana]

SEQ ID NO: 27054 - protein, 83 aa, Arabidopsis thaliana; identical to SEQ ID NO: 22254
  peptide (1)..(83): Ceres Seq. ID no. 13580412

SEQ ID NO: 27055 - DNA, 725 bp, Arabidopsis thaliana
  misc_feature (1)..(725): Ceres Seq. ID no. 12332438
  misc_feature: MA Experiment ID: 20000072 Result: Up-regulated in Transcription
  misc_feature: MA Experiment 20000072 PARAMETER Experiment Name: At_100uM_ABA_Mutants_cDNA_P Parameter: Plant Line Value: CS8105
  misc_feature: MA Experiment 20000072 PARAMETER Experiment Name: At_100uM_ABA_Mutants_cDNA_P Parameter: Timepoint (hr) Value: 6
  misc_feature: MA Experiment 20000072 PARAMETER Experiment Name: At_100uM_ABA_Mutants_cDNA_P Parameter: Tissue Value: Aerial
  misc_feature: MA Experiment 20000072 PARAMETER Experiment Name: At_100uM_ABA_Mutants_cDNA_P Parameter: Treatment Value: 100uM ABA vs. No Treatment
  misc_feature: MA Experiment ID: 20000086 Result: Up-regulated in Transcription
  misc_feature: MA Experiment 20000086 PARAMETER Experiment Name: At_100uM_ABA_Mutants_cDNA_P Parameter: Plant Line Value: CS22
  misc_feature: MA Experiment 20000086 PARAMETER Experiment Name: At_100uM_ABA_Mutants_cDNA_P Parameter: Timepoint (hr) Value: 6
  misc_feature: MA Experiment 20000086 PARAMETER Experiment Name: At_100uM_ABA_Mutants_cDNA_P Parameter: Tissue Value: Aerial
  misc_feature: MA Experiment 20000086 PARAMETER Experiment Name: At_100uM_ABA_Mutants_cDNA_P Parameter: Treatment Value: 100uM ABA vs. No Treatment
  misc_feature: MA Experiment ID: 20000087 Result: Up-regulated in Transcription
  misc_feature: MA Experiment 20000087 PARAMETER Experiment Name: At_100uM_ABA_Mutants_cDNA_P Parameter: Plant Line Value: WS
  misc_feature: MA Experiment 20000087 PARAMETER Experiment Name: At_100uM_ABA_Mutants_cDNA_P Parameter: Timepoint (hr) Value: 6
  misc_feature: MA Experiment 20000087 PARAMETER Experiment Name: At_100uM_ABA_Mutants_cDNA_P Parameter: Tissue Value: Aerial
  misc_feature: MA Experiment 20000087 PARAMETER Experiment Name: At_100uM_ABA_Mutants_cDNA_P Parameter: Treatment Value: 100uM ABA vs. No Treatment
  misc_feature: MA Experiment ID: 20000185 Result: Up-regulated in Transcription
  misc_feature: MA Experiment 20000185 PARAMETER Experiment Name: At_Roots__P Parameter: Age (day) Value: 7 vs. 21
  misc_feature: MA Experiment 20000185 PARAMETER Experiment Name: At_Roots__P Parameter: Organism Value: A. thaliana
  misc_feature: MA Experiment 20000185 PARAMETER Experiment Name: At_Roots__P Parameter: Tissue Value: Roots vs. Whole Plant
  misc_feature: MA Experiment ID: 20000234 Result: Up-regulated in Transcription
  misc_feature: MA Experiment 20000234 PARAMETER Experiment Name: At_Siliques_P Parameter: Age (day) Value: 21
  misc_feature: MA Experiment 20000234 PARAMETER Experiment Name: At_Siliques_P Parameter: Organism Value: A. thaliana
  misc_feature: MA Experiment 20000234 PARAMETER Experiment Name: At_Siliques_P Parameter: Plant Line Value: WS
  misc_feature: MA Experiment 20000234 PARAMETER Experiment Name: At_Siliques_P Parameter: Tissue Value: Less Than 5mm Siliques vs. Whole Plant
  misc_feature: MA Experiment ID: 20000235 Result: Up-regulated in Transcription
  misc_feature: MA Experiment 20000235 PARAMETER Experiment Name: At_Siliques_P Parameter: Age (day) Value: 21
  misc_feature: MA Experiment 20000235 PARAMETER Experiment Name: At_Siliques_P Parameter: Organism Value: A. thaliana
  misc_feature: MA Experiment 20000235 PARAMETER Experiment Name: At_Siliques_P Parameter: Plant Line Value: WS
  misc_feature: MA Experiment 20000235 PARAMETER Experiment Name: At_Siliques_P Parameter: Tissue Value: 5-10mm Siliques vs. Whole Plant
  misc_feature: MA Experiment ID: 20000265 Result: Up-regulated in Transcription
  misc_feature: MA Experiment 20000265 PARAMETER Experiment Name: At_Open_Flower_P Parameter: Age (day) Value: 21
  misc_feature: MA Experiment 20000265 PARAMETER Experiment Name: At_Open_Flower_P Parameter: Plant Line Value: WS
  misc_feature: MA Experiment 20000265 PARAMETER Experiment Name: At_Open_Flower_P Parameter: Tissue Value: Closed Flower vs. Whole Plant
  misc_feature: MA Experiment ID: 20000439 Result: Up-regulated in Transcription
  misc_feature: MA Experiment 20000439 PARAMETER Experiment Name: At_Roots__P Parameter: Age (day) Value: 14 vs. 21
  misc_feature: MA Experiment 20000439 PARAMETER Experiment Name: At_Roots__P Parameter: Organism Value: A. thaliana
  misc_feature: MA Experiment 20000439 PARAMETER Experiment Name: At_Roots__P Parameter: Tissue Value: Roots vs. Whole Plant
  misc_feature: MA Experiment ID: 20001557 Result: Up-regulated in Transcription
  misc_feature: MA Experiment 20001557 PARAMETER Experiment Name: At_Drought_Soil_Dry_P Parameter: Age (day) Value: 27
  misc_feature: MA Experiment 20001557 PARAMETER Experiment Name: At_Drought_Soil_Dry_P Parameter: Organism Value: A. thaliana
  misc_feature: MA Experiment 20001557 PARAMETER Experiment Name: At_Drought_Soil_Dry_P Parameter: Plant Line Value: WS
  misc_feature: MA Experiment 20001557 PARAMETER Experiment Name: At_Drought_Soil_Dry_P Parameter: Post Timepoint (hr) Value: 3
  misc_feature: MA Experiment 20001557 PARAMETER Experiment Name: At_Drought_Soil_Dry_P Parameter: Post-Treatment Value: Re-Water vs. No Drought
  misc_feature: MA Experiment 20001557 PARAMETER Experiment Name: At_Drought_Soil_Dry_P Parameter: Timepoint (day) Value: 13
  misc_feature: MA Experiment 20001557 PARAMETER Experiment Name: At_Drought_Soil_Dry_P Parameter: Treatment Value: Drought vs. No Drought
  misc_feature: MA Experiment ID: 20001560 Result: Up-regulated in Transcription
  misc_feature: MA Experiment 20001560 PARAMETER Experiment Name: At_Drought_Soil_Dry_P Parameter: Age (day) Value: 28
  misc_feature: MA Experiment 20001560 PARAMETER Experiment Name: At_Drought_Soil_Dry_P Parameter: Organism Value: A. thaliana
  misc_feature: MA Experiment 20001560 PARAMETER Experiment Name: At_Drought_Soil_Dry_P Parameter: Plant Line Value: WS
  misc_feature: MA Experiment 20001560 PARAMETER Experiment Name: At_Drought_Soil_Dry_P Parameter: Post Timepoint (hr) Value: None
  misc_feature: MA Experiment 20001560 PARAMETER Experiment Name: At_Drought_Soil_Dry_P Parameter: Post-Treatment Value: None
  misc_feature: MA Experiment 20001560 PARAMETER Experiment Name: At_Drought_Soil_Dry_P Parameter: Timepoint (day) Value: 14
  misc_feature: MA Experiment 20001560 PARAMETER Experiment Name: At_Drought_Soil_Dry_P Parameter: Treatment Value: Drought vs. No Drought
gttcatcttttgattttgaaattgttagtaaagaaagaaaaaaagctttgatttcgatttctcaagctgtgtttttttatttttcttcttcgcatcaggaaggaattgaaaaagatttttggtgttaaaagatggatccagatgcagtcaaatcgactctctcgaatctagcatttggaaatgtaatggcggctgctgcaagaaattatcaaaaggaagttcttgcaaatgagaaggcgcaaggatcaaatcctgttaatgaagaggttgatgttgatgaacttatggatgatccagagctagaaagattgcacgcagataggattgcagcactaaagagagaggttgagaagagagaatcgtttaaaagacaagggcatggtgaatatcgagaggtgagtgaaggagatttcttgggtgaagtcaccaggagtgagaaagtgatatgtcatttctaccataaggaattttaccggtgcaagattatggacaagcatctgaaaactcttgcacctagacatgtggacacaaagttcattaaagtggacgcagagaatgctcctttctttgtcacgaagcttgcaataaagactttgccttgcgttgtgcttttcagcaagggagtcgcgatggataggctagttgggttccaggatctgggaaccaaggacgatttcacaacgaataaactagagaacgttcttcttaaaaagggaatgctcagc

SEQ ID NO: 27056 - protein, 198 aa, Arabidopsis thaliana
  peptide (1)..(198): Ceres Seq. ID no. 12332439
  misc_feature (20)..(188): Homolog of NCBI NO: 2342477 NR Description: ATP binding protein [Homo sapiens]
  misc_feature (19)..(188): Homolog of NCBI NO: 28277604 NR Description: Similar to ATP binding protein associated with
  misc_feature (29)..(188): Homolog of NCBI NO: 25282435 NR Description: ES cell-related protein; ATP binding protein
  misc_feature (20)..(188): Homolog of NCBI NO: 19683948 NR Description: Similar to ATP binding protein associated with
  misc_feature (20)..(188): Homolog of NCBI NO: 18104959 NR Description: ATP binding protein associated with cell
  misc_feature (29)..(188): Homolog of NCBI NO: 25286717 NR Description: ATP binding protein associated with cell
  misc_feature (19)..(194): Homolog of NCBI NO: 7485705 NR Description: hypothetical protein F18B3.240 - Arabidopsis
  misc_feature (1)..(197): Homolog of NCBI NO: 10177522 NR Description: contains similarity to ATP binding protein
  misc_feature (1)..(197): Homolog of NCBI NO: 18425069 NR Description: putative protein
  misc_feature (1)..(197): Homolog of NCBI NO: 30693386 NR Description: expressed protein [Arabidopsis thaliana]
MDPDAVKSTLSNLAFGNVMAAAARNYQKEVLANEKAQGSNPVNEEVDVDELMDDPELERLHADRIAALKREVEKRESFKRQGHGEYREVSEGDFLGEVTRSEKVICHFYHKEFYRCKIMDKHLKTLAPRHVDTKFIKVDAENAPFFVTKLAIKTLPCVVLFSKGVAMDRLVGFQDLGTKDDFTTNKLENVLLKKGMLS

SEQ ID NO: 27057 - protein, 180 aa, Arabidopsis thaliana
  peptide (1)..(180): Ceres Seq. ID no. 12332440
  misc_feature (1)..(179): Homolog of NCBI NO: 10177522 NR Description: contains similarity to ATP binding protein
  misc_feature (1)..(179): Homolog of NCBI NO: 18425069 NR Description: putative protein
  misc_feature (1)..(179): Homolog of NCBI NO: 30693386 NR Description: expressed protein [Arabidopsis thaliana]
  misc_feature (2)..(170): Homolog of NCBI NO: 2342477 NR Description: ATP binding protein [Homo sapiens]
  misc_feature (1)..(170): Homolog of NCBI NO: 28277604 NR Description: Similar to ATP binding protein associated with
  misc_feature (11)..(170): Homolog of NCBI NO: 25282435 NR Description: ES cell-related protein; ATP binding protein
  misc_feature (2)..(170): Homolog of NCBI NO: 19683948 NR Description: Similar to ATP binding protein associated with
  misc_feature (2)..(170): Homolog of NCBI NO: 18104959 NR Description: ATP binding protein associated with cell
  misc_feature (11)..(170): Homolog of NCBI NO: 25286717 NR Description: ATP binding protein associated with cell
  misc_feature (1)..(176): Homolog of NCBI NO: 7485705 NR Description: hypothetical protein F18B3.240 - Arabidopsis
MAAAARNYQKEVLANEKAQGSNPVNEEVDVDELMDDPELERLHADRIAALKREVEKRESFKRQGHGEYREVSEGDFLGEVTRSEKVICHFYHKEFYRCKIMDKHLKTLAPRHVDTKFIKVDAENAPFFVTKLAIKTLPCVVLFSKGVAMDRLVGFQDLGTKDDFTTNKLENVLLKKGMLS

SEQ ID NO: 27058 - protein, 147 aa, Arabidopsis thaliana
  peptide (1)..(147): Ceres Seq. ID no. 12332441
  misc_feature (1)..(137): Homolog of NCBI NO: 2342477 NR Description: ATP binding protein [Homo sapiens]
  misc_feature (1)..(137): Homolog of NCBI NO: 28277604 NR Description: Similar to ATP binding protein associated with
  misc_feature (1)..(137): Homolog of NCBI NO: 25282435 NR Description: ES cell-related protein; ATP binding protein
  misc_feature (1)..(137): Homolog of NCBI NO: 19683948 NR Description: Similar to ATP binding protein associated with
  misc_feature (1)..(137): Homolog of NCBI NO: 18104959 NR Description: ATP binding protein associated with cell
  misc_feature (1)..(137): Homolog of NCBI NO: 25286717 NR Description: ATP binding protein associated with cell
  misc_feature (1)..(143): Homolog of NCBI NO: 7485705 NR Description: hypothetical protein F18B3.240 - Arabidopsis
  misc_feature (1)..(146): Homolog of NCBI NO: 10177522 NR Description: contains similarity to ATP binding protein
  misc_feature (1)..(146): Homolog of NCBI NO: 18425069 NR Description: putative protein
  misc_feature (1)..(146): Homolog of NCBI NO: 30693386 NR Description: expressed protein [Arabidopsis thaliana]
MDDPELERLHADRIAALKREVEKRESFKRQGHGEYREVSEGDFLGEVTRSEKVICHFYHKEFYRCKIMDKHLKTLAPRHVDTKFIKVDAENAPFFVTKLAIKTLPCVVLFSKGVAMDRLVGFQDLGTKDDFTTNKLENVLLKKGMLS

SEQ ID NO: 27059 - DNA, 750 bp, Arabidopsis thaliana
  misc_feature (1)..(750): Ceres Seq. ID no. 12420752
  misc_feature: MA Experiment ID: 108595 Result: Down-regulated in Transcription
  misc_feature: MA Experiment 108595 PARAMETER Experiment Name: At_Ler-pi_Ovule_cDNA_P Parameter: Plant Line Value: null
  misc_feature: MA Experiment ID: 20000184 Result: Up-regulated in Transcription
  misc_feature: MA Experiment 20000184 PARAMETER Experiment Name: At_Shoots__P Parameter: Age (day) Value: 7
  misc_feature: MA Experiment 20000184 PARAMETER Experiment Name: At_Shoots__P Parameter: Tissue Value: Shoots vs. Whole Plant
  misc_feature: MA Experiment ID: 20000185 Result: Down-regulated in Transcription
  misc_feature: MA Experiment 20000185 PARAMETER Experiment Name: At_Roots__P Parameter: Age (day) Value: 7 vs. 21
  misc_feature: MA Experiment 20000185 PARAMETER Experiment Name: At_Roots__P Parameter: Organism Value: A. thaliana
  misc_feature: MA Experiment 20000185 PARAMETER Experiment Name: At_Roots__P Parameter: Tissue Value: Roots vs. Whole Plant
  misc_feature: MA Experiment ID: 20000439 Result: Down-regulated in Transcription
  misc_feature: MA Experiment 20000439 PARAMETER Experiment Name: At_Roots__P Parameter: Age (day) Value: 14 vs. 21
  misc_feature: MA Experiment 20000439 PARAMETER Experiment Name: At_Roots__P Parameter: Organism Value: A. thaliana
  misc_feature: MA Experiment 20000439 PARAMETER Experiment Name: At_Roots__P Parameter: Tissue Value: Roots vs. Whole Plant
acacatttttttttcttcactcggactgatatgagtagccaaatcgctttgtcaccggccatcgccgccgccattcgccgtccgtcctctcacgactgtctatccgcttccgccactactgttaccgccacccccatggctctcaaatcttgcatcgtcgcacctctctcgctattcacctctcaatctcaaatcaaacactcaagctcaagaaaaacttctcgaaccacgattcgatgcgatgtagcgataaaatccgcagattcgataaacgcagacgccaatccttcgtcctcaccgtcatcagaggaagaaatcgaagcggaagcgaaggcgaagataggatctagggttagagtaactgcaccgttgaaggtttatcatgtaaatcgagttccagaggttgatttagaaggtatggaaggtaaactcaaagattacgttgctgtttggaaagggaaacgaatctcagctaatcttccttataagattgagttcttcaaagaaattgaaggtcgtggtcttgttaaatttgtttcacatcttaaggaagatgagttcgagttcattgatcagtgatgaaacaagaaagacaatttttgttttcctttctcagtgtttgtttttgtttgttgtgtttactggaacctgggaatggagaatgatttgtatgtagtgtgatgtgtattcaacctttagcaatcatatacataagggtgtcttcactctctgtttatgttgatttgattc

SEQ ID NO: 27060 - protein, 192 aa, Arabidopsis thaliana
  peptide (1)..(192): Ceres Seq. ID no. 12420753
  misc_feature (113)..(190): Homolog of NCBI NO: 17229961 NR Description: ferredoxin-thioredoxin reductase variable subunit
  misc_feature (107)..(191): Homolog of NCBI NO: 1362192 NR Description: ferredoxin-thioredoxin reductase (EC 1.18.-.-)
  misc_feature (60)..(191): Homolog of NCBI NO: 38346617 NR Description: OSJNBa0074L08.8 [Oryza sativa (japonica
  misc_feature (107)..(191): Homolog of NCBI NO: 2498397 NR Description: FERREDOXIN-THIOREDOXIN REDUCTASE, VARIABLE CHAIN
  misc_feature (34)..(190): Homolog of NCBI NO: 729538 NR Description: Ferredoxin-thioredoxin reductase, variable chain, precursor (FTR-V) (Ferredoxin-thioredoxin reductase subunit A)
  misc_feature (34)..(190): Homolog of NCBI NO: 505186 NR Description: ferredoxin-thioredoxin reductase SU A [Spinacia
  misc_feature (63)..(191): Homolog of NCBI NO: 14275856 NR Description: subunit A of ferredoxin-thioredoxin-reductase
  misc_feature (11)..(191): Homolog of NCBI NO: 18415805 NR Description: Expressed protein
  misc_feature (11)..(191): Homolog of NCBI NO: 10178283 NR Description: lipoic acid synthase-like protein [Arabidopsis
  misc_feature (11)..(192): Homolog of NCBI NO: 15237763 NR Description: putative protein; protein id: At5g23440.1
THFFFFTRTDMSSQIALSPAIAAAIRRPSSHDCLSASATTVTATPMALKSCIVAPLSLFTSQSQIKHSSSRKTSRTTIRCDVAIKSADSINADANPSSSPSSEEEIEAEAKAKIGSRVRVTAPLKVYHVNRVPEVDLEGMEGKLKDYVAVWKGKRISANLPYKIEFFKEIEGRGLVKFVSHLKEDEFEFIDQ

SEQ ID NO: 27061 - protein, 182 aa, Arabidopsis thaliana
  peptide (1)..(182): Ceres Seq. ID no. 12420754
  misc_feature (103)..(180): Homolog of NCBI NO: 17229961 NR Description: ferredoxin-thioredoxin reductase variable subunit
  misc_feature (97)..(181): Homolog of NCBI NO: 1362192 NR Description: ferredoxin-thioredoxin reductase (EC 1.18.-.-)
  misc_feature (50)..(181): Homolog of NCBI NO: 38346617 NR Description: OSJNBa0074L08.8 [Oryza sativa (japonica
  misc_feature (97)..(181): Homolog of NCBI NO: 2498397 NR Description: FERREDOXIN-THIOREDOXIN REDUCTASE, VARIABLE CHAIN
  misc_feature (24)..(180): Homolog of NCBI NO: 729538 NR Description: Ferredoxin-thioredoxin reductase, variable chain, precursor (FTR-V) (Ferredoxin-thioredoxin reductase subunit A)
  misc_feature (24)..(180): Homolog of NCBI NO: 505186 NR Description: ferredoxin-thioredoxin reductase SU A [Spinacia
  misc_feature (53)..(181): Homolog of NCBI NO: 14275856 NR Description: subunit A of ferredoxin-thioredoxin-reductase
  misc_feature (1)..(181): Homolog of NCBI NO: 18415805 NR Description: Expressed protein
  misc_feature (1)..(181): Homolog of NCBI NO: 10178283 NR Description: lipoic acid synthase-like protein [Arabidopsis
  misc_feature (1)..(182): Homolog of NCBI NO: 15237763 NR Description: putative protein; protein id: At5g23440.1
MSSQIALSPAIAAAIRRPSSHDCLSASATTVTATPMALKSCIVAPLSLFTSQSQIKHSSSRKTSRTTIRCDVAIKSADSINADANPSSSPSSEEEIEAEAKAKIGSRVRVTAPLKVYHVNRVPEVDLEGMEGKLKDYVAVWKGKRISANLPYKIEFFKEIEGRGLVKFVSHLKEDEFEFIDQ

SEQ ID NO: 27062 - protein, 147 aa, Arabidopsis thaliana
  peptide (1)..(147): Ceres Seq. ID no. 12420755
  misc_feature (68)..(145): Homolog of NCBI NO: 17229961 NR Description: ferredoxin-thioredoxin reductase variable subunit
  misc_feature (62)..(146): Homolog of NCBI NO: 1362192 NR Description: ferredoxin-thioredoxin reductase (EC 1.18.-.-)
  misc_feature (15)..(146): Homolog of NCBI NO: 38346617 NR Description: OSJNBa0074L08.8 [Oryza sativa (japonica
  misc_feature (62)..(146): Homolog of NCBI NO: 2498397 NR Description: FERREDOXIN-THIOREDOXIN REDUCTASE, VARIABLE CHAIN
  misc_feature (1)..(145): Homolog of NCBI NO: 729538 NR Description: Ferredoxin-thioredoxin reductase, variable chain, precursor (FTR-V) (Ferredoxin-thioredoxin reductase subunit A)
  misc_feature (1)..(145): Homolog of NCBI NO: 505186 NR Description: ferredoxin-thioredoxin reductase SU A [Spinacia
  misc_feature (18)..(146): Homolog of NCBI NO: 14275856 NR Description: subunit A of ferredoxin-thioredoxin-reductase
  misc_feature (1)..(146): Homolog of NCBI NO: 18415805 NR Description: Expressed protein
  misc_feature (1)..(146): Homolog of NCBI NO: 10178283 NR Description: lipoic acid synthase-like protein [Arabidopsis
  misc_feature (1)..(147): Homolog of NCBI NO: 15237763 NR Description: putative protein; protein id: At5g23440.1
MALKSCIVAPLSLFTSQSQIKHSSSRKTSRTTIRCDVAIKSADSINADANPSSSPSSEEEIEAEAKAKIGSRVRVTAPLKVYHVNRVPEVDLEGMEGKLKDYVAVWKGKRISANLPYKIEFFKEIEGRGLVKFVSHLKEDEFEFIDQ

SEQ ID NO: 27063 - DNA, 1024 bp, Arabidopsis thaliana
  misc_feature (1)..(1024): Ceres Seq. ID no. 12394829
  misc_feature: MA Experiment ID: 108595 Result: Down-regulated in Transcription
  misc_feature: MA Experiment 108595 PARAMETER Experiment Name: At_Ler-pi_Ovule_cDNA_P Parameter: Plant Line Value: null
  misc_feature: MA Experiment ID: 20000185 Result: Down-regulated in Transcription
  misc_feature: MA Experiment 20000185 PARAMETER Experiment Name: At_Roots__P Parameter: Age (day) Value: 7 vs. 21
  misc_feature: MA Experiment 20000185 PARAMETER Experiment Name: At_Roots__P Parameter: Organism Value: A. thaliana
  misc_feature: MA Experiment 20000185 PARAMETER Experiment Name: At_Roots__P Parameter: Tissue Value: Roots vs. Whole Plant
  misc_feature: MA Experiment ID: 20000439 Result: Down-regulated in Transcription
  misc_feature: MA Experiment 20000439 PARAMETER Experiment Name: At_Roots__P Parameter: Age (day) Value: 14 vs. 21
  misc_feature: MA Experiment 20000439 PARAMETER Experiment Name: At_Roots__P Parameter: Organism Value: A. thaliana
  misc_feature: MA Experiment 20000439 PARAMETER Experiment Name: At_Roots__P Parameter: Tissue Value: Roots vs. Whole Plant
  misc_feature: Phenotype: WHOLE PLANT Color-Yellow-Green Viable 3
  misc_feature: Phenotype: WHOLE PLANT Color-Yellow-Green Viable 3
  misc_feature: Phenotype: WHOLE PLANT Color-Yellow-Green Viable 3
  misc_feature: Phenotype: WHOLE PLANT Color-Yellow-Green Viable 3
  misc_feature: Phenotype: WHOLE PLANT Color-Yellow-Green Viable 3
acttcttctagtcttaaaataaaacaaacaaaaaaatcagtgttcggctctaacacgctcgacgaccatggcggtctcgtttaatacaacgcttcaccagccttctctgagtcccagctgtagcatcaagctttattctgggttaaagcctcaatctgcaagctttttggcaagtgggtatcagaatttgaataaggagttctatggaagagttcataagagtctgcaatctgggactggcaaagcgagcaggtcacgggtaaagatgatgccaataggaacaccgagagtgccctacagaaaccgtgaagaaggcacttggcaatgggttgatatatggaatgccctttatcgagagcgtgtaatcttcattggacaaaacattgatgaagagtttagcaaccagatattagcaaccatgttgtaccttgatactcttgatgactcgaggaggatttatatgtacctaaatggtccgggtggtgatcttactccaagtctagccatctatgatacaatgaagagcttgaaaagtccggttgggacacattgcgttgggcttgcttacaaccttgcaggttttcttcttgcggctggagaaaagggtcaccgatttgcgatgccattgtcaagaatcgccctccaatcaccagctggtgcagcccgtggccaggctgatgatatccaaaatgaagcaaaagagctttcaaggataagagactacctcttcaatgaactagccaagaatacaggccagcctgcggaaagggtcttcaaagacttgagccgggtgaaaaggttcaatgcagaggaagcaatcgagtatggacttattgataagattgttagaccaccgcgcatcaaagaagacgctcctcgccaagacgaaagcgcagggctaggctagtcttttttgtttgtttgttatgtcaaaagttttaatctttatgttattgtgattgtgattgttacctaaaaaaatcactgattattgttttttcattccaccgattttctgatttct

SEQ ID NO: 27064 - protein, 279 aa, Arabidopsis thaliana
  peptide (1)..(279): Ceres Seq. ID no. 12394830
  misc_feature (79)..(263): Pfam Name: Clp protease Pfam Description: Clp protease
  misc_feature (75)..(268): Homolog of NCBI NO: 29840675 NR Description: ATP-dependent Clp protease, proteolytic subunit
  misc_feature (68)..(263): Homolog of NCBI NO: 33240837 NR Description: Protease subunit of ATP-dependent Clp protease
  misc_feature (68)..(260): Homolog of NCBI NO: 23043112 NR Description: hypothetical protein [Trichodesmium erythraeum
  misc_feature (68)..(262): Homolog of NCBI NO: 18203213 NR Description: ATP-dependent Clp protease proteolytic subunit 3
  misc_feature (68)..(260): Homolog of NCBI NO: 23126722 NR Description: hypothetical protein [Nostoc punctiforme]
  misc_feature (68)..(260): Homolog of NCBI NO: 17231849 NR Description: ATP-dependent Clp protease proteolytic subunit
  misc_feature (43)..(260): Homolog of NCBI NO: 13812170 NR Description: ATP-dependent Clp protease proteolytic subunit
  misc_feature (68)..(260): Homolog of NCBI NO: 22298615 NR Description: ATP-dependent Clp protease proteolytic subunit 2
  misc_feature (1)..(279): Homolog of NCBI NO: 16209712 NR Description: At1g12410/F5O11_7 [Arabidopsis thaliana]
  misc_feature (1)..(279): Homolog of NCBI NO: 18391391 NR Description: ATP-dependent Clp protease proteolytic subunit
MAVSFNTTLHQPSLSPSCSIKLYSGLKPQSASFLASGYQNLNKEFYGRVHKSLQSGTGKASRSRVKMMPIGTPRVPYRNREEGTWQWVDIWNALYRERVIFIGQNIDEEFSNQILATMLYLDTLDDSRRIYMYLNGPGGDLTPSLAIYDTMKSLKSPVGTHCVGLAYNLAGFLLAAGEKGHRFAMPLSRIALQSPAGAARGQADDIQNEAKELSRIRDYLFNELAKNTGQPAERVFKDLSRVKRFNAEEAIEYGLIDKIVRPPRIKEDAPRQDESAGLG

SEQ ID NO: 27065 - protein, 213 aa, Arabidopsis thaliana; identical to SEQ ID NO: 26213
  peptide (1)..(213): Ceres Seq. ID no. 12394831
  misc_feature (13)..(197): Pfam Name: Clp protease Pfam Description: Clp protease
  misc_feature (9)..(202): Homolog of NCBI NO: 29840675 NR Description: ATP-dependent Clp protease, proteolytic subunit
  misc_feature (2)..(197): Homolog of NCBI NO: 33240837 NR Description: Protease subunit of ATP-dependent Clp protease
  misc_feature (2)..(194): Homolog of NCBI NO: 23043112 NR Description: hypothetical protein [Trichodesmium erythraeum
  misc_feature (2)..(196): Homolog of NCBI NO: 18203213 NR Description: ATP-dependent Clp protease proteolytic subunit 3
  misc_feature (2)..(194): Homolog of NCBI NO: 23126722 NR Description: hypothetical protein [Nostoc punctiforme]
  misc_feature (2)..(194): Homolog of NCBI NO: 17231849 NR Description: ATP-dependent Clp protease proteolytic subunit
  misc_feature (1)..(194): Homolog of NCBI NO: 13812170 NR Description: ATP-dependent Clp protease proteolytic subunit
  misc_feature (2)..(194): Homolog of NCBI NO: 22298615 NR Description: ATP-dependent Clp protease proteolytic subunit 2
  misc_feature (1)..(213): Homolog of NCBI NO: 16209712 NR Description: At1g12410/F5O11_7 [Arabidopsis thaliana]
  misc_feature (1)..(213): Homolog of NCBI NO: 18391391 NR Description: ATP-dependent Clp protease proteolytic subunit

SEQ ID NO: 27066 - protein, 212 aa, Arabidopsis thaliana
  peptide (1)..(212): Ceres Seq. ID no. 12394832
  misc_feature (12)..(196): Pfam Name: Clp protease Pfam Description: Clp protease
  misc_feature (8)..(201): Homolog of NCBI NO: 29840675 NR Description: ATP-dependent Clp protease, proteolytic subunit
  misc_feature (1)..(196): Homolog of NCBI NO: 33240837 NR Description: Protease subunit of ATP-dependent Clp protease
  misc_feature (1)..(193): Homolog of NCBI NO: 23043112 NR Description: hypothetical protein [Trichodesmium erythraeum
  misc_feature (1)..(195): Homolog of NCBI NO: 18203213 NR Description: ATP-dependent Clp protease proteolytic subunit 3
  misc_feature (1)..(193): Homolog of NCBI NO: 23126722 NR Description: hypothetical protein [Nostoc punctiforme]
  misc_feature (1)..(193): Homolog of NCBI NO: 17231849 NR Description: ATP-dependent Clp protease proteolytic subunit
  misc_feature (1)..(193): Homolog of NCBI NO: 13812170 NR Description: ATP-dependent Clp protease proteolytic subunit
  misc_feature (1)..(193): Homolog of NCBI NO: 22298615 NR Description: ATP-dependent Clp protease proteolytic subunit 2
  misc_feature (1)..(212): Homolog of NCBI NO: 16209712 NR Description: At1g12410/F5O11_7 [Arabidopsis thaliana]
  misc_feature (1)..(212): Homolog of NCBI NO: 18391391 NR Description: ATP-dependent Clp protease proteolytic subunit
MPIGTPRVPYRNREEGTWQWVDIWNALYRERVIFIGQNIDEEFSNQILATMLYLDTLDDSRRIYMYLNGPGGDLTPSLAIYDTMKSLKSPVGTHCVGLAYNLAGFLLAAGEKGHRFAMPLSRIALQSPAGAARGQADDIQNEAKELSRIRDYLFNELAKNTGQPAERVFKDLSRVKRFNAEEAIEYGLIDKIVRPPRIKEDAPRQDESAGLG

SEQ ID NO: 27067 - DNA, 763 bp, Arabidopsis thaliana
  misc_feature (1)..(763): Ceres Seq. ID no. 12482010
  misc_feature: MA Experiment ID: 108462 Result: Down-regulated in Transcription
  misc_feature: MA Experiment 108462 PARAMETER Experiment Name: At_Germinating_Seeds_cDNA_P Parameter: Age (day) Value: 2 vs. 0
  misc_feature: MA Experiment 108462 PARAMETER Experiment Name: At_Germinating_Seeds_cDNA_P Parameter: Tissue Value: Germinating Seeds
  misc_feature: MA Experiment ID: 108463 Result: Down-regulated in Transcription
  misc_feature: MA Experiment 108463 PARAMETER Experiment Name: At_Germinating_Seeds_cDNA_P Parameter: Age (day) Value: 3 vs. 0
  misc_feature: MA Experiment 108463 PARAMETER Experiment Name: At_Germinating_Seeds_cDNA_P Parameter: Tissue Value: Germinating Seeds
  misc_feature: MA Experiment ID: 108464 Result: Down-regulated in Transcription
  misc_feature: MA Experiment 108464 PARAMETER Experiment Name: At_Germinating_Seeds_cDNA_P Parameter: Age (day) Value: 4 vs. 0
  misc_feature: MA Experiment 108464 PARAMETER Experiment Name: At_Germinating_Seeds_cDNA_P Parameter: Tissue Value: Germinating Seeds
  misc_feature: MA Experiment ID: 20000071 Result: Down-regulated in Transcription
  misc_feature: MA Experiment 20000071 PARAMETER Experiment Name: At_100uM_ABA_Mutants_cDNA_P Parameter: Plant Line Value: CS8104
  misc_feature: MA Experiment 20000071 PARAMETER Experiment Name: At_100uM_ABA_Mutants_cDNA_P Parameter: Timepoint (hr) Value: 6
  misc_feature: MA Experiment 20000071 PARAMETER Experiment Name: At_100uM_ABA_Mutants_cDNA_P Parameter: Tissue Value: Aerial
  misc_feature: MA Experiment 20000071 PARAMETER Experiment Name: At_100uM_ABA_Mutants_cDNA_P Parameter: Treatment Value: 100uM ABA vs. No Treatment
  misc_feature: MA Experiment ID: 20000072 Result: Down-regulated in Transcription
  misc_feature: MA Experiment 20000072 PARAMETER Experiment Name: At_100uM_ABA_Mutants_cDNA_P Parameter: Plant Line Value: CS8105
  misc_feature: MA Experiment 20000072 PARAMETER Experiment Name: At_100uM_ABA_Mutants_cDNA_P Parameter: Timepoint (hr) Value: 6
  misc_feature: MA Experiment 20000072 PARAMETER Experiment Name: At_100uM_ABA_Mutants_cDNA_P Parameter: Tissue Value: Aerial
  misc_feature: MA Experiment 20000072 PARAMETER Experiment Name: At_100uM_ABA_Mutants_cDNA_P Parameter: Treatment Value: 100uM ABA vs. No Treatment
  misc_feature: MA Experiment ID: 20000113 Result: Up-regulated in Transcription
  misc_feature: MA Experiment 20000113 PARAMETER Experiment Name: At_42deg_Heat_cDNA_P Parameter: Temperature (deg C) Value: 42 vs. 22
  misc_feature: MA Experiment 20000113 PARAMETER Experiment Name: At_42deg_Heat_cDNA_P Parameter: Timepoint (hr) Value: 8
  misc_feature: MA Experiment 20000113 PARAMETER Experiment Name: At_42deg_Heat_cDNA_P Parameter: Tissue Value: Aerial
  misc_feature: MA Experiment ID: 20000224 Result: Down-regulated in Transcription
  misc_feature: MA Experiment ID: 20000437 Result: Down-regulated in Transcription
  misc_feature: MA Experiment 20000437 PARAMETER Experiment Name: At_Drought_P Parameter: Age (day) Value: 8
  misc_feature: MA Experiment 20000437 PARAMETER Experiment Name: At_Drought_P Parameter: Organism Value: A. thaliana
  misc_feature: MA Experiment 20000437 PARAMETER Experiment Name: At_Drought_P Parameter: Plant Line Value: WS
  misc_feature: MA Experiment 20000437 PARAMETER Experiment Name: At_Drought_P Parameter: Timepoint (hr) Value: 24
  misc_feature: MA Experiment 20000437 PARAMETER Experiment Name: At_Drought_P Parameter: Tissue Value: Whole Plant
  misc_feature: MA Experiment 20000437 PARAMETER Experiment Name: At_Drought_P Parameter: Treatment Value: Drought vs. No Drought
  misc_feature: MA Experiment ID: 20000794 Result: Down-regulated in Transcription
  misc_feature: MA Experiment 20000794 PARAMETER Experiment Name: At_Petals_P Parameter: Age (day) Value: 23-25 days
  misc_feature: MA Experiment 20000794 PARAMETER Experiment Name: At_Petals_P Parameter: Plant Line Value: WS
  misc_feature: MA Experiment 20000794 PARAMETER Experiment Name: At_Petals_P Parameter: Tissue Value: Petals vs. Whole plant
acttctgtcgtctctgcaaaaactctctatttctctttcgccggagataatgggagaagggaaggcctccactctggttttcatcctcgtcgtcgctcttagtttagtagccttcggcttctccatcgccgccgagcgccgccgcagcatcgggaaatctattcaagacccaataacaaacacaacgttctgcgtttatgactctgatgtagccactggttatggagttggagctttccttttcctcctctctagtgaatcattgcttatgagtgttaccaaatgcatgtgttttggaagacccttagcccctggaagtgaccgtgcttggtctattatctatttcatctcttcgtggatgacatttctggtagcagaagcttgtgtaatagcaggagcgaccaagaacgcataccacacaaagtacttaagttcgcaaaccttttcgtgtgcatcattgcgtaaaggaattttcattgcaggtgcagtctttatagttgctactatggttcttaatgtctactactacatgtattttaccaagtccgtctcttcgccgcctgctcacaaagccaaccgctctagttccaatattggtatggcgggttatgcataaatgtcaaaaagaggaaatggttagtcatttgcattgtagatgtaagaaaggaaagagattgttgcattgttacaacacttggttactcttatatcttttgcttatatatctcttacttatttatgaaaattttcgctatttgctctc

SEQ ID NO: 27068 - protein, 204 aa, Arabidopsis thaliana
  peptide (1)..(204): Ceres Seq. ID no. 12482011
  misc_feature (22)..(204): Homolog of NCBI NO: 34394069 NR Description: unknown protein [Oryza sativa (japonica
  misc_feature (22)..(185): Homolog of NCBI NO: 18416991 NR Description: Expressed protein
  misc_feature (22)..(203): Homolog of NCBI NO: 38016521 NR Description: fiber protein Fb34 [Gossypium barbadense]
  misc_feature (17)..(204): Homolog of NCBI NO: 18391509 NR Description: expressed protein
  misc_feature (23)..(200): Homolog of NCBI NO: 18408976 NR Description: expressed protein
  misc_feature (22)..(182): Homolog of NCBI NO: 38344206 NR Description: OSJNBa0064G10.22 [Oryza sativa (japonica
  misc_feature (22)..(182): Homolog of NCBI NO: 18404242 NR Description: expressed protein
  misc_feature (22)..(182): Homolog of NCBI NO: 18400781 NR Description: expressed protein
  misc_feature (22)..(196): Homolog of NCBI NO: 21554630 NR Description: unknown [Arabidopsis thaliana]
  misc_feature (22)..(196): Homolog of NCBI NO: 18407003 NR Description: Expressed protein
LLSSLQKLSISLSPEIMGEGKASTLVFILVVALSLVAFGFSIAAERRRSIGKSIQDPITNTTFCVYDSDVATGYGVGAFLFLLSSESLLMSVTKCMCFGRPLAPGSDRAWSIIYFISSWMTFLVAEACVIAGATKNAYHTKYLSSQTFSCASLRKGIFIAGAVFIVATMVLNVYYYMYFTKSVSSPPAHKANRSSSNIGMAGYA

SEQ ID NO: 27069 - protein, 188 aa, Arabidopsis thaliana
  peptide (1)..(188): Ceres Seq. ID no. 12482012
  misc_feature (7)..(184): Homolog of NCBI NO: 18408976 NR Description: expressed protein
  misc_feature (6)..(166): Homolog of NCBI NO: 38344206 NR Description: OSJNBa0064G10.22 [Oryza sativa (japonica
  misc_feature (6)..(166): Homolog of NCBI NO: 18404242 NR Description: expressed protein
  misc_feature (6)..(166): Homolog of NCBI NO: 18400781 NR Description: expressed protein
  misc_feature (6)..(180): Homolog of NCBI NO: 21554630 NR Description: unknown [Arabidopsis thaliana]
  misc_feature (6)..(180): Homolog of NCBI NO: 18407003 NR Description: Expressed protein
  misc_feature (6)..(188): Homolog of NCBI NO: 34394069 NR Description: unknown protein [Oryza sativa (japonica
  misc_feature (6)..(169): Homolog of NCBI NO: 18416991 NR Description: Expressed protein
  misc_feature (6)..(187): Homolog of NCBI NO: 38016521 NR Description: fiber protein Fb34 [Gossypium barbadense]
  misc_feature (1)..(188): Homolog of NCBI NO: 18391509 NR Description: expressed protein
MGEGKASTLVFILVVALSLVAFGFSIAAERRRSIGKSIQDPITNTTFCVYDSDVATGYGVGAFLFLLSSESLLMSVTKCMCFGRPLAPGSDRAWSIIYFISSWMTFLVAEACVIAGATKNAYHTKYLSSQTFSCASLRKGIFIAGAVFIVATMVLNVYYYMYFTKSVSSPPAHKANRSSSNIGMAGYA

SEQ ID NO: 27070 - protein, 115 aa, Arabidopsis thaliana
  peptide (1)..(115): Ceres Seq. ID no. 12482013
  misc_feature (1)..(111): Homolog of NCBI NO: 18408976 NR Description: expressed protein
  misc_feature (1)..(93): Homolog of NCBI NO: 38344206 NR Description: OSJNBa0064G10.22 [Oryza sativa (japonica
  misc_feature (1)..(93): Homolog of NCBI NO: 18404242 NR Description: expressed protein
  misc_feature (1)..(93): Homolog of NCBI NO: 18400781 NR Description: expressed protein
  misc_feature (1)..(107): Homolog of NCBI NO: 21554630 NR Description: unknown [Arabidopsis thaliana]
  misc_feature (1)..(107): Homolog of NCBI NO: 18407003 NR Description: Expressed protein
  misc_feature (1)..(115): Homolog of NCBI NO: 34394069 NR Description: unknown protein [Oryza sativa (japonica
  misc_feature (1)..(96): Homolog of NCBI NO: 18416991 NR Description: Expressed protein
  misc_feature (1)..(114): Homolog of NCBI NO: 38016521 NR Description: fiber protein Fb34 [Gossypium barbadense]
  misc_feature (1)..(115): Homolog of NCBI NO: 18391509 NR Description: expressed protein
MSVTKCMCFGRPLAPGSDRAWSIIYFISSWMTFLVAEACVIAGATKNAYHTKYLSSQTFSCASLRKGIFIAGAVFIVATMVLNVYYYMYFTKSVSSPPAHKANRSSSNIGMAGYA

SEQ ID NO: 27071 - DNA, 2764 bp, Arabidopsis thaliana
  misc_feature (1)..(2764): Ceres Seq. ID no. 13491797
  misc_feature: MA Experiment ID: 108435 Result: Down-regulated in Transcription
  misc_feature: MA Experiment 108435 PARAMETER Experiment Name: At_stm_Mutants_cDNA_P Parameter: Plant Line Value: wt Landsburg vs stm
  misc_feature: MA Experiment 108435 PARAMETER Experiment Name: At_stm_Mutants_cDNA_P Parameter: Tissue Value: Shoot Apical Meristem Region
  misc_feature: MA Experiment ID: 20000069 Result: Up-regulated in Transcription
  misc_feature: MA Experiment 20000069 PARAMETER Experiment Name: At_100uM_ABA_Mutants_cDNA_P Parameter: Plant Line Value: CS23
  misc_feature: MA Experiment 20000069 PARAMETER Experiment Name: At_100uM_ABA_Mutants_cDNA_P Parameter: Timepoint (hr) Value: 6
  misc_feature: MA Experiment 20000069 PARAMETER Experiment Name: At_100uM_ABA_Mutants_cDNA_P Parameter: Tissue Value: Aerial
  misc_feature: MA Experiment 20000069 PARAMETER Experiment Name: At_100uM_ABA_Mutants_cDNA_P Parameter: Treatment Value: 100uM ABA vs. No Treatment
  misc_feature: MA Experiment ID: 20000070 Result: Up-regulated in Transcription
  misc_feature: MA Experiment 20000070 PARAMETER Experiment Name: At_100uM_ABA_Mutants_cDNA_P Parameter: Plant Line Value: CS24
  misc_feature: MA Experiment 20000070 PARAMETER Experiment Name: At_100uM_ABA_Mutants_cDNA_P Parameter: Timepoint (hr) Value: 6
  misc_feature: MA Experiment 20000070 PARAMETER Experiment Name: At_100uM_ABA_Mutants_cDNA_P Parameter: Tissue Value: Aerial
  misc_feature: MA Experiment 20000070 PARAMETER Experiment Name: At_100uM_ABA_Mutants_cDNA_P Parameter: Treatment Value: 100uM ABA vs. No Treatment
  misc_feature: MA Experiment ID: 20000071 Result: Up-regulated in Transcription
  misc_feature: MA Experiment 20000071 PARAMETER Experiment Name: At_100uM_ABA_Mutants_cDNA_P Parameter: Plant Line Value: CS8104
  misc_feature: MA Experiment 20000071 PARAMETER Experiment Name: At_100uM_ABA_Mutants_cDNA_P Parameter: Timepoint (hr) Value: 6
  misc_feature: MA Experiment 20000071 PARAMETER Experiment Name: At_100uM_ABA_Mutants_cDNA_P Parameter: Tissue Value: Aerial
  misc_feature: MA Experiment 20000071 PARAMETER Experiment Name: At_100uM_ABA_Mutants_cDNA_P Parameter: Treatment Value: 100uM ABA vs. No Treatment
  misc_feature: MA Experiment ID: 20000072 Result: Up-regulated in Transcription
  misc_feature: MA Experiment 20000072 PARAMETER Experiment Name: At_100uM_ABA_Mutants_cDNA_P Parameter: Plant Line Value: CS8105
  misc_feature: MA Experiment 20000072 PARAMETER Experiment Name: At_100uM_ABA_Mutants_cDNA_P Parameter: Timepoint (hr) Value: 6
  misc_feature: MA Experiment 20000072 PARAMETER Experiment Name: At_100uM_ABA_Mutants_cDNA_P Parameter: Tissue Value: Aerial
  misc_feature: MA Experiment 20000072 PARAMETER Experiment Name: At_100uM_ABA_Mutants_cDNA_P Parameter: Treatment Value: 100uM ABA vs. No Treatment
  misc_feature: MA Experiment ID: 20000086 Result: Up-regulated in Transcription
  misc_feature: MA Experiment 20000086 PARAMETER Experiment Name: At_100uM_ABA_Mutants_cDNA_P Parameter: Plant Line Value: CS22
  misc_feature: MA Experiment 20000086 PARAMETER Experiment Name: At_100uM_ABA_Mutants_cDNA_P Parameter: Timepoint (hr) Value: 6
  misc_feature: MA Experiment 20000086 PARAMETER Experiment Name: At_100uM_ABA_Mutants_cDNA_P Parameter: Tissue Value: Aerial
  misc_feature: MA Experiment 20000086 PARAMETER Experiment Name: At_100uM_ABA_Mutants_cDNA_P Parameter: Treatment Value: 100uM ABA vs. No Treatment
  misc_feature: MA Experiment ID: 20000087 Result: Up-regulated in Transcription
  misc_feature: MA Experiment 20000087 PARAMETER Experiment Name: At_100uM_ABA_Mutants_cDNA_P Parameter: Plant Line Value: WS
  misc_feature: MA Experiment 20000087 PARAMETER Experiment Name: At_100uM_ABA_Mutants_cDNA_P Parameter: Timepoint (hr) Value: 6
  misc_feature: MA Experiment 20000087 PARAMETER Experiment Name: At_100uM_ABA_Mutants_cDNA_P Parameter: Tissue Value: Aerial
  misc_feature: MA Experiment 20000087 PARAMETER Experiment Name: At_100uM_ABA_Mutants_cDNA_P Parameter: Treatment Value: 100uM ABA vs. No Treatment
  misc_feature: MA Experiment ID: 20000088 Result: Up-regulated in Transcription
  misc_feature: MA Experiment 20000088 PARAMETER Experiment Name: At_100uM_ABA_Mutants_cDNA_P Parameter: Plant Line Value: Landsberg
  misc_feature: MA Experiment 20000088 PARAMETER Experiment Name: At_100uM_ABA_Mutants_cDNA_P Parameter: Timepoint (hr) Value: 6
  misc_feature: MA Experiment 20000088 PARAMETER Experiment Name: At_100uM_ABA_Mutants_cDNA_P Parameter: Tissue Value: Aerial
  misc_feature: MA Experiment 20000088 PARAMETER Experiment Name: At_100uM_ABA_Mutants_cDNA_P Parameter: Treatment Value: 100uM ABA vs. No Treatment
  misc_feature: MA Experiment ID: 20000089 Result: Up-regulated in Transcription
  misc_feature: MA Experiment ID: 20000090 Result: Up-regulated in Transcription
  misc_feature: MA Experiment ID: 20000112 Result: Down-regulated in Transcription
  misc_feature: MA Experiment 20000112 PARAMETER Experiment Name: At_42deg_Heat_cDNA_P Parameter: Temperature (deg C) Value: 42 vs. 22
  misc_feature: MA Experiment 20000112 PARAMETER Experiment Name: At_42deg_Heat_cDNA_P Parameter: Timepoint (hr) Value: 2
  misc_feature: MA Experiment 20000112 PARAMETER Experiment Name: At_42deg_Heat_cDNA_P Parameter: Tissue Value: Aerial
  misc_feature: MA Experiment ID: 20000113 Result: Down-regulated in Transcription
  misc_feature: MA Experiment 20000113 PARAMETER Experiment Name: At_42deg_Heat_cDNA_P Parameter: Temperature (deg C) Value: 42 vs. 22
  misc_feature: MA Experiment 20000113 PARAMETER Experiment Name: At_42deg_Heat_cDNA_P Parameter: Timepoint (hr) Value: 8
  misc_feature: MA Experiment 20000113 PARAMETER Experiment Name: At_42deg_Heat_cDNA_P Parameter: Tissue Value: Aerial
  misc_feature: MA Experiment ID: 20000117 Result: Up-regulated in Transcription
  misc_feature: MA Experiment 20000117 PARAMETER Experiment Name: At_100uM_ABA_Mutants_cDNA_P Parameter: Plant Line Value: Columbia
  misc_feature: MA Experiment 20000117 PARAMETER Experiment Name: At_100uM_ABA_Mutants_cDNA_P Parameter: Timepoint (hr) Value: 6
  misc_feature: MA Experiment 20000117 PARAMETER Experiment Name: At_100uM_ABA_Mutants_cDNA_P Parameter: Tissue Value: Aerial
  misc_feature: MA Experiment 20000117 PARAMETER Experiment Name: At_100uM_ABA_Mutants_cDNA_P Parameter: Treatment Value: 100uM ABA vs. No Treatment
  misc_feature: MA Experiment ID: 20000173 Result: Down-regulated in Transcription
  misc_feature: MA Experiment 20000173 PARAMETER Experiment Name: At_42deg_Heat_P Parameter: Age (day) Value: 14
  misc_feature: MA Experiment 20000173 PARAMETER Experiment Name: At_42deg_Heat_P Parameter: Organism Value: A. thaliana
  misc_feature: MA Experiment 20000173 PARAMETER Experiment Name: At_42deg_Heat_P Parameter: Plant Line Value: WS
  misc_feature: MA Experiment 20000173 PARAMETER Experiment Name: At_42deg_Heat_P Parameter: Temperature (deg C) Value: 42 vs. 22
  misc_feature: MA Experiment 20000173 PARAMETER Experiment Name: At_42deg_Heat_P Parameter: Timepoint (hr) Value: 6
  misc_feature: MA Experiment 20000173 PARAMETER Experiment Name: At_42deg_Heat_P Parameter: Tissue Value: Aerial
  misc_feature: MA Experiment ID: 20000182 Result: Down-regulated in Transcription
  misc_feature: MA Experiment 20000182 PARAMETER Experiment Name: At_2mM_SA_P Parameter: Age (day) Value: 14
  misc_feature: MA Experiment 20000182 PARAMETER Experiment Name: At_2mM_SA_P Parameter: Organism Value: A. thaliana
  misc_feature: MA Experiment 20000182 PARAMETER Experiment Name: At_2mM_SA_P Parameter: Plant Line Value: WS
  misc_feature: MA Experiment 20000182 PARAMETER Experiment Name: At_2mM_SA_P Parameter: Timepoint (hr) Value: 6
  misc_feature: MA Experiment 20000182 PARAMETER Experiment Name: At_2mM_SA_P Parameter: Tissue Value: Aerial
  misc_feature: MA Experiment 20000182 PARAMETER Experiment Name: At_2mM_SA_P Parameter: Treatment Value: 2mM SA vs. No Treatment
  misc_feature: MA Experiment ID: 20000184 Result: Down-regulated in Transcription
  misc_feature: MA Experiment 20000184 PARAMETER Experiment Name: At_Shoots__P Parameter: Age (day) Value: 7
  misc_feature: MA Experiment 20000184 PARAMETER Experiment Name: At_Shoots__P Parameter: Tissue Value: Shoots vs. Whole Plant
  misc_feature: MA Experiment ID: 20000437 Result: Up-regulated in Transcription
  misc_feature: MA Experiment 20000437 PARAMETER Experiment Name: At_Drought_P Parameter: Age (day) Value: 8
  misc_feature: MA Experiment 20000437 PARAMETER Experiment Name: At_Drought_P Parameter: Organism Value: A. thaliana
  misc_feature: MA Experiment 20000437 PARAMETER Experiment Name: At_Drought_P Parameter: Plant Line Value: WS
  misc_feature: MA Experiment 20000437 PARAMETER Experiment Name: At_Drought_P Parameter: Timepoint (hr) Value: 24
  misc_feature: MA Experiment 20000437 PARAMETER Experiment Name: At_Drought_P Parameter: Tissue Value: Whole Plant
  misc_feature: MA Experiment 20000437 PARAMETER Experiment Name: At_Drought_P Parameter: Treatment Value: Drought vs. No Drought
  misc_feature: MA Experiment ID: 20000438 Result: Down-regulated in Transcription
  misc_feature: MA Experiment 20000438 PARAMETER Experiment Name: At_Shoots__P Parameter: Age (day) Value: 14
  misc_feature: MA Experiment 20000438 PARAMETER Experiment Name: At_Shoots__P Parameter: Tissue Value: Shoots vs. Whole Plant
  misc_feature: MA Experiment ID: 20001451 Result: Down-regulated in Transcription
  misc_feature: MA Experiment 20001451 PARAMETER Experiment Name: At_Far-red-induction_P Parameter: Age (day) Value: 7
  misc_feature: MA Experiment 20001451 PARAMETER Experiment Name: At_Far-red-induction_P Parameter: Light Value: Far-red vs. White
  misc_feature: MA Experiment 20001451 PARAMETER Experiment Name: At_Far-red-induction_P Parameter: Organism Value: A. thaliana
  misc_feature: MA Experiment 20001451 PARAMETER Experiment Name: At_Far-red-induction_P Parameter: Plant Line Value: Columbia
  misc_feature: MA Experiment 20001451 PARAMETER Experiment Name: At_Far-red-induction_P Parameter: Timepoint (hr) Value: 24
  misc_feature: MA Experiment 20001451 PARAMETER Experiment Name: At_Far-red-induction_P Parameter: Tissue Value: Whole Plant
  misc_feature: MA Experiment ID: 20001555 Result: Up-regulated in Transcription
  misc_feature: MA Experiment 20001555 PARAMETER Experiment Name: At_Drought_Soil_Dry_P Parameter: Age (day) Value: 24
  misc_feature: MA Experiment 20001555 PARAMETER Experiment Name: At_Drought_Soil_Dry_P Parameter: Organism Value: A. thaliana
  misc_feature: MA Experiment 20001555 PARAMETER Experiment Name: At_Drought_Soil_Dry_P Parameter: Plant Line Value: WS
  misc_feature: MA Experiment 20001555 PARAMETER Experiment Name: At_Drought_Soil_Dry_P Parameter: Post Timepoint (hr) Value: None
  misc_feature: MA Experiment 20001555 PARAMETER Experiment Name: At_Drought_Soil_Dry_P Parameter: Post-Treatment Value: None
  misc_feature: MA Experiment 20001555 PARAMETER Experiment Name: At_Drought_Soil_Dry_P Parameter: Timepoint (day) Value: 10
  misc_feature: MA Experiment 20001555 PARAMETER Experiment Name: At_Drought_Soil_Dry_P Parameter: Treatment Value: Drought vs. No Drought
  misc_feature: MA Experiment ID: 20001558 Result: Down-regulated in Transcription
  misc_feature: MA Experiment 20001558 PARAMETER Experiment Name: At_Drought_Soil_Dry_P Parameter: Age (day) Value: 27
  misc_feature: MA Experiment 20001558 PARAMETER Experiment Name: At_Drought_Soil_Dry_P Parameter: Organism Value: A. thaliana
  misc_feature: MA Experiment 20001558 PARAMETER Experiment Name: At_Drought_Soil_Dry_P Parameter: Plant Line Value: WS
  misc_feature: MA Experiment 20001558 PARAMETER Experiment Name: At_Drought_Soil_Dry_P Parameter: Post Timepoint (hr) Value: 6
  misc_feature: MA Experiment 20001558 PARAMETER Experiment Name: At_Drought_Soil_Dry_P Parameter: Post-Treatment Value: Re-Water vs. No Drought
  misc_feature: MA Experiment 20001558 PARAMETER Experiment Name: At_Drought_Soil_Dry_P Parameter: Timepoint (day) Value: 13
  misc_feature: MA Experiment 20001558 PARAMETER Experiment Name: At_Drought_Soil_Dry_P Parameter: Treatment Value: Drought vs. No Drought
actctctcttcccaaagttctctgtaaaactctctctccgtcttcaatggtttacacgatttcaggcgtacgttttcctcatcttccatcgattaagaagaagaattcgtctcttcacagtttcaatgaagatctcaggagaagcaacgctgtctcattctctctgaggaaggactctcgttcttctgggaaggtttttgctcggaagccatcgtatgattctgattcgtcttccttagctaccactgcatctgagaagctccgtggccatcagagtgatagctcttcatctgcctctgatcaagtacaatctcgggatactgtctctgacgatactcaggtgctcggcaatgtagacgttcagaaaactgaagaagcccaggaaacagagacactagatcaaacttctgcactctcaacatctggaagcataagttataaagaagattttgcaaagatgtcacactctgtcgaccaagaagttgggcagaggaagattccacctcctggagatgggaagagaatatatgacattgatcctatgttgaacagtcatcgtaatcatcttgattaccgatatgggcagtacagaaaactgcgtgaagaaattgacaagaatgaaggtggtttggaggcattttctcgtggttatgaaatatttggcttcactcgaagcgccactggtatcacttaccgggaatgggcaccgggagctaaggcagcatcactgatcggagattttaataactggaatgcgaaatctgatgttatggctcggaacgactttggtgtgtgggaaatatttctgccaaataatgctgatggctcaccagcaattccccatggctcccgtgtgaagatccgcatggataccccatctggtattaaagactccattccagcttggatcaagtattctgtccagccacctggcgagatcccatataatggagtatattatgaccctcctgaggaggataaatatgcgttcaaacatcctcgtccaaagaaacccacatcgctgcgtatatatgaatcacatgttggaatgagtagtacggaaccaaagataaatacatatgccaactttagagatgatgtacttccccgtataaaaaagctaggctataatgctgtgcagataatggccattcaagagcatgcctactatgccagctttgggtatcatgtgacaaattttttcgcacctagcagccgctttggaacacctgatgaccttaaatctttgatagacaaagctcatgagctaggtctggttgttctgatggatattgtgcacagccatgcatcaaaaaacacactggatggcctggacatgtttgatggtactgatggtcaatatttccactctggatcgcgtggttatcattggatgtgggattctcgtcttttcaattacggaagctgggaagtgcttaggtatcttctttccaacgcgagatggtggctggaagaatacaagtttgatgggttcagatttgatggtgtgacttccatgatgtacactcatcatggactgcaggtcgaatttactgggaattacaatgagtactttggatattctactgatgttgacgctgtggtctatctaatgctggtgaacgatttgattcatgggctataccctgaggctattgttgtcggcgaagatgttagcgggatgccagctttttgcgttcctgtcgaagacggtggtgtgggttttgactaccgtctacacatggcagtggcagataaatggattgagcttcttaagaagagagacgaggactggcaggttggtgatataactttcacgcttaccaacaggaggtggggagaaaaatgtgtcgtctatgcagagagtcatgatcaagcccttgttggagacaaaacgatagctttctggctaatggataaggacatgtatgatttcatggccgttgatagacaggccactccgcgtgtagaccgtgggattgctttacacaaaatgatccgtctcattacgatgggattgggtggagaaggatacctcaatttcatgggaaacgaatttggacacccagaatggatcgacttcccaaggaccgaccagcaccttcctgatggcagagtcatcgctgggaataatggtagttatgataaatgccgacgtaggtttgatctgggagatgcagaatatcttagataccatggactacaagagtttgatcgagcaatgcaaaatctagaggagacgtatggtttcatgacttcagagcaccagtacatatcccgcaaggatgaaggagacagagtcattgtattcgagagaggtaacttgctcttcgtcttcaacttccactggaccaacagttactctgactaccgtatcggttgctctgttcccggaaagtacaaaatcgttttggactctgataactctttatttggaggcttcaaccggctagatgactccgcggagtttttcacctctgatggaaggcacgacgataggccttgctccttcatggtgtatgcaccgtgcagaaccgctgtagtttacgctgcagtagatgatgatgatgatgatgaacgttcttctcttgtccccataggcctgttacccgaagatgtttaggagcaaagacagttgtccgagtttacctactgtaagcttctttgtactacaaaaatttactcgttgatcttcttctcctttagttttcgcttgcagcatcattataacttaaaaatgaaataaaaagtcgttgcacttctg

SEQ ID NO: 27072 - protein, 873 aa, Arabidopsis thaliana
  peptide (1)..(873): Ceres Seq. ID no. 13491798
  misc_feature (175)..(860): Homolog of NCBI NO: 283000 NR Description: 1,4-alpha-glucan branching enzyme (EC 2.4.1.18) I
  misc_feature (175)..(854): Homolog of NCBI NO: 11037532 NR Description: starch branching enyzyme 1 [Triticum aestivum]
  misc_feature (175)..(854): Homolog of NCBI NO: 4586238 NR Description: starch branching enzyme I [Triticum aestivum]
  misc_feature (175)..(854): Homolog of NCBI NO: 4586237 NR Description: starch branching enzyme I [Triticum aestivum]
  misc_feature (175)..(854): Homolog of NCBI NO: 4586236 NR Description: starch branching enzyme I [Triticum aestivum]
  misc_feature (175)..(826): Homolog of NCBI NO: 1169912 NR Description: 1,4-alpha-glucan branching enzyme (Starch
  misc_feature (175)..(864): Homolog of NCBI NO: 5441248 NR Description: branching enzyme 3 [Phaseolus vulgaris]
  misc_feature (175)..(854): Homolog of NCBI NO: 7433851 NR Description: 1,4-alpha-glucan branching enzyme (EC 2.4.1.18) I
  misc_feature (175)..(873): Homolog of NCBI NO: 1771261 NR Description: 1,4-alpha-glucan branching enzyme [Manihot
  misc_feature (109)..(853): Homolog of NCBI NO: 3822022 NR Description: starch branching enzyme IIb [Hordeum vulgare]
  misc_feature (175)..(860): Homolog of NCBI NO: 283000 NR Description: 1,4-alpha-glucan branching enzyme (EC 2.4.1.18) I
  misc_feature (175)..(854): Homolog of NCBI NO: 11037532 NR Description: starch branching enyzyme 1 [Triticum aestivum]
  misc_feature (175)..(854): Homolog of NCBI NO: 4586238 NR Description: starch branching enzyme I [Triticum aestivum]
  misc_feature (175)..(854): Homolog of NCBI NO: 4586237 NR Description: starch branching enzyme I [Triticum aestivum]
  misc_feature (175)..(854): Homolog of NCBI NO: 4586236 NR Description: starch branching enzyme I [Triticum aestivum]
  misc_feature (175)..(826): Homolog of NCBI NO: 1169912 NR Description: 1,4-alpha-glucan branching enzyme (Starch
  misc_feature (175)..(864): Homolog of NCBI NO: 5441248 NR Description: branching enzyme 3 [Phaseolus vulgaris]
  misc_feature (175)..(854): Homolog of NCBI NO: 7433851 NR Description: 1,4-alpha-glucan branching enzyme (EC 2.4.1.18) I
  misc_feature (175)..(873): Homolog of NCBI NO: 1771261 NR Description: 1,4-alpha-glucan branching enzyme [Manihot
  misc_feature (109)..(853): Homolog of NCBI NO: 3822022 NR Description: starch branching enzyme IIb [Hordeum vulgare]
LSLPKVLCKTLSPSSMVYTISGVRFPHLPSIKKKNSSLHSFNEDLRRSNAVSFSLRKDSRSSGKVFARKPSYDSDSSSLATTASEKLRGHQSDSSSSASDQVQSRDTVSDDTQVLGNVDVQKTEEAQETETLDQTSALSTSGSISYKEDFAKMSHSVDQEVGQRKIPPPGDGKRIYDIDPMLNSHRNHLDYRYGQYRKLREEIDKNEGGLEAFSRGYEIFGFTRSATGITYREWAPGAKAASLIGDFNNWNAKSDVMARNDFGVWEIFLPNNADGSPAIPHGSRVKIRMDTPSGIKDSIPAWIKYSVQPPGEIPYNGVYYDPPEEDKYAFKHPRPKKPTSLRIYESHVGMSSTEPKINTYANFRDDVLPRIKKLGYNAVQIMAIQEHAYYASFGYHVTNFFAPSSRFGTPDDLKSLIDKAHELGLVVLMDIVHSHASKNTLDGLDMFDGTDGQYFHSGSRGYHWMWDSRLFNYGSWEVLRYLLSNARWWLEEYKFDGFRFDGVTSMMYTHHGLQVEFTGNYNEYFGYSTDVDAVVYLMLVNDLIHGLYPEAIVVGEDVSGMPAFCVPVEDGGVGFDYRLHMAVADKWIELLKKRDEDWQVGDITFTLTNRRWGEKCVVYAESHDQALVGDKTIAFWLMDKDMYDFMAVDRQATPRVDRGIALHKMIRLITMGLGGEGYLNFMGNEFGHPEWIDFPRTDQHLPDGRVIAGNNGSYDKCRRRFDLGDAEYLRYHGLQEFDRAMQNLEETYGFMTSEHQYISRKDEGDRVIVFERGNLLFVFNFHWTNSYSDYRIGCSVPGKYKIVLDSDNSLFGGFNRLDDSAEFFTSDGRHDDRPCSFMVYAPCRTAVVYAAVDDDDDDERSSLVPIGLLPEDV

SEQ ID NO: 27073 - protein, 858 aa, Arabidopsis thaliana
  peptide (1)..(858): Ceres Seq. ID no. 13491799
  misc_feature (160)..(845): Homolog of NCBI NO: 283000 NR Description: 1,4-alpha-glucan branching enzyme (EC 2.4.1.18) I
  misc_feature (160)..(839): Homolog of NCBI NO: 4586238 NR Description: starch branching enzyme I [Triticum aestivum]
  misc_feature (160)..(839): Homolog of NCBI NO: 11037532 NR Description: starch branching enyzyme 1 [Triticum aestivum]
  misc_feature (160)..(839): Homolog of NCBI NO: 4586237 NR Description: starch branching enzyme I [Triticum aestivum]
  misc_feature (160)..(839): Homolog of NCBI NO: 4586236 NR Description: starch branching enzyme I [Triticum aestivum]
  misc_feature (160)..(811): Homolog of NCBI NO: 1169912 NR Description: 1,4-alpha-glucan branching enzyme (Starch
  misc_feature (160)..(849): Homolog of NCBI NO: 5441248 NR Description: branching enzyme 3 [Phaseolus vulgaris]
  misc_feature (160)..(839): Homolog of NCBI NO: 7433851 NR Description: 1,4-alpha-glucan branching enzyme (EC 2.4.1.18) I
  misc_feature (160)..(858): Homolog of NCBI NO: 1771261 NR Description: 1,4-alpha-glucan branching enzyme [Manihot
  misc_feature (94)..(838): Homolog of NCBI NO: 3822022 NR Description: starch branching enzyme IIb [Hordeum vulgare]
  misc_feature (160)..(845): Homolog of NCBI NO: 283000 NR Description: 1,4-alpha-glucan branching enzyme (EC 2.4.1.18) I
  misc_feature (160)..(839): Homolog of NCBI NO: 4586238 NR Description: starch branching enzyme I [Triticum aestivum]
  misc_feature (160)..(839): Homolog of NCBI NO: 11037532 NR Description: starch branching enyzyme 1 [Triticum aestivum]
  misc_feature (160)..(839): Homolog of NCBI NO: 4586237 NR Description: starch branching enzyme I [Triticum aestivum]
  misc_feature (160)..(839): Homolog of NCBI NO: 4586236 NR Description: starch branching enzyme I [Triticum aestivum]
  misc_feature (160)..(811): Homolog of NCBI NO: 1169912 NR Description: 1,4-alpha-glucan branching enzyme (Starch
  misc_feature (160)..(849): Homolog of NCBI NO: 5441248 NR Description: branching enzyme 3 [Phaseolus vulgaris]
  misc_feature (160)..(839): Homolog of NCBI NO: 7433851 NR Description: 1,4-alpha-glucan branching enzyme (EC 2.4.1.18) I
  misc_feature (160)..(858): Homolog of NCBI NO: 1771261 NR Description: 1,4-alpha-glucan branching enzyme [Manihot
  misc_feature (94)..(838): Homolog of NCBI NO: 3822022 NR Description: starch branching enzyme IIb [Hordeum vulgare]
MVYTISGVRFPHLPSIKKKNSSLHSFNEDLRRSNAVSFSLRKDSRSSGKVFARKPSYDSDSSSLATTASEKLRGHQSDSSSSASDQVQSRDTVSDDTQVLGNVDVQKTEEAQETETLDQTSALSTSGSISYKEDFAKMSHSVDQEVGQRKIPPPGDGKRIYDIDPMLNSHRNHLDYRYGQYRKLREEIDKNEGGLEAFSRGYEIFGFTRSATGITYREWAPGAKAASLIGDFNNWNAKSDVMARNDFGVWEIFLPNNADGSPAIPHGSRVKIRMDTPSGIKDSIPAWIKYSVQPPGEIPYNGVYYDPPEEDKYAFKHPRPKKPTSLRIYESHVGMSSTEPKINTYANFRDDVLPRIKKLGYNAVQIMAIQEHAYYASFGYHVTNFFAPSSRFGTPDDLKSLIDKAHELGLVVLMDIVHSHASKNTLDGLDMFDGTDGQYFHSGSRGYHWMWDSRLFNYGSWEVLRYLLSNARWWLEEYKFDGFRFDGVTSMMYTHHGLQVEFTGNYNEYFGYSTDVDAVVYLMLVNDLIHGLYPEAIVVGEDVSGMPAFCVPVEDGGVGFDYRLHMAVADKWIELLKKRDEDWQVGDITFTLTNRRWGEKCVVYAESHDQALVGDKTIAFWLMDKDMYDFMAVDRQATPRVDRGIALHKMIRLITMGLGGEGYLNFMGNEFGHPEWIDFPRTDQHLPDGRVIAGNNGSYDKCRRRFDLGDAEYLRYHGLQEFDRAMQNLEETYGFMTSEHQYISRKDEGDRVIVFERGNLLFVFNFHWTNSYSDYRIGCSVPGKYKIVLDSDNSLFGGFNRLDDSAEFFTSDGRHDDRPCSFMVYAPCRTAVVYAAVDDDDDDERSSLVPIGLLPEDV

SEQ ID NO: 27074 - protein, 721 aa, Arabidopsis thaliana
  peptide (1)..(721): Ceres Seq. ID no. 13491800
  misc_feature (23)..(708): Homolog of NCBI NO: 283000 NR Description: 1,4-alpha-glucan branching enzyme (EC 2.4.1.18) I
  misc_feature (23)..(702): Homolog of NCBI NO: 4586237 NR Description: starch branching enzyme I [Triticum aestivum]
  misc_feature (23)..(702): Homolog of NCBI NO: 11037532 NR Description: starch branching enyzyme 1 [Triticum aestivum]
  misc_feature (23)..(702): Homolog of NCBI NO: 4586238 NR Description: starch branching enzyme I [Triticum aestivum]
  misc_feature (23)..(702): Homolog of NCBI NO: 4586236 NR Description: starch branching enzyme I [Triticum aestivum]
  misc_feature (23)..(674): Homolog of NCBI NO: 1169912 NR Description: 1,4-alpha-glucan branching enzyme (Starch
  misc_feature (23)..(712): Homolog of NCBI NO: 5441248 NR Description: branching enzyme 3 [Phaseolus vulgaris]
  misc_feature (23)..(702): Homolog of NCBI NO: 7433851 NR Description: 1,4-alpha-glucan branching enzyme (EC 2.4.1.18) I
  misc_feature (23)..(721): Homolog of NCBI NO: 1771261 NR Description: 1,4-alpha-glucan branching enzyme [Manihot
  misc_feature (1)..(701): Homolog of NCBI NO: 3822022 NR Description: starch branching enzyme IIb [Hordeum vulgare]
  misc_feature (23)..(708): Homolog of NCBI NO: 283000 NR Description: 1,4-alpha-glucan branching enzyme (EC 2.4.1.18) I
  misc_feature (23)..(702): Homolog of NCBI NO: 4586237 NR Description: starch branching enzyme I [Triticum aestivum]
  misc_feature (23)..(702): Homolog of NCBI NO: 11037532 NR Description: starch branching enyzyme 1 [Triticum aestivum]
  misc_feature (23)..(702): Homolog of NCBI NO: 4586238 NR Description: starch branching enzyme I [Triticum aestivum]
  misc_feature (23)..(702): Homolog of NCBI NO: 4586236 NR Description: starch branching enzyme I [Triticum aestivum]
  misc_feature (23)..(674): Homolog of NCBI NO: 1169912 NR Description: 1,4-alpha-glucan branching enzyme (Starch
  misc_feature (23)..(712): Homolog of NCBI NO: 5441248 NR Description: branching enzyme 3 [Phaseolus vulgaris]
  misc_feature (23)..(702): Homolog of NCBI NO: 7433851 NR Description: 1,4-alpha-glucan branching enzyme (EC 2.4.1.18) I
  misc_feature (23)..(721): Homolog of NCBI NO: 1771261 NR Description: 1,4-alpha-glucan branching enzyme [Manihot
  misc_feature (1)..(701): Homolog of NCBI NO: 3822022 NR Description: starch branching enzyme IIb [Hordeum vulgare]
MSHSVDQEVGQRKIPPPGDGKRIYDIDPMLNSHRNHLDYRYGQYRKLREEIDKNEGGLEAFSRGYEIFGFTRSATGITYREWAPGAKAASLIGDFNNWNAKSDVMARNDFGVWEIFLPNNADGSPAIPHGSRVKIRMDTPSGIKDSIPAWIKYSVQPPGEIPYNGVYYDPPEEDKYAFKHPRPKKPTSLRIYESHVGMSSTEPKINTYANFRDDVLPRIKKLGYNAVQIMAIQEHAYYASFGYHVTNFFAPSSRFGTPDDLKSLIDKAHELGLVVLMDIVHSHASKNTLDGLDMFDGTDGQYFHSGSRGYHWMWDSRLFNYGSWEVLRYLLSNARWWLEEYKFDGFRFDGVTSMMYTHHGLQVEFTGNYNEYFGYSTDVDAVVYLMLVNDLIHGLYPEAIVVGEDVSGMPAFCVPVEDGGVGFDYRLHMAVADKWIELLKKRDEDWQVGDITFTLTNRRWGEKCVVYAESHDQALVGDKTIAFWLMDKDMYDFMAVDRQATPRVDRGIALHKMIRLITMGLGGEGYLNFMGNEFGHPEWIDFPRTDQHLPDGRVIAGNNGSYDKCRRRFDLGDAEYLRYHGLQEFDRAMQNLEETYGFMTSEHQYISRKDEGDRVIVFERGNLLFVFNFHWTNSYSDYRIGCSVPGKYKIVLDSDNSLFGGFNRLDDSAEFFTSDGRHDDRPCSFMVYAPCRTAVVYAAVDDDDDDERSSLVPIGLLPEDV

SEQ ID NO: 27075 - DNA, 1556 bp, Arabidopsis thaliana
  misc_feature (1)..(1556): Ceres Seq. ID no. 13487486
  misc_feature: MA Experiment ID: 20000179 Result: Up-regulated in Transcription
  misc_feature: MA Experiment 20000179 PARAMETER Experiment Name: At_Germinating_Seeds_P Parameter: Age (hr) Value: 6 vs. 0
  misc_feature: MA Experiment 20000179 PARAMETER Experiment Name: At_Germinating_Seeds_P Parameter: Tissue Value: Germinating Seeds
  misc_feature: MA Experiment ID: 20000180 Result: Up-regulated in Transcription
  misc_feature: MA Experiment 20000180 PARAMETER Experiment Name: At_Germinating_Seeds_P Parameter: Age (hr) Value: 24 vs. 0
  misc_feature: MA Experiment 20000180 PARAMETER Experiment Name: At_Germinating_Seeds_P Parameter: Tissue Value: Germinating Seeds
  misc_feature: MA Experiment ID: 20000182 Result: Up-regulated in Transcription
  misc_feature: MA Experiment 20000182 PARAMETER Experiment Name: At_2mM_SA_P Parameter: Age (day) Value: 14
  misc_feature: MA Experiment 20000182 PARAMETER Experiment Name: At_2mM_SA_P Parameter: Organism Value: A. thaliana
  misc_feature: MA Experiment 20000182 PARAMETER Experiment Name: At_2mM_SA_P Parameter: Plant Line Value: WS
  misc_feature: MA Experiment 20000182 PARAMETER Experiment Name: At_2mM_SA_P Parameter: Timepoint (hr) Value: 6
  misc_feature: MA Experiment 20000182 PARAMETER Experiment Name: At_2mM_SA_P Parameter: Tissue Value: Aerial
  misc_feature: MA Experiment 20000182 PARAMETER Experiment Name: At_2mM_SA_P Parameter: Treatment Value: 2mM SA vs. No Treatment
  misc_feature: MA Experiment ID: 20001451 Result: Down-regulated in Transcription
  misc_feature: MA Experiment 20001451 PARAMETER Experiment Name: At_Far-red-induction_P Parameter: Age (day) Value: 7
  misc_feature: MA Experiment 20001451 PARAMETER Experiment Name: At_Far-red-induction_P Parameter: Light Value: Far-red vs. White
  misc_feature: MA Experiment 20001451 PARAMETER Experiment Name: At_Far-red-induction_P Parameter: Organism Value: A. thaliana
  misc_feature: MA Experiment 20001451 PARAMETER Experiment Name: At_Far-red-induction_P Parameter: Plant Line Value: Columbia
  misc_feature: MA Experiment 20001451 PARAMETER Experiment Name: At_Far-red-induction_P Parameter: Timepoint (hr) Value: 24
  misc_feature: MA Experiment 20001451 PARAMETER Experiment Name: At_Far-red-induction_P Parameter: Tissue Value: Whole Plant
aactccaaatctctacacttccatataattaaaacacagagagacgaagaaaatcgagatctcgaataatgcgaatctgaaggatctttacgaattccataatcttcagatcgaaaggtttctatcgattcgttggtcaagaggagattgtgcgtgtgattcgtgagcatgggctgttcgttttcaggattgaacgcactttacgacgccgtcaacggtggaggtgacgtatggatcaatgagaatcgattcaggatcgtgaggcagctcggcgaaggaggtttcgcattcgtctttttggtcaaggaaattgtcgccgacgcttcctccgccgcatccggtggtggtctagctaagaaagtcaaggatccggctcatctctccgctgacggaacttatgctatgaagaaagttttgattcagaacaaggagcaattggaattggtgcgtgaggagatccgtgtttcttcattgttcaatcaccctaatttgcttccactccttgatcatgccattatttctgttaaggacggccaagagggagcttggaaacacgaggccttcttgctgtttcctgttcacttggatgggaccttgctggataatttcactttgatgaaggctaaaaaagaaactttctcaacaactgatgttttgcacatattccgtcagctttgtgatggacttaaacacatgcactctctggagccaccatatgctcacaacgatgtcaaacctggcaacgtccttttaacacgtagaaaaggacagcctcctcttgcgatattgatggactttggaagtgctcgcccatcacggaagcaaatccgttcccgtcaagaggccttacagttacaggaatggacatctgagcattgctcagcaccgtttcgagctcccgagctctgggattgcccaagccatgctgatattgatgagagaacagatatctggtcactaggctgcacattatatgcaataatgtatggtgtgtctccattcgagtatgcgcttggagaatctggtggaagtcttcagcttgcaatcgtgaacgctcagatcaaatggccaaacactggaccaaaagcttcttaccctgaagctcttcaccagttcgtaacttggatgctgcaaccacaagctgctgttcgaccgcgcatagacgatatcatcatccatgtcgacaaattgatcgctaaattcaccaaatgattcccgaattatgttggttttcaaaaaaaggtgaaaggaaagaaaagaagactctttatacattgctttgtctctttttttttctaatatccttagctgttttcaaaaatcccatattagatacatatatttaatagtattacattgctcttcgtaatgtattttgaactttttaggattcggggttttctttttgactatgggaagttgtgaaccaataaatttacttaagacagtatatctcgtagttgtcctaattctggtcgatgatgctgtaatgctattataattttgtgctgattcatattttaattataaccatagggtttttgaaaatgttattt

SEQ ID NO: 27076 - protein, 347 aa, Arabidopsis thaliana
  peptide (1)..(347): Ceres Seq. ID no. 13487487
  misc_feature (74)..(341): Homolog of NCBI NO: 6714558 NR Description: F5-2 [Mus musculus]
  misc_feature (74)..(341): Homolog of NCBI NO: 27465615 NR Description: serine/threonine kinase 16 [Rattus norvegicus]
  misc_feature (74)..(341): Homolog of NCBI NO: 3372666 NR Description: myristilated and palmitylated serine-threonine
  misc_feature (74)..(341): Homolog of NCBI NO: 33303961 NR Description: serine/threonine kinase 16 [synthetic construct]
  misc_feature (74)..(341): Homolog of NCBI NO: 12803571 NR Description: serine/threonine kinase 16 [Homo sapiens]
  misc_feature (74)..(341): Homolog of NCBI NO: 10640971 NR Description: F5-2 [Homo sapiens]
  misc_feature (1)..(30): Homolog of NCBI NO: 30682270 NR Description: serine/threonine protein kinase, putative
  misc_feature (67)..(347): Homolog of NCBI NO: 30682270 NR Description: serine/threonine protein kinase, putative
  misc_feature (1)..(347): Homolog of NCBI NO: 21593866 NR Description: serine/threonine protein kinase [Arabidopsis
  misc_feature (1)..(347): Homolog of NCBI NO: 15241535 NR Description: serine/threonine protein kinase, putative
MGCSFSGLNALYDAVNGGGDVWINENRFRIVRQLGEGGFAFVFLVKEIVADASSAASGGGLAKKVKDPAHLSADGTYAMKKVLIQNKEQLELVREEIRVSSLFNHPNLLPLLDHAIISVKDGQEGAWKHEAFLLFPVHLDGTLLDNFTLMKAKKETFSTTDVLHIFRQLCDGLKHMHSLEPPYAHNDVKPGNVLLTRRKGQPPLAILMDFGSARPSRKQIRSRQEALQLQEWTSEHCSAPFRAPELWDCPSHADIDERTDIWSLGCTLYAIMYGVSPFEYALGESGGSLQLAIVNAQIKWPNTGPKASYPEALHQFVTWMLQPQAAVRPRIDDIIIHVDKLIAKFTK

SEQ ID NO: 27077 - protein, 269 aa, Arabidopsis thaliana
  peptide (1)..(269): Ceres Seq. ID no. 13487488
  misc_feature (1)..(263): Homolog of NCBI NO: 4505837 NR Description: serine/threonine kinase 16
  misc_feature (1)..(263): Homolog of NCBI NO: 6714558 NR Description: F5-2 [Mus musculus]
  misc_feature (1)..(263): Homolog of NCBI NO: 27465615 NR Description: serine/threonine kinase 16 [Rattus norvegicus]
  misc_feature (1)..(263): Homolog of NCBI NO: 3372666 NR Description: myristilated and palmitylated serine-threonine
  misc_feature (1)..(263): Homolog of NCBI NO: 33303961 NR Description: serine/threonine kinase 16 [synthetic construct]
  misc_feature (1)..(263): Homolog of NCBI NO: 12803571 NR Description: serine/threonine kinase 16 [Homo sapiens]
  misc_feature (1)..(263): Homolog of NCBI NO: 10640971 NR Description: F5-2 [Homo sapiens]
  misc_feature (1)..(269): Homolog of NCBI NO: 30682270 NR Description: serine/threonine protein kinase, putative
  misc_feature (1)..(269): Homolog of NCBI NO: 21593866 NR Description: serine/threonine protein kinase [Arabidopsis
  misc_feature (1)..(269): Homolog of NCBI NO: 15241535 NR Description: serine/threonine protein kinase, putative
MKKVLIQNKEQLELVREEIRVSSLFNHPNLLPLLDHAIISVKDGQEGAWKHEAFLLFPVHLDGTLLDNFTLMKAKKETFSTTDVLHIFRQLCDGLKHMHSLEPPYAHNDVKPGNVLLTRRKGQPPLAILMDFGSARPSRKQIRSRQEALQLQEWTSEHCSAPFRAPELWDCPSHADIDERTDIWSLGCTLYAIMYGVSPFEYALGESGGSLQLAIVNAQIKWPNTGPKASYPEALHQFVTWMLQPQAAVRPRIDDIIIHVDKLIAKFTK

SEQ ID NO: 27078 - protein, 198 aa, Arabidopsis thaliana
  peptide (1)..(198): Ceres Seq. ID no. 13487489
  misc_feature (1)..(192): Homolog of NCBI NO: 4505837 NR Description: serine/threonine kinase 16
  misc_feature (1)..(192): Homolog of NCBI NO: 6714558 NR Description: F5-2 [Mus musculus]
  misc_feature (1)..(192): Homolog of NCBI NO: 27465615 NR Description: serine/threonine kinase 16 [Rattus norvegicus]
  misc_feature (1)..(192): Homolog of NCBI NO: 3372666 NR Description: myristilated and palmitylated serine-threonine
  misc_feature (1)..(192): Homolog of NCBI NO: 33303961 NR Description: serine/threonine kinase 16 [synthetic construct]
  misc_feature (1)..(192): Homolog of NCBI NO: 12803571 NR Description: serine/threonine kinase 16 [Homo sapiens]
  misc_feature (1)..(192): Homolog of NCBI NO: 10640971 NR Description: F5-2 [Homo sapiens]
  misc_feature (1)..(198): Homolog of NCBI NO: 30682270 NR Description: serine/threonine protein kinase, putative
  misc_feature (1)..(198): Homolog of NCBI NO: 21593866 NR Description: serine/threonine protein kinase [Arabidopsis
  misc_feature (1)..(198): Homolog of NCBI NO: 15241535 NR Description: serine/threonine protein kinase, putative
MKAKKETFSTTDVLHIFRQLCDGLKHMHSLEPPYAHNDVKPGNVLLTRRKGQPPLAILMDFGSARPSRKQIRSRQEALQLQEWTSEHCSAPFRAPELWDCPSHADIDERTDIWSLGCTLYAIMYGVSPFEYALGESGGSLQLAIVNAQIKWPNTGPKASYPEALHQFVTWMLQPQAAVRPRIDDIIIHVDKLIAKFTK

SEQ ID NO: 27079 - DNA, 1132 bp, Arabidopsis thaliana
  misc_feature (1)..(1132): Ceres Seq. ID no. 12325365
  misc_feature: MA Experiment ID: 108434 Result: Down-regulated in Transcription
  misc_feature: MA Experiment 108434 PARAMETER Experiment Name: At_Root_Tips_cDNA_P Parameter: Tissue Value: Root Tips
  misc_feature: MA Experiment ID: 108461 Result: Down-regulated in Transcription
  misc_feature: MA Experiment 108461 PARAMETER Experiment Name: At_Germinating_Seeds_cDNA_P Parameter: Age (day) Value: 1 vs. 0
  misc_feature: MA Experiment 108461 PARAMETER Experiment Name: At_Germinating_Seeds_cDNA_P Parameter: Tissue Value: Germinating Seeds
  misc_feature: MA Experiment ID: 108462 Result: Up-regulated in Transcription
  misc_feature: MA Experiment 108462 PARAMETER Experiment Name: At_Germinating_Seeds_cDNA_P Parameter: Age (day) Value: 2 vs. 0
  misc_feature: MA Experiment 108462 PARAMETER Experiment Name: At_Germinating_Seeds_cDNA_P Parameter: Tissue Value: Germinating Seeds
  misc_feature: MA Experiment ID: 108464 Result: Up-regulated in Transcription
  misc_feature: MA Experiment 108464 PARAMETER Experiment Name: At_Germinating_Seeds_cDNA_P Parameter: Age (day) Value: 4 vs. 0
  misc_feature: MA Experiment 108464 PARAMETER Experiment Name: At_Germinating_Seeds_cDNA_P Parameter: Tissue Value: Germinating Seeds
  misc_feature: MA Experiment ID: 108501 Result: Down-regulated in Transcription
  misc_feature: MA Experiment 108501 PARAMETER Experiment Name: At_ap2_floral_buds_cDNA_P Parameter: Plant Line Value: ap2 (Ler.)
  misc_feature: MA Experiment 108501 PARAMETER Experiment Name: At_ap2_floral_buds_cDNA_P Parameter: Tissue Value: Closed Flower
  misc_feature: MA Experiment ID: 108577 Result: Down-regulated in Transcription
  misc_feature: MA Experiment 108577 PARAMETER Experiment Name: At_42deg_Heat_cDNA_P Parameter: Temperature (deg C) Value: 42 vs. 22
  misc_feature: MA Experiment 108577 PARAMETER Experiment Name: At_42deg_Heat_cDNA_P Parameter: Timepoint (hr) Value: 6
  misc_feature: MA Experiment 108577 PARAMETER Experiment Name: At_42deg_Heat_cDNA_P Parameter: Tissue Value: Aerial
  misc_feature: MA Experiment ID: 108585 Result: Up-regulated in Transcription
  misc_feature: MA Experiment 108585 PARAMETER Experiment Name: At_5mM_NaNP_cDNA_P Parameter: Timepoint (hr) Value: 6
  misc_feature: MA Experiment 108585 PARAMETER Experiment Name: At_5mM_NaNP_cDNA_P Parameter: Tissue Value: Aerial
  misc_feature: MA Experiment 108585 PARAMETER Experiment Name: At_5mM_NaNP_cDNA_P Parameter: Treatment Value: null
  misc_feature: MA Experiment ID: 108608 Result: Up-regulated in Transcription
  misc_feature: MA Experiment 108608 PARAMETER Experiment Name: At_100uM_ABA_cDNA_P Parameter: Timepoint (hr) Value: 1
  misc_feature: MA Experiment 108608 PARAMETER Experiment Name: At_100uM_ABA_cDNA_P Parameter: Tissue Value: Aerial
  misc_feature: MA Experiment 108608 PARAMETER Experiment Name: At_100uM_ABA_cDNA_P Parameter: Treatment Value: 100uM ABA vs. No Treatment
  misc_feature: MA Experiment ID: 108668 Result: Up-regulated in Transcription
  misc_feature: MA Experiment 108668 PARAMETER Experiment Name: At_2mM_SA_cDNA_P Parameter: Plant Line Value: WS
  misc_feature: MA Experiment 108668 PARAMETER Experiment Name: At_2mM_SA_cDNA_P Parameter: Timepoint (hr) Value: 6
  misc_feature: MA Experiment 108668 PARAMETER Experiment Name: At_2mM_SA_cDNA_P Parameter: Treatment Value: 2mM SA vs. No Treatment
  misc_feature: MA Experiment ID: 20000069 Result: Up-regulated in Transcription
  misc_feature: MA Experiment 20000069 PARAMETER Experiment Name: At_100uM_ABA_Mutants_cDNA_P Parameter: Plant Line Value: CS23
  misc_feature: MA Experiment 20000069 PARAMETER Experiment Name: At_100uM_ABA_Mutants_cDNA_P Parameter: Timepoint (hr) Value: 6
  misc_feature: MA Experiment 20000069 PARAMETER Experiment Name: At_100uM_ABA_Mutants_cDNA_P Parameter: Tissue Value: Aerial
  misc_feature: MA Experiment 20000069 PARAMETER Experiment Name: At_100uM_ABA_Mutants_cDNA_P Parameter: Treatment Value: 100uM ABA vs. No Treatment
  misc_feature: MA Experiment ID: 20000089 Result: Up-regulated in Transcription
  misc_feature: MA Experiment ID: 20000179 Result: Down-regulated in Transcription
  misc_feature: MA Experiment 20000179 PARAMETER Experiment Name: At_Germinating_Seeds_P Parameter: Age (hr) Value: 6 vs. 0
  misc_feature: MA Experiment 20000179 PARAMETER Experiment Name: At_Germinating_Seeds_P Parameter: Tissue Value: Germinating Seeds
  misc_feature: MA Experiment ID: 20000180 Result: Down-regulated in Transcription
  misc_feature: MA Experiment 20000180 PARAMETER Experiment Name: At_Germinating_Seeds_P Parameter: Age (hr) Value: 24 vs. 0
  misc_feature: MA Experiment 20000180 PARAMETER Experiment Name: At_Germinating_Seeds_P Parameter: Tissue Value: Germinating Seeds
  misc_feature: MA Experiment ID: 20000185 Result: Up-regulated in Transcription
  misc_feature: MA Experiment 20000185 PARAMETER Experiment Name: At_Roots__P Parameter: Age (day) Value: 7 vs. 21
  misc_feature: MA Experiment 20000185 PARAMETER Experiment Name: At_Roots__P Parameter: Organism Value: A. thaliana
  misc_feature: MA Experiment 20000185 PARAMETER Experiment Name: At_Roots__P Parameter: Tissue Value: Roots vs. Whole Plant
  misc_feature: MA Experiment ID: 20000235 Result: Down-regulated in Transcription
  misc_feature: MA Experiment 20000235 PARAMETER Experiment Name: At_Siliques_P Parameter: Age (day) Value: 21
  misc_feature: MA Experiment 20000235 PARAMETER Experiment Name: At_Siliques_P Parameter: Organism Value: A. thaliana
  misc_feature: MA Experiment 20000235 PARAMETER Experiment Name: At_Siliques_P Parameter: Plant Line Value: WS
  misc_feature: MA Experiment 20000235 PARAMETER Experiment Name: At_Siliques_P Parameter: Tissue Value: 5-10mm Siliques vs. Whole Plant
  misc_feature: MA Experiment ID: 20000439 Result: Up-regulated in Transcription
  misc_feature: MA Experiment 20000439 PARAMETER Experiment Name: At_Roots__P Parameter: Age (day) Value: 14 vs. 21
  misc_feature: MA Experiment 20000439 PARAMETER Experiment Name: At_Roots__P Parameter: Organism Value: A. thaliana
  misc_feature: MA Experiment 20000439 PARAMETER Experiment Name: At_Roots__P Parameter: Tissue Value: Roots vs. Whole Plant
  misc_feature: MA Experiment ID: 20000445 Result: Up-regulated in Transcription
  misc_feature: MA Experiment 20000445 PARAMETER Experiment Name: At_100uM_NAA__P Parameter: Age (day) Value: 14
  misc_feature: MA Experiment 20000445 PARAMETER Experiment Name: At_100uM_NAA__P Parameter: Organism Value: A. thaliana
  misc_feature: MA Experiment 20000445 PARAMETER Experiment Name: At_100uM_NAA__P Parameter: Plant Line Value: WS
  misc_feature: MA Experiment 20000445 PARAMETER Experiment Name: At_100uM_NAA__P Parameter: Timepoint (hr) Value: 6
  misc_feature: MA Experiment 20000445 PARAMETER Experiment Name: At_100uM_NAA__P Parameter: Tissue Value: Aerial
  misc_feature: MA Experiment 20000445 PARAMETER Experiment Name: At_100uM_NAA__P Parameter: Treatment Value: 100uM NAA vs. No Treatment
  misc_feature: MA Experiment ID: 20000451 Result: Up-regulated in Transcription
  misc_feature: MA Experiment 20000451 PARAMETER Experiment Name: At_CS6879_Shoots-Roots_P Parameter: Age (day) Value: 14
  misc_feature: MA Experiment 20000451 PARAMETER Experiment Name: At_CS6879_Shoots-Roots_P Parameter: Organism Value: A. thaliana
  misc_feature: MA Experiment 20000451 PARAMETER Experiment Name: At_CS6879_Shoots-Roots_P Parameter: Plant Line Value: CS6879 vs. WS
  misc_feature: MA Experiment 20000451 PARAMETER Experiment Name: At_CS6879_Shoots-Roots_P Parameter: Tissue Value: Roots
  misc_feature: MA Experiment ID: 20001248 Result: Up-regulated in Transcription
  misc_feature: MA Experiment 20001248 PARAMETER Experiment Name: At_Far-red-induction_P Parameter: Age (day) Value: 7
  misc_feature: MA Experiment 20001248 PARAMETER Experiment Name: At_Far-red-induction_P Parameter: Light Value: Far-red vs. White
  misc_feature: MA Experiment 20001248 PARAMETER Experiment Name: At_Far-red-induction_P Parameter: Organism Value: A. thaliana
  misc_feature: MA Experiment 20001248 PARAMETER Experiment Name: At_Far-red-induction_P Parameter: Plant Line Value: Columbia
  misc_feature: MA Experiment 20001248 PARAMETER Experiment Name: At_Far-red-induction_P Parameter: Timepoint (hr) Value: 4
  misc_feature: MA Experiment 20001248 PARAMETER Experiment Name: At_Far-red-induction_P Parameter: Tissue Value: Whole Plant
  misc_feature: MA Experiment ID: 20001904 Result: Down-regulated in Transcription
  misc_feature: MA Experiment 20001904 PARAMETER Experiment Name: At_Drought_Reproduction_P Parameter: Age (day) Value: 37
  misc_feature: MA Experiment 20001904 PARAMETER Experiment Name: At_Drought_Reproduction_P Parameter: Organism Value: A. thaliana
  misc_feature: MA Experiment 20001904 PARAMETER Experiment Name: At_Drought_Reproduction_P Parameter: Plant Line Value: WS
  misc_feature: MA Experiment 20001904 PARAMETER Experiment Name: At_Drought_Reproduction_P Parameter: Timepoint (day) Value: 7
  misc_feature: MA Experiment 20001904 PARAMETER Experiment Name: At_Drought_Reproduction_P Parameter: Tissue Value: Rosettes
  misc_feature: MA Experiment 20001904 PARAMETER Experiment Name: At_Drought_Reproduction_P Parameter: Treatment Value: Drought vs. No Drought
  misc_feature: MA Experiment ID: 20001906 Result: Down-regulated in Transcription
  misc_feature: MA Experiment 20001906 PARAMETER Experiment Name: At_Drought_Reproduction_P Parameter: Age (day) Value: 35
  misc_feature: MA Experiment 20001906 PARAMETER Experiment Name: At_Drought_Reproduction_P Parameter: Organism Value: A. thaliana
  misc_feature: MA Experiment 20001906 PARAMETER Experiment Name: At_Drought_Reproduction_P Parameter: Plant Line Value: WS
  misc_feature: MA Experiment 20001906 PARAMETER Experiment Name: At_Drought_Reproduction_P Parameter: Timepoint (day) Value: 5
  misc_feature: MA Experiment 20001906 PARAMETER Experiment Name: At_Drought_Reproduction_P Parameter: Tissue Value: Siliques
  misc_feature: MA Experiment 20001906 PARAMETER Experiment Name: At_Drought_Reproduction_P Parameter: Treatment Value: Drought vs. No Drought
  misc_feature: MA Experiment ID: 20001907 Result: Down-regulated in Transcription
  misc_feature: MA Experiment 20001907 PARAMETER Experiment Name: At_Drought_Reproduction_P Parameter: Age (day) Value: 37
  misc_feature: MA Experiment 20001907 PARAMETER Experiment Name: At_Drought_Reproduction_P Parameter: Organism Value: A. thaliana
  misc_feature: MA Experiment 20001907 PARAMETER Experiment Name: At_Drought_Reproduction_P Parameter: Plant Line Value: WS
  misc_feature: MA Experiment 20001907 PARAMETER Experiment Name: At_Drought_Reproduction_P Parameter: Timepoint (day) Value: 7
  misc_feature: MA Experiment 20001907 PARAMETER Experiment Name: At_Drought_Reproduction_P Parameter: Tissue Value: Siliques
  misc_feature: MA Experiment 20001907 PARAMETER Experiment Name: At_Drought_Reproduction_P Parameter: Treatment Value: Drought vs. No Drought
  misc_feature: MA Experiment ID: 20001908 Result: Down-regulated in Transcription
  misc_feature: MA Experiment 20001908 PARAMETER Experiment Name: At_Drought_Reproduction_P Parameter: Age (day) Value: 40
  misc_feature: MA Experiment 20001908 PARAMETER Experiment Name: At_Drought_Reproduction_P Parameter: Organism Value: A. thaliana
  misc_feature: MA Experiment 20001908 PARAMETER Experiment Name: At_Drought_Reproduction_P Parameter: Plant Line Value: WS
  misc_feature: MA Experiment 20001908 PARAMETER Experiment Name: At_Drought_Reproduction_P Parameter: Timepoint (day) Value: 10
  misc_feature: MA Experiment 20001908 PARAMETER Experiment Name: At_Drought_Reproduction_P Parameter: Tissue Value: Siliques
  misc_feature: MA Experiment 20001908 PARAMETER Experiment Name: At_Drought_Reproduction_P Parameter: Treatment Value: Drought vs. No Drought
  misc_feature: MA Experiment ID: 20001911 Result: Down-regulated in Transcription
  misc_feature: MA Experiment 20001911 PARAMETER Experiment Name: At_Drought_Reproduction_P Parameter: Age (day) Value: 40
  misc_feature: MA Experiment 20001911 PARAMETER Experiment Name: At_Drought_Reproduction_P Parameter: Organism Value: A. thaliana
  misc_feature: MA Experiment 20001911 PARAMETER Experiment Name: At_Drought_Reproduction_P Parameter: Plant Line Value: WS
  misc_feature: MA Experiment 20001911 PARAMETER Experiment Name: At_Drought_Reproduction_P Parameter: Timepoint (day) Value: 10
  misc_feature: MA Experiment 20001911 PARAMETER Experiment Name: At_Drought_Reproduction_P Parameter: Tissue Value: Flowers
  misc_feature: MA Experiment 20001911 PARAMETER Experiment Name: At_Drought_Reproduction_P Parameter: Treatment Value: Drought vs. No Drought
catcaaaattcaaaaccaacaccatggataagacagcgacattactttccactctcttgttcttgttcacattcctcacgacctgtttgtctaaagatctctgtaaccaaaatgacaaaaacaccctcctcaagatcaagaaatctctaaacaacccttatcacctcgcttcatgggaccctcaaaccgactgttgctcctggtactgccttgagtgcggcgacgccaccgttaaccaccgtgttaccgccttaaccatattctccggccagatctccggtcagatcccggctgaagtcggtgacttgccgtatcttgagacccttgtcttccgcaaactctctaacctcaccggtacaatccaacccaccatcgccaaactcaagaacctccgaatgctcaggctcagctggacgaatctgacaggtccaattcctgactttataagtcagctcaagaatctcgagttcttagaactttccttcaatgatctctctggttccattccaagttctctctctacgttacctaaaatcttggctcttgaacttagcaggaacaaacttacaggttccataccagagtcatttgggtcgtttccaggaacagtccctgaccttcgcctatcacataaccagctctccggtccaatacccaaatcattaggcaacatcgactttaaccggatcgatttatcccgcaacaagctccaaggtgatgcttcgatgttgtttggttccaacaaaacaacctggtctattgacttatcaagaaacatgttccagttcgatatctcaaaggttgatatccctaaaacacttggtatcttggacttgaaccacaatgggatcactgggaatattccggtgcagtggactgaagctcctcttcagttcttcaatgttagctacaacaaactgtgtggacacatcccaactggagggaaacttcagacatttgattcttattcctattttcacaacaagtgtttgtgtggtgctcctcttgaaatttgcaagtaaaccaagcttatctctaggattacgaaaaaatatatttgagtcaataatatagacaaatatgtaatgttattcggattgattaataaaacatgaaccaaacctctcattcg

SEQ ID NO: 27080 - protein, 339 aa, Arabidopsis thaliana
  peptide (1)..(339): Ceres Seq. ID no. 12325366
  misc_feature (129)..(152): Pfam Name: Leucine Rich Repeat Pfam Description: Leucine Rich Repeat
  misc_feature (16)..(339): Homolog of NCBI NO: 18148925 NR Description: polygalacturonase-inhibitor protein [Citrus sp.
  misc_feature (8)..(338): Homolog of NCBI NO: 22256016 NR Description: polygalacturonase inhibitor protein [Brassica
  misc_feature (10)..(339): Homolog of NCBI NO: 22324851 NR Description: polygalacturonase inhibitory protein [Brassica
  misc_feature (14)..(339): Homolog of NCBI NO: 7800201 NR Description: polygalacturonase inhibiting protein 2; PGIP2
  misc_feature (16)..(339): Homolog of NCBI NO: 18148923 NR Description: polygalacturonase-inhibitor protein [Citrus sp.
  misc_feature (16)..(339): Homolog of NCBI NO: 18148376 NR Description: polygalacturonase-inhibitor protein [Citrus sp.
  misc_feature (8)..(339): Homolog of NCBI NO: 15240183 NR Description: polygalacturonase inhibiting protein (PGIP2)
  misc_feature (8)..(339): Homolog of NCBI NO: 26094811 NR Description: polygalacturonase inhibitor protein [Brassica
  misc_feature (8)..(339): Homolog of NCBI NO: 15240182 NR Description: polygalacturonase inhibiting protein (PGIP1)
  misc_feature (8)..(339): Homolog of NCBI NO: 21593869 NR Description: polygalacturonase inhibiting protein 1
SKFKTNTMDKTATLLSTLLFLFTFLTTCLSKDLCNQNDKNTLLKIKKSLNNPYHLASWDPQTDCCSWYCLECGDATVNHRVTALTIFSGQISGQIPAEVGDLPYLETLVFRKLSNLTGTIQPTIAKLKNLRMLRLSWTNLTGPIPDFISQLKNLEFLELSFNDLSGSIPSSLSTLPKILALELSRNKLTGSIPESFGSFPGTVPDLRLSHNQLSGPIPKSLGNIDFNRIDLSRNKLQGDASMLFGSNKTTWSIDLSRNMFQFDISKVDIPKTLGILDLNHNGITGNIPVQWTEAPLQFFNVSYNKLCGHIPTGGKLQTFDSYSYFHNKCLCGAPLEICK

SEQ ID NO: 27081 - protein, 332 aa, Arabidopsis thaliana
  peptide (1)..(332): Ceres Seq. ID no. 12325367
  misc_feature (122)..(145): Pfam Name: Leucine Rich Repeat Pfam Description: Leucine Rich Repeat
  misc_feature (9)..(332): Homolog of NCBI NO: 18148923 NR Description: polygalacturonase-inhibitor protein [Citrus sp.
  misc_feature (9)..(332): Homolog of NCBI NO: 18148376 NR Description: polygalacturonase-inhibitor protein [Citrus sp.
  misc_feature (9)..(332): Homolog of NCBI NO: 18148925 NR Description: polygalacturonase-inhibitor protein [Citrus sp.
  misc_feature (1)..(331): Homolog of NCBI NO: 22256016 NR Description: polygalacturonase inhibitor protein [Brassica
  misc_feature (3)..(332): Homolog of NCBI NO: 22324851 NR Description: polygalacturonase inhibitory protein [Brassica
  misc_feature (7)..(332): Homolog of NCBI NO: 7800201 NR Description: polygalacturonase inhibiting protein 2; PGIP2
  misc_feature (1)..(332): Homolog of NCBI NO: 15240183 NR Description: polygalacturonase inhibiting protein (PGIP2)
  misc_feature (1)..(332): Homolog of NCBI NO: 26094811 NR Description: polygalacturonase inhibitor protein [Brassica
  misc_feature (1)..(332): Homolog of NCBI NO: 15240182 NR Description: polygalacturonase inhibiting protein (PGIP1)
  misc_feature (1)..(332): Homolog of NCBI NO: 21593869 NR Description: polygalacturonase inhibiting protein 1
MDKTATLLSTLLFLFTFLTTCLSKDLCNQNDKNTLLKIKKSLNNPYHLASWDPQTDCCSWYCLECGDATVNHRVTALTIFSGQISGQIPAEVGDLPYLETLVFRKLSNLTGTIQPTIAKLKNLRMLRLSWTNLTGPIPDFISQLKNLEFLELSFNDLSGSIPSSLSTLPKILALELSRNKLTGSIPESFGSFPGTVPDLRLSHNQLSGPIPKSLGNIDFNRIDLSRNKLQGDASMLFGSNKTTWSIDLSRNMFQFDISKVDIPKTLGILDLNHNGITGNIPVQWTEAPLQFFNVSYNKLCGHIPTGGKLQTFDSYSYFHNKCLCGAPLEICK

SEQ ID NO: 27082 - protein, 208 aa, Arabidopsis thaliana
  peptide (1)..(208): Ceres Seq. ID no. 12325368
  misc_feature (1)..(21): Pfam Name: Leucine Rich Repeat Pfam Description: Leucine Rich Repeat
  misc_feature (1)..(208): Homolog of NCBI NO: 18148923 NR Description: polygalacturonase-inhibitor protein [Citrus sp.
  misc_feature (1)..(208): Homolog of NCBI NO: 18148376 NR Description: polygalacturonase-inhibitor protein [Citrus sp.
  misc_feature (1)..(208): Homolog of NCBI NO: 18148925 NR Description: polygalacturonase-inhibitor protein [Citrus sp.
  misc_feature (1)..(207): Homolog of NCBI NO: 22256016 NR Description: polygalacturonase inhibitor protein [Brassica
  misc_feature (1)..(208): Homolog of NCBI NO: 22324851 NR Description: polygalacturonase inhibitory protein [Brassica
  misc_feature (1)..(208): Homolog of NCBI NO: 7800201 NR Description: polygalacturonase inhibiting protein 2; PGIP2
  misc_feature (1)..(208): Homolog of NCBI NO: 15240183 NR Description: polygalacturonase inhibiting protein (PGIP2)
  misc_feature (1)..(208): Homolog of NCBI NO: 26094811 NR Description: polygalacturonase inhibitor protein [Brassica
  misc_feature (1)..(208): Homolog of NCBI NO: 15240182 NR Description: polygalacturonase inhibiting protein (PGIP1)
  misc_feature (1)..(208): Homolog of NCBI NO: 21593869 NR Description: polygalacturonase inhibiting protein 1
MLRLSWTNLTGPIPDFISQLKNLEFLELSFNDLSGSIPSSLSTLPKILALELSRNKLTGSIPESFGSFPGTVPDLRLSHNQLSGPIPKSLGNIDFNRIDLSRNKLQGDASMLFGSNKTTWSIDLSRNMFQFDISKVDIPKTLGILDLNHNGITGNIPVQWTEAPLQFFNVSYNKLCGHIPTGGKLQTFDSYSYFHNKCLCGAPLEICK

SEQ ID NO: 27083 - DNA, 628 bp, Arabidopsis thaliana
  misc_feature (1)..(628): Ceres Seq. ID no. 13487326
  misc_feature: MA Experiment ID: 108488 Result: Down-regulated in Transcription
  misc_feature: MA Experiment ID: 108489 Result: Up-regulated in Transcription
  misc_feature: MA Experiment ID: 20000264 Result: Up-regulated in Transcription
  misc_feature: MA Experiment 20000264 PARAMETER Experiment Name: At_Open_Flower_P Parameter: Age (day) Value: 21
  misc_feature: MA Experiment 20000264 PARAMETER Experiment Name: At_Open_Flower_P Parameter: Plant Line Value: WS
  misc_feature: MA Experiment 20000264 PARAMETER Experiment Name: At_Open_Flower_P Parameter: Tissue Value: Open Flower vs. Whole Plant
  misc_feature: MA Experiment ID: 20000794 Result: Up-regulated in Transcription
  misc_feature: MA Experiment 20000794 PARAMETER Experiment Name: At_Petals_P Parameter: Age (day) Value: 23-25 days
  misc_feature: MA Experiment 20000794 PARAMETER Experiment Name: At_Petals_P Parameter: Plant Line Value: WS
  misc_feature: MA Experiment 20000794 PARAMETER Experiment Name: At_Petals_P Parameter: Tissue Value: Petals vs. Whole plant
  misc_feature: MA Experiment ID: 20001910 Result: Up-regulated in Transcription
  misc_feature: MA Experiment 20001910 PARAMETER Experiment Name: At_Drought_Reproduction_P Parameter: Age (day) Value: 37
  misc_feature: MA Experiment 20001910 PARAMETER Experiment Name: At_Drought_Reproduction_P Parameter: Organism Value: A. thaliana
  misc_feature: MA Experiment 20001910 PARAMETER Experiment Name: At_Drought_Reproduction_P Parameter: Plant Line Value: WS
  misc_feature: MA Experiment 20001910 PARAMETER Experiment Name: At_Drought_Reproduction_P Parameter: Timepoint (day) Value: 7
  misc_feature: MA Experiment 20001910 PARAMETER Experiment Name: At_Drought_Reproduction_P Parameter: Tissue Value: Flowers
  misc_feature: MA Experiment 20001910 PARAMETER Experiment Name: At_Drought_Reproduction_P Parameter: Treatment Value: Drought vs. No Drought
ttgtcctcttctcaaacatatctcaacttattgtttgaatataaaaagagatatcaaaaagaagagaagaccaaaaacaaaacaaaaatctctaataaaaatggcttccaaagctatcttcttctctttctttgtcgtctccgccgtgtgtttgtcttctctggcaggtttcgccgccgctgatgctgacgacttcgatcgtttccagattcaaggatcagtttactgtgacacttgccgtgtccaattcgttacccgtctcagcaaattcctcgaaggcgcgaaagtgaagttggagtgcaggagcagaacaaacggaaccataacattgaccaaagaagctgttaccgacaaaacaggaagctacaaaatggaagtaaccggtgaccacgaggaagaagtttgcgagcttgttttggtccaatcaccagacagtggttgcagtgatgtcagcacagaggcttacttacgtaacgccgctaagatcagtttaacggcgaatgacggaatcgtctcccacgagacacgtattgttaaccctctcggtttcatggttcagactccattggctgattgtcctgctgccttcaaggagcttggtattgtccctgacgtaacattctaagcg

SEQ ID NO: 27084 - protein, 207 aa, Arabidopsis thaliana
  peptide (1)..(207): Ceres Seq. ID no. 13487327
  misc_feature (70)..(194): Pfam Name: Pollen proteins Ole e I family Pfam Description: Pollen proteins Ole e I family
  misc_feature (45)..(203): Homolog of NCBI NO: 125887 NR Description: Anther specific LAT52 protein precursor
  misc_feature (43)..(201): Homolog of NCBI NO: 22074346 NR Description: Che a 1 allergen precursor [Chenopodium album]
  misc_feature (48)..(204): Homolog of NCBI NO: 28380096 NR Description: Olee1-like protein precursor
  misc_feature (93)..(207): Homolog of NCBI NO: 28393099 NR Description: unknown protein [Arabidopsis thaliana]
  misc_feature (38)..(207): Homolog of NCBI NO: 15218844 NR Description: expressed protein [Arabidopsis thaliana]
  misc_feature (51)..(207): Homolog of NCBI NO: 9758935 NR Description: Ole e I (main olive allergen)-like protein
  misc_feature (34)..(207): Homolog of NCBI NO: 18415132 NR Description: Ole e I (main olive allergen)-related protein
  misc_feature (3)..(204): Homolog of NCBI NO: 7486300 NR Description: hypothetical protein F28J12.250 - Arabidopsis
  misc_feature (34)..(207): Homolog of NCBI NO: 21593871 NR Description: Ole e I (main olive allergen)-like protein
  misc_feature (34)..(207): Homolog of NCBI NO: 18422603 NR Description: Ole e I (main olive allergen)-related protein
CPLLKHISTYCLNIKRDIKKKRRPKTKQKSLIKMASKAIFFSFFVVSAVCLSSLAGFAAADADDFDRFQIQGSVYCDTCRVQFVTRLSKFLEGAKVKLECRSRTNGTITLTKEAVTDKTGSYKMEVTGDHEEEVCELVLVQSPDSGCSDVSTEAYLRNAAKISLTANDGIVSHETRIVNPLGFMVQTPLADCPAAFKELGIVPDVTF

SEQ ID NO: 27085 - protein, 174 aa, Arabidopsis thaliana
  peptide (1)..(174): Ceres Seq. ID no. 13487328
  misc_feature (37)..(161): Pfam Name: Pollen proteins Ole e I family Pfam Description: Pollen proteins Ole e I family
  misc_feature (12)..(170): Homolog of NCBI NO: 125887 NR Description: Anther specific LAT52 protein precursor
  misc_feature (10)..(168): Homolog of NCBI NO: 22074346 NR Description: Che a 1 allergen precursor [Chenopodium album]
  misc_feature (15)..(171): Homolog of NCBI NO: 28380096 NR Description: Olee1-like protein precursor
  misc_feature (60)..(174): Homolog of NCBI NO: 28393099 NR Description: unknown protein [Arabidopsis thaliana]
  misc_feature (5)..(174): Homolog of NCBI NO: 15218844 NR Description: expressed protein [Arabidopsis thaliana]
  misc_feature (18)..(174): Homolog of NCBI NO: 9758935 NR Description: Ole e I (main olive allergen)-like protein
  misc_feature (1)..(174): Homolog of NCBI NO: 18415132 NR Description: Ole e I (main olive allergen)-related protein
  misc_feature (1)..(171): Homolog of NCBI NO: 7486300 NR Description: hypothetical protein F28J12.250 - Arabidopsis
  misc_feature (1)..(174): Homolog of NCBI NO: 21593871 NR Description: Ole e I (main olive allergen)-like protein
  misc_feature (1)..(174): Homolog of NCBI NO: 18422603 NR Description: Ole e I (main olive allergen)-related protein
MASKAIFFSFFVVSAVCLSSLAGFAAADADDFDRFQIQGSVYCDTCRVQFVTRLSKFLEGAKVKLECRSRTNGTITLTKEAVTDKTGSYKMEVTGDHEEEVCELVLVQSPDSGCSDVSTEAYLRNAAKISLTANDGIVSHETRIVNPLGFMVQTPLADCPAAFKELGIVPDVTF

SEQ ID NO: 27086 - DNA, 914 bp, Arabidopsis thaliana
  misc_feature (1)..(914): Ceres Seq. ID no. 13487345
  misc_feature: MA Experiment ID: 108433 Result: Up-regulated in Transcription
  misc_feature: MA Experiment 108433 PARAMETER Experiment Name: At_rhl_Mutant2_cDNA_P Parameter: Age (day) Value: 7
  misc_feature: MA Experiment 108433 PARAMETER Experiment Name: At_rhl_Mutant2_cDNA_P Parameter: Organism Value: A. thaliana
  misc_feature: MA Experiment 108433 PARAMETER Experiment Name: At_rhl_Mutant2_cDNA_P Parameter: Plant Line Value: rhl Mutant vs. wt landsburg
  misc_feature: MA Experiment 108433 PARAMETER Experiment Name: At_rhl_Mutant2_cDNA_P Parameter: Tissue Value: Roots
  misc_feature: MA Experiment ID: 108434 Result: Down-regulated in Transcription
  misc_feature: MA Experiment 108434 PARAMETER Experiment Name: At_Root_Tips_cDNA_P Parameter: Tissue Value: Root Tips
  misc_feature: MA Experiment ID: 108461 Result: Down-regulated in Transcription
  misc_feature: MA Experiment 108461 PARAMETER Experiment Name: At_Germinating_Seeds_cDNA_P Parameter: Age (day) Value: 1 vs. 0
  misc_feature: MA Experiment 108461 PARAMETER Experiment Name: At_Germinating_Seeds_cDNA_P Parameter: Tissue Value: Germinating Seeds
  misc_feature: MA Experiment ID: 108464 Result: Up-regulated in Transcription
  misc_feature: MA Experiment 108464 PARAMETER Experiment Name: At_Germinating_Seeds_cDNA_P Parameter: Age (day) Value: 4 vs. 0
  misc_feature: MA Experiment 108464 PARAMETER Experiment Name: At_Germinating_Seeds_cDNA_P Parameter: Tissue Value: Germinating Seeds
  misc_feature: MA Experiment ID: 108488 Result: Down-regulated in Transcription
  misc_feature: MA Experiment ID: 108489 Result: Up-regulated in Transcription
  misc_feature: MA Experiment ID: 108561 Result: Up-regulated in Transcription
  misc_feature: MA Experiment 108561 PARAMETER Experiment Name: At_100uM_ABA_cDNA_P Parameter: Timepoint (hr) Value: 6
  misc_feature: MA Experiment 108561 PARAMETER Experiment Name: At_100uM_ABA_cDNA_P Parameter: Tissue Value: Aerial
  misc_feature: MA Experiment 108561 PARAMETER Experiment Name: At_100uM_ABA_cDNA_P Parameter: Treatment Value: 100uM ABA vs. No Treatment
  misc_feature: MA Experiment ID: 108579 Result: Down-regulated in Transcription
  misc_feature: MA Experiment 108579 PARAMETER Experiment Name: At_4deg_Cold_cDNA_P Parameter: Temperature (deg C) Value: 4 vs. 22
  misc_feature: MA Experiment 108579 PARAMETER Experiment Name: At_4deg_Cold_cDNA_P Parameter: Timepoint (hr) Value: 6
  misc_feature: MA Experiment 108579 PARAMETER Experiment Name: At_4deg_Cold_cDNA_P Parameter: Tissue Value: Aerial
  misc_feature: MA Experiment ID: 108668 Result: Up-regulated in Transcription
  misc_feature: MA Experiment 108668 PARAMETER Experiment Name: At_2mM_SA_cDNA_P Parameter: Plant Line Value: WS
  misc_feature: MA Experiment 108668 PARAMETER Experiment Name: At_2mM_SA_cDNA_P Parameter: Timepoint (hr) Value: 6
  misc_feature: MA Experiment 108668 PARAMETER Experiment Name: At_2mM_SA_cDNA_P Parameter: Treatment Value: 2mM SA vs. No Treatment
  misc_feature: MA Experiment ID: 20000070 Result: Up-regulated in Transcription
  misc_feature: MA Experiment 20000070 PARAMETER Experiment Name: At_100uM_ABA_Mutants_cDNA_P Parameter: Plant Line Value: CS24
  misc_feature: MA Experiment 20000070 PARAMETER Experiment Name: At_100uM_ABA_Mutants_cDNA_P Parameter: Timepoint (hr) Value: 6
  misc_feature: MA Experiment 20000070 PARAMETER Experiment Name: At_100uM_ABA_Mutants_cDNA_P Parameter: Tissue Value: Aerial
  misc_feature: MA Experiment 20000070 PARAMETER Experiment Name: At_100uM_ABA_Mutants_cDNA_P Parameter: Treatment Value: 100uM ABA vs. No Treatment
  misc_feature: MA Experiment ID: 20000087 Result: Up-regulated in Transcription
  misc_feature: MA Experiment 20000087 PARAMETER Experiment Name: At_100uM_ABA_Mutants_cDNA_P Parameter: Plant Line Value: WS
  misc_feature: MA Experiment 20000087 PARAMETER Experiment Name: At_100uM_ABA_Mutants_cDNA_P Parameter: Timepoint (hr) Value: 6
  misc_feature: MA Experiment 20000087 PARAMETER Experiment Name: At_100uM_ABA_Mutants_cDNA_P Parameter: Tissue Value: Aerial
  misc_feature: MA Experiment 20000087 PARAMETER Experiment Name: At_100uM_ABA_Mutants_cDNA_P Parameter: Treatment Value: 100uM ABA vs. No Treatment
  misc_feature: MA Experiment ID: 20000117 Result: Up-regulated in Transcription
  misc_feature: MA Experiment 20000117 PARAMETER Experiment Name: At_100uM_ABA_Mutants_cDNA_P Parameter: Plant Line Value: Columbia
  misc_feature: MA Experiment 20000117 PARAMETER Experiment Name: At_100uM_ABA_Mutants_cDNA_P Parameter: Timepoint (hr) Value: 6
  misc_feature: MA Experiment 20000117 PARAMETER Experiment Name: At_100uM_ABA_Mutants_cDNA_P Parameter: Tissue Value: Aerial
  misc_feature: MA Experiment 20000117 PARAMETER Experiment Name: At_100uM_ABA_Mutants_cDNA_P Parameter: Treatment Value: 100uM ABA vs. No Treatment
  misc_feature: MA Experiment ID: 20000179 Result: Down-regulated in Transcription
  misc_feature: MA Experiment 20000179 PARAMETER Experiment Name: At_Germinating_Seeds_P Parameter: Age (hr) Value: 6 vs. 0
  misc_feature: MA Experiment 20000179 PARAMETER Experiment Name: At_Germinating_Seeds_P Parameter: Tissue Value: Germinating Seeds
  misc_feature: MA Experiment ID: 20000180 Result: Down-regulated in Transcription
  misc_feature: MA Experiment 20000180 PARAMETER Experiment Name: At_Germinating_Seeds_P Parameter: Age (hr) Value: 24 vs. 0
  misc_feature: MA Experiment 20000180 PARAMETER Experiment Name: At_Germinating_Seeds_P Parameter: Tissue Value: Germinating Seeds
  misc_feature: MA Experiment ID: 20000184 Result: Down-regulated in Transcription
  misc_feature: MA Experiment 20000184 PARAMETER Experiment Name: At_Shoots__P Parameter: Age (day) Value: 7
  misc_feature: MA Experiment 20000184 PARAMETER Experiment Name: At_Shoots__P Parameter: Tissue Value: Shoots vs. Whole Plant
  misc_feature: MA Experiment ID: 20000185 Result: Up-regulated in Transcription
  misc_feature: MA Experiment 20000185 PARAMETER Experiment Name: At_Roots__P Parameter: Age (day) Value: 7 vs. 21
  misc_feature: MA Experiment 20000185 PARAMETER Experiment Name: At_Roots__P Parameter: Organism Value: A. thaliana
  misc_feature: MA Experiment 20000185 PARAMETER Experiment Name: At_Roots__P Parameter: Tissue Value: Roots vs. Whole Plant
  misc_feature: MA Experiment ID: 20000224 Result: Down-regulated in Transcription
  misc_feature: MA Experiment ID: 20000227 Result: Down-regulated in Transcription
  misc_feature: MA Experiment 20000227 PARAMETER Experiment Name: At_Root-Tips-vs-Tops_P Parameter: Tissue Value: Root Tips vs. Root Tops
  misc_feature: MA Experiment ID: 20000234 Result: Down-regulated in Transcription
  misc_feature: MA Experiment 20000234 PARAMETER Experiment Name: At_Siliques_P Parameter: Age (day) Value: 21
  misc_feature: MA Experiment 20000234 PARAMETER Experiment Name: At_Siliques_P Parameter: Organism Value: A. thaliana
  misc_feature: MA Experiment 20000234 PARAMETER Experiment Name: At_Siliques_P Parameter: Plant Line Value: WS
  misc_feature: MA Experiment 20000234 PARAMETER Experiment Name: At_Siliques_P Parameter: Tissue Value: Less Than 5mm Siliques vs. Whole Plant
  misc_feature: MA Experiment ID: 20000235 Result: Down-regulated in Transcription
  misc_feature: MA Experiment 20000235 PARAMETER Experiment Name: At_Siliques_P Parameter: Age (day) Value: 21
  misc_feature: MA Experiment 20000235 PARAMETER Experiment Name: At_Siliques_P Parameter: Organism Value: A. thaliana
  misc_feature: MA Experiment 20000235 PARAMETER Experiment Name: At_Siliques_P Parameter: Plant Line Value: WS
  misc_feature: MA Experiment 20000235 PARAMETER Experiment Name: At_Siliques_P Parameter: Tissue Value: 5-10mm Siliques vs. Whole Plant
  misc_feature: MA Experiment ID: 20000264 Result: Down-regulated in Transcription
  misc_feature: MA Experiment 20000264 PARAMETER Experiment Name: At_Open_Flower_P Parameter: Age (day) Value: 21
  misc_feature: MA Experiment 20000264 PARAMETER Experiment Name: At_Open_Flower_P Parameter: Plant Line Value: WS
  misc_feature: MA Experiment 20000264 PARAMETER Experiment Name: At_Open_Flower_P Parameter: Tissue Value: Open Flower vs. Whole Plant
  misc_feature: MA Experiment ID: 20000265 Result: Down-regulated in Transcription
  misc_feature: MA Experiment 20000265 PARAMETER Experiment Name: At_Open_Flower_P Parameter: Age (day) Value: 21
  misc_feature: MA Experiment 20000265 PARAMETER Experiment Name: At_Open_Flower_P Parameter: Plant Line Value: WS
  misc_feature: MA Experiment 20000265 PARAMETER Experiment Name: At_Open_Flower_P Parameter: Tissue Value: Closed Flower vs. Whole Plant
  misc_feature: MA Experiment ID: 20000267 Result: Down-regulated in Transcription
  misc_feature: MA Experiment 20000267 PARAMETER Experiment Name: At_Drought_P Parameter: Age (day) Value: 7
  misc_feature: MA Experiment 20000267 PARAMETER Experiment Name: At_Drought_P Parameter: Organism Value: A. thaliana
  misc_feature: MA Experiment 20000267 PARAMETER Experiment Name: At_Drought_P Parameter: Plant Line Value: WS
  misc_feature: MA Experiment 20000267 PARAMETER Experiment Name: At_Drought_P Parameter: Timepoint (hr) Value: 6
  misc_feature: MA Experiment 20000267 PARAMETER Experiment Name: At_Drought_P Parameter: Tissue Value: Whole Plant
  misc_feature: MA Experiment 20000267 PARAMETER Experiment Name: At_Drought_P Parameter: Treatment Value: Drought vs. No Drought
  misc_feature: MA Experiment ID: 20000438 Result: Down-regulated in Transcription
  misc_feature: MA Experiment 20000438 PARAMETER Experiment Name: At_Shoots__P Parameter: Age (day) Value: 14
  misc_feature: MA Experiment 20000438 PARAMETER Experiment Name: At_Shoots__P Parameter: Tissue Value: Shoots vs. Whole Plant
  misc_feature: MA Experiment ID: 20000441 Result: Up-regulated in Transcription
  misc_feature: MA Experiment 20000441 PARAMETER Experiment Name: At_1uM_BR-BRZ__P Parameter: Tissue Value: Shoot Apices
  misc_feature: MA Experiment 20000441 PARAMETER Experiment Name: At_1uM_BR-BRZ__P Parameter: Treatment Value: 1uM BR vs. No Treatment
  misc_feature: MA Experiment ID: 20000443 Result: Up-regulated in Transcription
  misc_feature: MA Experiment 20000443 PARAMETER Experiment Name: At_1uM_BR-BRZ__P Parameter: Tissue Value: Shoot Apices
  misc_feature: MA Experiment 20000443 PARAMETER Experiment Name: At_1uM_BR-BRZ__P Parameter: Treatment Value: 1uM BRZ vs. No Treatment
  misc_feature: MA Experiment ID: 20000794 Result: Down-regulated in Transcription
  misc_feature: MA Experiment 20000794 PARAMETER Experiment Name: At_Petals_P Parameter: Age (day) Value: 23-25 days
  misc_feature: MA Experiment 20000794 PARAMETER Experiment Name: At_Petals_P Parameter: Plant Line Value: WS
  misc_feature: MA Experiment 20000794 PARAMETER Experiment Name: At_Petals_P Parameter: Tissue Value: Petals vs. Whole plant
  misc_feature: MA Experiment ID: 20001248 Result: Up-regulated in Transcription
  misc_feature: MA Experiment 20001248 PARAMETER Experiment Name: At_Far-red-induction_P Parameter: Age (day) Value: 7
  misc_feature: MA Experiment 20001248 PARAMETER Experiment Name: At_Far-red-induction_P Parameter: Light Value: Far-red vs. White
  misc_feature: MA Experiment 20001248 PARAMETER Experiment Name: At_Far-red-induction_P Parameter: Organism Value: A. thaliana
  misc_feature: MA Experiment 20001248 PARAMETER Experiment Name: At_Far-red-induction_P Parameter: Plant Line Value: Columbia
  misc_feature: MA Experiment 20001248 PARAMETER Experiment Name: At_Far-red-induction_P Parameter: Timepoint (hr) Value: 4
  misc_feature: MA Experiment 20001248 PARAMETER Experiment Name: At_Far-red-induction_P Parameter: Tissue Value: Whole Plant
  misc_feature: MA Experiment ID: 20001450 Result: Up-regulated in Transcription
  misc_feature: MA Experiment 20001450 PARAMETER Experiment Name: At_Far-red-induction_P Parameter: Age (day) Value: 7
  misc_feature: MA Experiment 20001450 PARAMETER Experiment Name: At_Far-red-induction_P Parameter: Light Value: Far-red vs. White
  misc_feature: MA Experiment 20001450 PARAMETER Experiment Name: At_Far-red-induction_P Parameter: Organism Value: A. thaliana
  misc_feature: MA Experiment 20001450 PARAMETER Experiment Name: At_Far-red-induction_P Parameter: Plant Line Value: Columbia
  misc_feature: MA Experiment 20001450 PARAMETER Experiment Name: At_Far-red-induction_P Parameter: Timepoint (hr) Value: 8
  misc_feature: MA Experiment 20001450 PARAMETER Experiment Name: At_Far-red-induction_P Parameter: Tissue Value: Whole Plant
  misc_feature: MA Experiment ID: 20001451 Result: Up-regulated in Transcription
  misc_feature: MA Experiment 20001451 PARAMETER Experiment Name: At_Far-red-induction_P Parameter: Age (day) Value: 7
  misc_feature: MA Experiment 20001451 PARAMETER Experiment Name: At_Far-red-induction_P Parameter: Light Value: Far-red vs. White
  misc_feature: MA Experiment 20001451 PARAMETER Experiment Name: At_Far-red-induction_P Parameter: Organism Value: A. thaliana
  misc_feature: MA Experiment 20001451 PARAMETER Experiment Name: At_Far-red-induction_P Parameter: Plant Line Value: Columbia
  misc_feature: MA Experiment 20001451 PARAMETER Experiment Name: At_Far-red-induction_P Parameter: Timepoint (hr) Value: 24
  misc_feature: MA Experiment 20001451 PARAMETER Experiment Name: At_Far-red-induction_P Parameter: Tissue Value: Whole Plant
  misc_feature: MA Experiment ID: 20001503 Result: Down-regulated in Transcription
  misc_feature: MA Experiment 20001503 PARAMETER Experiment Name: At_Far-red-enriched_P Parameter: Age (day) Value: 7
  misc_feature: MA Experiment 20001503 PARAMETER Experiment Name: At_Far-red-enriched_P Parameter: Light Value: Far-red enriched vs. White
  misc_feature: MA Experiment 20001503 PARAMETER Experiment Name: At_Far-red-enriched_P Parameter: Organism Value: A. thaliana
  misc_feature: MA Experiment 20001503 PARAMETER Experiment Name: At_Far-red-enriched_P Parameter: Plant Line Value: Columbia
  misc_feature: MA Experiment 20001503 PARAMETER Experiment Name: At_Far-red-enriched_P Parameter: Timepoint (day) Value: 3
  misc_feature: MA Experiment 20001503 PARAMETER Experiment Name: At_Far-red-enriched_P Parameter: Tissue Value: Whole Plant
  misc_feature: MA Experiment ID: 20001504 Result: Down-regulated in Transcription
  misc_feature: MA Experiment 20001504 PARAMETER Experiment Name: At_Far-red-enriched_P Parameter: Age (day) Value: 10
  misc_feature: MA Experiment 20001504 PARAMETER Experiment Name: At_Far-red-enriched_P Parameter: Light Value: Far-red enriched vs. White
  misc_feature: MA Experiment 20001504 PARAMETER Experiment Name: At_Far-red-enriched_P Parameter: Organism Value: A. thaliana
  misc_feature: MA Experiment 20001504 PARAMETER Experiment Name: At_Far-red-enriched_P Parameter: Plant Line Value: Columbia
  misc_feature: MA Experiment 20001504 PARAMETER Experiment Name: At_Far-red-enriched_P Parameter: Timepoint (day) Value: 6
  misc_feature: MA Experiment 20001504 PARAMETER Experiment Name: At_Far-red-enriched_P Parameter: Tissue Value: Whole Plant
  misc_feature: MA Experiment ID: 20001556 Result: Up-regulated in Transcription
  misc_feature: MA Experiment 20001556 PARAMETER Experiment Name: At_Drought_Soil_Dry_P Parameter: Age (day) Value: 26
  misc_feature: MA Experiment 20001556 PARAMETER Experiment Name: At_Drought_Soil_Dry_P Parameter: Organism Value: A. thaliana
  misc_feature: MA Experiment 20001556 PARAMETER Experiment Name: At_Drought_Soil_Dry_P Parameter: Plant Line Value: WS
  misc_feature: MA Experiment 20001556 PARAMETER Experiment Name: At_Drought_Soil_Dry_P Parameter: Post Timepoint (hr) Value: None
  misc_feature: MA Experiment 20001556 PARAMETER Experiment Name: At_Drought_Soil_Dry_P Parameter: Post-Treatment Value: None
  misc_feature: MA Experiment 20001556 PARAMETER Experiment Name: At_Drought_Soil_Dry_P Parameter: Timepoint (day) Value: 12
  misc_feature: MA Experiment 20001556 PARAMETER Experiment Name: At_Drought_Soil_Dry_P Parameter: Treatment Value: Drought vs. No Drought
  misc_feature: MA Experiment ID: 20001557 Result: Up-regulated in Transcription
  misc_feature: MA Experiment 20001557 PARAMETER Experiment Name: At_Drought_Soil_Dry_P Parameter: Age (day) Value: 27
  misc_feature: MA Experiment 20001557 PARAMETER Experiment Name: At_Drought_Soil_Dry_P Parameter: Organism Value: A. thaliana
  misc_feature: MA Experiment 20001557 PARAMETER Experiment Name: At_Drought_Soil_Dry_P Parameter: Plant Line Value: WS
  misc_feature: MA Experiment 20001557 PARAMETER Experiment Name: At_Drought_Soil_Dry_P Parameter: Post Timepoint (hr) Value: 3
  misc_feature: MA Experiment 20001557 PARAMETER Experiment Name: At_Drought_Soil_Dry_P Parameter: Post-Treatment Value: Re-Water vs. No Drought
  misc_feature: MA Experiment 20001557 PARAMETER Experiment Name: At_Drought_Soil_Dry_P Parameter: Timepoint (day) Value: 13
  misc_feature: MA Experiment 20001557 PARAMETER Experiment Name: At_Drought_Soil_Dry_P Parameter: Treatment Value: Drought vs. No Drought
  misc_feature: MA Experiment ID: 20001558 Result: Up-regulated in Transcription
  misc_feature: MA Experiment 20001558 PARAMETER Experiment Name: At_Drought_Soil_Dry_P Parameter: Age (day) Value: 27
  misc_feature: MA Experiment 20001558 PARAMETER Experiment Name: At_Drought_Soil_Dry_P Parameter: Organism Value: A. thaliana
  misc_feature: MA Experiment 20001558 PARAMETER Experiment Name: At_Drought_Soil_Dry_P Parameter: Plant Line Value: WS
  misc_feature: MA Experiment 20001558 PARAMETER Experiment Name: At_Drought_Soil_Dry_P Parameter: Post Timepoint (hr) Value: 6
  misc_feature: MA Experiment 20001558 PARAMETER Experiment Name: At_Drought_Soil_Dry_P Parameter: Post-Treatment Value: Re-Water vs. No Drought
  misc_feature: MA Experiment 20001558 PARAMETER Experiment Name: At_Drought_Soil_Dry_P Parameter: Timepoint (day) Value: 13
  misc_feature: MA Experiment 20001558 PARAMETER Experiment Name: At_Drought_Soil_Dry_P Parameter: Treatment Value: Drought vs. No Drought
  misc_feature: MA Experiment ID: 20001559 Result: Up-regulated in Transcription
  misc_feature: MA Experiment 20001559 PARAMETER Experiment Name: At_Drought_Soil_Dry_P Parameter: Age (day) Value: 28
  misc_feature: MA Experiment 20001559 PARAMETER Experiment Name: At_Drought_Soil_Dry_P Parameter: Organism Value: A. thaliana
  misc_feature: MA Experiment 20001559 PARAMETER Experiment Name: At_Drought_Soil_Dry_P Parameter: Plant Line Value: WS
  misc_feature: MA Experiment 20001559 PARAMETER Experiment Name: At_Drought_Soil_Dry_P Parameter: Post Timepoint (hr) Value: 29
  misc_feature: MA Experiment 20001559 PARAMETER Experiment Name: At_Drought_Soil_Dry_P Parameter: Post-Treatment Value: Re-Water vs. No Drought
  misc_feature: MA Experiment 20001559 PARAMETER Experiment Name: At_Drought_Soil_Dry_P Parameter: Timepoint (day) Value: 14
  misc_feature: MA Experiment 20001559 PARAMETER Experiment Name: At_Drought_Soil_Dry_P Parameter: Treatment Value: Drought vs. No Drought
  misc_feature: MA Experiment ID: 20001560 Result: Up-regulated in Transcription
  misc_feature: MA Experiment 20001560 PARAMETER Experiment Name: At_Drought_Soil_Dry_P Parameter: Age (day) Value: 28
  misc_feature: MA Experiment 20001560 PARAMETER Experiment Name: At_Drought_Soil_Dry_P Parameter: Organism Value: A. thaliana
  misc_feature: MA Experiment 20001560 PARAMETER Experiment Name: At_Drought_Soil_Dry_P Parameter: Plant Line Value: WS
  misc_feature: MA Experiment 20001560 PARAMETER Experiment Name: At_Drought_Soil_Dry_P Parameter: Post Timepoint (hr) Value: None
  misc_feature: MA Experiment 20001560 PARAMETER Experiment Name: At_Drought_Soil_Dry_P Parameter: Post-Treatment Value: None
  misc_feature: MA Experiment 20001560 PARAMETER Experiment Name: At_Drought_Soil_Dry_P Parameter: Timepoint (day) Value: 14
  misc_feature: MA Experiment 20001560 PARAMETER Experiment Name: At_Drought_Soil_Dry_P Parameter: Treatment Value: Drought vs. No Drought
  misc_feature: MA Experiment ID: 20001904 Result: Up-regulated in Transcription
  misc_feature: MA Experiment 20001904 PARAMETER Experiment Name: At_Drought_Reproduction_P Parameter: Age (day) Value: 37
  misc_feature: MA Experiment 20001904 PARAMETER Experiment Name: At_Drought_Reproduction_P Parameter: Organism Value: A. thaliana
  misc_feature: MA Experiment 20001904 PARAMETER Experiment Name: At_Drought_Reproduction_P Parameter: Plant Line Value: WS
  misc_feature: MA Experiment 20001904 PARAMETER Experiment Name: At_Drought_Reproduction_P Parameter: Timepoint (day) Value: 7
  misc_feature: MA Experiment 20001904 PARAMETER Experiment Name: At_Drought_Reproduction_P Parameter: Tissue Value: Rosettes
  misc_feature: MA Experiment 20001904 PARAMETER Experiment Name: At_Drought_Reproduction_P Parameter: Treatment Value: Drought vs. No Drought
  misc_feature: MA Experiment ID: 20001905 Result: Up-regulated in Transcription
  misc_feature: MA Experiment 20001905 PARAMETER Experiment Name: At_Drought_Reproduction_P Parameter: Age (day) Value: 40
  misc_feature: MA Experiment 20001905 PARAMETER Experiment Name: At_Drought_Reproduction_P Parameter: Organism Value: A. thaliana
  misc_feature: MA Experiment 20001905 PARAMETER Experiment Name: At_Drought_Reproduction_P Parameter: Plant Line Value: WS
  misc_feature: MA Experiment 20001905 PARAMETER Experiment Name: At_Drought_Reproduction_P Parameter: Timepoint (day) Value: 10
  misc_feature: MA Experiment 20001905 PARAMETER Experiment Name: At_Drought_Reproduction_P Parameter: Tissue Value: Rosettes
  misc_feature: MA Experiment 20001905 PARAMETER Experiment Name: At_Drought_Reproduction_P Parameter: Treatment Value: Drought vs. No Drought
  misc_feature: MA Experiment ID: 20001906 Result: Up-regulated in Transcription
  misc_feature: MA Experiment 20001906 PARAMETER Experiment Name: At_Drought_Reproduction_P Parameter: Age (day) Value: 35
  misc_feature: MA Experiment 20001906 PARAMETER Experiment Name: At_Drought_Reproduction_P Parameter: Organism Value: A. thaliana
  misc_feature: MA Experiment 20001906 PARAMETER Experiment Name: At_Drought_Reproduction_P Parameter: Plant Line Value: WS
  misc_feature: MA Experiment 20001906 PARAMETER Experiment Name: At_Drought_Reproduction_P Parameter: Timepoint (day) Value: 5
  misc_feature: MA Experiment 20001906 PARAMETER Experiment Name: At_Drought_Reproduction_P Parameter: Tissue Value: Siliques
  misc_feature: MA Experiment 20001906 PARAMETER Experiment Name: At_Drought_Reproduction_P Parameter: Treatment Value: Drought vs. No Drought
  misc_feature: MA Experiment ID: 20001908 Result: Up-regulated in Transcription
  misc_feature: MA Experiment 20001908 PARAMETER Experiment Name: At_Drought_Reproduction_P Parameter: Age (day) Value: 40
  misc_feature: MA Experiment 20001908 PARAMETER Experiment Name: At_Drought_Reproduction_P Parameter: Organism Value: A. thaliana
  misc_feature: MA Experiment 20001908 PARAMETER Experiment Name: At_Drought_Reproduction_P Parameter: Plant Line Value: WS
  misc_feature: MA Experiment 20001908 PARAMETER Experiment Name: At_Drought_Reproduction_P Parameter: Timepoint (day) Value: 10
  misc_feature: MA Experiment 20001908 PARAMETER Experiment Name: At_Drought_Reproduction_P Parameter: Tissue Value: Siliques
  misc_feature: MA Experiment 20001908 PARAMETER Experiment Name: At_Drought_Reproduction_P Parameter: Treatment Value: Drought vs. No Drought
  misc_feature: MA Experiment ID: 20001911 Result: Up-regulated in Transcription
  misc_feature: MA Experiment 20001911 PARAMETER Experiment Name: At_Drought_Reproduction_P Parameter: Age (day) Value: 40
  misc_feature: MA Experiment 20001911 PARAMETER Experiment Name: At_Drought_Reproduction_P Parameter: Organism Value: A. thaliana
  misc_feature: MA Experiment 20001911 PARAMETER Experiment Name: At_Drought_Reproduction_P Parameter: Plant Line Value: WS
  misc_feature: MA Experiment 20001911 PARAMETER Experiment Name: At_Drought_Reproduction_P Parameter: Timepoint (day) Value: 10
  misc_feature: MA Experiment 20001911 PARAMETER Experiment Name: At_Drought_Reproduction_P Parameter: Tissue Value: Flowers
  misc_feature: MA Experiment 20001911 PARAMETER Experiment Name: At_Drought_Reproduction_P Parameter: Treatment Value: Drought vs. No Drought
tgagataagttccgtggttatcccattaaccttctttctacacaacacaaaactatatataaagatcatacatgtaataacgtcctgcaactattacaatcattctcgcttgaattaacgtggacgtcattgtttttggattgttaatcaaaggcggcgttacttttttttaatataattgtttctttaggatctttgtctctggaaaatgaaggaagacgcaggaaaccctttgcatctcacgtcactgaaccatgtctctgtcttgtgccgatccgtcgacgaatctatgaatttttaccaaaaggtgttagggttcatcccgatacgaagacctgaatccttaaattttgaaggcgcttggttgtttggtcacgggattggaatacacctcctgtgtgccccagaaccagagaaacttcccaagaaaactgcgattaatcccaaggataatcacatctctttccagtgtgagagtatgggagtagtggagaagaagctggaggaaatggggatagattatgtaagggcattagtagaagaaggagggatccaagtggaccagctcttcttccatgaccctgatggcttcatgatcgagatttgcaactgcgatagcctccccgtagtccccctcgtaggagaaatggctcggtcctgctcaagagtcaaactccaccagatggtgcagccacaaccgcagactcagatccaccaagtggtctacccttaattataaacagctcacttcttctttatattgtgtgtgtttgtgtattggtgtgcttggttttgggtgtaatatacaataagagaccgatgtgaatcagcgaatgtgattcccttcgaggaaatgaccattctctttgctccacaagcttatataatataatcaagggaaatcatgttttact

SEQ ID NO: 27087 - protein, 174 aa, Arabidopsis thaliana
  peptide (1)..(174): Ceres Seq. ID no. 13487346
  misc_feature (2)..(131): Homolog of NCBI NO: 33146737 NR Description: unknown protein [Oryza sativa (japonica
  misc_feature (11)..(169): Homolog of NCBI NO: 21740426 NR Description: OSJNBa0091D06.24 [Oryza sativa (japonica
  misc_feature (11)..(142): Homolog of NCBI NO: 18401734 NR Description: glyoxalase family protein (lactoylglutathione
  misc_feature (11)..(142): Homolog of NCBI NO: 15529260 NR Description: At2g28420/T1B3.6 [Arabidopsis thaliana]
  misc_feature (1)..(149): Homolog of NCBI NO: 34899038 NR Description: hypothetical protein~similar to Arabidopsis
  misc_feature (1)..(149): Homolog of NCBI NO: 34395261 NR Description: glyoxalase family-like protein
  misc_feature (6)..(150): Homolog of NCBI NO: 34910246 NR Description: OSJNBa0089K24.9 [Oryza sativa (japonica
  misc_feature (1)..(169): Homolog of NCBI NO: 18412683 NR Description: glyoxalase family protein (lactoylglutathione
  misc_feature (1)..(169): Homolog of NCBI NO: 25406639 NR Description: hypothetical protein F18B13.24 [imported] -
  misc_feature (1)..(174): Homolog of NCBI NO: 18394235 NR Description: glyoxalase family protein (lactoylglutathione
MKEDAGNPLHLTSLNHVSVLCRSVDESMNFYQKVLGFIPIRRPESLNFEGAWLFGHGIGIHLLCAPEPEKLPKKTAINPKDNHISFQCESMGVVEKKLEEMGIDYVRALVEEGGIQVDQLFFHDPDGFMIEICNCDSLPVVPLVGEMARSCSRVKLHQMVQPQPQTQIHQVVYP

SEQ ID NO: 27088 - protein, 147 aa, Arabidopsis thaliana
  peptide (1)..(147): Ceres Seq. ID no. 13487347
  misc_feature (1)..(104): Homolog of NCBI NO: 33146737 NR Description: unknown protein [Oryza sativa (japonica
  misc_feature (1)..(142): Homolog of NCBI NO: 21740426 NR Description: OSJNBa0091D06.24 [Oryza sativa (japonica
  misc_feature (1)..(115): Homolog of NCBI NO: 18401734 NR Description: glyoxalase family protein (lactoylglutathione
  misc_feature (1)..(115): Homolog of NCBI NO: 15529260 NR Description: At2g28420/T1B3.6 [Arabidopsis thaliana]
  misc_feature (1)..(122): Homolog of NCBI NO: 34899038 NR Description: hypothetical protein~similar to Arabidopsis
  misc_feature (1)..(122): Homolog of NCBI NO: 34395261 NR Description: glyoxalase family-like protein
  misc_feature (1)..(123): Homolog of NCBI NO: 34910246 NR Description: OSJNBa0089K24.9 [Oryza sativa (japonica
  misc_feature (1)..(142): Homolog of NCBI NO: 18412683 NR Description: glyoxalase family protein (lactoylglutathione
  misc_feature (1)..(142): Homolog of NCBI NO: 25406639 NR Description: hypothetical protein F18B13.24 [imported] -
  misc_feature (1)..(147): Homolog of NCBI NO: 18394235 NR Description: glyoxalase family protein (lactoylglutathione
MNFYQKVLGFIPIRRPESLNFEGAWLFGHGIGIHLLCAPEPEKLPKKTAINPKDNHISFQCESMGVVEKKLEEMGIDYVRALVEEGGIQVDQLFFHDPDGFMIEICNCDSLPVVPLVGEMARSCSRVKLHQMVQPQPQTQIHQVVYP

SEQ ID NO: 27089 - DNA, 861 bp, Arabidopsis thaliana
  misc_feature (1)..(861): Ceres Seq. ID no. 12323663
  misc_feature: MA Experiment ID: 108434 Result: Up-regulated in Transcription
  misc_feature: MA Experiment 108434 PARAMETER Experiment Name: At_Root_Tips_cDNA_P Parameter: Tissue Value: Root Tips
  misc_feature: MA Experiment ID: 108462 Result: Down-regulated in Transcription
  misc_feature: MA Experiment 108462 PARAMETER Experiment Name: At_Germinating_Seeds_cDNA_P Parameter: Age (day) Value: 2 vs. 0
  misc_feature: MA Experiment 108462 PARAMETER Experiment Name: At_Germinating_Seeds_cDNA_P Parameter: Tissue Value: Germinating Seeds
  misc_feature: MA Experiment ID: 108463 Result: Down-regulated in Transcription
  misc_feature: MA Experiment 108463 PARAMETER Experiment Name: At_Germinating_Seeds_cDNA_P Parameter: Age (day) Value: 3 vs. 0
  misc_feature: MA Experiment 108463 PARAMETER Experiment Name: At_Germinating_Seeds_cDNA_P Parameter: Tissue Value: Germinating Seeds
  misc_feature: MA Experiment ID: 108464 Result: Down-regulated in Transcription
  misc_feature: MA Experiment 108464 PARAMETER Experiment Name: At_Germinating_Seeds_cDNA_P Parameter: Age (day) Value: 4 vs. 0
  misc_feature: MA Experiment 108464 PARAMETER Experiment Name: At_Germinating_Seeds_cDNA_P Parameter: Tissue Value: Germinating Seeds
  misc_feature: MA Experiment ID: 108561 Result: Down-regulated in Transcription
  misc_feature: MA Experiment 108561 PARAMETER Experiment Name: At_100uM_ABA_cDNA_P Parameter: Timepoint (hr) Value: 6
  misc_feature: MA Experiment 108561 PARAMETER Experiment Name: At_100uM_ABA_cDNA_P Parameter: Tissue Value: Aerial
  misc_feature: MA Experiment 108561 PARAMETER Experiment Name: At_100uM_ABA_cDNA_P Parameter: Treatment Value: 100uM ABA vs. No Treatment
  misc_feature: MA Experiment ID: 108595 Result: Down-regulated in Transcription
  misc_feature: MA Experiment 108595 PARAMETER Experiment Name: At_Ler-pi_Ovule_cDNA_P Parameter: Plant Line Value: null
  misc_feature: MA Experiment ID: 108668 Result: Down-regulated in Transcription
  misc_feature: MA Experiment 108668 PARAMETER Experiment Name: At_2mM_SA_cDNA_P Parameter: Plant Line Value: WS
  misc_feature: MA Experiment 108668 PARAMETER Experiment Name: At_2mM_SA_cDNA_P Parameter: Timepoint (hr) Value: 6
  misc_feature: MA Experiment 108668 PARAMETER Experiment Name: At_2mM_SA_cDNA_P Parameter: Treatment Value: 2mM SA vs. No Treatment
  misc_feature: MA Experiment ID: 20000069 Result: Up-regulated in Transcription
  misc_feature: MA Experiment 20000069 PARAMETER Experiment Name: At_100uM_ABA_Mutants_cDNA_P Parameter: Plant Line Value: CS23
  misc_feature: MA Experiment 20000069 PARAMETER Experiment Name: At_100uM_ABA_Mutants_cDNA_P Parameter: Timepoint (hr) Value: 6
  misc_feature: MA Experiment 20000069 PARAMETER Experiment Name: At_100uM_ABA_Mutants_cDNA_P Parameter: Tissue Value: Aerial
  misc_feature: MA Experiment 20000069 PARAMETER Experiment Name: At_100uM_ABA_Mutants_cDNA_P Parameter: Treatment Value: 100uM ABA vs. No Treatment
  misc_feature: MA Experiment ID: 20000070 Result: Up-regulated in Transcription
  misc_feature: MA Experiment 20000070 PARAMETER Experiment Name: At_100uM_ABA_Mutants_cDNA_P Parameter: Plant Line Value: CS24
  misc_feature: MA Experiment 20000070 PARAMETER Experiment Name: At_100uM_ABA_Mutants_cDNA_P Parameter: Timepoint (hr) Value: 6
  misc_feature: MA Experiment 20000070 PARAMETER Experiment Name: At_100uM_ABA_Mutants_cDNA_P Parameter: Tissue Value: Aerial
  misc_feature: MA Experiment 20000070 PARAMETER Experiment Name: At_100uM_ABA_Mutants_cDNA_P Parameter: Treatment Value: 100uM ABA vs. No Treatment
  misc_feature: MA Experiment ID: 20000071 Result: Up-regulated in Transcription
  misc_feature: MA Experiment 20000071 PARAMETER Experiment Name: At_100uM_ABA_Mutants_cDNA_P Parameter: Plant Line Value: CS8104
  misc_feature: MA Experiment 20000071 PARAMETER Experiment Name: At_100uM_ABA_Mutants_cDNA_P Parameter: Timepoint (hr) Value: 6
  misc_feature: MA Experiment 20000071 PARAMETER Experiment Name: At_100uM_ABA_Mutants_cDNA_P Parameter: Tissue Value: Aerial
  misc_feature: MA Experiment 20000071 PARAMETER Experiment Name: At_100uM_ABA_Mutants_cDNA_P Parameter: Treatment Value: 100uM ABA vs. No Treatment
  misc_feature: MA Experiment ID: 20000072 Result: Up-regulated in Transcription
  misc_feature: MA Experiment 20000072 PARAMETER Experiment Name: At_100uM_ABA_Mutants_cDNA_P Parameter: Plant Line Value: CS8105
  misc_feature: MA Experiment 20000072 PARAMETER Experiment Name: At_100uM_ABA_Mutants_cDNA_P Parameter: Timepoint (hr) Value: 6
  misc_feature: MA Experiment 20000072 PARAMETER Experiment Name: At_100uM_ABA_Mutants_cDNA_P Parameter: Tissue Value: Aerial
  misc_feature: MA Experiment 20000072 PARAMETER Experiment Name: At_100uM_ABA_Mutants_cDNA_P Parameter: Treatment Value: 100uM ABA vs. No Treatment
  misc_feature: MA Experiment ID: 20000086 Result: Up-regulated in Transcription
  misc_feature: MA Experiment 20000086 PARAMETER Experiment Name: At_100uM_ABA_Mutants_cDNA_P Parameter: Plant Line Value: CS22
  misc_feature: MA Experiment 20000086 PARAMETER Experiment Name: At_100uM_ABA_Mutants_cDNA_P Parameter: Timepoint (hr) Value: 6
  misc_feature: MA Experiment 20000086 PARAMETER Experiment Name: At_100uM_ABA_Mutants_cDNA_P Parameter: Tissue Value: Aerial
  misc_feature: MA Experiment 20000086 PARAMETER Experiment Name: At_100uM_ABA_Mutants_cDNA_P Parameter: Treatment Value: 100uM ABA vs. No Treatment
  misc_feature: MA Experiment ID: 20000087 Result: Up-regulated in Transcription
  misc_feature: MA Experiment 20000087 PARAMETER Experiment Name: At_100uM_ABA_Mutants_cDNA_P Parameter: Plant Line Value: WS
  misc_feature: MA Experiment 20000087 PARAMETER Experiment Name: At_100uM_ABA_Mutants_cDNA_P Parameter: Timepoint (hr) Value: 6
  misc_feature: MA Experiment 20000087 PARAMETER Experiment Name: At_100uM_ABA_Mutants_cDNA_P Parameter: Tissue Value: Aerial
  misc_feature: MA Experiment 20000087 PARAMETER Experiment Name: At_100uM_ABA_Mutants_cDNA_P Parameter: Treatment Value: 100uM ABA vs. No Treatment
  misc_feature: MA Experiment ID: 20000088 Result: Up-regulated in Transcription
  misc_feature: MA Experiment 20000088 PARAMETER Experiment Name: At_100uM_ABA_Mutants_cDNA_P Parameter: Plant Line Value: Landsberg
  misc_feature: MA Experiment 20000088 PARAMETER Experiment Name: At_100uM_ABA_Mutants_cDNA_P Parameter: Timepoint (hr) Value: 6
  misc_feature: MA Experiment 20000088 PARAMETER Experiment Name: At_100uM_ABA_Mutants_cDNA_P Parameter: Tissue Value: Aerial
  misc_feature: MA Experiment 20000088 PARAMETER Experiment Name: At_100uM_ABA_Mutants_cDNA_P Parameter: Treatment Value: 100uM ABA vs. No Treatment
  misc_feature: MA Experiment ID: 20000089 Result: Up-regulated in Transcription
  misc_feature: MA Experiment ID: 20000090 Result: Up-regulated in Transcription
  misc_feature: MA Experiment ID: 20000111 Result: Down-regulated in Transcription
  misc_feature: MA Experiment 20000111 PARAMETER Experiment Name: At_42deg_Heat_cDNA_P Parameter: Temperature (deg C) Value: 42 vs. 22
  misc_feature: MA Experiment 20000111 PARAMETER Experiment Name: At_42deg_Heat_cDNA_P Parameter: Timepoint (hr) Value: 6
  misc_feature: MA Experiment 20000111 PARAMETER Experiment Name: At_42deg_Heat_cDNA_P Parameter: Tissue Value: Aerial
  misc_feature: MA Experiment ID: 20000117 Result: Up-regulated in Transcription
  misc_feature: MA Experiment 20000117 PARAMETER Experiment Name: At_100uM_ABA_Mutants_cDNA_P Parameter: Plant Line Value: Columbia
  misc_feature: MA Experiment 20000117 PARAMETER Experiment Name: At_100uM_ABA_Mutants_cDNA_P Parameter: Timepoint (hr) Value: 6
  misc_feature: MA Experiment 20000117 PARAMETER Experiment Name: At_100uM_ABA_Mutants_cDNA_P Parameter: Tissue Value: Aerial
  misc_feature: MA Experiment 20000117 PARAMETER Experiment Name: At_100uM_ABA_Mutants_cDNA_P Parameter: Treatment Value: 100uM ABA vs. No Treatment
  misc_feature: MA Experiment ID: 20000182 Result: Down-regulated in Transcription
  misc_feature: MA Experiment 20000182 PARAMETER Experiment Name: At_2mM_SA_P Parameter: Age (day) Value: 14
  misc_feature: MA Experiment 20000182 PARAMETER Experiment Name: At_2mM_SA_P Parameter: Organism Value: A. thaliana
  misc_feature: MA Experiment 20000182 PARAMETER Experiment Name: At_2mM_SA_P Parameter: Plant Line Value: WS
  misc_feature: MA Experiment 20000182 PARAMETER Experiment Name: At_2mM_SA_P Parameter: Timepoint (hr) Value: 6
  misc_feature: MA Experiment 20000182 PARAMETER Experiment Name: At_2mM_SA_P Parameter: Tissue Value: Aerial
  misc_feature: MA Experiment 20000182 PARAMETER Experiment Name: At_2mM_SA_P Parameter: Treatment Value: 2mM SA vs. No Treatment
  misc_feature: MA Experiment ID: 20000185 Result: Down-regulated in Transcription
  misc_feature: MA Experiment 20000185 PARAMETER Experiment Name: At_Roots__P Parameter: Age (day) Value: 7 vs. 21
  misc_feature: MA Experiment 20000185 PARAMETER Experiment Name: At_Roots__P Parameter: Organism Value: A. thaliana
  misc_feature: MA Experiment 20000185 PARAMETER Experiment Name: At_Roots__P Parameter: Tissue Value: Roots vs. Whole Plant
  misc_feature: MA Experiment ID: 20000224 Result: Down-regulated in Transcription
  misc_feature: MA Experiment ID: 20000436 Result: Down-regulated in Transcription
  misc_feature: MA Experiment 20000436 PARAMETER Experiment Name: At_Drought_P Parameter: Age (day) Value: 7
  misc_feature: MA Experiment 20000436 PARAMETER Experiment Name: At_Drought_P Parameter: Organism Value: A. thaliana
  misc_feature: MA Experiment 20000436 PARAMETER Experiment Name: At_Drought_P Parameter: Plant Line Value: WS
  misc_feature: MA Experiment 20000436 PARAMETER Experiment Name: At_Drought_P Parameter: Timepoint (hr) Value: 12
  misc_feature: MA Experiment 20000436 PARAMETER Experiment Name: At_Drought_P Parameter: Tissue Value: Whole Plant
  misc_feature: MA Experiment 20000436 PARAMETER Experiment Name: At_Drought_P Parameter: Treatment Value: Drought vs. No Drought
  misc_feature: MA Experiment ID: 20000438 Result: Down-regulated in Transcription
  misc_feature: MA Experiment 20000438 PARAMETER Experiment Name: At_Shoots__P Parameter: Age (day) Value: 14
  misc_feature: MA Experiment 20000438 PARAMETER Experiment Name: At_Shoots__P Parameter: Tissue Value: Shoots vs. Whole Plant
  misc_feature: MA Experiment ID: 20001247 Result: Down-regulated in Transcription
  misc_feature: MA Experiment 20001247 PARAMETER Experiment Name: At_Far-red-induction_P Parameter: Age (day) Value: 7
  misc_feature: MA Experiment 20001247 PARAMETER Experiment Name: At_Far-red-induction_P Parameter: Light Value: Far-red vs. White
  misc_feature: MA Experiment 20001247 PARAMETER Experiment Name: At_Far-red-induction_P Parameter: Organism Value: A. thaliana
  misc_feature: MA Experiment 20001247 PARAMETER Experiment Name: At_Far-red-induction_P Parameter: Plant Line Value: Columbia
  misc_feature: MA Experiment 20001247 PARAMETER Experiment Name: At_Far-red-induction_P Parameter: Timepoint (hr) Value: 1
  misc_feature: MA Experiment 20001247 PARAMETER Experiment Name: At_Far-red-induction_P Parameter: Tissue Value: Whole Plant
  misc_feature: MA Experiment ID: 20001248 Result: Up-regulated in Transcription
  misc_feature: MA Experiment 20001248 PARAMETER Experiment Name: At_Far-red-induction_P Parameter: Age (day) Value: 7
  misc_feature: MA Experiment 20001248 PARAMETER Experiment Name: At_Far-red-induction_P Parameter: Light Value: Far-red vs. White
  misc_feature: MA Experiment 20001248 PARAMETER Experiment Name: At_Far-red-induction_P Parameter: Organism Value: A. thaliana
  misc_feature: MA Experiment 20001248 PARAMETER Experiment Name: At_Far-red-induction_P Parameter: Plant Line Value: Columbia
  misc_feature: MA Experiment 20001248 PARAMETER Experiment Name: At_Far-red-induction_P Parameter: Timepoint (hr) Value: 4
  misc_feature: MA Experiment 20001248 PARAMETER Experiment Name: At_Far-red-induction_P Parameter: Tissue Value: Whole Plant
  misc_feature: MA Experiment ID: 20001451 Result: Down-regulated in Transcription
  misc_feature: MA Experiment 20001451 PARAMETER Experiment Name: At_Far-red-induction_P Parameter: Age (day) Value: 7
  misc_feature: MA Experiment 20001451 PARAMETER Experiment Name: At_Far-red-induction_P Parameter: Light Value: Far-red vs. White
  misc_feature: MA Experiment 20001451 PARAMETER Experiment Name: At_Far-red-induction_P Parameter: Organism Value: A. thaliana
  misc_feature: MA Experiment 20001451 PARAMETER Experiment Name: At_Far-red-induction_P Parameter: Plant Line Value: Columbia
  misc_feature: MA Experiment 20001451 PARAMETER Experiment Name: At_Far-red-induction_P Parameter: Timepoint (hr) Value: 24
  misc_feature: MA Experiment 20001451 PARAMETER Experiment Name: At_Far-red-induction_P Parameter: Tissue Value: Whole Plant
  misc_feature: MA Experiment ID: 20001557 Result: Up-regulated in Transcription
  misc_feature: MA Experiment 20001557 PARAMETER Experiment Name: At_Drought_Soil_Dry_P Parameter: Age (day) Value: 27
  misc_feature: MA Experiment 20001557 PARAMETER Experiment Name: At_Drought_Soil_Dry_P Parameter: Organism Value: A. thaliana
  misc_feature: MA Experiment 20001557 PARAMETER Experiment Name: At_Drought_Soil_Dry_P Parameter: Plant Line Value: WS
  misc_feature: MA Experiment 20001557 PARAMETER Experiment Name: At_Drought_Soil_Dry_P Parameter: Post Timepoint (hr) Value: 3
  misc_feature: MA Experiment 20001557 PARAMETER Experiment Name: At_Drought_Soil_Dry_P Parameter: Post-Treatment Value: Re-Water vs. No Drought
  misc_feature: MA Experiment 20001557 PARAMETER Experiment Name: At_Drought_Soil_Dry_P Parameter: Timepoint (day) Value: 13
  misc_feature: MA Experiment 20001557 PARAMETER Experiment Name: At_Drought_Soil_Dry_P Parameter: Treatment Value: Drought vs. No Drought
  misc_feature: MA Experiment ID: 20001757 Result: Up-regulated in Transcription
  misc_feature: MA Experiment 20001757 PARAMETER Experiment Name: At_50mM_NH4NO3_L-to-H_P Parameter: Timepoint (hr) Value: 6
  misc_feature: MA Experiment 20001757 PARAMETER Experiment Name: At_50mM_NH4NO3_L-to-H_P Parameter: Tissue Value: Leaf
  misc_feature: MA Experiment 20001757 PARAMETER Experiment Name: At_50mM_NH4NO3_L-to-H_P Parameter: Treatment Value: 50mM NH4NO3 vs 100mM Mannitol
actatcaattcgactggaaaaaggatatttccagattaggtagagagagagcaaaagtactttcattcagacttcagtttaagctatggcggcgaacgattcttcaaatgctattgacatcgacgggaatctcgactccgattcgaatcttaacactgacggtgacgaagcgaccgataatgattcctcgaaggcattggttactatccctgctccagccgtttgtcttttccggttcgccggagatgctgctggtggcgccgttatgggctctatcttcggatatggttcaggattgttcaagaagaaaggcttcaaaggatcatttgcagatgcagggcagtctgctaagacttttgctgttttatctggagtccacagtttggttgtttgccttctgaagcaaatccgaggcaaagatgacgccattaatgttggagtagcagggtgttgcactggtcttgctcttagtttccctggtgctccacaggctcttctacagagttgtctcacgtttggggcattctcttttattcttgagggactcaacaaaagacaaacagctttggcacactcggtctcgttgagacaccaaaccggactgttccaagatcatcatcgtgctttaccactctctcttgctctcccgatccctgaagaaatcaaaggagccttttcttctttctgcaagtccttagctaaaccaaggaagttctaatctcgtcttattattctccctttcttgtgtcttaggctctctctatgtagatgtaaaattttcccgcttttgttgtactttgtgagacatgttttgtgaaaggctttttgcaagagccaatttgaagagaaaaagagttgtgt

SEQ ID NO: 27090 - protein, 210 aa, Arabidopsis thaliana
  peptide (1)..(210): Ceres Seq. ID no. 12323664
  misc_feature (40)..(158): Pfam Name: Tim17/Tim22/Tim23 family Pfam Description: Tim17/Tim22/Tim23 family
  misc_feature (47)..(188): Homolog of NCBI NO: 25742816 NR Description: translocator of inner mitochondrial membrane 17a
  misc_feature (47)..(188): Homolog of NCBI NO: 33468943 NR Description: translocator of inner mitochondrial membrane a
  misc_feature (87)..(159): Homolog of NCBI NO: 18398755 NR Description: expressed protein
  misc_feature (25)..(208): Homolog of NCBI NO: 24414272 NR Description: Unknown protein [Oryza sativa (japonica
  misc_feature (41)..(208): Homolog of NCBI NO: 37533490 NR Description: unknown protein [Oryza sativa (japonica
  misc_feature (1)..(209): Homolog of NCBI NO: 9758183 NR Description: contains similarity to unknown
  misc_feature (1)..(209): Homolog of NCBI NO: 15240525 NR Description: putative protein; protein id: At5g55510.1
  misc_feature (1)..(210): Homolog of NCBI NO: 7485327 NR Description: hypothetical protein F10M23.10 - Arabidopsis
  misc_feature (1)..(210): Homolog of NCBI NO: 18416798 NR Description: putative protein
MAANDSSNAIDIDGNLDSDSNLNTDGDEATDNDSSKALVTIPAPAVCLFRFAGDAAGGAVMGSIFGYGSGLFKKKGFKGSFADAGQSAKTFAVLSGVHSLVVCLLKQIRGKDDAINVGVAGCCTGLALSFPGAPQALLQSCLTFGAFSFILEGLNKRQTALAHSVSLRHQTGLFQDHHRALPLSLALPIPEEIKGAFSSFCKSLAKPRKF

SEQ ID NO: 27091 - protein, 150 aa, Arabidopsis thaliana
  peptide (1)..(150): Ceres Seq. ID no. 12323665
  misc_feature (1)..(98): Pfam Name: Tim17/Tim22/Tim23 family Pfam Description: Tim17/Tim22/Tim23 family
  misc_feature (1)..(128): Homolog of NCBI NO: 25742816 NR Description: translocator of inner mitochondrial membrane 17a
  misc_feature (1)..(128): Homolog of NCBI NO: 33468943 NR Description: translocator of inner mitochondrial membrane a
  misc_feature (27)..(99): Homolog of NCBI NO: 18398755 NR Description: expressed protein
  misc_feature (1)..(148): Homolog of NCBI NO: 24414272 NR Description: Unknown protein [Oryza sativa (japonica
  misc_feature (1)..(148): Homolog of NCBI NO: 37533490 NR Description: unknown protein [Oryza sativa (japonica
  misc_feature (1)..(149): Homolog of NCBI NO: 9758183 NR Description: contains similarity to unknown
  misc_feature (1)..(149): Homolog of NCBI NO: 15240525 NR Description: putative protein; protein id: At5g55510.1
  misc_feature (1)..(150): Homolog of NCBI NO: 7485327 NR Description: hypothetical protein F10M23.10 - Arabidopsis
  misc_feature (1)..(150): Homolog of NCBI NO: 18416798 NR Description: putative protein
MGSIFGYGSGLFKKKGFKGSFADAGQSAKTFAVLSGVHSLVVCLLKQIRGKDDAINVGVAGCCTGLALSFPGAPQALLQSCLTFGAFSFILEGLNKRQTALAHSVSLRHQTGLFQDHHRALPLSLALPIPEEIKGAFSSFCKSLAKPRKF

SEQ ID NO: 27092 - protein, 132 aa, Arabidopsis thaliana
  peptide (1)..(132): Ceres Seq. ID no. 12323666
YQFDWKKDISRLGRERAKVLSFRLQFKLWRRTILQMLLTSTGISTPIRILTLTVTKRPIMIPRRHWLLSLLQPFVFSGSPEMLLVAPLWALSSDMVQDCSRRKASKDHLQMQGSLLRLLLFYLESTVWLFAF

SEQ ID NO: 27093 - DNA, 686 bp, Arabidopsis thaliana
  misc_feature (1)..(686): Ceres Seq. ID no. 12394301
  misc_feature: MA Experiment ID: 108434 Result: Up-regulated in Transcription
  misc_feature: MA Experiment 108434 PARAMETER Experiment Name: At_Root_Tips_cDNA_P Parameter: Tissue Value: Root Tips
  misc_feature: MA Experiment ID: 108463 Result: Down-regulated in Transcription
  misc_feature: MA Experiment 108463 PARAMETER Experiment Name: At_Germinating_Seeds_cDNA_P Parameter: Age (day) Value: 3 vs. 0
  misc_feature: MA Experiment 108463 PARAMETER Experiment Name: At_Germinating_Seeds_cDNA_P Parameter: Tissue Value: Germinating Seeds
  misc_feature: MA Experiment ID: 108464 Result: Down-regulated in Transcription
  misc_feature: MA Experiment 108464 PARAMETER Experiment Name: At_Germinating_Seeds_cDNA_P Parameter: Age (day) Value: 4 vs. 0
  misc_feature: MA Experiment 108464 PARAMETER Experiment Name: At_Germinating_Seeds_cDNA_P Parameter: Tissue Value: Germinating Seeds
  misc_feature: MA Experiment ID: 108607 Result: Down-regulated in Transcription
  misc_feature: MA Experiment 108607 PARAMETER Experiment Name: At_100uM_ABA_cDNA_P Parameter: Timepoint (hr) Value: 4
  misc_feature: MA Experiment 108607 PARAMETER Experiment Name: At_100uM_ABA_cDNA_P Parameter: Tissue Value: Aerial
  misc_feature: MA Experiment 108607 PARAMETER Experiment Name: At_100uM_ABA_cDNA_P Parameter: Treatment Value: 100uM ABA vs. No Treatment
  misc_feature: MA Experiment ID: 20000030 Result: Down-regulated in Transcription
  misc_feature: MA Experiment 20000030 PARAMETER Experiment Name: At_CS6630_Roots_cDNA_P Parameter: Plant Line Value: CS6630 vs. WS
  misc_feature: MA Experiment 20000030 PARAMETER Experiment Name: At_CS6630_Roots_cDNA_P Parameter: Tissue Value: Roots
  misc_feature: MA Experiment ID: 20000069 Result: Down-regulated in Transcription
  misc_feature: MA Experiment 20000069 PARAMETER Experiment Name: At_100uM_ABA_Mutants_cDNA_P Parameter: Plant Line Value: CS23
  misc_feature: MA Experiment 20000069 PARAMETER Experiment Name: At_100uM_ABA_Mutants_cDNA_P Parameter: Timepoint (hr) Value: 6
  misc_feature: MA Experiment 20000069 PARAMETER Experiment Name: At_100uM_ABA_Mutants_cDNA_P Parameter: Tissue Value: Aerial
  misc_feature: MA Experiment 20000069 PARAMETER Experiment Name: At_100uM_ABA_Mutants_cDNA_P Parameter: Treatment Value: 100uM ABA vs. No Treatment
  misc_feature: MA Experiment ID: 20000071 Result: Down-regulated in Transcription
  misc_feature: MA Experiment 20000071 PARAMETER Experiment Name: At_100uM_ABA_Mutants_cDNA_P Parameter: Plant Line Value: CS8104
  misc_feature: MA Experiment 20000071 PARAMETER Experiment Name: At_100uM_ABA_Mutants_cDNA_P Parameter: Timepoint (hr) Value: 6
  misc_feature: MA Experiment 20000071 PARAMETER Experiment Name: At_100uM_ABA_Mutants_cDNA_P Parameter: Tissue Value: Aerial
  misc_feature: MA Experiment 20000071 PARAMETER Experiment Name: At_100uM_ABA_Mutants_cDNA_P Parameter: Treatment Value: 100uM ABA vs. No Treatment
  misc_feature: MA Experiment ID: 20000086 Result: Down-regulated in Transcription
  misc_feature: MA Experiment 20000086 PARAMETER Experiment Name: At_100uM_ABA_Mutants_cDNA_P Parameter: Plant Line Value: CS22
  misc_feature: MA Experiment 20000086 PARAMETER Experiment Name: At_100uM_ABA_Mutants_cDNA_P Parameter: Timepoint (hr) Value: 6
  misc_feature: MA Experiment 20000086 PARAMETER Experiment Name: At_100uM_ABA_Mutants_cDNA_P Parameter: Tissue Value: Aerial
  misc_feature: MA Experiment 20000086 PARAMETER Experiment Name: At_100uM_ABA_Mutants_cDNA_P Parameter: Treatment Value: 100uM ABA vs. No Treatment
  misc_feature: MA Experiment ID: 20000087 Result: Down-regulated in Transcription
  misc_feature: MA Experiment 20000087 PARAMETER Experiment Name: At_100uM_ABA_Mutants_cDNA_P Parameter: Plant Line Value: WS
  misc_feature: MA Experiment 20000087 PARAMETER Experiment Name: At_100uM_ABA_Mutants_cDNA_P Parameter: Timepoint (hr) Value: 6
  misc_feature: MA Experiment 20000087 PARAMETER Experiment Name: At_100uM_ABA_Mutants_cDNA_P Parameter: Tissue Value: Aerial
  misc_feature: MA Experiment 20000087 PARAMETER Experiment Name: At_100uM_ABA_Mutants_cDNA_P Parameter: Treatment Value: 100uM ABA vs. No Treatment
  misc_feature: MA Experiment ID: 20000113 Result: Down-regulated in Transcription
  misc_feature: MA Experiment 20000113 PARAMETER Experiment Name: At_42deg_Heat_cDNA_P Parameter: Temperature (deg C) Value: 42 vs. 22
  misc_feature: MA Experiment 20000113 PARAMETER Experiment Name: At_42deg_Heat_cDNA_P Parameter: Timepoint (hr) Value: 8
  misc_feature: MA Experiment 20000113 PARAMETER Experiment Name: At_42deg_Heat_cDNA_P Parameter: Tissue Value: Aerial
  misc_feature: MA Experiment ID: 20000117 Result: Down-regulated in Transcription
  misc_feature: MA Experiment 20000117 PARAMETER Experiment Name: At_100uM_ABA_Mutants_cDNA_P Parameter: Plant Line Value: Columbia
  misc_feature: MA Experiment 20000117 PARAMETER Experiment Name: At_100uM_ABA_Mutants_cDNA_P Parameter: Timepoint (hr) Value: 6
  misc_feature: MA Experiment 20000117 PARAMETER Experiment Name: At_100uM_ABA_Mutants_cDNA_P Parameter: Tissue Value: Aerial
  misc_feature: MA Experiment 20000117 PARAMETER Experiment Name: At_100uM_ABA_Mutants_cDNA_P Parameter: Treatment Value: 100uM ABA vs. No Treatment
  misc_feature: MA Experiment ID: 20000184 Result: Up-regulated in Transcription
  misc_feature: MA Experiment 20000184 PARAMETER Experiment Name: At_Shoots__P Parameter: Age (day) Value: 7
  misc_feature: MA Experiment 20000184 PARAMETER Experiment Name: At_Shoots__P Parameter: Tissue Value: Shoots vs. Whole Plant
  misc_feature: MA Experiment ID: 20000234 Result: Up-regulated in Transcription
  misc_feature: MA Experiment 20000234 PARAMETER Experiment Name: At_Siliques_P Parameter: Age (day) Value: 21
  misc_feature: MA Experiment 20000234 PARAMETER Experiment Name: At_Siliques_P Parameter: Organism Value: A. thaliana
  misc_feature: MA Experiment 20000234 PARAMETER Experiment Name: At_Siliques_P Parameter: Plant Line Value: WS
  misc_feature: MA Experiment 20000234 PARAMETER Experiment Name: At_Siliques_P Parameter: Tissue Value: Less Than 5mm Siliques vs. Whole Plant
  misc_feature: MA Experiment ID: 20000264 Result: Up-regulated in Transcription
  misc_feature: MA Experiment 20000264 PARAMETER Experiment Name: At_Open_Flower_P Parameter: Age (day) Value: 21
  misc_feature: MA Experiment 20000264 PARAMETER Experiment Name: At_Open_Flower_P Parameter: Plant Line Value: WS
  misc_feature: MA Experiment 20000264 PARAMETER Experiment Name: At_Open_Flower_P Parameter: Tissue Value: Open Flower vs. Whole Plant
  misc_feature: MA Experiment ID: 20000286 Result: Up-regulated in Transcription
  misc_feature: MA Experiment 20000286 PARAMETER Experiment Name: At_Open_Flower_P Parameter: Age (day) Value: 21
  misc_feature: MA Experiment 20000286 PARAMETER Experiment Name: At_Open_Flower_P Parameter: Plant Line Value: WS
  misc_feature: MA Experiment 20000286 PARAMETER Experiment Name: At_Open_Flower_P Parameter: Tissue Value: Half Open vs. Whole Plant
  misc_feature: MA Experiment ID: 20000437 Result: Down-regulated in Transcription
  misc_feature: MA Experiment 20000437 PARAMETER Experiment Name: At_Drought_P Parameter: Age (day) Value: 8
  misc_feature: MA Experiment 20000437 PARAMETER Experiment Name: At_Drought_P Parameter: Organism Value: A. thaliana
  misc_feature: MA Experiment 20000437 PARAMETER Experiment Name: At_Drought_P Parameter: Plant Line Value: WS
  misc_feature: MA Experiment 20000437 PARAMETER Experiment Name: At_Drought_P Parameter: Timepoint (hr) Value: 24
  misc_feature: MA Experiment 20000437 PARAMETER Experiment Name: At_Drought_P Parameter: Tissue Value: Whole Plant
  misc_feature: MA Experiment 20000437 PARAMETER Experiment Name: At_Drought_P Parameter: Treatment Value: Drought vs. No Drought
  misc_feature: MA Experiment ID: 20000445 Result: Down-regulated in Transcription
  misc_feature: MA Experiment 20000445 PARAMETER Experiment Name: At_100uM_NAA__P Parameter: Age (day) Value: 14
  misc_feature: MA Experiment 20000445 PARAMETER Experiment Name: At_100uM_NAA__P Parameter: Organism Value: A. thaliana
  misc_feature: MA Experiment 20000445 PARAMETER Experiment Name: At_100uM_NAA__P Parameter: Plant Line Value: WS
  misc_feature: MA Experiment 20000445 PARAMETER Experiment Name: At_100uM_NAA__P Parameter: Timepoint (hr) Value: 6
  misc_feature: MA Experiment 20000445 PARAMETER Experiment Name: At_100uM_NAA__P Parameter: Tissue Value: Aerial
  misc_feature: MA Experiment 20000445 PARAMETER Experiment Name: At_100uM_NAA__P Parameter: Treatment Value: 100uM NAA vs. No Treatment
  misc_feature: MA Experiment ID: 20000460 Result: Up-regulated in Transcription
  misc_feature: MA Experiment 20000460 PARAMETER Experiment Name: At_10percent_PEG_P Parameter: Age (day) Value: 12
  misc_feature: MA Experiment 20000460 PARAMETER Experiment Name: At_10percent_PEG_P Parameter: Organism Value: A. thaliana
  misc_feature: MA Experiment 20000460 PARAMETER Experiment Name: At_10percent_PEG_P Parameter: Plant Line Value: WS
  misc_feature: MA Experiment 20000460 PARAMETER Experiment Name: At_10percent_PEG_P Parameter: Timepoint (day) Value: 12
  misc_feature: MA Experiment 20000460 PARAMETER Experiment Name: At_10percent_PEG_P Parameter: Tissue Value: Whole Plant
  misc_feature: MA Experiment 20000460 PARAMETER Experiment Name: At_10percent_PEG_P Parameter: Treatment Value: 10percent PEG vs. No Treatment
  misc_feature: MA Experiment ID: 20000527 Result: Up-regulated in Transcription
  misc_feature: MA Experiment 20000527 PARAMETER Experiment Name: At_10percent_PEG_P Parameter: Age (day) Value: 20
  misc_feature: MA Experiment 20000527 PARAMETER Experiment Name: At_10percent_PEG_P Parameter: Organism Value: A. thaliana
  misc_feature: MA Experiment 20000527 PARAMETER Experiment Name: At_10percent_PEG_P Parameter: Plant Line Value: WS
  misc_feature: MA Experiment 20000527 PARAMETER Experiment Name: At_10percent_PEG_P Parameter: Timepoint (day) Value: 20
  misc_feature: MA Experiment 20000527 PARAMETER Experiment Name: At_10percent_PEG_P Parameter: Tissue Value: Whole Plant
  misc_feature: MA Experiment 20000527 PARAMETER Experiment Name: At_10percent_PEG_P Parameter: Treatment Value: 10percent PEG vs. No Treatment
  misc_feature: MA Experiment ID: 20001248 Result: Down-regulated in Transcription
  misc_feature: MA Experiment 20001248 PARAMETER Experiment Name: At_Far-red-induction_P Parameter: Age (day) Value: 7
  misc_feature: MA Experiment 20001248 PARAMETER Experiment Name: At_Far-red-induction_P Parameter: Light Value: Far-red vs. White
  misc_feature: MA Experiment 20001248 PARAMETER Experiment Name: At_Far-red-induction_P Parameter: Organism Value: A. thaliana
  misc_feature: MA Experiment 20001248 PARAMETER Experiment Name: At_Far-red-induction_P Parameter: Plant Line Value: Columbia
  misc_feature: MA Experiment 20001248 PARAMETER Experiment Name: At_Far-red-induction_P Parameter: Timepoint (hr) Value: 4
  misc_feature: MA Experiment 20001248 PARAMETER Experiment Name: At_Far-red-induction_P Parameter: Tissue Value: Whole Plant
  misc_feature: MA Experiment ID: 20001450 Result: Down-regulated in Transcription
  misc_feature: MA Experiment 20001450 PARAMETER Experiment Name: At_Far-red-induction_P Parameter: Age (day) Value: 7
  misc_feature: MA Experiment 20001450 PARAMETER Experiment Name: At_Far-red-induction_P Parameter: Light Value: Far-red vs. White
  misc_feature: MA Experiment 20001450 PARAMETER Experiment Name: At_Far-red-induction_P Parameter: Organism Value: A. thaliana
  misc_feature: MA Experiment 20001450 PARAMETER Experiment Name: At_Far-red-induction_P Parameter: Plant Line Value: Columbia
  misc_feature: MA Experiment 20001450 PARAMETER Experiment Name: At_Far-red-induction_P Parameter: Timepoint (hr) Value: 8
  misc_feature: MA Experiment 20001450 PARAMETER Experiment Name: At_Far-red-induction_P Parameter: Tissue Value: Whole Plant
  misc_feature: MA Experiment ID: 20001451 Result: Down-regulated in Transcription
  misc_feature: MA Experiment 20001451 PARAMETER Experiment Name: At_Far-red-induction_P Parameter: Age (day) Value: 7
  misc_feature: MA Experiment 20001451 PARAMETER Experiment Name: At_Far-red-induction_P Parameter: Light Value: Far-red vs. White
  misc_feature: MA Experiment 20001451 PARAMETER Experiment Name: At_Far-red-induction_P Parameter: Organism Value: A. thaliana
  misc_feature: MA Experiment 20001451 PARAMETER Experiment Name: At_Far-red-induction_P Parameter: Plant Line Value: Columbia
  misc_feature: MA Experiment 20001451 PARAMETER Experiment Name: At_Far-red-induction_P Parameter: Timepoint (hr) Value: 24
  misc_feature: MA Experiment 20001451 PARAMETER Experiment Name: At_Far-red-induction_P Parameter: Tissue Value: Whole Plant
  misc_feature: MA Experiment ID: 20001554 Result: Down-regulated in Transcription
  misc_feature: MA Experiment 20001554 PARAMETER Experiment Name: At_Drought_Soil_Dry_P Parameter: Age (day) Value: 21
  misc_feature: MA Experiment 20001554 PARAMETER Experiment Name: At_Drought_Soil_Dry_P Parameter: Organism Value: A. thaliana
  misc_feature: MA Experiment 20001554 PARAMETER Experiment Name: At_Drought_Soil_Dry_P Parameter: Plant Line Value: WS
  misc_feature: MA Experiment 20001554 PARAMETER Experiment Name: At_Drought_Soil_Dry_P Parameter: Post Timepoint (hr) Value: None
  misc_feature: MA Experiment 20001554 PARAMETER Experiment Name: At_Drought_Soil_Dry_P Parameter: Post-Treatment Value: None
  misc_feature: MA Experiment 20001554 PARAMETER Experiment Name: At_Drought_Soil_Dry_P Parameter: Timepoint (day) Value: 7
  misc_feature: MA Experiment 20001554 PARAMETER Experiment Name: At_Drought_Soil_Dry_P Parameter: Treatment Value: Drought vs. No Drought
  misc_feature: MA Experiment ID: 20001555 Result: Down-regulated in Transcription
  misc_feature: MA Experiment 20001555 PARAMETER Experiment Name: At_Drought_Soil_Dry_P Parameter: Age (day) Value: 24
  misc_feature: MA Experiment 20001555 PARAMETER Experiment Name: At_Drought_Soil_Dry_P Parameter: Organism Value: A. thaliana
  misc_feature: MA Experiment 20001555 PARAMETER Experiment Name: At_Drought_Soil_Dry_P Parameter: Plant Line Value: WS
  misc_feature: MA Experiment 20001555 PARAMETER Experiment Name: At_Drought_Soil_Dry_P Parameter: Post Timepoint (hr) Value: None
  misc_feature: MA Experiment 20001555 PARAMETER Experiment Name: At_Drought_Soil_Dry_P Parameter: Post-Treatment Value: None
  misc_feature: MA Experiment 20001555 PARAMETER Experiment Name: At_Drought_Soil_Dry_P Parameter: Timepoint (day) Value: 10
  misc_feature: MA Experiment 20001555 PARAMETER Experiment Name: At_Drought_Soil_Dry_P Parameter: Treatment Value: Drought vs. No Drought
  misc_feature: MA Experiment ID: 20001556 Result: Down-regulated in Transcription
  misc_feature: MA Experiment 20001556 PARAMETER Experiment Name: At_Drought_Soil_Dry_P Parameter: Age (day) Value: 26
  misc_feature: MA Experiment 20001556 PARAMETER Experiment Name: At_Drought_Soil_Dry_P Parameter: Organism Value: A. thaliana
  misc_feature: MA Experiment 20001556 PARAMETER Experiment Name: At_Drought_Soil_Dry_P Parameter: Plant Line Value: WS
  misc_feature: MA Experiment 20001556 PARAMETER Experiment Name: At_Drought_Soil_Dry_P Parameter: Post Timepoint (hr) Value: None
  misc_feature: MA Experiment 20001556 PARAMETER Experiment Name: At_Drought_Soil_Dry_P Parameter: Post-Treatment Value: None
  misc_feature: MA Experiment 20001556 PARAMETER Experiment Name: At_Drought_Soil_Dry_P Parameter: Timepoint (day) Value: 12
  misc_feature: MA Experiment 20001556 PARAMETER Experiment Name: At_Drought_Soil_Dry_P Parameter: Treatment Value: Drought vs. No Drought
  misc_feature: MA Experiment ID: 20001557 Result: Down-regulated in Transcription
  misc_feature: MA Experiment 20001557 PARAMETER Experiment Name: At_Drought_Soil_Dry_P Parameter: Age (day) Value: 27
  misc_feature: MA Experiment 20001557 PARAMETER Experiment Name: At_Drought_Soil_Dry_P Parameter: Organism Value: A. thaliana
  misc_feature: MA Experiment 20001557 PARAMETER Experiment Name: At_Drought_Soil_Dry_P Parameter: Plant Line Value: WS
  misc_feature: MA Experiment 20001557 PARAMETER Experiment Name: At_Drought_Soil_Dry_P Parameter: Post Timepoint (hr) Value: 3
  misc_feature: MA Experiment 20001557 PARAMETER Experiment Name: At_Drought_Soil_Dry_P Parameter: Post-Treatment Value: Re-Water vs. No Drought
  misc_feature: MA Experiment 20001557 PARAMETER Experiment Name: At_Drought_Soil_Dry_P Parameter: Timepoint (day) Value: 13
  misc_feature: MA Experiment 20001557 PARAMETER Experiment Name: At_Drought_Soil_Dry_P Parameter: Treatment Value: Drought vs. No Drought
  misc_feature: MA Experiment ID: 20001558 Result: Down-regulated in Transcription
  misc_feature: MA Experiment 20001558 PARAMETER Experiment Name: At_Drought_Soil_Dry_P Parameter: Age (day) Value: 27
  misc_feature: MA Experiment 20001558 PARAMETER Experiment Name: At_Drought_Soil_Dry_P Parameter: Organism Value: A. thaliana
  misc_feature: MA Experiment 20001558 PARAMETER Experiment Name: At_Drought_Soil_Dry_P Parameter: Plant Line Value: WS
  misc_feature: MA Experiment 20001558 PARAMETER Experiment Name: At_Drought_Soil_Dry_P Parameter: Post Timepoint (hr) Value: 6
  misc_feature: MA Experiment 20001558 PARAMETER Experiment Name: At_Drought_Soil_Dry_P Parameter: Post-Treatment Value: Re-Water vs. No Drought
  misc_feature: MA Experiment 20001558 PARAMETER Experiment Name: At_Drought_Soil_Dry_P Parameter: Timepoint (day) Value: 13
  misc_feature: MA Experiment 20001558 PARAMETER Experiment Name: At_Drought_Soil_Dry_P Parameter: Treatment Value: Drought vs. No Drought
  misc_feature: MA Experiment ID: 20001559 Result: Down-regulated in Transcription
  misc_feature: MA Experiment 20001559 PARAMETER Experiment Name: At_Drought_Soil_Dry_P Parameter: Age (day) Value: 28
  misc_feature: MA Experiment 20001559 PARAMETER Experiment Name: At_Drought_Soil_Dry_P Parameter: Organism Value: A. thaliana
  misc_feature: MA Experiment 20001559 PARAMETER Experiment Name: At_Drought_Soil_Dry_P Parameter: Plant Line Value: WS
  misc_feature: MA Experiment 20001559 PARAMETER Experiment Name: At_Drought_Soil_Dry_P Parameter: Post Timepoint (hr) Value: 29
  misc_feature: MA Experiment 20001559 PARAMETER Experiment Name: At_Drought_Soil_Dry_P Parameter: Post-Treatment Value: Re-Water vs. No Drought
  misc_feature: MA Experiment 20001559 PARAMETER Experiment Name: At_Drought_Soil_Dry_P Parameter: Timepoint (day) Value: 14
  misc_feature: MA Experiment 20001559 PARAMETER Experiment Name: At_Drought_Soil_Dry_P Parameter: Treatment Value: Drought vs. No Drought
  misc_feature: MA Experiment ID: 20001560 Result: Up-regulated in Transcription
  misc_feature: MA Experiment 20001560 PARAMETER Experiment Name: At_Drought_Soil_Dry_P Parameter: Age (day) Value: 28
  misc_feature: MA Experiment 20001560 PARAMETER Experiment Name: At_Drought_Soil_Dry_P Parameter: Organism Value: A. thaliana
  misc_feature: MA Experiment 20001560 PARAMETER Experiment Name: At_Drought_Soil_Dry_P Parameter: Plant Line Value: WS
  misc_feature: MA Experiment 20001560 PARAMETER Experiment Name: At_Drought_Soil_Dry_P Parameter: Post Timepoint (hr) Value: None
  misc_feature: MA Experiment 20001560 PARAMETER Experiment Name: At_Drought_Soil_Dry_P Parameter: Post-Treatment Value: None
  misc_feature: MA Experiment 20001560 PARAMETER Experiment Name: At_Drought_Soil_Dry_P Parameter: Timepoint (day) Value: 14
  misc_feature: MA Experiment 20001560 PARAMETER Experiment Name: At_Drought_Soil_Dry_P Parameter: Treatment Value: Drought vs. No Drought
aatcccttgcgtcgccaagaaagctcaatgggctatgaaatggatcgacggttctcagactttcgccgaacgaatcatcgctttcgcttgcgtcgaaggtatcttcttctccggaagcttttgttcaatcttctggctgaagaaacggggactcatgcctggattaacattctcaaacgaattgatctctcgtgacgaaggtttacactgcgacttcgcttgtctactctacacgctactcaaaacaaagcttagcgaagaacgcgtgaaatcaatcgtctgcgacgcggtcgaaatcgagagagagtttgtgtgcgacgcgcttccgtgcgcgttggttgggatgaaccgtgatttgatgagtcagtatattgagtttgttgcggataggcttttgggtgcgcttgggtacgggaaggtgtacggtgttactaatccgtttgattggatggaacttatttcgcttcaagggaaaacgaatttcttcgagaaacgtgttggtgattaccaaaaggcttccgttatgtctagcgttaatggtaacggcgcgtttgataaccatgtcttctctctcgacgaagatttttaaagagcgtttgttttgatgctataattacgattctactcttgtattattaccgtgtattatccttggtttttgaattaatgaataattagttgctttt

SEQ ID NO: 27094 - protein, 195 aa, Arabidopsis thaliana
  peptide (1)..(195): Ceres Seq. ID no. 12394302
  misc_feature (1)..(151): Pfam Name: Ribonucleotide reductase, small chain Pfam Description: Ribonucleotide reductase, small chain
  misc_feature (2)..(195): Homolog of NCBI NO: 1710401 NR Description: RIBONUCLEOSIDE-DIPHOSPHATE REDUCTASE SMALL CHAIN
  misc_feature (4)..(195): Homolog of NCBI NO: 28393533 NR Description: putative ribonucleoside-diphosphate reductase
  misc_feature (1)..(195): Homolog of NCBI NO: 34898038 NR Description: putative ribonucleoside-diphosphate reductase
  misc_feature (1)..(195): Homolog of NCBI NO: 15232077 NR Description: ribonucleotide reductase small subunit, putative
IPCVAKKAQWAMKWIDGSQTFAERIIAFACVEGIFFSGSFCSIFWLKKRGLMPGLTFSNELISRDEGLHCDFACLLYTLLKTKLSEERVKSIVCDAVEIEREFVCDALPCALVGMNRDLMSQYIEFVADRLLGALGYGKVYGVTNPFDWMELISLQGKTNFFEKRVGDYQKASVMSSVNGNGAFDNHVFSLDEDF

SEQ ID NO: 27095 - protein, 184 aa, Arabidopsis thaliana
  peptide (1)..(184): Ceres Seq. ID no. 12394303
  misc_feature (1)..(140): Pfam Name: Ribonucleotide reductase, small chain Pfam Description: Ribonucleotide reductase, small chain
  misc_feature (1)..(184): Homolog of NCBI NO: 34898038 NR Description: putative ribonucleoside-diphosphate reductase
  misc_feature (1)..(184): Homolog of NCBI NO: 1710401 NR Description: RIBONUCLEOSIDE-DIPHOSPHATE REDUCTASE SMALL CHAIN
  misc_feature (1)..(184): Homolog of NCBI NO: 28393533 NR Description: putative ribonucleoside-diphosphate reductase
  misc_feature (1)..(184): Homolog of NCBI NO: 15232077 NR Description: ribonucleotide reductase small subunit, putative
MKWIDGSQTFAERIIAFACVEGIFFSGSFCSIFWLKKRGLMPGLTFSNELISRDEGLHCDFACLLYTLLKTKLSEERVKSIVCDAVEIEREFVCDALPCALVGMNRDLMSQYIEFVADRLLGALGYGKVYGVTNPFDWMELISLQGKTNFFEKRVGDYQKASVMSSVNGNGAFDNHVFSLDEDF

SEQ ID NO: 27096 - protein, 144 aa, Arabidopsis thaliana
  peptide (1)..(144): Ceres Seq. ID no. 12394304
  misc_feature (1)..(100): Pfam Name: Ribonucleotide reductase, small chain Pfam Description: Ribonucleotide reductase, small chain
  misc_feature (1)..(144): Homolog of NCBI NO: 34898038 NR Description: putative ribonucleoside-diphosphate reductase
  misc_feature (1)..(144): Homolog of NCBI NO: 1710401 NR Description: RIBONUCLEOSIDE-DIPHOSPHATE REDUCTASE SMALL CHAIN
  misc_feature (1)..(144): Homolog of NCBI NO: 28393533 NR Description: putative ribonucleoside-diphosphate reductase
  misc_feature (1)..(144): Homolog of NCBI NO: 15232077 NR Description: ribonucleotide reductase small subunit, putative
MPGLTFSNELISRDEGLHCDFACLLYTLLKTKLSEERVKSIVCDAVEIEREFVCDALPCALVGMNRDLMSQYIEFVADRLLGALGYGKVYGVTNPFDWMELISLQGKTNFFEKRVGDYQKASVMSSVNGNGAFDNHVFSLDEDF

SEQ ID NO: 27097 - DNA, 930 bp, Arabidopsis thaliana
  misc_feature (1)..(930): Ceres Seq. ID no. 12647740
  misc_feature: MA Experiment ID: 20000173 Result: Down-regulated in Transcription
  misc_feature: MA Experiment 20000173 PARAMETER Experiment Name: At_42deg_Heat_P Parameter: Age (day) Value: 14
  misc_feature: MA Experiment 20000173 PARAMETER Experiment Name: At_42deg_Heat_P Parameter: Organism Value: A. thaliana
  misc_feature: MA Experiment 20000173 PARAMETER Experiment Name: At_42deg_Heat_P Parameter: Plant Line Value: WS
  misc_feature: MA Experiment 20000173 PARAMETER Experiment Name: At_42deg_Heat_P Parameter: Temperature (deg C) Value: 42 vs. 22
  misc_feature: MA Experiment 20000173 PARAMETER Experiment Name: At_42deg_Heat_P Parameter: Timepoint (hr) Value: 6
  misc_feature: MA Experiment 20000173 PARAMETER Experiment Name: At_42deg_Heat_P Parameter: Tissue Value: Aerial
  misc_feature: MA Experiment ID: 20000185 Result: Down-regulated in Transcription
  misc_feature: MA Experiment 20000185 PARAMETER Experiment Name: At_Roots__P Parameter: Age (day) Value: 7 vs. 21
  misc_feature: MA Experiment 20000185 PARAMETER Experiment Name: At_Roots__P Parameter: Organism Value: A. thaliana
  misc_feature: MA Experiment 20000185 PARAMETER Experiment Name: At_Roots__P Parameter: Tissue Value: Roots vs. Whole Plant
  misc_feature: MA Experiment ID: 20000227 Result: Down-regulated in Transcription
  misc_feature: MA Experiment 20000227 PARAMETER Experiment Name: At_Root-Tips-vs-Tops_P Parameter: Tissue Value: Root Tips vs. Root Tops
  misc_feature: MA Experiment ID: 20000234 Result: Down-regulated in Transcription
  misc_feature: MA Experiment 20000234 PARAMETER Experiment Name: At_Siliques_P Parameter: Age (day) Value: 21
  misc_feature: MA Experiment 20000234 PARAMETER Experiment Name: At_Siliques_P Parameter: Organism Value: A. thaliana
  misc_feature: MA Experiment 20000234 PARAMETER Experiment Name: At_Siliques_P Parameter: Plant Line Value: WS
  misc_feature: MA Experiment 20000234 PARAMETER Experiment Name: At_Siliques_P Parameter: Tissue Value: Less Than 5mm Siliques vs. Whole Plant
  misc_feature: MA Experiment ID: 20000264 Result: Down-regulated in Transcription
  misc_feature: MA Experiment 20000264 PARAMETER Experiment Name: At_Open_Flower_P Parameter: Age (day) Value: 21
  misc_feature: MA Experiment 20000264 PARAMETER Experiment Name: At_Open_Flower_P Parameter: Plant Line Value: WS
  misc_feature: MA Experiment 20000264 PARAMETER Experiment Name: At_Open_Flower_P Parameter: Tissue Value: Open Flower vs. Whole Plant
  misc_feature: MA Experiment ID: 20000265 Result: Down-regulated in Transcription
  misc_feature: MA Experiment 20000265 PARAMETER Experiment Name: At_Open_Flower_P Parameter: Age (day) Value: 21
  misc_feature: MA Experiment 20000265 PARAMETER Experiment Name: At_Open_Flower_P Parameter: Plant Line Value: WS
  misc_feature: MA Experiment 20000265 PARAMETER Experiment Name: At_Open_Flower_P Parameter: Tissue Value: Closed Flower vs. Whole Plant
  misc_feature: MA Experiment ID: 20000268 Result: Down-regulated in Transcription
  misc_feature: MA Experiment 20000268 PARAMETER Experiment Name: At_100mM_NaCl__P Parameter: Age (day) Value: 14
  misc_feature: MA Experiment 20000268 PARAMETER Experiment Name: At_100mM_NaCl__P Parameter: Organism Value: A. thaliana
  misc_feature: MA Experiment 20000268 PARAMETER Experiment Name: At_100mM_NaCl__P Parameter: Plant Line Value: WS
  misc_feature: MA Experiment 20000268 PARAMETER Experiment Name: At_100mM_NaCl__P Parameter: Timepoint (hr) Value: 6
  misc_feature: MA Experiment 20000268 PARAMETER Experiment Name: At_100mM_NaCl__P Parameter: Tissue Value: Whole Plant
  misc_feature: MA Experiment 20000268 PARAMETER Experiment Name: At_100mM_NaCl__P Parameter: Treatment Value: 100mM NaCl vs. No Treatment
  misc_feature: MA Experiment ID: 20000269 Result: Down-regulated in Transcription
  misc_feature: MA Experiment 20000269 PARAMETER Experiment Name: At_1mM_KNO3_L-vs-H_Roots_P Parameter: Age (day) Value: 7,10,12
  misc_feature: MA Experiment 20000269 PARAMETER Experiment Name: At_1mM_KNO3_L-vs-H_Roots_P Parameter: Organism Value: A. thaliana
  misc_feature: MA Experiment 20000269 PARAMETER Experiment Name: At_1mM_KNO3_L-vs-H_Roots_P Parameter: Plant Line Value: WS
  misc_feature: MA Experiment 20000269 PARAMETER Experiment Name: At_1mM_KNO3_L-vs-H_Roots_P Parameter: Timepoint (day) Value: 7,10,12
  misc_feature: MA Experiment 20000269 PARAMETER Experiment Name: At_1mM_KNO3_L-vs-H_Roots_P Parameter: Tissue Value: Roots
  misc_feature: MA Experiment 20000269 PARAMETER Experiment Name: At_1mM_KNO3_L-vs-H_Roots_P Parameter: Treatment Value: 1mM KNO3 vs. 50mM KNO3
  misc_feature: MA Experiment ID: 20000286 Result: Down-regulated in Transcription
  misc_feature: MA Experiment 20000286 PARAMETER Experiment Name: At_Open_Flower_P Parameter: Age (day) Value: 21
  misc_feature: MA Experiment 20000286 PARAMETER Experiment Name: At_Open_Flower_P Parameter: Plant Line Value: WS
  misc_feature: MA Experiment 20000286 PARAMETER Experiment Name: At_Open_Flower_P Parameter: Tissue Value: Half Open vs. Whole Plant
  misc_feature: MA Experiment ID: 20000308 Result: Down-regulated in Transcription
  misc_feature: MA Experiment 20000308 PARAMETER Experiment Name: At_100mM_NaCl__P Parameter: Age (day) Value: 17
  misc_feature: MA Experiment 20000308 PARAMETER Experiment Name: At_100mM_NaCl__P Parameter: Organism Value: A. thaliana
  misc_feature: MA Experiment 20000308 PARAMETER Experiment Name: At_100mM_NaCl__P Parameter: Plant Line Value: WS
  misc_feature: MA Experiment 20000308 PARAMETER Experiment Name: At_100mM_NaCl__P Parameter: Timepoint (hr) Value: 72
  misc_feature: MA Experiment 20000308 PARAMETER Experiment Name: At_100mM_NaCl__P Parameter: Tissue Value: Whole Plant
  misc_feature: MA Experiment 20000308 PARAMETER Experiment Name: At_100mM_NaCl__P Parameter: Treatment Value: 100mM NaCl vs. No Treatment
  misc_feature: MA Experiment ID: 20000439 Result: Down-regulated in Transcription
  misc_feature: MA Experiment 20000439 PARAMETER Experiment Name: At_Roots__P Parameter: Age (day) Value: 14 vs. 21
  misc_feature: MA Experiment 20000439 PARAMETER Experiment Name: At_Roots__P Parameter: Organism Value: A. thaliana
  misc_feature: MA Experiment 20000439 PARAMETER Experiment Name: At_Roots__P Parameter: Tissue Value: Roots vs. Whole Plant
  misc_feature: MA Experiment ID: 20000441 Result: Up-regulated in Transcription
  misc_feature: MA Experiment 20000441 PARAMETER Experiment Name: At_1uM_BR-BRZ__P Parameter: Tissue Value: Shoot Apices
  misc_feature: MA Experiment 20000441 PARAMETER Experiment Name: At_1uM_BR-BRZ__P Parameter: Treatment Value: 1uM BR vs. No Treatment
  misc_feature: MA Experiment ID: 20000443 Result: Up-regulated in Transcription
  misc_feature: MA Experiment 20000443 PARAMETER Experiment Name: At_1uM_BR-BRZ__P Parameter: Tissue Value: Shoot Apices
  misc_feature: MA Experiment 20000443 PARAMETER Experiment Name: At_1uM_BR-BRZ__P Parameter: Treatment Value: 1uM BRZ vs. No Treatment
  misc_feature: MA Experiment ID: 20000451 Result: Down-regulated in Transcription
  misc_feature: MA Experiment 20000451 PARAMETER Experiment Name: At_CS6879_Shoots-Roots_P Parameter: Age (day) Value: 14
  misc_feature: MA Experiment 20000451 PARAMETER Experiment Name: At_CS6879_Shoots-Roots_P Parameter: Organism Value: A. thaliana
  misc_feature: MA Experiment 20000451 PARAMETER Experiment Name: At_CS6879_Shoots-Roots_P Parameter: Plant Line Value: CS6879 vs. WS
  misc_feature: MA Experiment 20000451 PARAMETER Experiment Name: At_CS6879_Shoots-Roots_P Parameter: Tissue Value: Roots
  misc_feature: MA Experiment ID: 20000460 Result: Up-regulated in Transcription
  misc_feature: MA Experiment 20000460 PARAMETER Experiment Name: At_10percent_PEG_P Parameter: Age (day) Value: 12
  misc_feature: MA Experiment 20000460 PARAMETER Experiment Name: At_10percent_PEG_P Parameter: Organism Value: A. thaliana
  misc_feature: MA Experiment 20000460 PARAMETER Experiment Name: At_10percent_PEG_P Parameter: Plant Line Value: WS
  misc_feature: MA Experiment 20000460 PARAMETER Experiment Name: At_10percent_PEG_P Parameter: Timepoint (day) Value: 12
  misc_feature: MA Experiment 20000460 PARAMETER Experiment Name: At_10percent_PEG_P Parameter: Tissue Value: Whole Plant
  misc_feature: MA Experiment 20000460 PARAMETER Experiment Name: At_10percent_PEG_P Parameter: Treatment Value: 10percent PEG vs. No Treatment
  misc_feature: MA Experiment ID: 20000527 Result: Up-regulated in Transcription
  misc_feature: MA Experiment 20000527 PARAMETER Experiment Name: At_10percent_PEG_P Parameter: Age (day) Value: 20
  misc_feature: MA Experiment 20000527 PARAMETER Experiment Name: At_10percent_PEG_P Parameter: Organism Value: A. thaliana
  misc_feature: MA Experiment 20000527 PARAMETER Experiment Name: At_10percent_PEG_P Parameter: Plant Line Value: WS
  misc_feature: MA Experiment 20000527 PARAMETER Experiment Name: At_10percent_PEG_P Parameter: Timepoint (day) Value: 20
  misc_feature: MA Experiment 20000527 PARAMETER Experiment Name: At_10percent_PEG_P Parameter: Tissue Value: Whole Plant
  misc_feature: MA Experiment 20000527 PARAMETER Experiment Name: At_10percent_PEG_P Parameter: Treatment Value: 10percent PEG vs. No Treatment
  misc_feature: MA Experiment ID: 20000794 Result: Down-regulated in Transcription
  misc_feature: MA Experiment 20000794 PARAMETER Experiment Name: At_Petals_P Parameter: Age (day) Value: 23-25 days
  misc_feature: MA Experiment 20000794 PARAMETER Experiment Name: At_Petals_P Parameter: Plant Line Value: WS
  misc_feature: MA Experiment 20000794 PARAMETER Experiment Name: At_Petals_P Parameter: Tissue Value: Petals vs. Whole plant
  misc_feature: MA Experiment ID: 20001247 Result: Up-regulated in Transcription
  misc_feature: MA Experiment 20001247 PARAMETER Experiment Name: At_Far-red-induction_P Parameter: Age (day) Value: 7
  misc_feature: MA Experiment 20001247 PARAMETER Experiment Name: At_Far-red-induction_P Parameter: Light Value: Far-red vs. White
  misc_feature: MA Experiment 20001247 PARAMETER Experiment Name: At_Far-red-induction_P Parameter: Organism Value: A. thaliana
  misc_feature: MA Experiment 20001247 PARAMETER Experiment Name: At_Far-red-induction_P Parameter: Plant Line Value: Columbia
  misc_feature: MA Experiment 20001247 PARAMETER Experiment Name: At_Far-red-induction_P Parameter: Timepoint (hr) Value: 1
  misc_feature: MA Experiment 20001247 PARAMETER Experiment Name: At_Far-red-induction_P Parameter: Tissue Value: Whole Plant
  misc_feature: MA Experiment ID: 20001450 Result: Up-regulated in Transcription
  misc_feature: MA Experiment 20001450 PARAMETER Experiment Name: At_Far-red-induction_P Parameter: Age (day) Value: 7
  misc_feature: MA Experiment 20001450 PARAMETER Experiment Name: At_Far-red-induction_P Parameter: Light Value: Far-red vs. White
  misc_feature: MA Experiment 20001450 PARAMETER Experiment Name: At_Far-red-induction_P Parameter: Organism Value: A. thaliana
  misc_feature: MA Experiment 20001450 PARAMETER Experiment Name: At_Far-red-induction_P Parameter: Plant Line Value: Columbia
  misc_feature: MA Experiment 20001450 PARAMETER Experiment Name: At_Far-red-induction_P Parameter: Timepoint (hr) Value: 8
  misc_feature: MA Experiment 20001450 PARAMETER Experiment Name: At_Far-red-induction_P Parameter: Tissue Value: Whole Plant
  misc_feature: MA Experiment ID: 20001451 Result: Up-regulated in Transcription
  misc_feature: MA Experiment 20001451 PARAMETER Experiment Name: At_Far-red-induction_P Parameter: Age (day) Value: 7
  misc_feature: MA Experiment 20001451 PARAMETER Experiment Name: At_Far-red-induction_P Parameter: Light Value: Far-red vs. White
  misc_feature: MA Experiment 20001451 PARAMETER Experiment Name: At_Far-red-induction_P Parameter: Organism Value: A. thaliana
  misc_feature: MA Experiment 20001451 PARAMETER Experiment Name: At_Far-red-induction_P Parameter: Plant Line Value: Columbia
  misc_feature: MA Experiment 20001451 PARAMETER Experiment Name: At_Far-red-induction_P Parameter: Timepoint (hr) Value: 24
  misc_feature: MA Experiment 20001451 PARAMETER Experiment Name: At_Far-red-induction_P Parameter: Tissue Value: Whole Plant
  misc_feature: MA Experiment ID: 20001458 Result: Up-regulated in Transcription
  misc_feature: MA Experiment 20001458 PARAMETER Experiment Name: At_50mM_NH4NO3_L-to-H_P Parameter: Age (day) Value: Undefined
  misc_feature: MA Experiment 20001458 PARAMETER Experiment Name: At_50mM_NH4NO3_L-to-H_P Parameter: Organism Value: Undefined
  misc_feature: MA Experiment 20001458 PARAMETER Experiment Name: At_50mM_NH4NO3_L-to-H_P Parameter: Plant Line Value: Undefined
  misc_feature: MA Experiment 20001458 PARAMETER Experiment Name: At_50mM_NH4NO3_L-to-H_P Parameter: Timepoint (hr) Value: 2
  misc_feature: MA Experiment 20001458 PARAMETER Experiment Name: At_50mM_NH4NO3_L-to-H_P Parameter: Tissue Value: Siliques
  misc_feature: MA Experiment 20001458 PARAMETER Experiment Name: At_50mM_NH4NO3_L-to-H_P Parameter: Treatment Value: 50mM NH4NO3 vs. 100mM Manitol
  misc_feature: MA Experiment ID: 20001459 Result: Down-regulated in Transcription
  misc_feature: MA Experiment 20001459 PARAMETER Experiment Name: At_50mM_NH4NO3_L-to-H_P Parameter: Age (day) Value: Undefined
  misc_feature: MA Experiment 20001459 PARAMETER Experiment Name: At_50mM_NH4NO3_L-to-H_P Parameter: Organism Value: Undefined
  misc_feature: MA Experiment 20001459 PARAMETER Experiment Name: At_50mM_NH4NO3_L-to-H_P Parameter: Plant Line Value: Undefined
  misc_feature: MA Experiment 20001459 PARAMETER Experiment Name: At_50mM_NH4NO3_L-to-H_P Parameter: Timepoint (hr) Value: 4
  misc_feature: MA Experiment 20001459 PARAMETER Experiment Name: At_50mM_NH4NO3_L-to-H_P Parameter: Tissue Value: Siliques
  misc_feature: MA Experiment 20001459 PARAMETER Experiment Name: At_50mM_NH4NO3_L-to-H_P Parameter: Treatment Value: 50mM NH4NO3 vs. 100mM Manitol
  misc_feature: MA Experiment ID: 20001504 Result: Down-regulated in Transcription
  misc_feature: MA Experiment 20001504 PARAMETER Experiment Name: At_Far-red-enriched_P Parameter: Age (day) Value: 10
  misc_feature: MA Experiment 20001504 PARAMETER Experiment Name: At_Far-red-enriched_P Parameter: Light Value: Far-red enriched vs. White
  misc_feature: MA Experiment 20001504 PARAMETER Experiment Name: At_Far-red-enriched_P Parameter: Organism Value: A. thaliana
  misc_feature: MA Experiment 20001504 PARAMETER Experiment Name: At_Far-red-enriched_P Parameter: Plant Line Value: Columbia
  misc_feature: MA Experiment 20001504 PARAMETER Experiment Name: At_Far-red-enriched_P Parameter: Timepoint (day) Value: 6
  misc_feature: MA Experiment 20001504 PARAMETER Experiment Name: At_Far-red-enriched_P Parameter: Tissue Value: Whole Plant
  misc_feature: MA Experiment ID: 20001554 Result: Down-regulated in Transcription
  misc_feature: MA Experiment 20001554 PARAMETER Experiment Name: At_Drought_Soil_Dry_P Parameter: Age (day) Value: 21
  misc_feature: MA Experiment 20001554 PARAMETER Experiment Name: At_Drought_Soil_Dry_P Parameter: Organism Value: A. thaliana
  misc_feature: MA Experiment 20001554 PARAMETER Experiment Name: At_Drought_Soil_Dry_P Parameter: Plant Line Value: WS
  misc_feature: MA Experiment 20001554 PARAMETER Experiment Name: At_Drought_Soil_Dry_P Parameter: Post Timepoint (hr) Value: None
  misc_feature: MA Experiment 20001554 PARAMETER Experiment Name: At_Drought_Soil_Dry_P Parameter: Post-Treatment Value: None
  misc_feature: MA Experiment 20001554 PARAMETER Experiment Name: At_Drought_Soil_Dry_P Parameter: Timepoint (day) Value: 7
  misc_feature: MA Experiment 20001554 PARAMETER Experiment Name: At_Drought_Soil_Dry_P Parameter: Treatment Value: Drought vs. No Drought
  misc_feature: MA Experiment ID: 20001555 Result: Down-regulated in Transcription
  misc_feature: MA Experiment 20001555 PARAMETER Experiment Name: At_Drought_Soil_Dry_P Parameter: Age (day) Value: 24
  misc_feature: MA Experiment 20001555 PARAMETER Experiment Name: At_Drought_Soil_Dry_P Parameter: Organism Value: A. thaliana
  misc_feature: MA Experiment 20001555 PARAMETER Experiment Name: At_Drought_Soil_Dry_P Parameter: Plant Line Value: WS
  misc_feature: MA Experiment 20001555 PARAMETER Experiment Name: At_Drought_Soil_Dry_P Parameter: Post Timepoint (hr) Value: None
  misc_feature: MA Experiment 20001555 PARAMETER Experiment Name: At_Drought_Soil_Dry_P Parameter: Post-Treatment Value: None
  misc_feature: MA Experiment 20001555 PARAMETER Experiment Name: At_Drought_Soil_Dry_P Parameter: Timepoint (day) Value: 10
  misc_feature: MA Experiment 20001555 PARAMETER Experiment Name: At_Drought_Soil_Dry_P Parameter: Treatment Value: Drought vs. No Drought
  misc_feature: MA Experiment ID: 20001556 Result: Down-regulated in Transcription
  misc_feature: MA Experiment 20001556 PARAMETER Experiment Name: At_Drought_Soil_Dry_P Parameter: Age (day) Value: 26
  misc_feature: MA Experiment 20001556 PARAMETER Experiment Name: At_Drought_Soil_Dry_P Parameter: Organism Value: A. thaliana
  misc_feature: MA Experiment 20001556 PARAMETER Experiment Name: At_Drought_Soil_Dry_P Parameter: Plant Line Value: WS
  misc_feature: MA Experiment 20001556 PARAMETER Experiment Name: At_Drought_Soil_Dry_P Parameter: Post Timepoint (hr) Value: None
  misc_feature: MA Experiment 20001556 PARAMETER Experiment Name: At_Drought_Soil_Dry_P Parameter: Post-Treatment Value: None
  misc_feature: MA Experiment 20001556 PARAMETER Experiment Name: At_Drought_Soil_Dry_P Parameter: Timepoint (day) Value: 12
  misc_feature: MA Experiment 20001556 PARAMETER Experiment Name: At_Drought_Soil_Dry_P Parameter: Treatment Value: Drought vs. No Drought
  misc_feature: MA Experiment ID: 20001557 Result: Down-regulated in Transcription
  misc_feature: MA Experiment 20001557 PARAMETER Experiment Name: At_Drought_Soil_Dry_P Parameter: Age (day) Value: 27
  misc_feature: MA Experiment 20001557 PARAMETER Experiment Name: At_Drought_Soil_Dry_P Parameter: Organism Value: A. thaliana
  misc_feature: MA Experiment 20001557 PARAMETER Experiment Name: At_Drought_Soil_Dry_P Parameter: Plant Line Value: WS
  misc_feature: MA Experiment 20001557 PARAMETER Experiment Name: At_Drought_Soil_Dry_P Parameter: Post Timepoint (hr) Value: 3
  misc_feature: MA Experiment 20001557 PARAMETER Experiment Name: At_Drought_Soil_Dry_P Parameter: Post-Treatment Value: Re-Water vs. No Drought
  misc_feature: MA Experiment 20001557 PARAMETER Experiment Name: At_Drought_Soil_Dry_P Parameter: Timepoint (day) Value: 13
  misc_feature: MA Experiment 20001557 PARAMETER Experiment Name: At_Drought_Soil_Dry_P Parameter: Treatment Value: Drought vs. No Drought
  misc_feature: MA Experiment ID: 20001558 Result: Down-regulated in Transcription
  misc_feature: MA Experiment 20001558 PARAMETER Experiment Name: At_Drought_Soil_Dry_P Parameter: Age (day) Value: 27
  misc_feature: MA Experiment 20001558 PARAMETER Experiment Name: At_Drought_Soil_Dry_P Parameter: Organism Value: A. thaliana
  misc_feature: MA Experiment 20001558 PARAMETER Experiment Name: At_Drought_Soil_Dry_P Parameter: Plant Line Value: WS
  misc_feature: MA Experiment 20001558 PARAMETER Experiment Name: At_Drought_Soil_Dry_P Parameter: Post Timepoint (hr) Value: 6
  misc_feature: MA Experiment 20001558 PARAMETER Experiment Name: At_Drought_Soil_Dry_P Parameter: Post-Treatment Value: Re-Water vs. No Drought
  misc_feature: MA Experiment 20001558 PARAMETER Experiment Name: At_Drought_Soil_Dry_P Parameter: Timepoint (day) Value: 13
  misc_feature: MA Experiment 20001558 PARAMETER Experiment Name: At_Drought_Soil_Dry_P Parameter: Treatment Value: Drought vs. No Drought
  misc_feature: MA Experiment ID: 20001559 Result: Down-regulated in Transcription
  misc_feature: MA Experiment 20001559 PARAMETER Experiment Name: At_Drought_Soil_Dry_P Parameter: Age (day) Value: 28
  misc_feature: MA Experiment 20001559 PARAMETER Experiment Name: At_Drought_Soil_Dry_P Parameter: Organism Value: A. thaliana
  misc_feature: MA Experiment 20001559 PARAMETER Experiment Name: At_Drought_Soil_Dry_P Parameter: Plant Line Value: WS
  misc_feature: MA Experiment 20001559 PARAMETER Experiment Name: At_Drought_Soil_Dry_P Parameter: Post Timepoint (hr) Value: 29
  misc_feature: MA Experiment 20001559 PARAMETER Experiment Name: At_Drought_Soil_Dry_P Parameter: Post-Treatment Value: Re-Water vs. No Drought
  misc_feature: MA Experiment 20001559 PARAMETER Experiment Name: At_Drought_Soil_Dry_P Parameter: Timepoint (day) Value: 14
  misc_feature: MA Experiment 20001559 PARAMETER Experiment Name: At_Drought_Soil_Dry_P Parameter: Treatment Value: Drought vs. No Drought
  misc_feature: MA Experiment ID: 20001560 Result: Down-regulated in Transcription
  misc_feature: MA Experiment 20001560 PARAMETER Experiment Name: At_Drought_Soil_Dry_P Parameter: Age (day) Value: 28
  misc_feature: MA Experiment 20001560 PARAMETER Experiment Name: At_Drought_Soil_Dry_P Parameter: Organism Value: A. thaliana
  misc_feature: MA Experiment 20001560 PARAMETER Experiment Name: At_Drought_Soil_Dry_P Parameter: Plant Line Value: WS
  misc_feature: MA Experiment 20001560 PARAMETER Experiment Name: At_Drought_Soil_Dry_P Parameter: Post Timepoint (hr) Value: None
  misc_feature: MA Experiment 20001560 PARAMETER Experiment Name: At_Drought_Soil_Dry_P Parameter: Post-Treatment Value: None
  misc_feature: MA Experiment 20001560 PARAMETER Experiment Name: At_Drought_Soil_Dry_P Parameter: Timepoint (day) Value: 14
  misc_feature: MA Experiment 20001560 PARAMETER Experiment Name: At_Drought_Soil_Dry_P Parameter: Treatment Value: Drought vs. No Drought
  misc_feature: MA Experiment ID: 20001755 Result: Down-regulated in Transcription
  misc_feature: MA Experiment 20001755 PARAMETER Experiment Name: At_50mM_NH4NO3_L-to-H_P Parameter: Timepoint (hr) Value: 2
  misc_feature: MA Experiment 20001755 PARAMETER Experiment Name: At_50mM_NH4NO3_L-to-H_P Parameter: Tissue Value: Leaf
  misc_feature: MA Experiment 20001755 PARAMETER Experiment Name: At_50mM_NH4NO3_L-to-H_P Parameter: Treatment Value: 50mM NH4NO3 vs 100mM Mannitol
  misc_feature: MA Experiment ID: 20001757 Result: Up-regulated in Transcription
  misc_feature: MA Experiment 20001757 PARAMETER Experiment Name: At_50mM_NH4NO3_L-to-H_P Parameter: Timepoint (hr) Value: 6
  misc_feature: MA Experiment 20001757 PARAMETER Experiment Name: At_50mM_NH4NO3_L-to-H_P Parameter: Tissue Value: Leaf
  misc_feature: MA Experiment 20001757 PARAMETER Experiment Name: At_50mM_NH4NO3_L-to-H_P Parameter: Treatment Value: 50mM NH4NO3 vs 100mM Mannitol
  misc_feature: MA Experiment ID: 20001906 Result: Down-regulated in Transcription
  misc_feature: MA Experiment 20001906 PARAMETER Experiment Name: At_Drought_Reproduction_P Parameter: Age (day) Value: 35
  misc_feature: MA Experiment 20001906 PARAMETER Experiment Name: At_Drought_Reproduction_P Parameter: Organism Value: A. thaliana
  misc_feature: MA Experiment 20001906 PARAMETER Experiment Name: At_Drought_Reproduction_P Parameter: Plant Line Value: WS
  misc_feature: MA Experiment 20001906 PARAMETER Experiment Name: At_Drought_Reproduction_P Parameter: Timepoint (day) Value: 5
  misc_feature: MA Experiment 20001906 PARAMETER Experiment Name: At_Drought_Reproduction_P Parameter: Tissue Value: Siliques
  misc_feature: MA Experiment 20001906 PARAMETER Experiment Name: At_Drought_Reproduction_P Parameter: Treatment Value: Drought vs. No Drought
  misc_feature: MA Experiment ID: 20001907 Result: Down-regulated in Transcription
  misc_feature: MA Experiment 20001907 PARAMETER Experiment Name: At_Drought_Reproduction_P Parameter: Age (day) Value: 37
  misc_feature: MA Experiment 20001907 PARAMETER Experiment Name: At_Drought_Reproduction_P Parameter: Organism Value: A. thaliana
  misc_feature: MA Experiment 20001907 PARAMETER Experiment Name: At_Drought_Reproduction_P Parameter: Plant Line Value: WS
  misc_feature: MA Experiment 20001907 PARAMETER Experiment Name: At_Drought_Reproduction_P Parameter: Timepoint (day) Value: 7
  misc_feature: MA Experiment 20001907 PARAMETER Experiment Name: At_Drought_Reproduction_P Parameter: Tissue Value: Siliques
  misc_feature: MA Experiment 20001907 PARAMETER Experiment Name: At_Drought_Reproduction_P Parameter: Treatment Value: Drought vs. No Drought
  misc_feature: MA Experiment ID: 20001908 Result: Down-regulated in Transcription
  misc_feature: MA Experiment 20001908 PARAMETER Experiment Name: At_Drought_Reproduction_P Parameter: Age (day) Value: 40
  misc_feature: MA Experiment 20001908 PARAMETER Experiment Name: At_Drought_Reproduction_P Parameter: Organism Value: A. thaliana
  misc_feature: MA Experiment 20001908 PARAMETER Experiment Name: At_Drought_Reproduction_P Parameter: Plant Line Value: WS
  misc_feature: MA Experiment 20001908 PARAMETER Experiment Name: At_Drought_Reproduction_P Parameter: Timepoint (day) Value: 10
  misc_feature: MA Experiment 20001908 PARAMETER Experiment Name: At_Drought_Reproduction_P Parameter: Tissue Value: Siliques
  misc_feature: MA Experiment 20001908 PARAMETER Experiment Name: At_Drought_Reproduction_P Parameter: Treatment Value: Drought vs. No Drought
ataacacatttcaagcattggattaatcaaagacaaagaaaacgaaaatgttggcaatatttcagaaagcttttgctcacccaccggaagaactcaacagtccggcttctcatttctccggcaaaactcctaaacttcccggcgaaactctctccgacttcctctctcatcaccaaaacaatgctttctctatgaacttcggcgactccgccgtcttagcttacgctcgccaagaaacctctcttcgtcaaaggttgttctgtggactagatgggatctactgtatgtttctagggagattgaataatctctgtacattgaatcgacaatacggtttatctgggaagaactcaaacgaggcaatgtttgtgatcgaagcttatcgaacacttcgtgatcgtggtccttacccagcagatcaagttcttagaggtcttgagggaagcttcgctttcgttgtctacgatactcaaacttcctctgttttctcagctctgagttctgatggaggagagagtctttactggggaatttctggagacggatctgttgtaatgtctgatgatattcagatcataaagcaaggctgtgctaaatcgtttgctcctttccctaatggatgtatgtttcatagtgagacagggcttaagagctttgaccatccgactaatatgatgaaggcaatgccgaggattgatagtgaaggtgttctttgtggagctagtttcaaagttgatgcttgttctaagatcaatagtatccctagaagaggaagtgaagctaactgggcgctggctaattctcgttgattttgcttctagtttcgttaactcttgcttctttgttgcgttttctttttatgtactcttgtttatgtaaatatagccttatgaagacgataaagaaataaaattgatttgcttcttcgtg

SEQ ID NO: 27098 - protein, 253 aa, Arabidopsis thaliana
  peptide (1)..(253): Ceres Seq. ID no. 12647741
  misc_feature (1)..(249): Homolog of NCBI NO: 18416995 NR Description: putative protein
  misc_feature (1)..(253): Homolog of NCBI NO: 18400774 NR Description: expressed protein
  misc_feature (1)..(249): Homolog of NCBI NO: 18416995 NR Description: putative protein
  misc_feature (1)..(253): Homolog of NCBI NO: 18400774 NR Description: expressed protein
  misc_feature (1)..(249): Homolog of NCBI NO: 18416995 NR Description: putative protein
  misc_feature (1)..(253): Homolog of NCBI NO: 18400774 NR Description: expressed protein
MLAIFQKAFAHPPEELNSPASHFSGKTPKLPGETLSDFLSHHQNNAFSMNFGDSAVLAYARQETSLRQRLFCGLDGIYCMFLGRLNNLCTLNRQYGLSGKNSNEAMFVIEAYRTLRDRGPYPADQVLRGLEGSFAFVVYDTQTSSVFSALSSDGGESLYWGISGDGSVVMSDDIQIIKQGCAKSFAPFPNGCMFHSETGLKSFDHPTNMMKAMPRIDSEGVLCGASFKVDACSKINSIPRRGSEANWALANSR

SEQ ID NO: 27099 - protein, 205 aa, Arabidopsis thaliana
  peptide (1)..(205): Ceres Seq. ID no. 12647742
  misc_feature (1)..(201): Homolog of NCBI NO: 18416995 NR Description: putative protein
  misc_feature (1)..(205): Homolog of NCBI NO: 18400774 NR Description: expressed protein
  misc_feature (1)..(201): Homolog of NCBI NO: 18416995 NR Description: putative protein
  misc_feature (1)..(205): Homolog of NCBI NO: 18400774 NR Description: expressed protein
  misc_feature (1)..(201): Homolog of NCBI NO: 18416995 NR Description: putative protein
  misc_feature (1)..(205): Homolog of NCBI NO: 18400774 NR Description: expressed protein
MNFGDSAVLAYARQETSLRQRLFCGLDGIYCMFLGRLNNLCTLNRQYGLSGKNSNEAMFVIEAYRTLRDRGPYPADQVLRGLEGSFAFVVYDTQTSSVFSALSSDGGESLYWGISGDGSVVMSDDIQIIKQGCAKSFAPFPNGCMFHSETGLKSFDHPTNMMKAMPRIDSEGVLCGASFKVDACSKINSIPRRGSEANWALANSR

SEQ ID NO: 27100 - protein, 174 aa, Arabidopsis thaliana
  peptide (1)..(174): Ceres Seq. ID no. 12647743
  misc_feature (1)..(170): Homolog of NCBI NO: 18416995 NR Description: putative protein
  misc_feature (1)..(174): Homolog of NCBI NO: 18400774 NR Description: expressed protein
  misc_feature (1)..(170): Homolog of NCBI NO: 18416995 NR Description: putative protein
  misc_feature (1)..(174): Homolog of NCBI NO: 18400774 NR Description: expressed protein
  misc_feature (1)..(170): Homolog of NCBI NO: 18416995 NR Description: putative protein
  misc_feature (1)..(174): Homolog of NCBI NO: 18400774 NR Description: expressed protein
MFLGRLNNLCTLNRQYGLSGKNSNEAMFVIEAYRTLRDRGPYPADQVLRGLEGSFAFVVYDTQTSSVFSALSSDGGESLYWGISGDGSVVMSDDIQIIKQGCAKSFAPFPNGCMFHSETGLKSFDHPTNMMKAMPRIDSEGVLCGASFKVDACSKINSIPRRGSEANWALANSR

SEQ ID NO: 27101 - DNA, 1883 bp, Arabidopsis thaliana
  misc_feature (1)..(1883): Ceres Seq. ID no. 12482898
  misc_feature: MA Experiment ID: 20000179 Result: Up-regulated in Transcription
  misc_feature: MA Experiment 20000179 PARAMETER Experiment Name: At_Germinating_Seeds_P Parameter: Age (hr) Value: 6 vs. 0
  misc_feature: MA Experiment 20000179 PARAMETER Experiment Name: At_Germinating_Seeds_P Parameter: Tissue Value: Germinating Seeds
  misc_feature: MA Experiment ID: 20001556 Result: Down-regulated in Transcription
  misc_feature: MA Experiment 20001556 PARAMETER Experiment Name: At_Drought_Soil_Dry_P Parameter: Age (day) Value: 26
  misc_feature: MA Experiment 20001556 PARAMETER Experiment Name: At_Drought_Soil_Dry_P Parameter: Organism Value: A. thaliana
  misc_feature: MA Experiment 20001556 PARAMETER Experiment Name: At_Drought_Soil_Dry_P Parameter: Plant Line Value: WS
  misc_feature: MA Experiment 20001556 PARAMETER Experiment Name: At_Drought_Soil_Dry_P Parameter: Post Timepoint (hr) Value: None
  misc_feature: MA Experiment 20001556 PARAMETER Experiment Name: At_Drought_Soil_Dry_P Parameter: Post-Treatment Value: None
  misc_feature: MA Experiment 20001556 PARAMETER Experiment Name: At_Drought_Soil_Dry_P Parameter: Timepoint (day) Value: 12
  misc_feature: MA Experiment 20001556 PARAMETER Experiment Name: At_Drought_Soil_Dry_P Parameter: Treatment Value: Drought vs. No Drought
gcacaaagcaaaaaaatctctgtaaaagcagaacgataatggagtcacaattatggaattggatcttacctcttttgatctcttctctcctcatctccttcgtcgctttctatggattcttcgtcaaaccgaagcggaacggtctccgtcacgatcggaaaactgtttctaccgtcacctccgacgtcggatctgttaatattaccggagatactgtcgctgatgtcattgttgttggagctggtgttgctggttctgctcttgcttatactcttggaaaggataaacgccgagttcatgtgattgaaagagatttatcggagcctgatcgtattgttggggagttgttacagcctgggggttacctcaagttactggagttgggaattgaagattgtgtggaagaaatagatgctcagcgtgtgtatggttatgcactttttaaaaatgggaaacgcattcgcttagcttatcctttggagaagtttcacgaagatgtatctggaaggagctttcacaatggacgttttattcaaagaatgcgggagaaagctgcttcacttcccaatgttcagctagagcaaggaacagttctttctcttctagaagagaatgggactatcaaaggtgtgagatataagaataaagcaggagaggaacaaaccgcatttgcagctttgactatagtttgtgatggttgtttctcaaacctgcgtcgctctttgtgcaatcctcaggtcgaggtgccttcttgttttgtcgggttggtcctagagaactgcaatctcccatatgcaaaccatggacatgtcgtcttagcagatccatcaccaattttgatgtatccaattagtagcacagaggtgcggtgcctagttgatgttcccggccagaaagtgccgtccattgcaaatggtgaaatgaaaaactatttgaagactgttgtggctcctcagatgcctcatgaggtctatgactctttcattgctgcggttgataaaggaaatattaagtccatgccaaacagaagcatgccagcttctccttatcctactccaggggctctgttaatgggagatgcatttaacatgcgtcatcctttgacgggtggaggaatgacggttgcattagctgacattgttgtcctgcgtaatctccttagaccgctgcgtgatcttagtgacggcgctagtctctgcaaatatcttgaatcattttacactctgcgaaagccagttgcagcaacaatcaacacccttgcgaatgctctttaccaagtgttctgttcatcagaaaatgaagcaagaaacgagatgagggaagcttgcttcgattatctgggcctcgggggtatgtgcacaagtggaccagtatctttgctttcgggtttgaaccctcgaccattaacacttgtctgccatttctttgcggttgcggtttatggagtcatacggttgttaatcccattcccttccccaaaacgaatctggcttggagccaaattaatctcgggagcatcggggataatatttccgataataaaagcggaaggagttaggcagatgtttttcccagcaactgtacctgcatactactacaaagctcctacagttggagaaaccaaatgttcatagttccaaataattctgtcacgagaaatgccatacaaaagaaaatgaaagttgtggattgcatttggtgtgtttgttgtgtaagtgttctttaaacctataaaagtgatgatactacgatgattatctctgtttttttttgtttttatatataggtatatgatggttgtatcttagttgcaaacggtataccattcttttacatatccaagtctctgcgttataaaatttgttttttaatccgctgtttcg

SEQ ID NO: 27102 - protein, 543 aa, Arabidopsis thaliana
  peptide (1)..(543): Ceres Seq. ID no. 12482899
  misc_feature (223)..(421): Pfam Name: Monooxygenase Pfam Description: Monooxygenase
  misc_feature (223)..(421): Pfam Name: Monooxygenase Pfam Description: Monooxygenase
  misc_feature (22)..(535): Homolog of NCBI NO: 15227757 NR Description: squalene monooxygenase (squalene epoxidase)(SE),
  misc_feature (24)..(536): Homolog of NCBI NO: 21537043 NR Description: squalene epoxidase-like protein [Arabidopsis
  misc_feature (24)..(536): Homolog of NCBI NO: 18420113 NR Description: squalene monooxygenase (squalene epoxidase)(SE),
  misc_feature (40)..(535): Homolog of NCBI NO: 27311240 NR Description: Putative Squalene monooxygenase
  misc_feature (24)..(537): Homolog of NCBI NO: 6685403 NR Description: Squalene monooxygenase (Squalene epoxidase) (SE)
  misc_feature (22)..(535): Homolog of NCBI NO: 15227757 NR Description: squalene monooxygenase (squalene epoxidase)(SE),
  misc_feature (24)..(536): Homolog of NCBI NO: 18420113 NR Description: squalene monooxygenase (squalene epoxidase)(SE),
  misc_feature (24)..(537): Homolog of NCBI NO: 6685403 NR Description: Squalene monooxygenase (Squalene epoxidase) (SE)
  misc_feature (13)..(543): Homolog of NCBI NO: 18406296 NR Description: squalene monooxygenase, putative; protein id:
  misc_feature (13)..(543): Homolog of NCBI NO: 25404216 NR Description: probable squalene monooxygenase F9K23.3
  misc_feature (17)..(537): Homolog of NCBI NO: 27475610 NR Description: squalene monooxygenase 2 [Medicago truncatula]
  misc_feature (26)..(535): Homolog of NCBI NO: 27475612 NR Description: squalene monooxygenase 1 [Medicago truncatula]
  misc_feature (69)..(543): Homolog of NCBI NO: 27311241 NR Description: Putative Squalene monooxygenase
  misc_feature (40)..(535): Homolog of NCBI NO: 27311240 NR Description: Putative Squalene monooxygenase
  misc_feature (24)..(536): Homolog of NCBI NO: 21537043 NR Description: squalene epoxidase-like protein [Arabidopsis
  misc_feature (69)..(543): Homolog of NCBI NO: 27311241 NR Description: Putative Squalene monooxygenase
  misc_feature (26)..(535): Homolog of NCBI NO: 27475612 NR Description: squalene monooxygenase 1 [Medicago truncatula]
  misc_feature (17)..(537): Homolog of NCBI NO: 27475610 NR Description: squalene monooxygenase 2 [Medicago truncatula]
  misc_feature (13)..(543): Homolog of NCBI NO: 25404216 NR Description: probable squalene monooxygenase F9K23.3
  misc_feature (13)..(543): Homolog of NCBI NO: 18406296 NR Description: squalene monooxygenase, putative; protein id:
TKQKNLCKSRTIMESQLWNWILPLLISSLLISFVAFYGFFVKPKRNGLRHDRKTVSTVTSDVGSVNITGDTVADVIVVGAGVAGSALAYTLGKDKRRVHVIERDLSEPDRIVGELLQPGGYLKLLELGIEDCVEEIDAQRVYGYALFKNGKRIRLAYPLEKFHEDVSGRSFHNGRFIQRMREKAASLPNVQLEQGTVLSLLEENGTIKGVRYKNKAGEEQTAFAALTIVCDGCFSNLRRSLCNPQVEVPSCFVGLVLENCNLPYANHGHVVLADPSPILMYPISSTEVRCLVDVPGQKVPSIANGEMKNYLKTVVAPQMPHEVYDSFIAAVDKGNIKSMPNRSMPASPYPTPGALLMGDAFNMRHPLTGGGMTVALADIVVLRNLLRPLRDLSDGASLCKYLESFYTLRKPVAATINTLANALYQVFCSSENEARNEMREACFDYLGLGGMCTSGPVSLLSGLNPRPLTLVCHFFAVAVYGVIRLLIPFPSPKRIWLGAKLISGASGIIFPIIKAEGVRQMFFPATVPAYYYKAPTVGETKCS

SEQ ID NO: 27103 - protein, 531 aa, Arabidopsis thaliana
  peptide (1)..(531): Ceres Seq. ID no. 12482900
  misc_feature (211)..(409): Pfam Name: Monooxygenase Pfam Description: Monooxygenase
  misc_feature (211)..(409): Pfam Name: Monooxygenase Pfam Description: Monooxygenase
  misc_feature (10)..(523): Homolog of NCBI NO: 15227757 NR Description: squalene monooxygenase (squalene epoxidase)(SE),
  misc_feature (12)..(524): Homolog of NCBI NO: 21537043 NR Description: squalene epoxidase-like protein [Arabidopsis
  misc_feature (12)..(524): Homolog of NCBI NO: 18420113 NR Description: squalene monooxygenase (squalene epoxidase)(SE),
  misc_feature (28)..(523): Homolog of NCBI NO: 27311240 NR Description: Putative Squalene monooxygenase
  misc_feature (12)..(525): Homolog of NCBI NO: 6685403 NR Description: Squalene monooxygenase (Squalene epoxidase) (SE)
  misc_feature (10)..(523): Homolog of NCBI NO: 15227757 NR Description: squalene monooxygenase (squalene epoxidase)(SE),
  misc_feature (12)..(524): Homolog of NCBI NO: 18420113 NR Description: squalene monooxygenase (squalene epoxidase)(SE),
  misc_feature (12)..(525): Homolog of NCBI NO: 6685403 NR Description: Squalene monooxygenase (Squalene epoxidase) (SE)
  misc_feature (1)..(531): Homolog of NCBI NO: 18406296 NR Description: squalene monooxygenase, putative; protein id:
  misc_feature (1)..(531): Homolog of NCBI NO: 25404216 NR Description: probable squalene monooxygenase F9K23.3
  misc_feature (5)..(525): Homolog of NCBI NO: 27475610 NR Description: squalene monooxygenase 2 [Medicago truncatula]
  misc_feature (14)..(523): Homolog of NCBI NO: 27475612 NR Description: squalene monooxygenase 1 [Medicago truncatula]
  misc_feature (57)..(531): Homolog of NCBI NO: 27311241 NR Description: Putative Squalene monooxygenase
  misc_feature (28)..(523): Homolog of NCBI NO: 27311240 NR Description: Putative Squalene monooxygenase
  misc_feature (12)..(524): Homolog of NCBI NO: 21537043 NR Description: squalene epoxidase-like protein [Arabidopsis
  misc_feature (57)..(531): Homolog of NCBI NO: 27311241 NR Description: Putative Squalene monooxygenase
  misc_feature (14)..(523): Homolog of NCBI NO: 27475612 NR Description: squalene monooxygenase 1 [Medicago truncatula]
  misc_feature (5)..(525): Homolog of NCBI NO: 27475610 NR Description: squalene monooxygenase 2 [Medicago truncatula]
  misc_feature (1)..(531): Homolog of NCBI NO: 25404216 NR Description: probable squalene monooxygenase F9K23.3
  misc_feature (1)..(531): Homolog of NCBI NO: 18406296 NR Description: squalene monooxygenase, putative; protein id:
MESQLWNWILPLLISSLLISFVAFYGFFVKPKRNGLRHDRKTVSTVTSDVGSVNITGDTVADVIVVGAGVAGSALAYTLGKDKRRVHVIERDLSEPDRIVGELLQPGGYLKLLELGIEDCVEEIDAQRVYGYALFKNGKRIRLAYPLEKFHEDVSGRSFHNGRFIQRMREKAASLPNVQLEQGTVLSLLEENGTIKGVRYKNKAGEEQTAFAALTIVCDGCFSNLRRSLCNPQVEVPSCFVGLVLENCNLPYANHGHVVLADPSPILMYPISSTEVRCLVDVPGQKVPSIANGEMKNYLKTVVAPQMPHEVYDSFIAAVDKGNIKSMPNRSMPASPYPTPGALLMGDAFNMRHPLTGGGMTVALADIVVLRNLLRPLRDLSDGASLCKYLESFYTLRKPVAATINTLANALYQVFCSSENEARNEMREACFDYLGLGGMCTSGPVSLLSGLNPRPLTLVCHFFAVAVYGVIRLLIPFPSPKRIWLGAKLISGASGIIFPIIKAEGVRQMFFPATVPAYYYKAPTVGETKCS

SEQ ID NO: 27104 - protein, 364 aa, Arabidopsis thaliana
  peptide (1)..(364): Ceres Seq. ID no. 12482901
  misc_feature (44)..(242): Pfam Name: Monooxygenase Pfam Description: Monooxygenase
  misc_feature (44)..(242): Pfam Name: Monooxygenase Pfam Description: Monooxygenase
  misc_feature (1)..(356): Homolog of NCBI NO: 15227757 NR Description: squalene monooxygenase (squalene epoxidase)(SE),
  misc_feature (1)..(357): Homolog of NCBI NO: 21537043 NR Description: squalene epoxidase-like protein [Arabidopsis
  misc_feature (1)..(357): Homolog of NCBI NO: 18420113 NR Description: squalene monooxygenase (squalene epoxidase)(SE),
  misc_feature (1)..(356): Homolog of NCBI NO: 27311240 NR Description: Putative Squalene monooxygenase
  misc_feature (1)..(358): Homolog of NCBI NO: 6685403 NR Description: Squalene monooxygenase (Squalene epoxidase) (SE)
  misc_feature (1)..(356): Homolog of NCBI NO: 15227757 NR Description: squalene monooxygenase (squalene epoxidase)(SE),
  misc_feature (1)..(357): Homolog of NCBI NO: 18420113 NR Description: squalene monooxygenase (squalene epoxidase)(SE),
  misc_feature (1)..(358): Homolog of NCBI NO: 6685403 NR Description: Squalene monooxygenase (Squalene epoxidase) (SE)
  misc_feature (1)..(364): Homolog of NCBI NO: 18406296 NR Description: squalene monooxygenase, putative; protein id:
  misc_feature (1)..(364): Homolog of NCBI NO: 25404216 NR Description: probable squalene monooxygenase F9K23.3
  misc_feature (1)..(358): Homolog of NCBI NO: 27475610 NR Description: squalene monooxygenase 2 [Medicago truncatula]
  misc_feature (1)..(356): Homolog of NCBI NO: 27475612 NR Description: squalene monooxygenase 1 [Medicago truncatula]
  misc_feature (1)..(364): Homolog of NCBI NO: 27311241 NR Description: Putative Squalene monooxygenase
  misc_feature (1)..(356): Homolog of NCBI NO: 27311240 NR Description: Putative Squalene monooxygenase
  misc_feature (1)..(357): Homolog of NCBI NO: 21537043 NR Description: squalene epoxidase-like protein [Arabidopsis
  misc_feature (1)..(364): Homolog of NCBI NO: 27311241 NR Description: Putative Squalene monooxygenase
  misc_feature (1)..(356): Homolog of NCBI NO: 27475612 NR Description: squalene monooxygenase 1 [Medicago truncatula]
  misc_feature (1)..(358): Homolog of NCBI NO: 27475610 NR Description: squalene monooxygenase 2 [Medicago truncatula]
  misc_feature (1)..(364): Homolog of NCBI NO: 25404216 NR Description: probable squalene monooxygenase F9K23.3
  misc_feature (1)..(364): Homolog of NCBI NO: 18406296 NR Description: squalene monooxygenase, putative; protein id:
MREKAASLPNVQLEQGTVLSLLEENGTIKGVRYKNKAGEEQTAFAALTIVCDGCFSNLRRSLCNPQVEVPSCFVGLVLENCNLPYANHGHVVLADPSPILMYPISSTEVRCLVDVPGQKVPSIANGEMKNYLKTVVAPQMPHEVYDSFIAAVDKGNIKSMPNRSMPASPYPTPGALLMGDAFNMRHPLTGGGMTVALADIVVLRNLLRPLRDLSDGASLCKYLESFYTLRKPVAATINTLANALYQVFCSSENEARNEMREACFDYLGLGGMCTSGPVSLLSGLNPRPLTLVCHFFAVAVYGVIRLLIPFPSPKRIWLGAKLISGASGIIFPIIKAEGVRQMFFPATVPAYYYKAPTVGETKCS

SEQ ID NO: 27105 - DNA, 665 bp, Arabidopsis thaliana
  misc_feature (1)..(665): Ceres Seq. ID no. 12323305
  misc_feature: MA Experiment ID: 108434 Result: Up-regulated in Transcription
  misc_feature: MA Experiment 108434 PARAMETER Experiment Name: At_Root_Tips_cDNA_P Parameter: Tissue Value: Root Tips
  misc_feature: MA Experiment ID: 108461 Result: Down-regulated in Transcription
  misc_feature: MA Experiment 108461 PARAMETER Experiment Name: At_Germinating_Seeds_cDNA_P Parameter: Age (day) Value: 1 vs. 0
  misc_feature: MA Experiment 108461 PARAMETER Experiment Name: At_Germinating_Seeds_cDNA_P Parameter: Tissue Value: Germinating Seeds
  misc_feature: MA Experiment ID: 108462 Result: Down-regulated in Transcription
  misc_feature: MA Experiment 108462 PARAMETER Experiment Name: At_Germinating_Seeds_cDNA_P Parameter: Age (day) Value: 2 vs. 0
  misc_feature: MA Experiment 108462 PARAMETER Experiment Name: At_Germinating_Seeds_cDNA_P Parameter: Tissue Value: Germinating Seeds
  misc_feature: MA Experiment ID: 108463 Result: Down-regulated in Transcription
  misc_feature: MA Experiment 108463 PARAMETER Experiment Name: At_Germinating_Seeds_cDNA_P Parameter: Age (day) Value: 3 vs. 0
  misc_feature: MA Experiment 108463 PARAMETER Experiment Name: At_Germinating_Seeds_cDNA_P Parameter: Tissue Value: Germinating Seeds
  misc_feature: MA Experiment ID: 108573 Result: Down-regulated in Transcription
  misc_feature: MA Experiment 108573 PARAMETER Experiment Name: At_Drought_cDNA_P Parameter: Timepoint (hr) Value: 6
  misc_feature: MA Experiment 108573 PARAMETER Experiment Name: At_Drought_cDNA_P Parameter: Tissue Value: Aerial
  misc_feature: MA Experiment 108573 PARAMETER Experiment Name: At_Drought_cDNA_P Parameter: Treatment Value: Drought vs. No Drought
  misc_feature: MA Experiment ID: 20000111 Result: Up-regulated in Transcription
  misc_feature: MA Experiment 20000111 PARAMETER Experiment Name: At_42deg_Heat_cDNA_P Parameter: Temperature (deg C) Value: 42 vs. 22
  misc_feature: MA Experiment 20000111 PARAMETER Experiment Name: At_42deg_Heat_cDNA_P Parameter: Timepoint (hr) Value: 6
  misc_feature: MA Experiment 20000111 PARAMETER Experiment Name: At_42deg_Heat_cDNA_P Parameter: Tissue Value: Aerial
  misc_feature: MA Experiment ID: 20000113 Result: Up-regulated in Transcription
  misc_feature: MA Experiment 20000113 PARAMETER Experiment Name: At_42deg_Heat_cDNA_P Parameter: Temperature (deg C) Value: 42 vs. 22
  misc_feature: MA Experiment 20000113 PARAMETER Experiment Name: At_42deg_Heat_cDNA_P Parameter: Timepoint (hr) Value: 8
  misc_feature: MA Experiment 20000113 PARAMETER Experiment Name: At_42deg_Heat_cDNA_P Parameter: Tissue Value: Aerial
  misc_feature: MA Experiment ID: 20000173 Result: Up-regulated in Transcription
  misc_feature: MA Experiment 20000173 PARAMETER Experiment Name: At_42deg_Heat_P Parameter: Age (day) Value: 14
  misc_feature: MA Experiment 20000173 PARAMETER Experiment Name: At_42deg_Heat_P Parameter: Organism Value: A. thaliana
  misc_feature: MA Experiment 20000173 PARAMETER Experiment Name: At_42deg_Heat_P Parameter: Plant Line Value: WS
  misc_feature: MA Experiment 20000173 PARAMETER Experiment Name: At_42deg_Heat_P Parameter: Temperature (deg C) Value: 42 vs. 22
  misc_feature: MA Experiment 20000173 PARAMETER Experiment Name: At_42deg_Heat_P Parameter: Timepoint (hr) Value: 6
  misc_feature: MA Experiment 20000173 PARAMETER Experiment Name: At_42deg_Heat_P Parameter: Tissue Value: Aerial
  misc_feature: MA Experiment ID: 20000234 Result: Up-regulated in Transcription
  misc_feature: MA Experiment 20000234 PARAMETER Experiment Name: At_Siliques_P Parameter: Age (day) Value: 21
  misc_feature: MA Experiment 20000234 PARAMETER Experiment Name: At_Siliques_P Parameter: Organism Value: A. thaliana
  misc_feature: MA Experiment 20000234 PARAMETER Experiment Name: At_Siliques_P Parameter: Plant Line Value: WS
  misc_feature: MA Experiment 20000234 PARAMETER Experiment Name: At_Siliques_P Parameter: Tissue Value: Less Than 5mm Siliques vs. Whole Plant
  misc_feature: MA Experiment ID: 20000436 Result: Down-regulated in Transcription
  misc_feature: MA Experiment 20000436 PARAMETER Experiment Name: At_Drought_P Parameter: Age (day) Value: 7
  misc_feature: MA Experiment 20000436 PARAMETER Experiment Name: At_Drought_P Parameter: Organism Value: A. thaliana
  misc_feature: MA Experiment 20000436 PARAMETER Experiment Name: At_Drought_P Parameter: Plant Line Value: WS
  misc_feature: MA Experiment 20000436 PARAMETER Experiment Name: At_Drought_P Parameter: Timepoint (hr) Value: 12
  misc_feature: MA Experiment 20000436 PARAMETER Experiment Name: At_Drought_P Parameter: Tissue Value: Whole Plant
  misc_feature: MA Experiment 20000436 PARAMETER Experiment Name: At_Drought_P Parameter: Treatment Value: Drought vs. No Drought
  misc_feature: MA Experiment ID: 20000437 Result: Down-regulated in Transcription
  misc_feature: MA Experiment 20000437 PARAMETER Experiment Name: At_Drought_P Parameter: Age (day) Value: 8
  misc_feature: MA Experiment 20000437 PARAMETER Experiment Name: At_Drought_P Parameter: Organism Value: A. thaliana
  misc_feature: MA Experiment 20000437 PARAMETER Experiment Name: At_Drought_P Parameter: Plant Line Value: WS
  misc_feature: MA Experiment 20000437 PARAMETER Experiment Name: At_Drought_P Parameter: Timepoint (hr) Value: 24
  misc_feature: MA Experiment 20000437 PARAMETER Experiment Name: At_Drought_P Parameter: Tissue Value: Whole Plant
  misc_feature: MA Experiment 20000437 PARAMETER Experiment Name: At_Drought_P Parameter: Treatment Value: Drought vs. No Drought
  misc_feature: MA Experiment ID: 20000496 Result: Up-regulated in Transcription
  misc_feature: MA Experiment 20000496 PARAMETER Experiment Name: At_Guard_Cells_P Parameter: Harvest Date Value: 7/19/2002
  misc_feature: MA Experiment 20000496 PARAMETER Experiment Name: At_Guard_Cells_P Parameter: Organism Value: Canola
  misc_feature: MA Experiment 20000496 PARAMETER Experiment Name: At_Guard_Cells_P Parameter: Tissue Value: Guard Cells vs. Leaves
  misc_feature: MA Experiment ID: 20000794 Result: Down-regulated in Transcription
  misc_feature: MA Experiment 20000794 PARAMETER Experiment Name: At_Petals_P Parameter: Age (day) Value: 23-25 days
  misc_feature: MA Experiment 20000794 PARAMETER Experiment Name: At_Petals_P Parameter: Plant Line Value: WS
  misc_feature: MA Experiment 20000794 PARAMETER Experiment Name: At_Petals_P Parameter: Tissue Value: Petals vs. Whole plant
  misc_feature: MA Experiment ID: 20001557 Result: Up-regulated in Transcription
  misc_feature: MA Experiment 20001557 PARAMETER Experiment Name: At_Drought_Soil_Dry_P Parameter: Age (day) Value: 27
  misc_feature: MA Experiment 20001557 PARAMETER Experiment Name: At_Drought_Soil_Dry_P Parameter: Organism Value: A. thaliana
  misc_feature: MA Experiment 20001557 PARAMETER Experiment Name: At_Drought_Soil_Dry_P Parameter: Plant Line Value: WS
  misc_feature: MA Experiment 20001557 PARAMETER Experiment Name: At_Drought_Soil_Dry_P Parameter: Post Timepoint (hr) Value: 3
  misc_feature: MA Experiment 20001557 PARAMETER Experiment Name: At_Drought_Soil_Dry_P Parameter: Post-Treatment Value: Re-Water vs. No Drought
  misc_feature: MA Experiment 20001557 PARAMETER Experiment Name: At_Drought_Soil_Dry_P Parameter: Timepoint (day) Value: 13
  misc_feature: MA Experiment 20001557 PARAMETER Experiment Name: At_Drought_Soil_Dry_P Parameter: Treatment Value: Drought vs. No Drought
  misc_feature: MA Experiment ID: 20001558 Result: Up-regulated in Transcription
  misc_feature: MA Experiment 20001558 PARAMETER Experiment Name: At_Drought_Soil_Dry_P Parameter: Age (day) Value: 27
  misc_feature: MA Experiment 20001558 PARAMETER Experiment Name: At_Drought_Soil_Dry_P Parameter: Organism Value: A. thaliana
  misc_feature: MA Experiment 20001558 PARAMETER Experiment Name: At_Drought_Soil_Dry_P Parameter: Plant Line Value: WS
  misc_feature: MA Experiment 20001558 PARAMETER Experiment Name: At_Drought_Soil_Dry_P Parameter: Post Timepoint (hr) Value: 6
  misc_feature: MA Experiment 20001558 PARAMETER Experiment Name: At_Drought_Soil_Dry_P Parameter: Post-Treatment Value: Re-Water vs. No Drought
  misc_feature: MA Experiment 20001558 PARAMETER Experiment Name: At_Drought_Soil_Dry_P Parameter: Timepoint (day) Value: 13
  misc_feature: MA Experiment 20001558 PARAMETER Experiment Name: At_Drought_Soil_Dry_P Parameter: Treatment Value: Drought vs. No Drought
  misc_feature: MA Experiment ID: 20001560 Result: Up-regulated in Transcription
  misc_feature: MA Experiment 20001560 PARAMETER Experiment Name: At_Drought_Soil_Dry_P Parameter: Age (day) Value: 28
  misc_feature: MA Experiment 20001560 PARAMETER Experiment Name: At_Drought_Soil_Dry_P Parameter: Organism Value: A. thaliana
  misc_feature: MA Experiment 20001560 PARAMETER Experiment Name: At_Drought_Soil_Dry_P Parameter: Plant Line Value: WS
  misc_feature: MA Experiment 20001560 PARAMETER Experiment Name: At_Drought_Soil_Dry_P Parameter: Post Timepoint (hr) Value: None
  misc_feature: MA Experiment 20001560 PARAMETER Experiment Name: At_Drought_Soil_Dry_P Parameter: Post-Treatment Value: None
  misc_feature: MA Experiment 20001560 PARAMETER Experiment Name: At_Drought_Soil_Dry_P Parameter: Timepoint (day) Value: 14
  misc_feature: MA Experiment 20001560 PARAMETER Experiment Name: At_Drought_Soil_Dry_P Parameter: Treatment Value: Drought vs. No Drought
  misc_feature: MA Experiment ID: 20001757 Result: Up-regulated in Transcription
  misc_feature: MA Experiment 20001757 PARAMETER Experiment Name: At_50mM_NH4NO3_L-to-H_P Parameter: Timepoint (hr) Value: 6
  misc_feature: MA Experiment 20001757 PARAMETER Experiment Name: At_50mM_NH4NO3_L-to-H_P Parameter: Tissue Value: Leaf
  misc_feature: MA Experiment 20001757 PARAMETER Experiment Name: At_50mM_NH4NO3_L-to-H_P Parameter: Treatment Value: 50mM NH4NO3 vs 100mM Mannitol
aacttaactccggcacgagtctcgttctcttctctttaccgccgtcatctaggtctgctaatatcaagtgaaggagctcgaaatggccacagttccaggacagttgatctgggagatcgtgaagagaaacaactgtttcttggtgaagcaattcggtagaggtaatgccaaggttcagttcagcaaagagagcaacaacctcgtcaacatcaactcgtacaagcactctggtttggccaacaaaaagacagtgaccattcaggcggctggcaaggaccaaggtgttgtactcggaaccaccaagactaagagacaaaacaagcctaagctctctgttaacaagtctatcctcaagaaggagttctcgaggatgagtaaagttgttgccaatcaggtagtggacaactactacaggcctgatttgaagaaagcagcacttgctaggcttagcgctatcagcaaaggtcttagagtagccaagtcgggtcccaagaggagaaacagacaggcttgaagaatccactactgaatatcttgtttactttttctaaaaagcttgttgtgagccattaagagtttctgacagcagcttgtaggttaagatttttcctgaacagctcaaggattgtaccaccatccttttttcactaaatgatattaaaact

SEQ ID NO: 27106 - protein, 143 aa, Arabidopsis thaliana
  peptide (1)..(143): Ceres Seq. ID no. 12323306
  misc_feature (5)..(136): Pfam Name: Ribosomal L28e protein family Pfam Description: Ribosomal L28e protein family
  misc_feature (8)..(143): Homolog of NCBI NO: 32450198 NR Description: Unknown (protein for MGC:64430) [Xenopus laevis]
  misc_feature (8)..(141): Homolog of NCBI NO: 38112699 NR Description: 60S ribosomal protein L28 [Hippocampus comes]
  misc_feature (1)..(136): Homolog of NCBI NO: 24656625 NR Description: CG12740-PA [Drosophila melanogaster]
  misc_feature (3)..(134): Homolog of NCBI NO: 19114036 NR Description: 60s ribosomal protein L28/L44
  misc_feature (1)..(136): Homolog of NCBI NO: 20976820 NR Description: GH04183p [Drosophila melanogaster]
  misc_feature (8)..(137): Homolog of NCBI NO: 24418650 NR Description: 60S ribosomal protein L28
  misc_feature (1)..(134): Homolog of NCBI NO: 31212979 NR Description: ENSANGP00000014265 [Anopheles gambiae]
  misc_feature (1)..(143): Homolog of NCBI NO: 34910390 NR Description: ribosomal protein L28-like
  misc_feature (1)..(143): Homolog of NCBI NO: 15224835 NR Description: putative ribosomal protein L28
  misc_feature (1)..(143): Homolog of NCBI NO: 15233567 NR Description: putative protein
MATVPGQLIWEIVKRNNCFLVKQFGRGNAKVQFSKESNNLVNINSYKHSGLANKKTVTIQAAGKDQGVVLGTTKTKRQNKPKLSVNKSILKKEFSRMSKVVANQVVDNYYRPDLKKAALARLSAISKGLRVAKSGPKRRNRQA

SEQ ID NO: 27107 - DNA, 1636 bp, Arabidopsis thaliana
  misc_feature (1)..(1636): Ceres Seq. ID no. 13500074
  misc_feature: MA Experiment ID: 108595 Result: Up-regulated in Transcription
  misc_feature: MA Experiment 108595 PARAMETER Experiment Name: At_Ler-pi_Ovule_cDNA_P Parameter: Plant Line Value: null
  misc_feature: MA Experiment ID: 20000234 Result: Up-regulated in Transcription
  misc_feature: MA Experiment 20000234 PARAMETER Experiment Name: At_Siliques_P Parameter: Age (day) Value: 21
  misc_feature: MA Experiment 20000234 PARAMETER Experiment Name: At_Siliques_P Parameter: Organism Value: A. thaliana
  misc_feature: MA Experiment 20000234 PARAMETER Experiment Name: At_Siliques_P Parameter: Plant Line Value: WS
  misc_feature: MA Experiment 20000234 PARAMETER Experiment Name: At_Siliques_P Parameter: Tissue Value: Less Than 5mm Siliques vs. Whole Plant
  misc_feature: MA Experiment ID: 20000235 Result: Up-regulated in Transcription
  misc_feature: MA Experiment 20000235 PARAMETER Experiment Name: At_Siliques_P Parameter: Age (day) Value: 21
  misc_feature: MA Experiment 20000235 PARAMETER Experiment Name: At_Siliques_P Parameter: Organism Value: A. thaliana
  misc_feature: MA Experiment 20000235 PARAMETER Experiment Name: At_Siliques_P Parameter: Plant Line Value: WS
  misc_feature: MA Experiment 20000235 PARAMETER Experiment Name: At_Siliques_P Parameter: Tissue Value: 5-10mm Siliques vs. Whole Plant
  misc_feature: MA Experiment ID: 20000264 Result: Up-regulated in Transcription
  misc_feature: MA Experiment 20000264 PARAMETER Experiment Name: At_Open_Flower_P Parameter: Age (day) Value: 21
  misc_feature: MA Experiment 20000264 PARAMETER Experiment Name: At_Open_Flower_P Parameter: Plant Line Value: WS
  misc_feature: MA Experiment 20000264 PARAMETER Experiment Name: At_Open_Flower_P Parameter: Tissue Value: Open Flower vs. Whole Plant
  misc_feature: MA Experiment ID: 20000265 Result: Up-regulated in Transcription
  misc_feature: MA Experiment 20000265 PARAMETER Experiment Name: At_Open_Flower_P Parameter: Age (day) Value: 21
  misc_feature: MA Experiment 20000265 PARAMETER Experiment Name: At_Open_Flower_P Parameter: Plant Line Value: WS
  misc_feature: MA Experiment 20000265 PARAMETER Experiment Name: At_Open_Flower_P Parameter: Tissue Value: Closed Flower vs. Whole Plant
  misc_feature: MA Experiment ID: 20000286 Result: Up-regulated in Transcription
  misc_feature: MA Experiment 20000286 PARAMETER Experiment Name: At_Open_Flower_P Parameter: Age (day) Value: 21
  misc_feature: MA Experiment 20000286 PARAMETER Experiment Name: At_Open_Flower_P Parameter: Plant Line Value: WS
  misc_feature: MA Experiment 20000286 PARAMETER Experiment Name: At_Open_Flower_P Parameter: Tissue Value: Half Open vs. Whole Plant
  misc_feature: MA Experiment ID: 20001757 Result: Down-regulated in Transcription
  misc_feature: MA Experiment 20001757 PARAMETER Experiment Name: At_50mM_NH4NO3_L-to-H_P Parameter: Timepoint (hr) Value: 6
  misc_feature: MA Experiment 20001757 PARAMETER Experiment Name: At_50mM_NH4NO3_L-to-H_P Parameter: Tissue Value: Leaf
  misc_feature: MA Experiment 20001757 PARAMETER Experiment Name: At_50mM_NH4NO3_L-to-H_P Parameter: Treatment Value: 50mM NH4NO3 vs 100mM Mannitol
  misc_feature: MA Experiment ID: 20001909 Result: Up-regulated in Transcription
  misc_feature: MA Experiment 20001909 PARAMETER Experiment Name: At_Drought_Reproduction_P Parameter: Age (day) Value: 35
  misc_feature: MA Experiment 20001909 PARAMETER Experiment Name: At_Drought_Reproduction_P Parameter: Organism Value: A. thaliana
  misc_feature: MA Experiment 20001909 PARAMETER Experiment Name: At_Drought_Reproduction_P Parameter: Plant Line Value: WS
  misc_feature: MA Experiment 20001909 PARAMETER Experiment Name: At_Drought_Reproduction_P Parameter: Timepoint (day) Value: 5
  misc_feature: MA Experiment 20001909 PARAMETER Experiment Name: At_Drought_Reproduction_P Parameter: Tissue Value: Flowers
  misc_feature: MA Experiment 20001909 PARAMETER Experiment Name: At_Drought_Reproduction_P Parameter: Treatment Value: Drought vs. No Drought
  misc_feature: MA Experiment ID: 20001910 Result: Up-regulated in Transcription
  misc_feature: MA Experiment 20001910 PARAMETER Experiment Name: At_Drought_Reproduction_P Parameter: Age (day) Value: 37
  misc_feature: MA Experiment 20001910 PARAMETER Experiment Name: At_Drought_Reproduction_P Parameter: Organism Value: A. thaliana
  misc_feature: MA Experiment 20001910 PARAMETER Experiment Name: At_Drought_Reproduction_P Parameter: Plant Line Value: WS
  misc_feature: MA Experiment 20001910 PARAMETER Experiment Name: At_Drought_Reproduction_P Parameter: Timepoint (day) Value: 7
  misc_feature: MA Experiment 20001910 PARAMETER Experiment Name: At_Drought_Reproduction_P Parameter: Tissue Value: Flowers
  misc_feature: MA Experiment 20001910 PARAMETER Experiment Name: At_Drought_Reproduction_P Parameter: Treatment Value: Drought vs. No Drought
ataattacttgtgattcttatttgtcttcttcaatatggcgagaagttctgttttgctatgtttaattctattggttacgttaggagttgtgataagtgtcacatttgccgacaacgttgaattgaaatcaaaagatctagagagcagtaagaaagataagaaggttgatcatgatagtacacacaaagagaagggaggtgaaaaggtagatggtgccggttctgatgatgaagacaacgataaaaaagaaaaaaagaaagagcatgatgtgcaaaaaaaggataaacaacatgaaaacaaagacaaggatgacgagaagaagcatgttgataagaagaagagcggtggtcatgataaagatgatgatgatgaaaagaagcacaaggataaaaagaaggatggacacaatgatgatgatgatagtgatgatgatacggatgatgacgatgacgatgatgatgatgatgatgatgatgatgaagttgatggagatgataatgagaaggagaaaattgggttatacgagctcaagaagggaaatctaactgtcaaattcacaaattggggtgcttcaatcatatctctccatttcccagacaaaaatggtaaaatggacgatattgttcttggctatgatagcgtcaaaacctacaagaccgacaaggtttatttcggagcaaccgttggccgagtagcaaatagaataggaaagggcaaattcaagttgaatggtaaagagtacaagacaagtgtcaacgatggaaaaaacacactccatggtggcaagaaagggtttggggatgttgtgtgggcagttgcaaaacaccagtacgatggcaagaaaccacacattgtcttcactcacacaagtcctgacggcgatcaagggtttccgggagaactcagtgtcacggtgacatataaacttgtcaaagacaatgaattgagtgtggtgatggaggcaaagcctaaggataaagcaactccggtgaacttagctcatcatagttattggaatcttggtggtcataattccggagatattttgtctgaagaaattcaaatcctcggctcgggttatacccccgtcgacggtgagctcattcccaccgggaaaatcaatccggtgaaaggaacagcatacgattttctccaactccgtcctattaaagataatatgaaggatcttaaaacaggatatgatataaattattgcttagatggtaaggcaaaaaagatgagaaaaatagttgaactcgtagataagaaatcagggaggaaaatggagttatccggaaaccaagcgggtttgcaattctataccggagggatgttaaaggatgtcaaagggaagaatggggcagtttaccaagctttcgggggattatgtttagaaacacaaagttatccagacgcattgaaccatcccaaatttccttcacagattgtcgagccagggaaaaaatacaaacacactatgctcttcaagttttctattgtttcatagattgttttagatgttgttacatgaacacccttggaaccatgtccaatgttcatgaacaagaaactaaatacattgtaatattttgtaacaatgcttaaattatcaaattatataaacctaacgtgaac

SEQ ID NO: 27108 - protein, 490 aa, Arabidopsis thaliana
  peptide (1)..(490): Ceres Seq. ID no. 13500075
  misc_feature (161)..(485): Pfam Name: Aldose 1-epimerase Pfam Description: Aldose 1-epimerase
  misc_feature (161)..(485): Pfam Name: Aldose 1-epimerase Pfam Description: Aldose 1-epimerase
  misc_feature (199)..(447): Homolog of NCBI NO: 6094558 NR Description: putative aldose 1-epimerase, 3' partial
  misc_feature (119)..(489): Homolog of NCBI NO: 15232072 NR Description: aldose 1-epimerase family [Arabidopsis thaliana]
  misc_feature (157)..(488): Homolog of NCBI NO: 40882679 NR Description: putative aldose 1-epimerase
  misc_feature (159)..(488): Homolog of NCBI NO: 7430313 NR Description: probable aldose 1-epimerase (EC 5.1.3.3) - common
  misc_feature (159)..(488): Homolog of NCBI NO: 15824565 NR Description: non-cell-autonomous protein pathway1;
  misc_feature (199)..(447): Homolog of NCBI NO: 6094558 NR Description: putative aldose 1-epimerase, 3' partial
  misc_feature (157)..(488): Homolog of NCBI NO: 40882679 NR Description: putative aldose 1-epimerase
  misc_feature (159)..(488): Homolog of NCBI NO: 15824565 NR Description: non-cell-autonomous protein pathway1;
  misc_feature (1)..(490): Homolog of NCBI NO: 15242223 NR Description: aldose 1-epimerase family [Arabidopsis thaliana]
  misc_feature (193)..(490): Homolog of NCBI NO: 26452398 NR Description: putative aldose 1-epimerase [Arabidopsis thaliana]
  misc_feature (158)..(487): Homolog of NCBI NO: 15228261 NR Description: aldose 1-epimerase family [Arabidopsis thaliana]
  misc_feature (158)..(487): Homolog of NCBI NO: 21537069 NR Description: aldose 1-epimerase-like protein [Arabidopsis
  misc_feature (159)..(488): Homolog of NCBI NO: 15824567 NR Description: non-cell-autonomous protein pathway2;
  misc_feature (159)..(488): Homolog of NCBI NO: 7430313 NR Description: probable aldose 1-epimerase (EC 5.1.3.3) - common
  misc_feature (119)..(489): Homolog of NCBI NO: 15232072 NR Description: aldose 1-epimerase family [Arabidopsis thaliana]
  misc_feature (159)..(488): Homolog of NCBI NO: 15824567 NR Description: non-cell-autonomous protein pathway2;
  misc_feature (158)..(487): Homolog of NCBI NO: 21537069 NR Description: aldose 1-epimerase-like protein [Arabidopsis
  misc_feature (158)..(487): Homolog of NCBI NO: 15228261 NR Description: aldose 1-epimerase family [Arabidopsis thaliana]
  misc_feature (193)..(490): Homolog of NCBI NO: 26452398 NR Description: putative aldose 1-epimerase [Arabidopsis thaliana]
  misc_feature (1)..(490): Homolog of NCBI NO: 15242223 NR Description: aldose 1-epimerase family [Arabidopsis thaliana]
MARSSVLLCLILLVTLGVVISVTFADNVELKSKDLESSKKDKKVDHDSTHKEKGGEKVDGAGSDDEDNDKKEKKKEHDVQKKDKQHENKDKDDEKKHVDKKKSGGHDKDDDDEKKHKDKKKDGHNDDDDSDDDTDDDDDDDDDDDDDDEVDGDDNEKEKIGLYELKKGNLTVKFTNWGASIISLHFPDKNGKMDDIVLGYDSVKTYKTDKVYFGATVGRVANRIGKGKFKLNGKEYKTSVNDGKNTLHGGKKGFGDVVWAVAKHQYDGKKPHIVFTHTSPDGDQGFPGELSVTVTYKLVKDNELSVVMEAKPKDKATPVNLAHHSYWNLGGHNSGDILSEEIQILGSGYTPVDGELIPTGKINPVKGTAYDFLQLRPIKDNMKDLKTGYDINYCLDGKAKKMRKIVELVDKKSGRKMELSGNQAGLQFYTGGMLKDVKGKNGAVYQAFGGLCLETQSYPDALNHPKFPSQIVEPGKKYKHTMLFKFSIVS

SEQ ID NO: 27109 - protein, 298 aa, Arabidopsis thaliana
  peptide (1)..(298): Ceres Seq. ID no. 13500076
  misc_feature (1)..(293): Pfam Name: Aldose 1-epimerase Pfam Description: Aldose 1-epimerase
  misc_feature (1)..(293): Pfam Name: Aldose 1-epimerase Pfam Description: Aldose 1-epimerase
  misc_feature (7)..(255): Homolog of NCBI NO: 6094558 NR Description: putative aldose 1-epimerase, 3' partial
  misc_feature (1)..(297): Homolog of NCBI NO: 15232072 NR Description: aldose 1-epimerase family [Arabidopsis thaliana]
  misc_feature (1)..(296): Homolog of NCBI NO: 40882679 NR Description: putative aldose 1-epimerase
  misc_feature (1)..(296): Homolog of NCBI NO: 7430313 NR Description: probable aldose 1-epimerase (EC 5.1.3.3) - common
  misc_feature (1)..(296): Homolog of NCBI NO: 15824565 NR Description: non-cell-autonomous protein pathway1;
  misc_feature (7)..(255): Homolog of NCBI NO: 6094558 NR Description: putative aldose 1-epimerase, 3' partial
  misc_feature (1)..(296): Homolog of NCBI NO: 40882679 NR Description: putative aldose 1-epimerase
  misc_feature (1)..(296): Homolog of NCBI NO: 15824565 NR Description: non-cell-autonomous protein pathway1;
  misc_feature (1)..(298): Homolog of NCBI NO: 15242223 NR Description: aldose 1-epimerase family [Arabidopsis thaliana]
  misc_feature (1)..(298): Homolog of NCBI NO: 26452398 NR Description: putative aldose 1-epimerase [Arabidopsis thaliana]
  misc_feature (1)..(295): Homolog of NCBI NO: 15228261 NR Description: aldose 1-epimerase family [Arabidopsis thaliana]
  misc_feature (1)..(295): Homolog of NCBI NO: 21537069 NR Description: aldose 1-epimerase-like protein [Arabidopsis
  misc_feature (1)..(296): Homolog of NCBI NO: 15824567 NR Description: non-cell-autonomous protein pathway2;
  misc_feature (1)..(296): Homolog of NCBI NO: 7430313 NR Description: probable aldose 1-epimerase (EC 5.1.3.3) - common
  misc_feature (1)..(297): Homolog of NCBI NO: 15232072 NR Description: aldose 1-epimerase family [Arabidopsis thaliana]
  misc_feature (1)..(296): Homolog of NCBI NO: 15824567 NR Description: non-cell-autonomous protein pathway2;
  misc_feature (1)..(295): Homolog of NCBI NO: 21537069 NR Description: aldose 1-epimerase-like protein [Arabidopsis
  misc_feature (1)..(295): Homolog of NCBI NO: 15228261 NR Description: aldose 1-epimerase family [Arabidopsis thaliana]
  misc_feature (1)..(298): Homolog of NCBI NO: 26452398 NR Description: putative aldose 1-epimerase [Arabidopsis thaliana]
  misc_feature (1)..(298): Homolog of NCBI NO: 15242223 NR Description: aldose 1-epimerase family [Arabidopsis thaliana]
MDDIVLGYDSVKTYKTDKVYFGATVGRVANRIGKGKFKLNGKEYKTSVNDGKNTLHGGKKGFGDVVWAVAKHQYDGKKPHIVFTHTSPDGDQGFPGELSVTVTYKLVKDNELSVVMEAKPKDKATPVNLAHHSYWNLGGHNSGDILSEEIQILGSGYTPVDGELIPTGKINPVKGTAYDFLQLRPIKDNMKDLKTGYDINYCLDGKAKKMRKIVELVDKKSGRKMELSGNQAGLQFYTGGMLKDVKGKNGAVYQAFGGLCLETQSYPDALNHPKFPSQIVEPGKKYKHTMLFKFSIVS

SEQ ID NO: 27110 - DNA, 967 bp, Arabidopsis thaliana
  misc_feature (1)..(967): Ceres Seq. ID no. 12482309
  misc_feature: MA Experiment ID: 108434 Result: Up-regulated in Transcription
  misc_feature: MA Experiment 108434 PARAMETER Experiment Name: At_Root_Tips_cDNA_P Parameter: Tissue Value: Root Tips
  misc_feature: MA Experiment ID: 20000224 Result: Down-regulated in Transcription
ttgattttaatcggaagttcaggtttgctcatcaatcgcagtgaagaaggaaggaacctaaatcggaatttgggtgctccatcaatggcttcgattttggctcgcaggtcactgaatactctccgtgctcgacatctcgttttgtcagggcaagctttacagggatctcatctgtctagactgcagtcccgtggtatatcttatggcagcaacaaagatgatgaagaagcagagcaactttctaaggaaatctccaaggactggaatactgtctttgaacggagcataaacaccctgttcctcacagaaatggtccgcggtttgtcgctgaccctcaagtacttctttgatccaaaagttactatcaattatccatttgagaagggtcctctgagccctcgcttccgtggtgaacatgctcttcgaagatatcctaccggggaagaacgctgcattgcctgcaaactctgtgaagctgtatgtccagctcaagcaatcacaatagaggcagaagagagggaagatggaagccgcagaaccactaggtacgatatcgacatgacaaaatgcatctactgtggtttctgccaagaagcttgccccgttgatgcaatcgttgaaggacctaactttgaattcgcaaccgagacacacgaggaacttctctatgacaaagagaagcttcttgagaatggagatcgatgggagacagagattgctgagaatctgaggtcggagagtctctaccgctgaaccattctacaacagtctctgcttcattcaacttgtttttcccggggaaacattttcgttgcttctgtttgaaaataaagacgagatcatatgcgtgtgaaaactcttttgtaatccagattttgtgctgtgtaattgaattgtttgtaaccaacctgactttgattttcggttcatgagttccggttattaggtgttttcggttcggagaaag

SEQ ID NO: 27111 - protein, 250 aa, Arabidopsis thaliana
  peptide (1)..(250): Ceres Seq. ID no. 12482310
  misc_feature (183)..(206): Pfam Name: 4Fe-4S binding domain Pfam Description: 4Fe-4S binding domain
  misc_feature (29)..(250): Homolog of NCBI NO: 15219265 NR Description: NADH dehydrogenase, putative
  misc_feature (40)..(250): Homolog of NCBI NO: 17944955 NR Description: RE02647p [Drosophila melanogaster]
  misc_feature (40)..(250): Homolog of NCBI NO: 17864306 NR Description: NADH:ubiquinone reductase 23kD subunit precursor
  misc_feature (74)..(250): Homolog of NCBI NO: 34328786 NR Description: NADH:ubiquinone oxidoreductase subunit 8;
  misc_feature (90)..(250): Homolog of NCBI NO: 11466496 NR Description: NADH dehydrogenase, subunit 8 [Reclinomonas
  misc_feature (29)..(250): Homolog of NCBI NO: 34915206 NR Description: putative  NADH dehydrogenase
  misc_feature (29)..(250): Homolog of NCBI NO: 3929358 NR Description: NADH-ubiquinone oxidoreductase 23 kDa subunit, precursor (Complex I-23KD) (CI-23KD) (Complex I-28.5KD)
  misc_feature (29)..(250): Homolog of NCBI NO: 1076669 NR Description: NADH2 dehydrogenase (ubiquinone) (EC 1.6.5.3)
  misc_feature (29)..(250): Homolog of NCBI NO: 6226880 NR Description: NADH-ubiquinone oxidoreductase 23 kDa subunit, precursor (Complex I-23KD) (CI-23KD) (Complex I-28.5KD)
  misc_feature (29)..(250): Homolog of NCBI NO: 15219311 NR Description: NADH:ubiquinone oxidoreductase, putative
LILIGSSGLLINRSEEGRNLNRNLGAPSMASILARRSLNTLRARHLVLSGQALQGSHLSRLQSRGISYGSNKDDEEAEQLSKEISKDWNTVFERSINTLFLTEMVRGLSLTLKYFFDPKVTINYPFEKGPLSPRFRGEHALRRYPTGEERCIACKLCEAVCPAQAITIEAEEREDGSRRTTRYDIDMTKCIYCGFCQEACPVDAIVEGPNFEFATETHEELLYDKEKLLENGDRWETEIAENLRSESLYR

SEQ ID NO: 27112 - protein, 222 aa, Arabidopsis thaliana
  peptide (1)..(222): Ceres Seq. ID no. 12482311
  misc_feature (155)..(178): Pfam Name: 4Fe-4S binding domain Pfam Description: 4Fe-4S binding domain
  misc_feature (12)..(222): Homolog of NCBI NO: 17944955 NR Description: RE02647p [Drosophila melanogaster]
  misc_feature (12)..(222): Homolog of NCBI NO: 17864306 NR Description: NADH:ubiquinone reductase 23kD subunit precursor
  misc_feature (46)..(222): Homolog of NCBI NO: 34328786 NR Description: NADH:ubiquinone oxidoreductase subunit 8;
  misc_feature (62)..(222): Homolog of NCBI NO: 11466496 NR Description: NADH dehydrogenase, subunit 8 [Reclinomonas
  misc_feature (1)..(222): Homolog of NCBI NO: 34915206 NR Description: putative  NADH dehydrogenase
  misc_feature (1)..(222): Homolog of NCBI NO: 3929358 NR Description: NADH-ubiquinone oxidoreductase 23 kDa subunit, precursor (Complex I-23KD) (CI-23KD) (Complex I-28.5KD)
  misc_feature (1)..(222): Homolog of NCBI NO: 1076669 NR Description: NADH2 dehydrogenase (ubiquinone) (EC 1.6.5.3)
  misc_feature (1)..(222): Homolog of NCBI NO: 6226880 NR Description: NADH-ubiquinone oxidoreductase 23 kDa subunit, precursor (Complex I-23KD) (CI-23KD) (Complex I-28.5KD)
  misc_feature (1)..(222): Homolog of NCBI NO: 15219311 NR Description: NADH:ubiquinone oxidoreductase, putative
  misc_feature (1)..(222): Homolog of NCBI NO: 15219265 NR Description: NADH dehydrogenase, putative
MASILARRSLNTLRARHLVLSGQALQGSHLSRLQSRGISYGSNKDDEEAEQLSKEISKDWNTVFERSINTLFLTEMVRGLSLTLKYFFDPKVTINYPFEKGPLSPRFRGEHALRRYPTGEERCIACKLCEAVCPAQAITIEAEEREDGSRRTTRYDIDMTKCIYCGFCQEACPVDAIVEGPNFEFATETHEELLYDKEKLLENGDRWETEIAENLRSESLYR

SEQ ID NO: 27113 - protein, 147 aa, Arabidopsis thaliana; identical to SEQ ID NO: 26053
  peptide (1)..(147): Ceres Seq. ID no. 12482312
  misc_feature (80)..(103): Pfam Name: 4Fe-4S binding domain Pfam Description: 4Fe-4S binding domain
  misc_feature (1)..(147): Homolog of NCBI NO: 17944955 NR Description: RE02647p [Drosophila melanogaster]
  misc_feature (1)..(147): Homolog of NCBI NO: 17864306 NR Description: NADH:ubiquinone reductase 23kD subunit precursor
  misc_feature (1)..(147): Homolog of NCBI NO: 34328786 NR Description: NADH:ubiquinone oxidoreductase subunit 8;
  misc_feature (1)..(147): Homolog of NCBI NO: 11466496 NR Description: NADH dehydrogenase, subunit 8 [Reclinomonas
  misc_feature (1)..(147): Homolog of NCBI NO: 34915206 NR Description: putative  NADH dehydrogenase
  misc_feature (1)..(147): Homolog of NCBI NO: 3929358 NR Description: NADH-ubiquinone oxidoreductase 23 kDa subunit, precursor (Complex I-23KD) (CI-23KD) (Complex I-28.5KD)
  misc_feature (1)..(147): Homolog of NCBI NO: 1076669 NR Description: NADH2 dehydrogenase (ubiquinone) (EC 1.6.5.3)
  misc_feature (1)..(147): Homolog of NCBI NO: 6226880 NR Description: NADH-ubiquinone oxidoreductase 23 kDa subunit, precursor (Complex I-23KD) (CI-23KD) (Complex I-28.5KD)
  misc_feature (1)..(147): Homolog of NCBI NO: 15219311 NR Description: NADH:ubiquinone oxidoreductase, putative
  misc_feature (1)..(147): Homolog of NCBI NO: 15219265 NR Description: NADH dehydrogenase, putative

SEQ ID NO: 27114 - DNA, 1294 bp, Arabidopsis thaliana
  misc_feature (1)..(1294): Ceres Seq. ID no. 13580484
  misc_feature: MA Experiment ID: 108434 Result: Up-regulated in Transcription
  misc_feature: MA Experiment 108434 PARAMETER Experiment Name: At_Root_Tips_cDNA_P Parameter: Tissue Value: Root Tips
  misc_feature: MA Experiment ID: 108435 Result: Down-regulated in Transcription
  misc_feature: MA Experiment 108435 PARAMETER Experiment Name: At_stm_Mutants_cDNA_P Parameter: Plant Line Value: wt Landsburg vs stm
  misc_feature: MA Experiment 108435 PARAMETER Experiment Name: At_stm_Mutants_cDNA_P Parameter: Tissue Value: Shoot Apical Meristem Region
  misc_feature: MA Experiment ID: 108463 Result: Up-regulated in Transcription
  misc_feature: MA Experiment 108463 PARAMETER Experiment Name: At_Germinating_Seeds_cDNA_P Parameter: Age (day) Value: 3 vs. 0
  misc_feature: MA Experiment 108463 PARAMETER Experiment Name: At_Germinating_Seeds_cDNA_P Parameter: Tissue Value: Germinating Seeds
  misc_feature: MA Experiment ID: 108572 Result: Up-regulated in Transcription
  misc_feature: MA Experiment 108572 PARAMETER Experiment Name: At_Drought_cDNA_P Parameter: Timepoint (hr) Value: 1
  misc_feature: MA Experiment 108572 PARAMETER Experiment Name: At_Drought_cDNA_P Parameter: Tissue Value: Aerial
  misc_feature: MA Experiment 108572 PARAMETER Experiment Name: At_Drought_cDNA_P Parameter: Treatment Value: Drought vs. No Drought
  misc_feature: MA Experiment ID: 108576 Result: Down-regulated in Transcription
  misc_feature: MA Experiment 108576 PARAMETER Experiment Name: At_42deg_Heat_cDNA_P Parameter: Temperature (deg C) Value: 42 vs. 22
  misc_feature: MA Experiment 108576 PARAMETER Experiment Name: At_42deg_Heat_cDNA_P Parameter: Timepoint (hr) Value: 1
  misc_feature: MA Experiment 108576 PARAMETER Experiment Name: At_42deg_Heat_cDNA_P Parameter: Tissue Value: Aerial
  misc_feature: MA Experiment ID: 108577 Result: Down-regulated in Transcription
  misc_feature: MA Experiment 108577 PARAMETER Experiment Name: At_42deg_Heat_cDNA_P Parameter: Temperature (deg C) Value: 42 vs. 22
  misc_feature: MA Experiment 108577 PARAMETER Experiment Name: At_42deg_Heat_cDNA_P Parameter: Timepoint (hr) Value: 6
  misc_feature: MA Experiment 108577 PARAMETER Experiment Name: At_42deg_Heat_cDNA_P Parameter: Tissue Value: Aerial
  misc_feature: MA Experiment ID: 108595 Result: Down-regulated in Transcription
  misc_feature: MA Experiment 108595 PARAMETER Experiment Name: At_Ler-pi_Ovule_cDNA_P Parameter: Plant Line Value: null
  misc_feature: MA Experiment ID: 108607 Result: Up-regulated in Transcription
  misc_feature: MA Experiment 108607 PARAMETER Experiment Name: At_100uM_ABA_cDNA_P Parameter: Timepoint (hr) Value: 4
  misc_feature: MA Experiment 108607 PARAMETER Experiment Name: At_100uM_ABA_cDNA_P Parameter: Tissue Value: Aerial
  misc_feature: MA Experiment 108607 PARAMETER Experiment Name: At_100uM_ABA_cDNA_P Parameter: Treatment Value: 100uM ABA vs. No Treatment
  misc_feature: MA Experiment ID: 20000069 Result: Up-regulated in Transcription
  misc_feature: MA Experiment 20000069 PARAMETER Experiment Name: At_100uM_ABA_Mutants_cDNA_P Parameter: Plant Line Value: CS23
  misc_feature: MA Experiment 20000069 PARAMETER Experiment Name: At_100uM_ABA_Mutants_cDNA_P Parameter: Timepoint (hr) Value: 6
  misc_feature: MA Experiment 20000069 PARAMETER Experiment Name: At_100uM_ABA_Mutants_cDNA_P Parameter: Tissue Value: Aerial
  misc_feature: MA Experiment 20000069 PARAMETER Experiment Name: At_100uM_ABA_Mutants_cDNA_P Parameter: Treatment Value: 100uM ABA vs. No Treatment
  misc_feature: MA Experiment ID: 20000071 Result: Up-regulated in Transcription
  misc_feature: MA Experiment 20000071 PARAMETER Experiment Name: At_100uM_ABA_Mutants_cDNA_P Parameter: Plant Line Value: CS8104
  misc_feature: MA Experiment 20000071 PARAMETER Experiment Name: At_100uM_ABA_Mutants_cDNA_P Parameter: Timepoint (hr) Value: 6
  misc_feature: MA Experiment 20000071 PARAMETER Experiment Name: At_100uM_ABA_Mutants_cDNA_P Parameter: Tissue Value: Aerial
  misc_feature: MA Experiment 20000071 PARAMETER Experiment Name: At_100uM_ABA_Mutants_cDNA_P Parameter: Treatment Value: 100uM ABA vs. No Treatment
  misc_feature: MA Experiment ID: 20000111 Result: Down-regulated in Transcription
  misc_feature: MA Experiment 20000111 PARAMETER Experiment Name: At_42deg_Heat_cDNA_P Parameter: Temperature (deg C) Value: 42 vs. 22
  misc_feature: MA Experiment 20000111 PARAMETER Experiment Name: At_42deg_Heat_cDNA_P Parameter: Timepoint (hr) Value: 6
  misc_feature: MA Experiment 20000111 PARAMETER Experiment Name: At_42deg_Heat_cDNA_P Parameter: Tissue Value: Aerial
  misc_feature: MA Experiment ID: 20000113 Result: Down-regulated in Transcription
  misc_feature: MA Experiment 20000113 PARAMETER Experiment Name: At_42deg_Heat_cDNA_P Parameter: Temperature (deg C) Value: 42 vs. 22
  misc_feature: MA Experiment 20000113 PARAMETER Experiment Name: At_42deg_Heat_cDNA_P Parameter: Timepoint (hr) Value: 8
  misc_feature: MA Experiment 20000113 PARAMETER Experiment Name: At_42deg_Heat_cDNA_P Parameter: Tissue Value: Aerial
  misc_feature: MA Experiment ID: 20000117 Result: Up-regulated in Transcription
  misc_feature: MA Experiment 20000117 PARAMETER Experiment Name: At_100uM_ABA_Mutants_cDNA_P Parameter: Plant Line Value: Columbia
  misc_feature: MA Experiment 20000117 PARAMETER Experiment Name: At_100uM_ABA_Mutants_cDNA_P Parameter: Timepoint (hr) Value: 6
  misc_feature: MA Experiment 20000117 PARAMETER Experiment Name: At_100uM_ABA_Mutants_cDNA_P Parameter: Tissue Value: Aerial
  misc_feature: MA Experiment 20000117 PARAMETER Experiment Name: At_100uM_ABA_Mutants_cDNA_P Parameter: Treatment Value: 100uM ABA vs. No Treatment
  misc_feature: MA Experiment ID: 20000185 Result: Down-regulated in Transcription
  misc_feature: MA Experiment 20000185 PARAMETER Experiment Name: At_Roots__P Parameter: Age (day) Value: 7 vs. 21
  misc_feature: MA Experiment 20000185 PARAMETER Experiment Name: At_Roots__P Parameter: Organism Value: A. thaliana
  misc_feature: MA Experiment 20000185 PARAMETER Experiment Name: At_Roots__P Parameter: Tissue Value: Roots vs. Whole Plant
  misc_feature: MA Experiment ID: 20000224 Result: Up-regulated in Transcription
  misc_feature: MA Experiment ID: 20000234 Result: Down-regulated in Transcription
  misc_feature: MA Experiment 20000234 PARAMETER Experiment Name: At_Siliques_P Parameter: Age (day) Value: 21
  misc_feature: MA Experiment 20000234 PARAMETER Experiment Name: At_Siliques_P Parameter: Organism Value: A. thaliana
  misc_feature: MA Experiment 20000234 PARAMETER Experiment Name: At_Siliques_P Parameter: Plant Line Value: WS
  misc_feature: MA Experiment 20000234 PARAMETER Experiment Name: At_Siliques_P Parameter: Tissue Value: Less Than 5mm Siliques vs. Whole Plant
  misc_feature: MA Experiment ID: 20000235 Result: Down-regulated in Transcription
  misc_feature: MA Experiment 20000235 PARAMETER Experiment Name: At_Siliques_P Parameter: Age (day) Value: 21
  misc_feature: MA Experiment 20000235 PARAMETER Experiment Name: At_Siliques_P Parameter: Organism Value: A. thaliana
  misc_feature: MA Experiment 20000235 PARAMETER Experiment Name: At_Siliques_P Parameter: Plant Line Value: WS
  misc_feature: MA Experiment 20000235 PARAMETER Experiment Name: At_Siliques_P Parameter: Tissue Value: 5-10mm Siliques vs. Whole Plant
  misc_feature: MA Experiment ID: 20000265 Result: Down-regulated in Transcription
  misc_feature: MA Experiment 20000265 PARAMETER Experiment Name: At_Open_Flower_P Parameter: Age (day) Value: 21
  misc_feature: MA Experiment 20000265 PARAMETER Experiment Name: At_Open_Flower_P Parameter: Plant Line Value: WS
  misc_feature: MA Experiment 20000265 PARAMETER Experiment Name: At_Open_Flower_P Parameter: Tissue Value: Closed Flower vs. Whole Plant
  misc_feature: MA Experiment ID: 20000451 Result: Down-regulated in Transcription
  misc_feature: MA Experiment 20000451 PARAMETER Experiment Name: At_CS6879_Shoots-Roots_P Parameter: Age (day) Value: 14
  misc_feature: MA Experiment 20000451 PARAMETER Experiment Name: At_CS6879_Shoots-Roots_P Parameter: Organism Value: A. thaliana
  misc_feature: MA Experiment 20000451 PARAMETER Experiment Name: At_CS6879_Shoots-Roots_P Parameter: Plant Line Value: CS6879 vs. WS
  misc_feature: MA Experiment 20000451 PARAMETER Experiment Name: At_CS6879_Shoots-Roots_P Parameter: Tissue Value: Roots
  misc_feature: MA Experiment ID: 20000452 Result: Down-regulated in Transcription
  misc_feature: MA Experiment 20000452 PARAMETER Experiment Name: At_CS6879_Shoots-Roots_P Parameter: Age (day) Value: 14
  misc_feature: MA Experiment 20000452 PARAMETER Experiment Name: At_CS6879_Shoots-Roots_P Parameter: Organism Value: A. thaliana
  misc_feature: MA Experiment 20000452 PARAMETER Experiment Name: At_CS6879_Shoots-Roots_P Parameter: Plant Line Value: CS6879 vs. WS
  misc_feature: MA Experiment 20000452 PARAMETER Experiment Name: At_CS6879_Shoots-Roots_P Parameter: Tissue Value: Shoots
  misc_feature: MA Experiment ID: 20001451 Result: Up-regulated in Transcription
  misc_feature: MA Experiment 20001451 PARAMETER Experiment Name: At_Far-red-induction_P Parameter: Age (day) Value: 7
  misc_feature: MA Experiment 20001451 PARAMETER Experiment Name: At_Far-red-induction_P Parameter: Light Value: Far-red vs. White
  misc_feature: MA Experiment 20001451 PARAMETER Experiment Name: At_Far-red-induction_P Parameter: Organism Value: A. thaliana
  misc_feature: MA Experiment 20001451 PARAMETER Experiment Name: At_Far-red-induction_P Parameter: Plant Line Value: Columbia
  misc_feature: MA Experiment 20001451 PARAMETER Experiment Name: At_Far-red-induction_P Parameter: Timepoint (hr) Value: 24
  misc_feature: MA Experiment 20001451 PARAMETER Experiment Name: At_Far-red-induction_P Parameter: Tissue Value: Whole Plant
aaaaagaaaatatatatggtttcacaaacaccattaccataactacaacgagaagaggatcttttttaaggagaaaagcagagagagaagagacgagtgtgtgaagtttttttgtcttttgtttcttttattacacacaaatagatgaaacgaggaaagctacttcttttgctacttccataaaaaggttcttcctttcgcagagaatcaactttgatcatcttcttccttctctttctttcttcttctccctccagtaatgcttatatagtctcctcctatatctctacctatacatacacaaaccctttatcctcgaaagcttcctcctggttaggtttttatcaaacccttttagccaatcgggaaattaactaaagaagaagatatggtgaggggcaaaactcagatgaagagaatagagaatgcaacaagcagacaagtgactttctccaaaagaaggaatggtttgttgaagaaagcctttgagctctcagtgctttgtgatgctgaagtttctcttatcatcttctctcctaaaggcaaactttatgaattcgccagctccaatatgcaagataccatagatcgttatctgaggcatactaaggatcgagtcagcaccaaaccggtttctgaagaaaatatgcagcatttgaaatatgaagcagcaaacatgatgaagaaaattgaacaactcgaagcttctaaacgtaaactcttgggagaaggcataggaacatgctcaatcgaggagctgcaacagattgagcaacagcttgagaaaagtgtcaaatgtattcgagcaagaaagactcaagtgtttaaggaacaaattgagcagctcaagcaaaaggagaaagctctagctgcagaaaacgagaagctctctgaaaagtggggatctcatgaaagcgaagtttggtcaaataagaatcaagaaagtactggaagaggtgatgaagagagtagcccaagttctgaagtagagacgcaattgttcattgggttaccttgttcttcaagaaagtgatctccactcaacaaaaaaaacaaaaaaacaaactaagtaaaaacaggtttagcagtactgagagtgtataaggacaagtaacaaaactctaaagctgcttctctcttgttgtcttatttctctctcactctctctctctcagtcacttctttaatgattctgaactgcttgtgttatgtatctatgttcttacacttgcctctctagaatgtaattttgattatgttttgttttcatgtatcaatttagctttcttccccc

SEQ ID NO: 27115 - protein, 214 aa, Arabidopsis thaliana
  peptide (1)..(214): Ceres Seq. ID no. 13580485
  misc_feature (74)..(173): Pfam Name: K-box region Pfam Description: K-box region
  misc_feature (1)..(213): Homolog of NCBI NO: 13384054 NR Description: MADS-box transcription factor FBP20 [Petunia x
  misc_feature (1)..(209): Homolog of NCBI NO: 3493647 NR Description: transcription activator [Pimpinella brachycarpa]
  misc_feature (1)..(214): Homolog of NCBI NO: 1076646 NR Description: MADS box protein mads1 - common tobacco
  misc_feature (1)..(214): Homolog of NCBI NO: 40641816 NR Description: putative MADS-box transcription factor DEFH68
  misc_feature (1)..(175): Homolog of NCBI NO: 30171311 NR Description: MADS-box protein [Draba nemorosa var. hebecarpa]
  misc_feature (1)..(214): Homolog of NCBI NO: 30171307 NR Description: MADS-box protein [Brassica rapa subsp. pekinensis]
  misc_feature (1)..(214): Homolog of NCBI NO: 33771690 NR Description: MADS-box protein [Brassica rapa]
  misc_feature (1)..(214): Homolog of NCBI NO: 7446552 NR Description: MADS box protein A - white mustard
  misc_feature (1)..(214): Homolog of NCBI NO: 30171309 NR Description: MADS-box protein [Cardamine flexuosa]
  misc_feature (1)..(214): Homolog of NCBI NO: 15225534 NR Description: MADS-box protein (AGL20) [Arabidopsis thaliana]
MVRGKTQMKRIENATSRQVTFSKRRNGLLKKAFELSVLCDAEVSLIIFSPKGKLYEFASSNMQDTIDRYLRHTKDRVSTKPVSEENMQHLKYEAANMMKKIEQLEASKRKLLGEGIGTCSIEELQQIEQQLEKSVKCIRARKTQVFKEQIEQLKQKEKALAAENEKLSEKWGSHESEVWSNKNQESTGRGDEESSPSSEVETQLFIGLPCSSRK

SEQ ID NO: 27116 - protein, 207 aa, Arabidopsis thaliana
  peptide (1)..(207): Ceres Seq. ID no. 13580486
  misc_feature (67)..(166): Pfam Name: K-box region Pfam Description: K-box region
  misc_feature (1)..(206): Homolog of NCBI NO: 13384054 NR Description: MADS-box transcription factor FBP20 [Petunia x
  misc_feature (1)..(202): Homolog of NCBI NO: 3493647 NR Description: transcription activator [Pimpinella brachycarpa]
  misc_feature (1)..(207): Homolog of NCBI NO: 1076646 NR Description: MADS box protein mads1 - common tobacco
  misc_feature (1)..(207): Homolog of NCBI NO: 40641816 NR Description: putative MADS-box transcription factor DEFH68
  misc_feature (1)..(168): Homolog of NCBI NO: 30171311 NR Description: MADS-box protein [Draba nemorosa var. hebecarpa]
  misc_feature (1)..(207): Homolog of NCBI NO: 30171307 NR Description: MADS-box protein [Brassica rapa subsp. pekinensis]
  misc_feature (1)..(207): Homolog of NCBI NO: 33771690 NR Description: MADS-box protein [Brassica rapa]
  misc_feature (1)..(207): Homolog of NCBI NO: 7446552 NR Description: MADS box protein A - white mustard
  misc_feature (1)..(207): Homolog of NCBI NO: 30171309 NR Description: MADS-box protein [Cardamine flexuosa]
  misc_feature (1)..(207): Homolog of NCBI NO: 15225534 NR Description: MADS-box protein (AGL20) [Arabidopsis thaliana]
MKRIENATSRQVTFSKRRNGLLKKAFELSVLCDAEVSLIIFSPKGKLYEFASSNMQDTIDRYLRHTKDRVSTKPVSEENMQHLKYEAANMMKKIEQLEASKRKLLGEGIGTCSIEELQQIEQQLEKSVKCIRARKTQVFKEQIEQLKQKEKALAAENEKLSEKWGSHESEVWSNKNQESTGRGDEESSPSSEVETQLFIGLPCSSRK

SEQ ID NO: 27117 - protein, 153 aa, Arabidopsis thaliana
  peptide (1)..(153): Ceres Seq. ID no. 13580487
  misc_feature (13)..(112): Pfam Name: K-box region Pfam Description: K-box region
  misc_feature (1)..(152): Homolog of NCBI NO: 13384054 NR Description: MADS-box transcription factor FBP20 [Petunia x
  misc_feature (1)..(148): Homolog of NCBI NO: 3493647 NR Description: transcription activator [Pimpinella brachycarpa]
  misc_feature (1)..(153): Homolog of NCBI NO: 1076646 NR Description: MADS box protein mads1 - common tobacco
  misc_feature (1)..(153): Homolog of NCBI NO: 40641816 NR Description: putative MADS-box transcription factor DEFH68
  misc_feature (1)..(114): Homolog of NCBI NO: 30171311 NR Description: MADS-box protein [Draba nemorosa var. hebecarpa]
  misc_feature (1)..(153): Homolog of NCBI NO: 30171307 NR Description: MADS-box protein [Brassica rapa subsp. pekinensis]
  misc_feature (1)..(153): Homolog of NCBI NO: 33771690 NR Description: MADS-box protein [Brassica rapa]
  misc_feature (1)..(153): Homolog of NCBI NO: 7446552 NR Description: MADS box protein A - white mustard
  misc_feature (1)..(153): Homolog of NCBI NO: 30171309 NR Description: MADS-box protein [Cardamine flexuosa]
  misc_feature (1)..(153): Homolog of NCBI NO: 15225534 NR Description: MADS-box protein (AGL20) [Arabidopsis thaliana]
MQDTIDRYLRHTKDRVSTKPVSEENMQHLKYEAANMMKKIEQLEASKRKLLGEGIGTCSIEELQQIEQQLEKSVKCIRARKTQVFKEQIEQLKQKEKALAAENEKLSEKWGSHESEVWSNKNQESTGRGDEESSPSSEVETQLFIGLPCSSRK

SEQ ID NO: 27118 - DNA, 1442 bp, Arabidopsis thaliana
  misc_feature (1)..(1442): Ceres Seq. ID no. 12369960
  misc_feature: MA Experiment ID: 108461 Result: Down-regulated in Transcription
  misc_feature: MA Experiment 108461 PARAMETER Experiment Name: At_Germinating_Seeds_cDNA_P Parameter: Age (day) Value: 1 vs. 0
  misc_feature: MA Experiment 108461 PARAMETER Experiment Name: At_Germinating_Seeds_cDNA_P Parameter: Tissue Value: Germinating Seeds
  misc_feature: MA Experiment ID: 108462 Result: Down-regulated in Transcription
  misc_feature: MA Experiment 108462 PARAMETER Experiment Name: At_Germinating_Seeds_cDNA_P Parameter: Age (day) Value: 2 vs. 0
  misc_feature: MA Experiment 108462 PARAMETER Experiment Name: At_Germinating_Seeds_cDNA_P Parameter: Tissue Value: Germinating Seeds
  misc_feature: MA Experiment ID: 108463 Result: Down-regulated in Transcription
  misc_feature: MA Experiment 108463 PARAMETER Experiment Name: At_Germinating_Seeds_cDNA_P Parameter: Age (day) Value: 3 vs. 0
  misc_feature: MA Experiment 108463 PARAMETER Experiment Name: At_Germinating_Seeds_cDNA_P Parameter: Tissue Value: Germinating Seeds
  misc_feature: MA Experiment ID: 108464 Result: Down-regulated in Transcription
  misc_feature: MA Experiment 108464 PARAMETER Experiment Name: At_Germinating_Seeds_cDNA_P Parameter: Age (day) Value: 4 vs. 0
  misc_feature: MA Experiment 108464 PARAMETER Experiment Name: At_Germinating_Seeds_cDNA_P Parameter: Tissue Value: Germinating Seeds
  misc_feature: MA Experiment ID: 108488 Result: Down-regulated in Transcription
  misc_feature: MA Experiment ID: 108573 Result: Up-regulated in Transcription
  misc_feature: MA Experiment 108573 PARAMETER Experiment Name: At_Drought_cDNA_P Parameter: Timepoint (hr) Value: 6
  misc_feature: MA Experiment 108573 PARAMETER Experiment Name: At_Drought_cDNA_P Parameter: Tissue Value: Aerial
  misc_feature: MA Experiment 108573 PARAMETER Experiment Name: At_Drought_cDNA_P Parameter: Treatment Value: Drought vs. No Drought
  misc_feature: MA Experiment ID: 20000180 Result: Down-regulated in Transcription
  misc_feature: MA Experiment 20000180 PARAMETER Experiment Name: At_Germinating_Seeds_P Parameter: Age (hr) Value: 24 vs. 0
  misc_feature: MA Experiment 20000180 PARAMETER Experiment Name: At_Germinating_Seeds_P Parameter: Tissue Value: Germinating Seeds
  misc_feature: MA Experiment ID: 20000184 Result: Down-regulated in Transcription
  misc_feature: MA Experiment 20000184 PARAMETER Experiment Name: At_Shoots__P Parameter: Age (day) Value: 7
  misc_feature: MA Experiment 20000184 PARAMETER Experiment Name: At_Shoots__P Parameter: Tissue Value: Shoots vs. Whole Plant
  misc_feature: MA Experiment ID: 20000224 Result: Down-regulated in Transcription
  misc_feature: MA Experiment ID: 20001905 Result: Up-regulated in Transcription
  misc_feature: MA Experiment 20001905 PARAMETER Experiment Name: At_Drought_Reproduction_P Parameter: Age (day) Value: 40
  misc_feature: MA Experiment 20001905 PARAMETER Experiment Name: At_Drought_Reproduction_P Parameter: Organism Value: A. thaliana
  misc_feature: MA Experiment 20001905 PARAMETER Experiment Name: At_Drought_Reproduction_P Parameter: Plant Line Value: WS
  misc_feature: MA Experiment 20001905 PARAMETER Experiment Name: At_Drought_Reproduction_P Parameter: Timepoint (day) Value: 10
  misc_feature: MA Experiment 20001905 PARAMETER Experiment Name: At_Drought_Reproduction_P Parameter: Tissue Value: Rosettes
  misc_feature: MA Experiment 20001905 PARAMETER Experiment Name: At_Drought_Reproduction_P Parameter: Treatment Value: Drought vs. No Drought
  misc_feature: MA Experiment ID: 20001911 Result: Up-regulated in Transcription
  misc_feature: MA Experiment 20001911 PARAMETER Experiment Name: At_Drought_Reproduction_P Parameter: Age (day) Value: 40
  misc_feature: MA Experiment 20001911 PARAMETER Experiment Name: At_Drought_Reproduction_P Parameter: Organism Value: A. thaliana
  misc_feature: MA Experiment 20001911 PARAMETER Experiment Name: At_Drought_Reproduction_P Parameter: Plant Line Value: WS
  misc_feature: MA Experiment 20001911 PARAMETER Experiment Name: At_Drought_Reproduction_P Parameter: Timepoint (day) Value: 10
  misc_feature: MA Experiment 20001911 PARAMETER Experiment Name: At_Drought_Reproduction_P Parameter: Tissue Value: Flowers
  misc_feature: MA Experiment 20001911 PARAMETER Experiment Name: At_Drought_Reproduction_P Parameter: Treatment Value: Drought vs. No Drought
aattagatgaagagacatcagatcttatcaaaaccctagctttcggtgtctctctcgatcctttagctcaatcgaaaactgaatttaggagctgcgatgggttccagatctcgtaatgataatttccagtccggcgatggcgctagtcctgggaaaatattcattggaggattgcacaaagacacgactaatactgtgttcaataagcactttggcaagtacggggagattacagattctgtcattatgcgagatcgacatactggacaacctaggggtttcggtttcatcaccttcgctgacccttctgttgttgacaaagttatcgaagatactcatgtcatcaatggcaaacaggttgagatcaaaaggactattccgaaaggtgctggtggcaatcagtcaaaggacatcaaaacaaagaagattttcgttggtggtataccctcaacggttacagaagatgaacttaaggacttctttgccaagtatgggaacgtggtggagcaccaggttattcgagaccatgaaacaaacaggtccagaggttttggttttgtaatttttgatagcgaagaagtcgtagatgaattattgtccaaaggaaacatgatcgatatggcagacactcaggtggagatcaagaaagctgaaccaaagaaatctctaaaccgttcacctccttcttacggtagtcaccctagaggtcgttcttctaacgatagttatgcaagttatggtggaccttacggaggttttgatggagggtatggtcatcctccaggtcccattaggtcacatggaggtcctgctagtagatatgctgggggatatgggtatggtcgtggcagtgtaggccctgaatttggaggaggttataataattatgggggtggtagtttaggaggttaccggaatgaaccaccccttggctattctagtcgttttggaccctatgggagtgggtttggtggtgagggatatggccgtggaggagaaggagcctatttgggatatcctcgtggaggaggggaaggctatgggggatatggtgggcctggttacggcggtgcatatgaatctggtggcccaggtggcagttatgaaggagcaggtggtccatatgggaggggttatagtagcagtagtcgataccatccgtatgcaaggtagggtcgaggtaatagcaatcagttggagctatagaagcttctctcacaggttcctctagattgttccaattgctctaggtgcattctagagttatcatgtagcgccaacatcaggaagggttgctaaggacaggaagagcatcaaaaagcttttattagtcatcttttagttgtgtgtttacctaatttaagtgttgtcttatctctataacttagattgtgttatgtagactttagcatatttgggcttggagtttgtttctcactggc

SEQ ID NO: 27119 - protein, 358 aa, Arabidopsis thaliana
  peptide (1)..(358): Ceres Seq. ID no. 12369961
  misc_feature (21)..(90): Pfam Name: RNA recognition motif. (a.k.a. RRM, RBD, or RNP domain) Pfam Description: RNA recognition motif. (a.k.a. RRM, RBD, or RNP
  misc_feature (20)..(349): Homolog of NCBI NO: 34853602 NR Description: similar to Hypothetical protein MGC37309 [Rattus
  misc_feature (2)..(349): Homolog of NCBI NO: 34740329 NR Description: heterogeneous nuclear ribonucleoprotein A3 [Homo
  misc_feature (19)..(96): Homolog of NCBI NO: 37535274 NR Description: putative RNA-binding protein
  misc_feature (97)..(347): Homolog of NCBI NO: 37535274 NR Description: putative RNA-binding protein
  misc_feature (20)..(323): Homolog of NCBI NO: 8778468 NR Description: F1L3.34 [Arabidopsis thaliana]
  misc_feature (1)..(323): Homolog of NCBI NO: 15220810 NR Description: RRM-containing RNA-binding protein, putative
  misc_feature (1)..(184): Homolog of NCBI NO: 30682550 NR Description: RNA recognition motif (RRM)-containing protein
  misc_feature (12)..(353): Homolog of NCBI NO: 15242719 NR Description: RRM-containing RNA-binding protein, putative
  misc_feature (14)..(358): Homolog of NCBI NO: 35215091 NR Description: putative heterogeneous nuclear ribonucleoprotein
  misc_feature (1)..(358): Homolog of NCBI NO: 30682553 NR Description: RNA recognition motif (RRM)-containing protein
MGSRSRNDNFQSGDGASPGKIFIGGLHKDTTNTVFNKHFGKYGEITDSVIMRDRHTGQPRGFGFITFADPSVVDKVIEDTHVINGKQVEIKRTIPKGAGGNQSKDIKTKKIFVGGIPSTVTEDELKDFFAKYGNVVEHQVIRDHETNRSRGFGFVIFDSEEVVDELLSKGNMIDMADTQVEIKKAEPKKSLNRSPPSYGSHPRGRSSNDSYASYGGPYGGFDGGYGHPPGPIRSHGGPASRYAGGYGYGRGSVGPEFGGGYNNYGGGSLGGYRNEPPLGYSSRFGPYGSGFGGEGYGRGGEGAYLGYPRGGGEGYGGYGGPGYGGAYESGGPGGSYEGAGGPYGRGYSSSSRYHPYAR

SEQ ID NO: 27120 - protein, 308 aa, Arabidopsis thaliana
  peptide (1)..(308): Ceres Seq. ID no. 12369962
  misc_feature (145)..(296): Pfam Name: S-antigen protein Pfam Description: S-antigen protein
  misc_feature (1)..(299): Homolog of NCBI NO: 34853602 NR Description: similar to Hypothetical protein MGC37309 [Rattus
  misc_feature (1)..(299): Homolog of NCBI NO: 34740329 NR Description: heterogeneous nuclear ribonucleoprotein A3 [Homo
  misc_feature (1)..(46): Homolog of NCBI NO: 37535274 NR Description: putative RNA-binding protein
  misc_feature (47)..(297): Homolog of NCBI NO: 37535274 NR Description: putative RNA-binding protein
  misc_feature (1)..(273): Homolog of NCBI NO: 8778468 NR Description: F1L3.34 [Arabidopsis thaliana]
  misc_feature (1)..(273): Homolog of NCBI NO: 15220810 NR Description: RRM-containing RNA-binding protein, putative
  misc_feature (1)..(134): Homolog of NCBI NO: 30682550 NR Description: RNA recognition motif (RRM)-containing protein
  misc_feature (1)..(303): Homolog of NCBI NO: 15242719 NR Description: RRM-containing RNA-binding protein, putative
  misc_feature (1)..(308): Homolog of NCBI NO: 35215091 NR Description: putative heterogeneous nuclear ribonucleoprotein
  misc_feature (1)..(308): Homolog of NCBI NO: 30682553 NR Description: RNA recognition motif (RRM)-containing protein
MRDRHTGQPRGFGFITFADPSVVDKVIEDTHVINGKQVEIKRTIPKGAGGNQSKDIKTKKIFVGGIPSTVTEDELKDFFAKYGNVVEHQVIRDHETNRSRGFGFVIFDSEEVVDELLSKGNMIDMADTQVEIKKAEPKKSLNRSPPSYGSHPRGRSSNDSYASYGGPYGGFDGGYGHPPGPIRSHGGPASRYAGGYGYGRGSVGPEFGGGYNNYGGGSLGGYRNEPPLGYSSRFGPYGSGFGGEGYGRGGEGAYLGYPRGGGEGYGGYGGPGYGGAYESGGPGGSYEGAGGPYGRGYSSSSRYHPYAR

SEQ ID NO: 27121 - protein, 187 aa, Arabidopsis thaliana
  peptide (1)..(187): Ceres Seq. ID no. 12369963
  misc_feature (24)..(175): Pfam Name: S-antigen protein Pfam Description: S-antigen protein
  misc_feature (1)..(187): Homolog of NCBI NO: 35215091 NR Description: putative heterogeneous nuclear ribonucleoprotein
  misc_feature (1)..(178): Homolog of NCBI NO: 23274114 NR Description: Similar to heterogeneous nuclear
  misc_feature (1)..(178): Homolog of NCBI NO: 34740329 NR Description: heterogeneous nuclear ribonucleoprotein A3 [Homo
  misc_feature (1)..(152): Homolog of NCBI NO: 8778468 NR Description: F1L3.34 [Arabidopsis thaliana]
  misc_feature (1)..(13): Homolog of NCBI NO: 30682550 NR Description: RNA recognition motif (RRM)-containing protein
  misc_feature (1)..(182): Homolog of NCBI NO: 15242719 NR Description: RRM-containing RNA-binding protein, putative
  misc_feature (1)..(152): Homolog of NCBI NO: 15220810 NR Description: RRM-containing RNA-binding protein, putative
  misc_feature (1)..(176): Homolog of NCBI NO: 37535274 NR Description: putative RNA-binding protein
  misc_feature (1)..(178): Homolog of NCBI NO: 34853602 NR Description: similar to Hypothetical protein MGC37309 [Rattus
  misc_feature (1)..(187): Homolog of NCBI NO: 30682553 NR Description: RNA recognition motif (RRM)-containing protein
MIDMADTQVEIKKAEPKKSLNRSPPSYGSHPRGRSSNDSYASYGGPYGGFDGGYGHPPGPIRSHGGPASRYAGGYGYGRGSVGPEFGGGYNNYGGGSLGGYRNEPPLGYSSRFGPYGSGFGGEGYGRGGEGAYLGYPRGGGEGYGGYGGPGYGGAYESGGPGGSYEGAGGPYGRGYSSSSRYHPYAR

SEQ ID NO: 27122 - DNA, 727 bp, Arabidopsis thaliana
  misc_feature (1)..(727): Ceres Seq. ID no. 12393028
  misc_feature: MA Experiment ID: 108462 Result: Down-regulated in Transcription
  misc_feature: MA Experiment 108462 PARAMETER Experiment Name: At_Germinating_Seeds_cDNA_P Parameter: Age (day) Value: 2 vs. 0
  misc_feature: MA Experiment 108462 PARAMETER Experiment Name: At_Germinating_Seeds_cDNA_P Parameter: Tissue Value: Germinating Seeds
  misc_feature: MA Experiment ID: 108463 Result: Down-regulated in Transcription
  misc_feature: MA Experiment 108463 PARAMETER Experiment Name: At_Germinating_Seeds_cDNA_P Parameter: Age (day) Value: 3 vs. 0
  misc_feature: MA Experiment 108463 PARAMETER Experiment Name: At_Germinating_Seeds_cDNA_P Parameter: Tissue Value: Germinating Seeds
  misc_feature: MA Experiment ID: 108576 Result: Up-regulated in Transcription
  misc_feature: MA Experiment 108576 PARAMETER Experiment Name: At_42deg_Heat_cDNA_P Parameter: Temperature (deg C) Value: 42 vs. 22
  misc_feature: MA Experiment 108576 PARAMETER Experiment Name: At_42deg_Heat_cDNA_P Parameter: Timepoint (hr) Value: 1
  misc_feature: MA Experiment 108576 PARAMETER Experiment Name: At_42deg_Heat_cDNA_P Parameter: Tissue Value: Aerial
  misc_feature: MA Experiment ID: 108577 Result: Up-regulated in Transcription
  misc_feature: MA Experiment 108577 PARAMETER Experiment Name: At_42deg_Heat_cDNA_P Parameter: Temperature (deg C) Value: 42 vs. 22
  misc_feature: MA Experiment 108577 PARAMETER Experiment Name: At_42deg_Heat_cDNA_P Parameter: Timepoint (hr) Value: 6
  misc_feature: MA Experiment 108577 PARAMETER Experiment Name: At_42deg_Heat_cDNA_P Parameter: Tissue Value: Aerial
  misc_feature: MA Experiment ID: 108595 Result: Up-regulated in Transcription
  misc_feature: MA Experiment 108595 PARAMETER Experiment Name: At_Ler-pi_Ovule_cDNA_P Parameter: Plant Line Value: null
  misc_feature: MA Experiment ID: 20000093 Result: Up-regulated in Transcription
  misc_feature: MA Experiment 20000093 PARAMETER Experiment Name: At_42deg_Heat_cDNA_P Parameter: Temperature (deg C) Value: 42 vs. 22
  misc_feature: MA Experiment 20000093 PARAMETER Experiment Name: At_42deg_Heat_cDNA_P Parameter: Timepoint (hr) Value: 0.5
  misc_feature: MA Experiment 20000093 PARAMETER Experiment Name: At_42deg_Heat_cDNA_P Parameter: Tissue Value: Aerial
  misc_feature: MA Experiment ID: 20000112 Result: Up-regulated in Transcription
  misc_feature: MA Experiment 20000112 PARAMETER Experiment Name: At_42deg_Heat_cDNA_P Parameter: Temperature (deg C) Value: 42 vs. 22
  misc_feature: MA Experiment 20000112 PARAMETER Experiment Name: At_42deg_Heat_cDNA_P Parameter: Timepoint (hr) Value: 2
  misc_feature: MA Experiment 20000112 PARAMETER Experiment Name: At_42deg_Heat_cDNA_P Parameter: Tissue Value: Aerial
  misc_feature: MA Experiment ID: 20000113 Result: Up-regulated in Transcription
  misc_feature: MA Experiment 20000113 PARAMETER Experiment Name: At_42deg_Heat_cDNA_P Parameter: Temperature (deg C) Value: 42 vs. 22
  misc_feature: MA Experiment 20000113 PARAMETER Experiment Name: At_42deg_Heat_cDNA_P Parameter: Timepoint (hr) Value: 8
  misc_feature: MA Experiment 20000113 PARAMETER Experiment Name: At_42deg_Heat_cDNA_P Parameter: Tissue Value: Aerial
  misc_feature: MA Experiment ID: 20000144 Result: Up-regulated in Transcription
  misc_feature: MA Experiment 20000144 PARAMETER Experiment Name: At_42deg_Heat_cDNA_P Parameter: Temperature (deg C) Value: 42 vs. 22
  misc_feature: MA Experiment 20000144 PARAMETER Experiment Name: At_42deg_Heat_cDNA_P Parameter: Timepoint (hr) Value: 1
  misc_feature: MA Experiment 20000144 PARAMETER Experiment Name: At_42deg_Heat_cDNA_P Parameter: Tissue Value: Aerial
  misc_feature: MA Experiment ID: 20000171 Result: Up-regulated in Transcription
  misc_feature: MA Experiment 20000171 PARAMETER Experiment Name: At_42deg_Heat_P Parameter: Age (day) Value: 14
  misc_feature: MA Experiment 20000171 PARAMETER Experiment Name: At_42deg_Heat_P Parameter: Organism Value: A. thaliana
  misc_feature: MA Experiment 20000171 PARAMETER Experiment Name: At_42deg_Heat_P Parameter: Plant Line Value: WS
  misc_feature: MA Experiment 20000171 PARAMETER Experiment Name: At_42deg_Heat_P Parameter: Temperature (deg C) Value: 42 vs. 22
  misc_feature: MA Experiment 20000171 PARAMETER Experiment Name: At_42deg_Heat_P Parameter: Timepoint (hr) Value: 1
  misc_feature: MA Experiment 20000171 PARAMETER Experiment Name: At_42deg_Heat_P Parameter: Tissue Value: Aerial
  misc_feature: MA Experiment ID: 20000173 Result: Up-regulated in Transcription
  misc_feature: MA Experiment 20000173 PARAMETER Experiment Name: At_42deg_Heat_P Parameter: Age (day) Value: 14
  misc_feature: MA Experiment 20000173 PARAMETER Experiment Name: At_42deg_Heat_P Parameter: Organism Value: A. thaliana
  misc_feature: MA Experiment 20000173 PARAMETER Experiment Name: At_42deg_Heat_P Parameter: Plant Line Value: WS
  misc_feature: MA Experiment 20000173 PARAMETER Experiment Name: At_42deg_Heat_P Parameter: Temperature (deg C) Value: 42 vs. 22
  misc_feature: MA Experiment 20000173 PARAMETER Experiment Name: At_42deg_Heat_P Parameter: Timepoint (hr) Value: 6
  misc_feature: MA Experiment 20000173 PARAMETER Experiment Name: At_42deg_Heat_P Parameter: Tissue Value: Aerial
  misc_feature: MA Experiment ID: 20000214 Result: Down-regulated in Transcription
  misc_feature: MA Experiment 20000214 PARAMETER Experiment Name: At_4deg_Cold_P Parameter: Timepoint (hr) Value: 6
  misc_feature: MA Experiment ID: 20000794 Result: Up-regulated in Transcription
  misc_feature: MA Experiment 20000794 PARAMETER Experiment Name: At_Petals_P Parameter: Age (day) Value: 23-25 days
  misc_feature: MA Experiment 20000794 PARAMETER Experiment Name: At_Petals_P Parameter: Plant Line Value: WS
  misc_feature: MA Experiment 20000794 PARAMETER Experiment Name: At_Petals_P Parameter: Tissue Value: Petals vs. Whole plant
  misc_feature: MA Experiment ID: 20001554 Result: Up-regulated in Transcription
  misc_feature: MA Experiment 20001554 PARAMETER Experiment Name: At_Drought_Soil_Dry_P Parameter: Age (day) Value: 21
  misc_feature: MA Experiment 20001554 PARAMETER Experiment Name: At_Drought_Soil_Dry_P Parameter: Organism Value: A. thaliana
  misc_feature: MA Experiment 20001554 PARAMETER Experiment Name: At_Drought_Soil_Dry_P Parameter: Plant Line Value: WS
  misc_feature: MA Experiment 20001554 PARAMETER Experiment Name: At_Drought_Soil_Dry_P Parameter: Post Timepoint (hr) Value: None
  misc_feature: MA Experiment 20001554 PARAMETER Experiment Name: At_Drought_Soil_Dry_P Parameter: Post-Treatment Value: None
  misc_feature: MA Experiment 20001554 PARAMETER Experiment Name: At_Drought_Soil_Dry_P Parameter: Timepoint (day) Value: 7
  misc_feature: MA Experiment 20001554 PARAMETER Experiment Name: At_Drought_Soil_Dry_P Parameter: Treatment Value: Drought vs. No Drought
  misc_feature: MA Experiment ID: 20001555 Result: Up-regulated in Transcription
  misc_feature: MA Experiment 20001555 PARAMETER Experiment Name: At_Drought_Soil_Dry_P Parameter: Age (day) Value: 24
  misc_feature: MA Experiment 20001555 PARAMETER Experiment Name: At_Drought_Soil_Dry_P Parameter: Organism Value: A. thaliana
  misc_feature: MA Experiment 20001555 PARAMETER Experiment Name: At_Drought_Soil_Dry_P Parameter: Plant Line Value: WS
  misc_feature: MA Experiment 20001555 PARAMETER Experiment Name: At_Drought_Soil_Dry_P Parameter: Post Timepoint (hr) Value: None
  misc_feature: MA Experiment 20001555 PARAMETER Experiment Name: At_Drought_Soil_Dry_P Parameter: Post-Treatment Value: None
  misc_feature: MA Experiment 20001555 PARAMETER Experiment Name: At_Drought_Soil_Dry_P Parameter: Timepoint (day) Value: 10
  misc_feature: MA Experiment 20001555 PARAMETER Experiment Name: At_Drought_Soil_Dry_P Parameter: Treatment Value: Drought vs. No Drought
aagtccaaacactttcatttgtctcctttcgtcaactccacagagatctcctcatggctccaattgctgtcggcgatgtcgttccagacggaaccatttccttcttcgatgagaatgatcaacttcagactgtctccgttcactctctcgccgccggtaaaaaagtcatcctctttggtgttcctggtgctttcactcccacctgcagcatgaagcatgttcctggtttcattgagaaagcagaggagctgaagtcaaagggtgttgatgacatcatttgctttagtgtgaacgatccttttttgatgaaagcatggggaaagacatacccagagaacaagcatgtgaagtttgtagctgatgggtctggagaatacacacaccttcttggacttgagcttgaccttaaggacaagggtcttggtattaggtcaaggagattcgctttgttgcttgataaccttaaggtgactgtagccaatctcgaatctggtggcgggttcacagtttccagcgccgatgatatcctcgaggctctctaagaaacgtaccacttgtgttgtctatgtaaaccgctgtatgtgaagtagaggattctatagcctgttctcagacattaagcaaggttgtaataaagcggtgtcattgtgacttgtttggcataacaaagtatttgcttttggtgtttttgtgcgttgattaatgaaagatgtgactcattgacgtg

SEQ ID NO: 27123 - protein, 179 aa, Arabidopsis thaliana
  peptide (1)..(179): Ceres Seq. ID no. 12393029
  misc_feature (23)..(177): Pfam Name: AhpC/TSA family Pfam Description: AhpC/TSA family
  misc_feature (18)..(179): Homolog of NCBI NO: 19548660 NR Description: peroxiredoxin [Populus tremula x Populus
  misc_feature (18)..(179): Homolog of NCBI NO: 18654477 NR Description: thioredoxin peroxidase [Capsicum annuum]
  misc_feature (18)..(179): Homolog of NCBI NO: 30841938 NR Description: thioredoxin peroxidase 1 [Lycopersicon esculentum]
  misc_feature (18)..(179): Homolog of NCBI NO: 21553913 NR Description: peroxiredoxin, putative [Arabidopsis thaliana]
  misc_feature (18)..(179): Homolog of NCBI NO: 4704732 NR Description: peroxiredoxin TPx2 [Arabidopsis thaliana]
  misc_feature (18)..(179): Homolog of NCBI NO: 18406870 NR Description: peroxiredoxin, putative
  misc_feature (18)..(179): Homolog of NCBI NO: 15218876 NR Description: type 2 peroxiredoxin, putative
  misc_feature (18)..(179): Homolog of NCBI NO: 4928472 NR Description: type 2 peroxiredoxin [Brassica rapa subsp.
  misc_feature (18)..(179): Homolog of NCBI NO: 15218877 NR Description: type 2 peroxiredoxin, putative
  misc_feature (18)..(179): Homolog of NCBI NO: 21593881 NR Description: type 2 peroxiredoxin, putative [Arabidopsis
VQTLSFVSFRQLHRDLLMAPIAVGDVVPDGTISFFDENDQLQTVSVHSLAAGKKVILFGVPGAFTPTCSMKHVPGFIEKAEELKSKGVDDIICFSVNDPFLMKAWGKTYPENKHVKFVADGSGEYTHLLGLELDLKDKGLGIRSRRFALLLDNLKVTVANLESGGGFTVSSADDILEAL

SEQ ID NO: 27124 - protein, 162 aa, Arabidopsis thaliana
  peptide (1)..(162): Ceres Seq. ID no. 12393030
  misc_feature (6)..(160): Pfam Name: AhpC/TSA family Pfam Description: AhpC/TSA family
  misc_feature (1)..(162): Homolog of NCBI NO: 19548660 NR Description: peroxiredoxin [Populus tremula x Populus
  misc_feature (1)..(162): Homolog of NCBI NO: 18654477 NR Description: thioredoxin peroxidase [Capsicum annuum]
  misc_feature (1)..(162): Homolog of NCBI NO: 30841938 NR Description: thioredoxin peroxidase 1 [Lycopersicon esculentum]
  misc_feature (1)..(162): Homolog of NCBI NO: 21553913 NR Description: peroxiredoxin, putative [Arabidopsis thaliana]
  misc_feature (1)..(162): Homolog of NCBI NO: 4704732 NR Description: peroxiredoxin TPx2 [Arabidopsis thaliana]
  misc_feature (1)..(162): Homolog of NCBI NO: 18406870 NR Description: peroxiredoxin, putative
  misc_feature (1)..(162): Homolog of NCBI NO: 15218876 NR Description: type 2 peroxiredoxin, putative
  misc_feature (1)..(162): Homolog of NCBI NO: 4928472 NR Description: type 2 peroxiredoxin [Brassica rapa subsp.
  misc_feature (1)..(162): Homolog of NCBI NO: 15218877 NR Description: type 2 peroxiredoxin, putative
  misc_feature (1)..(162): Homolog of NCBI NO: 21593881 NR Description: type 2 peroxiredoxin, putative [Arabidopsis
MAPIAVGDVVPDGTISFFDENDQLQTVSVHSLAAGKKVILFGVPGAFTPTCSMKHVPGFIEKAEELKSKGVDDIICFSVNDPFLMKAWGKTYPENKHVKFVADGSGEYTHLLGLELDLKDKGLGIRSRRFALLLDNLKVTVANLESGGGFTVSSADDILEAL

SEQ ID NO: 27125 - protein, 110 aa, Arabidopsis thaliana
  peptide (1)..(110): Ceres Seq. ID no. 12393031
  misc_feature (1)..(108): Pfam Name: AhpC/TSA family Pfam Description: AhpC/TSA family
  misc_feature (1)..(110): Homolog of NCBI NO: 19548660 NR Description: peroxiredoxin [Populus tremula x Populus
  misc_feature (1)..(110): Homolog of NCBI NO: 18654477 NR Description: thioredoxin peroxidase [Capsicum annuum]
  misc_feature (1)..(110): Homolog of NCBI NO: 30841938 NR Description: thioredoxin peroxidase 1 [Lycopersicon esculentum]
  misc_feature (1)..(110): Homolog of NCBI NO: 21553913 NR Description: peroxiredoxin, putative [Arabidopsis thaliana]
  misc_feature (1)..(110): Homolog of NCBI NO: 4704732 NR Description: peroxiredoxin TPx2 [Arabidopsis thaliana]
  misc_feature (1)..(110): Homolog of NCBI NO: 18406870 NR Description: peroxiredoxin, putative
  misc_feature (1)..(110): Homolog of NCBI NO: 15218876 NR Description: type 2 peroxiredoxin, putative
  misc_feature (1)..(110): Homolog of NCBI NO: 4928472 NR Description: type 2 peroxiredoxin [Brassica rapa subsp.
  misc_feature (1)..(110): Homolog of NCBI NO: 15218877 NR Description: type 2 peroxiredoxin, putative
  misc_feature (1)..(110): Homolog of NCBI NO: 21593881 NR Description: type 2 peroxiredoxin, putative [Arabidopsis
MKHVPGFIEKAEELKSKGVDDIICFSVNDPFLMKAWGKTYPENKHVKFVADGSGEYTHLLGLELDLKDKGLGIRSRRFALLLDNLKVTVANLESGGGFTVSSADDILEAL

SEQ ID NO: 27126 - DNA, 2071 bp, Arabidopsis thaliana
  misc_feature (1)..(2071): Ceres Seq. ID no. 13491829
  misc_feature: MA Experiment ID: 108434 Result: Down-regulated in Transcription
  misc_feature: MA Experiment 108434 PARAMETER Experiment Name: At_Root_Tips_cDNA_P Parameter: Tissue Value: Root Tips
  misc_feature: MA Experiment ID: 108488 Result: Down-regulated in Transcription
  misc_feature: MA Experiment ID: 108572 Result: Up-regulated in Transcription
  misc_feature: MA Experiment 108572 PARAMETER Experiment Name: At_Drought_cDNA_P Parameter: Timepoint (hr) Value: 1
  misc_feature: MA Experiment 108572 PARAMETER Experiment Name: At_Drought_cDNA_P Parameter: Tissue Value: Aerial
  misc_feature: MA Experiment 108572 PARAMETER Experiment Name: At_Drought_cDNA_P Parameter: Treatment Value: Drought vs. No Drought
  misc_feature: MA Experiment ID: 108573 Result: Up-regulated in Transcription
  misc_feature: MA Experiment 108573 PARAMETER Experiment Name: At_Drought_cDNA_P Parameter: Timepoint (hr) Value: 6
  misc_feature: MA Experiment 108573 PARAMETER Experiment Name: At_Drought_cDNA_P Parameter: Tissue Value: Aerial
  misc_feature: MA Experiment 108573 PARAMETER Experiment Name: At_Drought_cDNA_P Parameter: Treatment Value: Drought vs. No Drought
  misc_feature: MA Experiment ID: 108574 Result: Up-regulated in Transcription
  misc_feature: MA Experiment 108574 PARAMETER Experiment Name: At_Wounding__cDNA_P Parameter: Timepoint (hr) Value: 1
  misc_feature: MA Experiment 108574 PARAMETER Experiment Name: At_Wounding__cDNA_P Parameter: Tissue Value: Aerial
  misc_feature: MA Experiment 108574 PARAMETER Experiment Name: At_Wounding__cDNA_P Parameter: Treatment Value: Wounding vs. No Wounding
  misc_feature: MA Experiment ID: 108579 Result: Up-regulated in Transcription
  misc_feature: MA Experiment 108579 PARAMETER Experiment Name: At_4deg_Cold_cDNA_P Parameter: Temperature (deg C) Value: 4 vs. 22
  misc_feature: MA Experiment 108579 PARAMETER Experiment Name: At_4deg_Cold_cDNA_P Parameter: Timepoint (hr) Value: 6
  misc_feature: MA Experiment 108579 PARAMETER Experiment Name: At_4deg_Cold_cDNA_P Parameter: Tissue Value: Aerial
  misc_feature: MA Experiment ID: 108585 Result: Up-regulated in Transcription
  misc_feature: MA Experiment 108585 PARAMETER Experiment Name: At_5mM_NaNP_cDNA_P Parameter: Timepoint (hr) Value: 6
  misc_feature: MA Experiment 108585 PARAMETER Experiment Name: At_5mM_NaNP_cDNA_P Parameter: Tissue Value: Aerial
  misc_feature: MA Experiment 108585 PARAMETER Experiment Name: At_5mM_NaNP_cDNA_P Parameter: Treatment Value: null
  misc_feature: MA Experiment ID: 108595 Result: Up-regulated in Transcription
  misc_feature: MA Experiment 108595 PARAMETER Experiment Name: At_Ler-pi_Ovule_cDNA_P Parameter: Plant Line Value: null
  misc_feature: MA Experiment ID: 108608 Result: Up-regulated in Transcription
  misc_feature: MA Experiment 108608 PARAMETER Experiment Name: At_100uM_ABA_cDNA_P Parameter: Timepoint (hr) Value: 1
  misc_feature: MA Experiment 108608 PARAMETER Experiment Name: At_100uM_ABA_cDNA_P Parameter: Tissue Value: Aerial
  misc_feature: MA Experiment 108608 PARAMETER Experiment Name: At_100uM_ABA_cDNA_P Parameter: Treatment Value: 100uM ABA vs. No Treatment
  misc_feature: MA Experiment ID: 108668 Result: Up-regulated in Transcription
  misc_feature: MA Experiment 108668 PARAMETER Experiment Name: At_2mM_SA_cDNA_P Parameter: Plant Line Value: WS
  misc_feature: MA Experiment 108668 PARAMETER Experiment Name: At_2mM_SA_cDNA_P Parameter: Timepoint (hr) Value: 6
  misc_feature: MA Experiment 108668 PARAMETER Experiment Name: At_2mM_SA_cDNA_P Parameter: Treatment Value: 2mM SA vs. No Treatment
  misc_feature: MA Experiment ID: 20000111 Result: Up-regulated in Transcription
  misc_feature: MA Experiment 20000111 PARAMETER Experiment Name: At_42deg_Heat_cDNA_P Parameter: Temperature (deg C) Value: 42 vs. 22
  misc_feature: MA Experiment 20000111 PARAMETER Experiment Name: At_42deg_Heat_cDNA_P Parameter: Timepoint (hr) Value: 6
  misc_feature: MA Experiment 20000111 PARAMETER Experiment Name: At_42deg_Heat_cDNA_P Parameter: Tissue Value: Aerial
  misc_feature: MA Experiment ID: 20000112 Result: Up-regulated in Transcription
  misc_feature: MA Experiment 20000112 PARAMETER Experiment Name: At_42deg_Heat_cDNA_P Parameter: Temperature (deg C) Value: 42 vs. 22
  misc_feature: MA Experiment 20000112 PARAMETER Experiment Name: At_42deg_Heat_cDNA_P Parameter: Timepoint (hr) Value: 2
  misc_feature: MA Experiment 20000112 PARAMETER Experiment Name: At_42deg_Heat_cDNA_P Parameter: Tissue Value: Aerial
  misc_feature: MA Experiment ID: 20000113 Result: Up-regulated in Transcription
  misc_feature: MA Experiment 20000113 PARAMETER Experiment Name: At_42deg_Heat_cDNA_P Parameter: Temperature (deg C) Value: 42 vs. 22
  misc_feature: MA Experiment 20000113 PARAMETER Experiment Name: At_42deg_Heat_cDNA_P Parameter: Timepoint (hr) Value: 8
  misc_feature: MA Experiment 20000113 PARAMETER Experiment Name: At_42deg_Heat_cDNA_P Parameter: Tissue Value: Aerial
  misc_feature: MA Experiment ID: 20000166 Result: Up-regulated in Transcription
  misc_feature: MA Experiment 20000166 PARAMETER Experiment Name: At_100uM_ABA_P Parameter: Age (day) Value: 14
  misc_feature: MA Experiment 20000166 PARAMETER Experiment Name: At_100uM_ABA_P Parameter: Organism Value: A. thaliana
  misc_feature: MA Experiment 20000166 PARAMETER Experiment Name: At_100uM_ABA_P Parameter: Plant Line Value: WS
  misc_feature: MA Experiment 20000166 PARAMETER Experiment Name: At_100uM_ABA_P Parameter: Timepoint (hr) Value: 1
  misc_feature: MA Experiment 20000166 PARAMETER Experiment Name: At_100uM_ABA_P Parameter: Tissue Value: Aerial
  misc_feature: MA Experiment 20000166 PARAMETER Experiment Name: At_100uM_ABA_P Parameter: Treatment Value: 100uM ABA vs. No Treatment
  misc_feature: MA Experiment ID: 20000173 Result: Up-regulated in Transcription
  misc_feature: MA Experiment 20000173 PARAMETER Experiment Name: At_42deg_Heat_P Parameter: Age (day) Value: 14
  misc_feature: MA Experiment 20000173 PARAMETER Experiment Name: At_42deg_Heat_P Parameter: Organism Value: A. thaliana
  misc_feature: MA Experiment 20000173 PARAMETER Experiment Name: At_42deg_Heat_P Parameter: Plant Line Value: WS
  misc_feature: MA Experiment 20000173 PARAMETER Experiment Name: At_42deg_Heat_P Parameter: Temperature (deg C) Value: 42 vs. 22
  misc_feature: MA Experiment 20000173 PARAMETER Experiment Name: At_42deg_Heat_P Parameter: Timepoint (hr) Value: 6
  misc_feature: MA Experiment 20000173 PARAMETER Experiment Name: At_42deg_Heat_P Parameter: Tissue Value: Aerial
  misc_feature: MA Experiment ID: 20000182 Result: Up-regulated in Transcription
  misc_feature: MA Experiment 20000182 PARAMETER Experiment Name: At_2mM_SA_P Parameter: Age (day) Value: 14
  misc_feature: MA Experiment 20000182 PARAMETER Experiment Name: At_2mM_SA_P Parameter: Organism Value: A. thaliana
  misc_feature: MA Experiment 20000182 PARAMETER Experiment Name: At_2mM_SA_P Parameter: Plant Line Value: WS
  misc_feature: MA Experiment 20000182 PARAMETER Experiment Name: At_2mM_SA_P Parameter: Timepoint (hr) Value: 6
  misc_feature: MA Experiment 20000182 PARAMETER Experiment Name: At_2mM_SA_P Parameter: Tissue Value: Aerial
  misc_feature: MA Experiment 20000182 PARAMETER Experiment Name: At_2mM_SA_P Parameter: Treatment Value: 2mM SA vs. No Treatment
  misc_feature: MA Experiment ID: 20000185 Result: Up-regulated in Transcription
  misc_feature: MA Experiment 20000185 PARAMETER Experiment Name: At_Roots__P Parameter: Age (day) Value: 7 vs. 21
  misc_feature: MA Experiment 20000185 PARAMETER Experiment Name: At_Roots__P Parameter: Organism Value: A. thaliana
  misc_feature: MA Experiment 20000185 PARAMETER Experiment Name: At_Roots__P Parameter: Tissue Value: Roots vs. Whole Plant
  misc_feature: MA Experiment ID: 20000234 Result: Down-regulated in Transcription
  misc_feature: MA Experiment 20000234 PARAMETER Experiment Name: At_Siliques_P Parameter: Age (day) Value: 21
  misc_feature: MA Experiment 20000234 PARAMETER Experiment Name: At_Siliques_P Parameter: Organism Value: A. thaliana
  misc_feature: MA Experiment 20000234 PARAMETER Experiment Name: At_Siliques_P Parameter: Plant Line Value: WS
  misc_feature: MA Experiment 20000234 PARAMETER Experiment Name: At_Siliques_P Parameter: Tissue Value: Less Than 5mm Siliques vs. Whole Plant
  misc_feature: MA Experiment ID: 20000235 Result: Down-regulated in Transcription
  misc_feature: MA Experiment 20000235 PARAMETER Experiment Name: At_Siliques_P Parameter: Age (day) Value: 21
  misc_feature: MA Experiment 20000235 PARAMETER Experiment Name: At_Siliques_P Parameter: Organism Value: A. thaliana
  misc_feature: MA Experiment 20000235 PARAMETER Experiment Name: At_Siliques_P Parameter: Plant Line Value: WS
  misc_feature: MA Experiment 20000235 PARAMETER Experiment Name: At_Siliques_P Parameter: Tissue Value: 5-10mm Siliques vs. Whole Plant
  misc_feature: MA Experiment ID: 20000437 Result: Up-regulated in Transcription
  misc_feature: MA Experiment 20000437 PARAMETER Experiment Name: At_Drought_P Parameter: Age (day) Value: 8
  misc_feature: MA Experiment 20000437 PARAMETER Experiment Name: At_Drought_P Parameter: Organism Value: A. thaliana
  misc_feature: MA Experiment 20000437 PARAMETER Experiment Name: At_Drought_P Parameter: Plant Line Value: WS
  misc_feature: MA Experiment 20000437 PARAMETER Experiment Name: At_Drought_P Parameter: Timepoint (hr) Value: 24
  misc_feature: MA Experiment 20000437 PARAMETER Experiment Name: At_Drought_P Parameter: Tissue Value: Whole Plant
  misc_feature: MA Experiment 20000437 PARAMETER Experiment Name: At_Drought_P Parameter: Treatment Value: Drought vs. No Drought
  misc_feature: MA Experiment ID: 20000438 Result: Down-regulated in Transcription
  misc_feature: MA Experiment 20000438 PARAMETER Experiment Name: At_Shoots__P Parameter: Age (day) Value: 14
  misc_feature: MA Experiment 20000438 PARAMETER Experiment Name: At_Shoots__P Parameter: Tissue Value: Shoots vs. Whole Plant
  misc_feature: MA Experiment ID: 20000445 Result: Up-regulated in Transcription
  misc_feature: MA Experiment 20000445 PARAMETER Experiment Name: At_100uM_NAA__P Parameter: Age (day) Value: 14
  misc_feature: MA Experiment 20000445 PARAMETER Experiment Name: At_100uM_NAA__P Parameter: Organism Value: A. thaliana
  misc_feature: MA Experiment 20000445 PARAMETER Experiment Name: At_100uM_NAA__P Parameter: Plant Line Value: WS
  misc_feature: MA Experiment 20000445 PARAMETER Experiment Name: At_100uM_NAA__P Parameter: Timepoint (hr) Value: 6
  misc_feature: MA Experiment 20000445 PARAMETER Experiment Name: At_100uM_NAA__P Parameter: Tissue Value: Aerial
  misc_feature: MA Experiment 20000445 PARAMETER Experiment Name: At_100uM_NAA__P Parameter: Treatment Value: 100uM NAA vs. No Treatment
  misc_feature: MA Experiment ID: 20001905 Result: Up-regulated in Transcription
  misc_feature: MA Experiment 20001905 PARAMETER Experiment Name: At_Drought_Reproduction_P Parameter: Age (day) Value: 40
  misc_feature: MA Experiment 20001905 PARAMETER Experiment Name: At_Drought_Reproduction_P Parameter: Organism Value: A. thaliana
  misc_feature: MA Experiment 20001905 PARAMETER Experiment Name: At_Drought_Reproduction_P Parameter: Plant Line Value: WS
  misc_feature: MA Experiment 20001905 PARAMETER Experiment Name: At_Drought_Reproduction_P Parameter: Timepoint (day) Value: 10
  misc_feature: MA Experiment 20001905 PARAMETER Experiment Name: At_Drought_Reproduction_P Parameter: Tissue Value: Rosettes
  misc_feature: MA Experiment 20001905 PARAMETER Experiment Name: At_Drought_Reproduction_P Parameter: Treatment Value: Drought vs. No Drought
gcctcttcttcttcttcttcttcttcatcttcttctatatattggtgtttcatttgttctgctttaaaagtacacaaagattcatcttttttcggtcctctgattgggcaaaagactagctcggtcgtgttttgaacaagagatacatgttttgaaaaattcctcgcaaaagaagagaaagaaagactcaaacttttgtttgaatttgataccattttttatatatataccaaaagtccaagactggtttcatttttgggtttggtctgaaacctctcttcgtgttgtttgttcatggtatgtcttaattagggtaaaaaaatacttgattgttttctctcaatcatcgtgcatagagtacgcaataaaccggttaaatccaccgctactgcttccgtcaagcatttaatcaaacagagaggcggcgacggagctacggcggcttccaagtcggcgaatgattataataataatgatagtctcttgacggatatgcaggaaccaagcatcgatacagataaactcagctacgagattttctctattcttgagagcaaatttcttttcgggtacgacgactcgaaacccgaacccgcgaattcggttgttgctgggtcgattaagaaccagagaggtaaaatctgtattctgagtatcgatggaggtggaatgagagggatcttacccggtaaggctttggcttatctagaacacgctctgaaatctaaatcgggtgacccgaatgcccgaatcgccgattactttgacgtagccgccgggtccggtataggtgggatttacacagccatgttgttcgggtcaagagacggtaaccgccccatcttcaaagcagatgacacgtggcagttcttaacgagaaacgccaagggtctttacggaggagcaggaatcttgaaacgggtcttgagaaccgggtcgggttgttgttccgggacggctaagttaaagaaagtgatgaaagagtctttctcggagctaaccttaaaggacacgcttaaaccggtgcttataccttgctacgacctcaaaagctctggcccgtttctgttctcacgggccgatgcgcttgagacggacggctatgattttaggctctcggaggtttgtagagcgacttgggctgagccgggtgtgtttgagcccgtggagatgaagtcggttgatgggcagaccaagtgtgtggctgttggtggaggattagccatgagcaatcccacagcggctgcaatcacgcatgtcctgcacaacaagcaggagtttccgtttgtgcgaggtgttgaggatttgcttgtgttgtctcttggtatgggtcagttgcttgatgttagctatgagtatgatcggattatcaagtggaaggctaagcattgggctcgccccgcagctcttatttctaatgacggtgctgctgacactgtcgatcaagctgtggccatggcttttggtcactgccgcagtagtaactatgtccggattcaggcgaatgggtcgaacttaggaccttggagtcctaacatggacacagaccctagtgggagcaatgtgaatatgctgatgggagtagcagaggagatgcttaaacaaaagaatgttgaatctgttttgtttggaggtaaaagaatcgatgaacagagcaacttcgagaagcttgactggttagctggggaacttgttctcgagcatcaaaggagaaatagcagaatcgctccaaccgtagcgttcaagcaatccgtgcatagagcagatcaaaagacaagtgataaagatatcggtgtgaccgcaagagaacgatgaaataagaaatggtttgcttagatgatttttttaagataaggtttttatttctttcttcttaggttatgatttgttgtatagatttgtgtttttgagattgagtttctgagacatgatgagaaaaggggaaacacctatcatcttgcaaagagggctcaagctccttaatccatgctgcccaaaaaaaaaaaaaaaaatatgattcctgtaatttcggtttgtctttgttttcctatgtagtcatcatgatttcttc

SEQ ID NO: 27127 - protein, 440 aa, Arabidopsis thaliana
  peptide (1)..(440): Ceres Seq. ID no. 13491830
  misc_feature (53)..(253): Pfam Name: Patatin-like phospholipase Pfam Description: Patatin-like phospholipase
  misc_feature (6)..(343): Homolog of NCBI NO: 18412659 NR Description: patatin-related [Arabidopsis thaliana]
  misc_feature (6)..(343): Homolog of NCBI NO: 11357489 NR Description: hypothetical protein F16M2.50 - Arabidopsis
  misc_feature (9)..(416): Homolog of NCBI NO: 34899642 NR Description: contains ESTs
  misc_feature (6)..(432): Homolog of NCBI NO: 34897124 NR Description: putative lipid acyl hydrolase [Oryza sativa]
  misc_feature (9)..(31): Homolog of NCBI NO: 7486230 NR Description: hypothetical protein F27B13.40 - Arabidopsis
  misc_feature (40)..(440): Homolog of NCBI NO: 7486230 NR Description: hypothetical protein F27B13.40 - Arabidopsis
  misc_feature (9)..(31): Homolog of NCBI NO: 30688454 NR Description: patatin-related [Arabidopsis thaliana]
  misc_feature (40)..(440): Homolog of NCBI NO: 30688454 NR Description: patatin-related [Arabidopsis thaliana]
  misc_feature (1)..(433): Homolog of NCBI NO: 15225054 NR Description: patatin family [Arabidopsis thaliana]
  misc_feature (1)..(440): Homolog of NCBI NO: 15233136 NR Description: patatin-related [Arabidopsis thaliana]
MQEPSIDTDKLSYEIFSILESKFLFGYDDSKPEPANSVVAGSIKNQRGKICILSIDGGGMRGILPGKALAYLEHALKSKSGDPNARIADYFDVAAGSGIGGIYTAMLFGSRDGNRPIFKADDTWQFLTRNAKGLYGGAGILKRVLRTGSGCCSGTAKLKKVMKESFSELTLKDTLKPVLIPCYDLKSSGPFLFSRADALETDGYDFRLSEVCRATWAEPGVFEPVEMKSVDGQTKCVAVGGGLAMSNPTAAAITHVLHNKQEFPFVRGVEDLLVLSLGMGQLLDVSYEYDRIIKWKAKHWARPAALISNDGAADTVDQAVAMAFGHCRSSNYVRIQANGSNLGPWSPNMDTDPSGSNVNMLMGVAEEMLKQKNVESVLFGGKRIDEQSNFEKLDWLAGELVLEHQRRNSRIAPTVAFKQSVHRADQKTSDKDIGVTARER

SEQ ID NO: 27128 - protein, 381 aa, Arabidopsis thaliana
  peptide (1)..(381): Ceres Seq. ID no. 13491831
  misc_feature (1)..(194): Pfam Name: Patatin-like phospholipase Pfam Description: Patatin-like phospholipase
  misc_feature (304)..(342): Homolog of NCBI NO: 18412659 NR Description: patatin-related [Arabidopsis thaliana]
  misc_feature (304)..(342): Homolog of NCBI NO: 11357489 NR Description: hypothetical protein F16M2.50 - Arabidopsis
  misc_feature (1)..(284): Homolog of NCBI NO: 18412659 NR Description: patatin-related [Arabidopsis thaliana]
  misc_feature (1)..(284): Homolog of NCBI NO: 11357489 NR Description: hypothetical protein F16M2.50 - Arabidopsis
  misc_feature (1)..(357): Homolog of NCBI NO: 34899642 NR Description: contains ESTs
  misc_feature (1)..(373): Homolog of NCBI NO: 34897124 NR Description: putative lipid acyl hydrolase [Oryza sativa]
  misc_feature (1)..(381): Homolog of NCBI NO: 7486230 NR Description: hypothetical protein F27B13.40 - Arabidopsis
  misc_feature (1)..(381): Homolog of NCBI NO: 30688454 NR Description: patatin-related [Arabidopsis thaliana]
  misc_feature (1)..(374): Homolog of NCBI NO: 15225054 NR Description: patatin family [Arabidopsis thaliana]
  misc_feature (1)..(381): Homolog of NCBI NO: 15233136 NR Description: patatin-related [Arabidopsis thaliana]
MRGILPGKALAYLEHALKSKSGDPNARIADYFDVAAGSGIGGIYTAMLFGSRDGNRPIFKADDTWQFLTRNAKGLYGGAGILKRVLRTGSGCCSGTAKLKKVMKESFSELTLKDTLKPVLIPCYDLKSSGPFLFSRADALETDGYDFRLSEVCRATWAEPGVFEPVEMKSVDGQTKCVAVGGGLAMSNPTAAAITHVLHNKQEFPFVRGVEDLLVLSLGMGQLLDVSYEYDRIIKWKAKHWARPAALISNDGAADTVDQAVAMAFGHCRSSNYVRIQANGSNLGPWSPNMDTDPSGSNVNMLMGVAEEMLKQKNVESVLFGGKRIDEQSNFEKLDWLAGELVLEHQRRNSRIAPTVAFKQSVHRADQKTSDKDIGVTARER

SEQ ID NO: 27129 - protein, 335 aa, Arabidopsis thaliana
  peptide (1)..(335): Ceres Seq. ID no. 13491832
  misc_feature (1)..(148): Pfam Name: Patatin-like phospholipase Pfam Description: Patatin-like phospholipase
  misc_feature (258)..(296): Homolog of NCBI NO: 18412659 NR Description: patatin-related [Arabidopsis thaliana]
  misc_feature (258)..(296): Homolog of NCBI NO: 11357489 NR Description: hypothetical protein F16M2.50 - Arabidopsis
  misc_feature (1)..(238): Homolog of NCBI NO: 18412659 NR Description: patatin-related [Arabidopsis thaliana]
  misc_feature (1)..(238): Homolog of NCBI NO: 11357489 NR Description: hypothetical protein F16M2.50 - Arabidopsis
  misc_feature (1)..(311): Homolog of NCBI NO: 34899642 NR Description: contains ESTs
  misc_feature (1)..(327): Homolog of NCBI NO: 34897124 NR Description: putative lipid acyl hydrolase [Oryza sativa]
  misc_feature (1)..(335): Homolog of NCBI NO: 7486230 NR Description: hypothetical protein F27B13.40 - Arabidopsis
  misc_feature (1)..(335): Homolog of NCBI NO: 30688454 NR Description: patatin-related [Arabidopsis thaliana]
  misc_feature (1)..(328): Homolog of NCBI NO: 15225054 NR Description: patatin family [Arabidopsis thaliana]
  misc_feature (1)..(335): Homolog of NCBI NO: 15233136 NR Description: patatin-related [Arabidopsis thaliana]
MLFGSRDGNRPIFKADDTWQFLTRNAKGLYGGAGILKRVLRTGSGCCSGTAKLKKVMKESFSELTLKDTLKPVLIPCYDLKSSGPFLFSRADALETDGYDFRLSEVCRATWAEPGVFEPVEMKSVDGQTKCVAVGGGLAMSNPTAAAITHVLHNKQEFPFVRGVEDLLVLSLGMGQLLDVSYEYDRIIKWKAKHWARPAALISNDGAADTVDQAVAMAFGHCRSSNYVRIQANGSNLGPWSPNMDTDPSGSNVNMLMGVAEEMLKQKNVESVLFGGKRIDEQSNFEKLDWLAGELVLEHQRRNSRIAPTVAFKQSVHRADQKTSDKDIGVTARER

SEQ ID NO: 27130 - DNA, 1361 bp, Arabidopsis thaliana
  misc_feature (1)..(1361): Ceres Seq. ID no. 13489671
  misc_feature: MA Experiment ID: 108462 Result: Down-regulated in Transcription
  misc_feature: MA Experiment 108462 PARAMETER Experiment Name: At_Germinating_Seeds_cDNA_P Parameter: Age (day) Value: 2 vs. 0
  misc_feature: MA Experiment 108462 PARAMETER Experiment Name: At_Germinating_Seeds_cDNA_P Parameter: Tissue Value: Germinating Seeds
  misc_feature: MA Experiment ID: 108463 Result: Down-regulated in Transcription
  misc_feature: MA Experiment 108463 PARAMETER Experiment Name: At_Germinating_Seeds_cDNA_P Parameter: Age (day) Value: 3 vs. 0
  misc_feature: MA Experiment 108463 PARAMETER Experiment Name: At_Germinating_Seeds_cDNA_P Parameter: Tissue Value: Germinating Seeds
  misc_feature: MA Experiment ID: 108464 Result: Down-regulated in Transcription
  misc_feature: MA Experiment 108464 PARAMETER Experiment Name: At_Germinating_Seeds_cDNA_P Parameter: Age (day) Value: 4 vs. 0
  misc_feature: MA Experiment 108464 PARAMETER Experiment Name: At_Germinating_Seeds_cDNA_P Parameter: Tissue Value: Germinating Seeds
  misc_feature: MA Experiment ID: 108488 Result: Down-regulated in Transcription
  misc_feature: MA Experiment ID: 108573 Result: Up-regulated in Transcription
  misc_feature: MA Experiment 108573 PARAMETER Experiment Name: At_Drought_cDNA_P Parameter: Timepoint (hr) Value: 6
  misc_feature: MA Experiment 108573 PARAMETER Experiment Name: At_Drought_cDNA_P Parameter: Tissue Value: Aerial
  misc_feature: MA Experiment 108573 PARAMETER Experiment Name: At_Drought_cDNA_P Parameter: Treatment Value: Drought vs. No Drought
  misc_feature: MA Experiment ID: 108595 Result: Down-regulated in Transcription
  misc_feature: MA Experiment 108595 PARAMETER Experiment Name: At_Ler-pi_Ovule_cDNA_P Parameter: Plant Line Value: null
  misc_feature: MA Experiment ID: 20000111 Result: Down-regulated in Transcription
  misc_feature: MA Experiment 20000111 PARAMETER Experiment Name: At_42deg_Heat_cDNA_P Parameter: Temperature (deg C) Value: 42 vs. 22
  misc_feature: MA Experiment 20000111 PARAMETER Experiment Name: At_42deg_Heat_cDNA_P Parameter: Timepoint (hr) Value: 6
  misc_feature: MA Experiment 20000111 PARAMETER Experiment Name: At_42deg_Heat_cDNA_P Parameter: Tissue Value: Aerial
  misc_feature: MA Experiment ID: 20000173 Result: Down-regulated in Transcription
  misc_feature: MA Experiment 20000173 PARAMETER Experiment Name: At_42deg_Heat_P Parameter: Age (day) Value: 14
  misc_feature: MA Experiment 20000173 PARAMETER Experiment Name: At_42deg_Heat_P Parameter: Organism Value: A. thaliana
  misc_feature: MA Experiment 20000173 PARAMETER Experiment Name: At_42deg_Heat_P Parameter: Plant Line Value: WS
  misc_feature: MA Experiment 20000173 PARAMETER Experiment Name: At_42deg_Heat_P Parameter: Temperature (deg C) Value: 42 vs. 22
  misc_feature: MA Experiment 20000173 PARAMETER Experiment Name: At_42deg_Heat_P Parameter: Timepoint (hr) Value: 6
  misc_feature: MA Experiment 20000173 PARAMETER Experiment Name: At_42deg_Heat_P Parameter: Tissue Value: Aerial
  misc_feature: MA Experiment ID: 20000184 Result: Down-regulated in Transcription
  misc_feature: MA Experiment 20000184 PARAMETER Experiment Name: At_Shoots__P Parameter: Age (day) Value: 7
  misc_feature: MA Experiment 20000184 PARAMETER Experiment Name: At_Shoots__P Parameter: Tissue Value: Shoots vs. Whole Plant
  misc_feature: MA Experiment ID: 20000794 Result: Up-regulated in Transcription
  misc_feature: MA Experiment 20000794 PARAMETER Experiment Name: At_Petals_P Parameter: Age (day) Value: 23-25 days
  misc_feature: MA Experiment 20000794 PARAMETER Experiment Name: At_Petals_P Parameter: Plant Line Value: WS
  misc_feature: MA Experiment 20000794 PARAMETER Experiment Name: At_Petals_P Parameter: Tissue Value: Petals vs. Whole plant
gaacttctgaagcgaaaaaaagagagaattaaagtcattcattatttggggaatggagaagaagctcctttcctacagacgccatcattaacaacatcctcttaagcttctgcgattctctccgtttgtcggaagatttcacgacgattcttcaatccttatccgaaccggagaaatcatgtcggacgctttgatcaatggattggctggagctggtggtgggatcattgctcagcttctcacttatcctcttcaaactgtaaatacgcgccaacagacggagcgggatctgaagagggagaagaggaaacttggaactatcgaacacatgtgtcaggttgtcaaacaagaaggatgggagaggttatatggtggattggcgccgtctcttgctggaacggctgcatcacagggtgtgtactactacttctaccaagtgtttcggaatcgagctgaagccacagctcttgcacggaagaagaaaggtttgggtgacggatcagttgggatgtttgcttcacttttagtggctgcctttgccggatcggttaatgttcttatgacgaatccgatttgggtgattgttacgcgtatgcagacccacagaaaaatgacaaaagatcaaacagcggcccccgagtcaccttcttctaatgcagaagctctggttgctgttgagccgcgtccatatgggacctttaatacgattcgagaggtttacgatgaagctggaataactggcttctggaaaggtgtaattccaacattgatcatggtaagtaatccgtcaatgcaatttatgttgtacgagacaatgctaaccaagctgaagaaaaagcgtgccttgaagggtagcaacaacgttaccgctttggagacatttcttctcggagctgtggcgaaactcggagctactgtcacaacttaccctctcttggttgtaaagtcgcgacttcaagccaaacaggtcacaacaggggacaaaagacaacaatacaaaggaacattggacgcgattctgaaaatgattcgatatgaagggctttacgggttttataaagggatgagcacaaagattgtgcagagcgttttagctgctgcggttctgttcatgatcaaggaagagcttgtcaagggagctaagctgttgctctcaaacgctacctctagctaagtcaagtccaagccttcttgaatgaacgctagtagttagaaataaataaaaatagattaaatttccaatagttttcttgattaattattacactattgggattgttgttcatttcctgatgattgcaattgattattgtaatttctgcaagattctttagtaatgaaatctgaataaagtttggcag

SEQ ID NO: 27131 - protein, 331 aa, Arabidopsis thaliana
  peptide (1)..(331): Ceres Seq. ID no. 13489672
  misc_feature (115)..(317): Homolog of NCBI NO: 21314739 NR Description: mitochondrial folate transporter/carrier [Homo
  misc_feature (115)..(317): Homolog of NCBI NO: 14042724 NR Description: unnamed protein product [Homo sapiens]
  misc_feature (34)..(317): Homolog of NCBI NO: 40739628 NR Description: hypothetical protein AN4280.2 [Aspergillus
  misc_feature (2)..(317): Homolog of NCBI NO: 38105196 NR Description: hypothetical protein MG03247.4 [Magnaporthe
  misc_feature (2)..(317): Homolog of NCBI NO: 32404402 NR Description: hypothetical protein [Neurospora crassa]
  misc_feature (3)..(140): Homolog of NCBI NO: 28828484 NR Description: hypothetical protein [Dictyostelium discoideum]
  misc_feature (172)..(325): Homolog of NCBI NO: 28828484 NR Description: hypothetical protein [Dictyostelium discoideum]
  misc_feature (1)..(331): Homolog of NCBI NO: 34901996 NR Description: unknown protein [Oryza sativa (japonica
  misc_feature (1)..(330): Homolog of NCBI NO: 21593883 NR Description: putative peroxisomal membrane carrier protein
  misc_feature (1)..(331): Homolog of NCBI NO: 15225602 NR Description: peroxisomal membrane protein (PMP36) [Arabidopsis
MSDALINGLAGAGGGIIAQLLTYPLQTVNTRQQTERDLKREKRKLGTIEHMCQVVKQEGWERLYGGLAPSLAGTAASQGVYYYFYQVFRNRAEATALARKKKGLGDGSVGMFASLLVAAFAGSVNVLMTNPIWVIVTRMQTHRKMTKDQTAAPESPSSNAEALVAVEPRPYGTFNTIREVYDEAGITGFWKGVIPTLIMVSNPSMQFMLYETMLTKLKKKRALKGSNNVTALETFLLGAVAKLGATVTTYPLLVVKSRLQAKQVTTGDKRQQYKGTLDAILKMIRYEGLYGFYKGMSTKIVQSVLAAAVLFMIKEELVKGAKLLLSNATSS

SEQ ID NO: 27132 - protein, 281 aa, Arabidopsis thaliana
  peptide (1)..(281): Ceres Seq. ID no. 13489673
  misc_feature (65)..(267): Homolog of NCBI NO: 14042724 NR Description: unnamed protein product [Homo sapiens]
  misc_feature (1)..(267): Homolog of NCBI NO: 40739628 NR Description: hypothetical protein AN4280.2 [Aspergillus
  misc_feature (1)..(267): Homolog of NCBI NO: 38105196 NR Description: hypothetical protein MG03247.4 [Magnaporthe
  misc_feature (1)..(267): Homolog of NCBI NO: 32404402 NR Description: hypothetical protein [Neurospora crassa]
  misc_feature (1)..(90): Homolog of NCBI NO: 28828484 NR Description: hypothetical protein [Dictyostelium discoideum]
  misc_feature (122)..(275): Homolog of NCBI NO: 28828484 NR Description: hypothetical protein [Dictyostelium discoideum]
  misc_feature (1)..(281): Homolog of NCBI NO: 34901996 NR Description: unknown protein [Oryza sativa (japonica
  misc_feature (1)..(280): Homolog of NCBI NO: 21593883 NR Description: putative peroxisomal membrane carrier protein
  misc_feature (1)..(281): Homolog of NCBI NO: 15225602 NR Description: peroxisomal membrane protein (PMP36) [Arabidopsis
  misc_feature (65)..(267): Homolog of NCBI NO: 21314739 NR Description: mitochondrial folate transporter/carrier [Homo
MCQVVKQEGWERLYGGLAPSLAGTAASQGVYYYFYQVFRNRAEATALARKKKGLGDGSVGMFASLLVAAFAGSVNVLMTNPIWVIVTRMQTHRKMTKDQTAAPESPSSNAEALVAVEPRPYGTFNTIREVYDEAGITGFWKGVIPTLIMVSNPSMQFMLYETMLTKLKKKRALKGSNNVTALETFLLGAVAKLGATVTTYPLLVVKSRLQAKQVTTGDKRQQYKGTLDAILKMIRYEGLYGFYKGMSTKIVQSVLAAAVLFMIKEELVKGAKLLLSNATSS

SEQ ID NO: 27133 - protein, 221 aa, Arabidopsis thaliana
  peptide (1)..(221): Ceres Seq. ID no. 13489674
  misc_feature (5)..(207): Homolog of NCBI NO: 21314739 NR Description: mitochondrial folate transporter/carrier [Homo
  misc_feature (5)..(207): Homolog of NCBI NO: 14042724 NR Description: unnamed protein product [Homo sapiens]
  misc_feature (1)..(207): Homolog of NCBI NO: 40739628 NR Description: hypothetical protein AN4280.2 [Aspergillus
  misc_feature (1)..(207): Homolog of NCBI NO: 38105196 NR Description: hypothetical protein MG03247.4 [Magnaporthe
  misc_feature (1)..(207): Homolog of NCBI NO: 32404402 NR Description: hypothetical protein [Neurospora crassa]
  misc_feature (1)..(30): Homolog of NCBI NO: 28828484 NR Description: hypothetical protein [Dictyostelium discoideum]
  misc_feature (62)..(215): Homolog of NCBI NO: 28828484 NR Description: hypothetical protein [Dictyostelium discoideum]
  misc_feature (1)..(221): Homolog of NCBI NO: 34901996 NR Description: unknown protein [Oryza sativa (japonica
  misc_feature (1)..(220): Homolog of NCBI NO: 21593883 NR Description: putative peroxisomal membrane carrier protein
  misc_feature (1)..(221): Homolog of NCBI NO: 15225602 NR Description: peroxisomal membrane protein (PMP36) [Arabidopsis
MFASLLVAAFAGSVNVLMTNPIWVIVTRMQTHRKMTKDQTAAPESPSSNAEALVAVEPRPYGTFNTIREVYDEAGITGFWKGVIPTLIMVSNPSMQFMLYETMLTKLKKKRALKGSNNVTALETFLLGAVAKLGATVTTYPLLVVKSRLQAKQVTTGDKRQQYKGTLDAILKMIRYEGLYGFYKGMSTKIVQSVLAAAVLFMIKEELVKGAKLLLSNATSS

SEQ ID NO: 27134 - DNA, 1311 bp, Arabidopsis thaliana
  misc_feature (1)..(1311): Ceres Seq. ID no. 12393125
  misc_feature: MA Experiment ID: 108488 Result: Down-regulated in Transcription
  misc_feature: MA Experiment ID: 108501 Result: Up-regulated in Transcription
  misc_feature: MA Experiment 108501 PARAMETER Experiment Name: At_ap2_floral_buds_cDNA_P Parameter: Plant Line Value: ap2 (Ler.)
  misc_feature: MA Experiment 108501 PARAMETER Experiment Name: At_ap2_floral_buds_cDNA_P Parameter: Tissue Value: Closed Flower
  misc_feature: MA Experiment ID: 20000173 Result: Down-regulated in Transcription
  misc_feature: MA Experiment 20000173 PARAMETER Experiment Name: At_42deg_Heat_P Parameter: Age (day) Value: 14
  misc_feature: MA Experiment 20000173 PARAMETER Experiment Name: At_42deg_Heat_P Parameter: Organism Value: A. thaliana
  misc_feature: MA Experiment 20000173 PARAMETER Experiment Name: At_42deg_Heat_P Parameter: Plant Line Value: WS
  misc_feature: MA Experiment 20000173 PARAMETER Experiment Name: At_42deg_Heat_P Parameter: Temperature (deg C) Value: 42 vs. 22
  misc_feature: MA Experiment 20000173 PARAMETER Experiment Name: At_42deg_Heat_P Parameter: Timepoint (hr) Value: 6
  misc_feature: MA Experiment 20000173 PARAMETER Experiment Name: At_42deg_Heat_P Parameter: Tissue Value: Aerial
  misc_feature: MA Experiment ID: 20000227 Result: Up-regulated in Transcription
  misc_feature: MA Experiment 20000227 PARAMETER Experiment Name: At_Root-Tips-vs-Tops_P Parameter: Tissue Value: Root Tips vs. Root Tops
  misc_feature: MA Experiment ID: 20000234 Result: Up-regulated in Transcription
  misc_feature: MA Experiment 20000234 PARAMETER Experiment Name: At_Siliques_P Parameter: Age (day) Value: 21
  misc_feature: MA Experiment 20000234 PARAMETER Experiment Name: At_Siliques_P Parameter: Organism Value: A. thaliana
  misc_feature: MA Experiment 20000234 PARAMETER Experiment Name: At_Siliques_P Parameter: Plant Line Value: WS
  misc_feature: MA Experiment 20000234 PARAMETER Experiment Name: At_Siliques_P Parameter: Tissue Value: Less Than 5mm Siliques vs. Whole Plant
  misc_feature: MA Experiment ID: 20000235 Result: Up-regulated in Transcription
  misc_feature: MA Experiment 20000235 PARAMETER Experiment Name: At_Siliques_P Parameter: Age (day) Value: 21
  misc_feature: MA Experiment 20000235 PARAMETER Experiment Name: At_Siliques_P Parameter: Organism Value: A. thaliana
  misc_feature: MA Experiment 20000235 PARAMETER Experiment Name: At_Siliques_P Parameter: Plant Line Value: WS
  misc_feature: MA Experiment 20000235 PARAMETER Experiment Name: At_Siliques_P Parameter: Tissue Value: 5-10mm Siliques vs. Whole Plant
  misc_feature: MA Experiment ID: 20000264 Result: Up-regulated in Transcription
  misc_feature: MA Experiment 20000264 PARAMETER Experiment Name: At_Open_Flower_P Parameter: Age (day) Value: 21
  misc_feature: MA Experiment 20000264 PARAMETER Experiment Name: At_Open_Flower_P Parameter: Plant Line Value: WS
  misc_feature: MA Experiment 20000264 PARAMETER Experiment Name: At_Open_Flower_P Parameter: Tissue Value: Open Flower vs. Whole Plant
  misc_feature: MA Experiment ID: 20000265 Result: Up-regulated in Transcription
  misc_feature: MA Experiment 20000265 PARAMETER Experiment Name: At_Open_Flower_P Parameter: Age (day) Value: 21
  misc_feature: MA Experiment 20000265 PARAMETER Experiment Name: At_Open_Flower_P Parameter: Plant Line Value: WS
  misc_feature: MA Experiment 20000265 PARAMETER Experiment Name: At_Open_Flower_P Parameter: Tissue Value: Closed Flower vs. Whole Plant
  misc_feature: MA Experiment ID: 20000286 Result: Up-regulated in Transcription
  misc_feature: MA Experiment 20000286 PARAMETER Experiment Name: At_Open_Flower_P Parameter: Age (day) Value: 21
  misc_feature: MA Experiment 20000286 PARAMETER Experiment Name: At_Open_Flower_P Parameter: Plant Line Value: WS
  misc_feature: MA Experiment 20000286 PARAMETER Experiment Name: At_Open_Flower_P Parameter: Tissue Value: Half Open vs. Whole Plant
  misc_feature: MA Experiment ID: 20000436 Result: Up-regulated in Transcription
  misc_feature: MA Experiment 20000436 PARAMETER Experiment Name: At_Drought_P Parameter: Age (day) Value: 7
  misc_feature: MA Experiment 20000436 PARAMETER Experiment Name: At_Drought_P Parameter: Organism Value: A. thaliana
  misc_feature: MA Experiment 20000436 PARAMETER Experiment Name: At_Drought_P Parameter: Plant Line Value: WS
  misc_feature: MA Experiment 20000436 PARAMETER Experiment Name: At_Drought_P Parameter: Timepoint (hr) Value: 12
  misc_feature: MA Experiment 20000436 PARAMETER Experiment Name: At_Drought_P Parameter: Tissue Value: Whole Plant
  misc_feature: MA Experiment 20000436 PARAMETER Experiment Name: At_Drought_P Parameter: Treatment Value: Drought vs. No Drought
  misc_feature: MA Experiment ID: 20000437 Result: Up-regulated in Transcription
  misc_feature: MA Experiment 20000437 PARAMETER Experiment Name: At_Drought_P Parameter: Age (day) Value: 8
  misc_feature: MA Experiment 20000437 PARAMETER Experiment Name: At_Drought_P Parameter: Organism Value: A. thaliana
  misc_feature: MA Experiment 20000437 PARAMETER Experiment Name: At_Drought_P Parameter: Plant Line Value: WS
  misc_feature: MA Experiment 20000437 PARAMETER Experiment Name: At_Drought_P Parameter: Timepoint (hr) Value: 24
  misc_feature: MA Experiment 20000437 PARAMETER Experiment Name: At_Drought_P Parameter: Tissue Value: Whole Plant
  misc_feature: MA Experiment 20000437 PARAMETER Experiment Name: At_Drought_P Parameter: Treatment Value: Drought vs. No Drought
  misc_feature: MA Experiment ID: 20000453 Result: Up-regulated in Transcription
  misc_feature: MA Experiment 20000453 PARAMETER Experiment Name: At_100uM_ABA_P Parameter: Age (day) Value: 15
  misc_feature: MA Experiment 20000453 PARAMETER Experiment Name: At_100uM_ABA_P Parameter: Organism Value: A. thaliana
  misc_feature: MA Experiment 20000453 PARAMETER Experiment Name: At_100uM_ABA_P Parameter: Plant Line Value: WS
  misc_feature: MA Experiment 20000453 PARAMETER Experiment Name: At_100uM_ABA_P Parameter: Timepoint (hr) Value: 24
  misc_feature: MA Experiment 20000453 PARAMETER Experiment Name: At_100uM_ABA_P Parameter: Tissue Value: Aerial
  misc_feature: MA Experiment 20000453 PARAMETER Experiment Name: At_100uM_ABA_P Parameter: Treatment Value: 100uM ABA vs. No Treatment
  misc_feature: MA Experiment ID: 20000794 Result: Up-regulated in Transcription
  misc_feature: MA Experiment 20000794 PARAMETER Experiment Name: At_Petals_P Parameter: Age (day) Value: 23-25 days
  misc_feature: MA Experiment 20000794 PARAMETER Experiment Name: At_Petals_P Parameter: Plant Line Value: WS
  misc_feature: MA Experiment 20000794 PARAMETER Experiment Name: At_Petals_P Parameter: Tissue Value: Petals vs. Whole plant
  misc_feature: MA Experiment ID: 20001559 Result: Up-regulated in Transcription
  misc_feature: MA Experiment 20001559 PARAMETER Experiment Name: At_Drought_Soil_Dry_P Parameter: Age (day) Value: 28
  misc_feature: MA Experiment 20001559 PARAMETER Experiment Name: At_Drought_Soil_Dry_P Parameter: Organism Value: A. thaliana
  misc_feature: MA Experiment 20001559 PARAMETER Experiment Name: At_Drought_Soil_Dry_P Parameter: Plant Line Value: WS
  misc_feature: MA Experiment 20001559 PARAMETER Experiment Name: At_Drought_Soil_Dry_P Parameter: Post Timepoint (hr) Value: 29
  misc_feature: MA Experiment 20001559 PARAMETER Experiment Name: At_Drought_Soil_Dry_P Parameter: Post-Treatment Value: Re-Water vs. No Drought
  misc_feature: MA Experiment 20001559 PARAMETER Experiment Name: At_Drought_Soil_Dry_P Parameter: Timepoint (day) Value: 14
  misc_feature: MA Experiment 20001559 PARAMETER Experiment Name: At_Drought_Soil_Dry_P Parameter: Treatment Value: Drought vs. No Drought
  misc_feature: MA Experiment ID: 20001560 Result: Up-regulated in Transcription
  misc_feature: MA Experiment 20001560 PARAMETER Experiment Name: At_Drought_Soil_Dry_P Parameter: Age (day) Value: 28
  misc_feature: MA Experiment 20001560 PARAMETER Experiment Name: At_Drought_Soil_Dry_P Parameter: Organism Value: A. thaliana
  misc_feature: MA Experiment 20001560 PARAMETER Experiment Name: At_Drought_Soil_Dry_P Parameter: Plant Line Value: WS
  misc_feature: MA Experiment 20001560 PARAMETER Experiment Name: At_Drought_Soil_Dry_P Parameter: Post Timepoint (hr) Value: None
  misc_feature: MA Experiment 20001560 PARAMETER Experiment Name: At_Drought_Soil_Dry_P Parameter: Post-Treatment Value: None
  misc_feature: MA Experiment 20001560 PARAMETER Experiment Name: At_Drought_Soil_Dry_P Parameter: Timepoint (day) Value: 14
  misc_feature: MA Experiment 20001560 PARAMETER Experiment Name: At_Drought_Soil_Dry_P Parameter: Treatment Value: Drought vs. No Drought
  misc_feature: MA Experiment ID: 20001904 Result: Up-regulated in Transcription
  misc_feature: MA Experiment 20001904 PARAMETER Experiment Name: At_Drought_Reproduction_P Parameter: Age (day) Value: 37
  misc_feature: MA Experiment 20001904 PARAMETER Experiment Name: At_Drought_Reproduction_P Parameter: Organism Value: A. thaliana
  misc_feature: MA Experiment 20001904 PARAMETER Experiment Name: At_Drought_Reproduction_P Parameter: Plant Line Value: WS
  misc_feature: MA Experiment 20001904 PARAMETER Experiment Name: At_Drought_Reproduction_P Parameter: Timepoint (day) Value: 7
  misc_feature: MA Experiment 20001904 PARAMETER Experiment Name: At_Drought_Reproduction_P Parameter: Tissue Value: Rosettes
  misc_feature: MA Experiment 20001904 PARAMETER Experiment Name: At_Drought_Reproduction_P Parameter: Treatment Value: Drought vs. No Drought
  misc_feature: MA Experiment ID: 20001905 Result: Up-regulated in Transcription
  misc_feature: MA Experiment 20001905 PARAMETER Experiment Name: At_Drought_Reproduction_P Parameter: Age (day) Value: 40
  misc_feature: MA Experiment 20001905 PARAMETER Experiment Name: At_Drought_Reproduction_P Parameter: Organism Value: A. thaliana
  misc_feature: MA Experiment 20001905 PARAMETER Experiment Name: At_Drought_Reproduction_P Parameter: Plant Line Value: WS
  misc_feature: MA Experiment 20001905 PARAMETER Experiment Name: At_Drought_Reproduction_P Parameter: Timepoint (day) Value: 10
  misc_feature: MA Experiment 20001905 PARAMETER Experiment Name: At_Drought_Reproduction_P Parameter: Tissue Value: Rosettes
  misc_feature: MA Experiment 20001905 PARAMETER Experiment Name: At_Drought_Reproduction_P Parameter: Treatment Value: Drought vs. No Drought
  misc_feature: MA Experiment ID: 20001906 Result: Up-regulated in Transcription
  misc_feature: MA Experiment 20001906 PARAMETER Experiment Name: At_Drought_Reproduction_P Parameter: Age (day) Value: 35
  misc_feature: MA Experiment 20001906 PARAMETER Experiment Name: At_Drought_Reproduction_P Parameter: Organism Value: A. thaliana
  misc_feature: MA Experiment 20001906 PARAMETER Experiment Name: At_Drought_Reproduction_P Parameter: Plant Line Value: WS
  misc_feature: MA Experiment 20001906 PARAMETER Experiment Name: At_Drought_Reproduction_P Parameter: Timepoint (day) Value: 5
  misc_feature: MA Experiment 20001906 PARAMETER Experiment Name: At_Drought_Reproduction_P Parameter: Tissue Value: Siliques
  misc_feature: MA Experiment 20001906 PARAMETER Experiment Name: At_Drought_Reproduction_P Parameter: Treatment Value: Drought vs. No Drought
  misc_feature: MA Experiment ID: 20001908 Result: Up-regulated in Transcription
  misc_feature: MA Experiment 20001908 PARAMETER Experiment Name: At_Drought_Reproduction_P Parameter: Age (day) Value: 40
  misc_feature: MA Experiment 20001908 PARAMETER Experiment Name: At_Drought_Reproduction_P Parameter: Organism Value: A. thaliana
  misc_feature: MA Experiment 20001908 PARAMETER Experiment Name: At_Drought_Reproduction_P Parameter: Plant Line Value: WS
  misc_feature: MA Experiment 20001908 PARAMETER Experiment Name: At_Drought_Reproduction_P Parameter: Timepoint (day) Value: 10
  misc_feature: MA Experiment 20001908 PARAMETER Experiment Name: At_Drought_Reproduction_P Parameter: Tissue Value: Siliques
  misc_feature: MA Experiment 20001908 PARAMETER Experiment Name: At_Drought_Reproduction_P Parameter: Treatment Value: Drought vs. No Drought
actctataaacacacactctcaggagagaagttgtattgatcgtcttctctttccctaaacacactgattattttctctccgacgccgccatgtctctgctctcagatctcgttaacctcaacctcaccgatgccaccgggaaaatcatcgccgaatacatatggatcggtggatctggaatggatatcagaagcaaagccaggacactaccaggaccagtgactgatccatcaaagcttcccaagtggaactacgacggatccagcaccggtcaggctgctggagaagacagtgaagtcattctataccctcaggcaatattcaaggatcccttcaggaaaggcaacaacatcctggtgatgtgtgatgcttacacaccagctggtgatcctattccaaccaacaagaggcacaacgctgctaagatcttcagccaccccgacgttgccaaggaggagccttggtatgggattgagcaagaatacactttgatgcaaaaggatgtgaactggccaattggttggcctgttggtggctaccctggccctcagggaccttactactgtggtgtgggagctgacaaagccattggtcgtgacattgtggatgctcactacaaggcctgtctttacgccggtattggtatttctggtatcaatggagaagtcatgccaggccagtgggagttccaagtcggccctgttgagggtattagttctggtgatcaagtctgggttgctcgataccttctcgagaggatcactgagatctctggtgtaattgtcagcttcgacccgaaaccagtcccgggtgactggaatggagctggagctcactgcaactacagcactaagacaatgagaaacgatggaggattagaagtgatcaagaaagcgatagggaagctttcagctgaaacacaaagaacacattgctgcttacggtgaaggaaacgagcgtcgtctcactggaaagcacgaaaccgcagacatcaacacattctcttggggagtcgcgaaccgtggagcgtcagtgagagtgggacgtgacacagagaaggaaggtaaagggtacttcgaagacagaaggccagcttctaacatggatccttacgttgtcacctccatgatcgctgagacgaccatactcggttgatgacacatttcatgatttgatttctctccaatttggtttgttttttttcccttgtgattgcacttttcgataataaaaaaataattcttattatggcgtattgttgtgacattttgttatttgtttcgaataattaaataagcgcttcttaaggt

SEQ ID NO: 27135 - protein, 285 aa, Arabidopsis thaliana
  peptide (1)..(285): Ceres Seq. ID no. 12393126
  misc_feature (103)..(273): Pfam Name: Glutamine synthetase, catalytic domain Pfam Description: Glutamine synthetase, catalytic domain
  misc_feature (1)..(273): Homolog of NCBI NO: 2073448 NR Description: glutamine synthetase [Lotus japonicus]
  misc_feature (1)..(273): Homolog of NCBI NO: 1707959 NR Description: GLUTAMINE SYNTHETASE CYTOSOLIC ISOZYME 2
  misc_feature (1)..(273): Homolog of NCBI NO: 12643762 NR Description: GLUTAMINE SYNTHETASE, CYTOSOLIC ISOZYME
  misc_feature (1)..(273): Homolog of NCBI NO: 2213877 NR Description: glutamine synthetase [Hevea brasiliensis]
  misc_feature (1)..(273): Homolog of NCBI NO: 417060 NR Description: Glutamine synthetase nodule isozyme
  misc_feature (1)..(276): Homolog of NCBI NO: 1076473 NR Description: Gln 1.1 protein - radish
  misc_feature (2)..(273): Homolog of NCBI NO: 228456 NR Description: Gln synthetase
  misc_feature (2)..(273): Homolog of NCBI NO: 99698 NR Description: glutamate-ammonia ligase (EC 6.3.1.2), cytosolic
  misc_feature (1)..(273): Homolog of NCBI NO: 28393681 NR Description: putative glutamine synthetase [Arabidopsis
  misc_feature (1)..(273): Homolog of NCBI NO: 15229530 NR Description: glutamine synthetase, putative
MSLLSDLVNLNLTDATGKIIAEYIWIGGSGMDIRSKARTLPGPVTDPSKLPKWNYDGSSTGQAAGEDSEVILYPQAIFKDPFRKGNNILVMCDAYTPAGDPIPTNKRHNAAKIFSHPDVAKEEPWYGIEQEYTLMQKDVNWPIGWPVGGYPGPQGPYYCGVGADKAIGRDIVDAHYKACLYAGIGISGINGEVMPGQWEFQVGPVEGISSGDQVWVARYLLERITEISGVIVSFDPKPVPGDWNGAGAHCNYSTKTMRNDGGLEVIKKAIGKLSAETQRTHCCLR

SEQ ID NO: 27136 - protein, 255 aa, Arabidopsis thaliana
  peptide (1)..(255): Ceres Seq. ID no. 12393127
  misc_feature (73)..(243): Pfam Name: Glutamine synthetase, catalytic domain Pfam Description: Glutamine synthetase, catalytic domain
  misc_feature (1)..(243): Homolog of NCBI NO: 2073448 NR Description: glutamine synthetase [Lotus japonicus]
  misc_feature (1)..(243): Homolog of NCBI NO: 1707959 NR Description: GLUTAMINE SYNTHETASE CYTOSOLIC ISOZYME 2
  misc_feature (1)..(243): Homolog of NCBI NO: 12643762 NR Description: GLUTAMINE SYNTHETASE, CYTOSOLIC ISOZYME
  misc_feature (1)..(243): Homolog of NCBI NO: 2213877 NR Description: glutamine synthetase [Hevea brasiliensis]
  misc_feature (1)..(243): Homolog of NCBI NO: 417060 NR Description: Glutamine synthetase nodule isozyme
  misc_feature (1)..(246): Homolog of NCBI NO: 1076473 NR Description: Gln 1.1 protein - radish
  misc_feature (1)..(243): Homolog of NCBI NO: 228456 NR Description: Gln synthetase
  misc_feature (1)..(243): Homolog of NCBI NO: 99698 NR Description: glutamate-ammonia ligase (EC 6.3.1.2), cytosolic
  misc_feature (1)..(243): Homolog of NCBI NO: 28393681 NR Description: putative glutamine synthetase [Arabidopsis
  misc_feature (1)..(243): Homolog of NCBI NO: 15229530 NR Description: glutamine synthetase, putative
MDIRSKARTLPGPVTDPSKLPKWNYDGSSTGQAAGEDSEVILYPQAIFKDPFRKGNNILVMCDAYTPAGDPIPTNKRHNAAKIFSHPDVAKEEPWYGIEQEYTLMQKDVNWPIGWPVGGYPGPQGPYYCGVGADKAIGRDIVDAHYKACLYAGIGISGINGEVMPGQWEFQVGPVEGISSGDQVWVARYLLERITEISGVIVSFDPKPVPGDWNGAGAHCNYSTKTMRNDGGLEVIKKAIGKLSAETQRTHCCLR

SEQ ID NO: 27137 - protein, 195 aa, Arabidopsis thaliana
  peptide (1)..(195): Ceres Seq. ID no. 12393128
  misc_feature (13)..(183): Pfam Name: Glutamine synthetase, catalytic domain Pfam Description: Glutamine synthetase, catalytic domain
  misc_feature (1)..(183): Homolog of NCBI NO: 2073448 NR Description: glutamine synthetase [Lotus japonicus]
  misc_feature (1)..(183): Homolog of NCBI NO: 1707959 NR Description: GLUTAMINE SYNTHETASE CYTOSOLIC ISOZYME 2
  misc_feature (1)..(183): Homolog of NCBI NO: 12643762 NR Description: GLUTAMINE SYNTHETASE, CYTOSOLIC ISOZYME
  misc_feature (1)..(183): Homolog of NCBI NO: 2213877 NR Description: glutamine synthetase [Hevea brasiliensis]
  misc_feature (1)..(183): Homolog of NCBI NO: 417060 NR Description: Glutamine synthetase nodule isozyme
  misc_feature (1)..(186): Homolog of NCBI NO: 1076473 NR Description: Gln 1.1 protein - radish
  misc_feature (1)..(183): Homolog of NCBI NO: 228456 NR Description: Gln synthetase
  misc_feature (1)..(183): Homolog of NCBI NO: 99698 NR Description: glutamate-ammonia ligase (EC 6.3.1.2), cytosolic
  misc_feature (1)..(183): Homolog of NCBI NO: 28393681 NR Description: putative glutamine synthetase [Arabidopsis
  misc_feature (1)..(183): Homolog of NCBI NO: 15229530 NR Description: glutamine synthetase, putative
MCDAYTPAGDPIPTNKRHNAAKIFSHPDVAKEEPWYGIEQEYTLMQKDVNWPIGWPVGGYPGPQGPYYCGVGADKAIGRDIVDAHYKACLYAGIGISGINGEVMPGQWEFQVGPVEGISSGDQVWVARYLLERITEISGVIVSFDPKPVPGDWNGAGAHCNYSTKTMRNDGGLEVIKKAIGKLSAETQRTHCCLR

SEQ ID NO: 27138 - DNA, 1733 bp, Arabidopsis thaliana
  misc_feature (1)..(1733): Ceres Seq. ID no. 12726090
  misc_feature: MA Experiment ID: 108434 Result: Up-regulated in Transcription
  misc_feature: MA Experiment 108434 PARAMETER Experiment Name: At_Root_Tips_cDNA_P Parameter: Tissue Value: Root Tips
gtgcccacaactcctagtaatgactttctcaggcattgttgacacaaattttgctctgagtaaaacttgggaatagagagagactctgagtgagagagagattctgagtgagagacggagatggaggcagacgaaagcggcatctctctgccgtcgggacccgacggacgtaagcggcgagtcagttacttctacgagccgacgatcggagactactactacggtcaaggccacccgatgaagcctcaccggatccgtatggctcatagcctaatcattcactatcacctccaccgtcgcttagaaatcagtcgccctagcctcgctgacgcctccgatatcggccgattccattcgccggagtatgttgacttcctcgcttccgtttcgccggaatctatgggcgatccttccgctgcacgaaacctaaggcgattcaatgtcggtgaggattgtcctgtcttcgacggactttttgatttttgccgtgcttccgccggaggttctattggtgctgccgtcaaattaaacagacaggacgctgatatcgctatcaattggggcggtgggcttcaccatgctaagaaaagcgaggcttctgggttttgctatgtaaacgacatcgtgctagggattctggagttgctcaagatgtttaagcgggttctctacatagatattgatgtccaccatggagatggagtggaagaagcgttttacaccactgatagagttatgactgtttctttccacaaatttggggactttttcccaggaactggtcacataagagatgttggcgctgaaaaagggaaatactatgctctaaatgttccactaaacgatggtatggacgatgaaagtttccgcagcttgtttagacctcttatccagaaggttatggaagtgtatcagccagaggcagttgttcttcagtgtggtgctgactccttaagtggtgatcggttgggttgcttcaacttatcagtcaagggtcacgctgattgccttcggttcttaagatcttacaacgttcctctcatggtgttgggtggtggagggtatactattcgaaatgttgcccgttgctggtgttatgagactgcagttgctgttggagtagagccggacaacaaactcccttacaatgagtattttgagtatttcggcccagattatacgcttcatgtcgacccaagtcctatggagaatttaaacacgcccaaagatatggagaggataaggaacacgttgctggaacaactttcgggactaatacacgcacctagcgtccagtttcagcacacaccaccagtcaatcgagttttggacgagccggaagatgacatggagacaagaccaaaacctcgcatctggagtggaactgcgacttatgaatcagacagtgacgatgatgataaacctcttcatggttactcatgtcgtggtggcgcaactacggacagggactctaccggtgaagatgaaatggatgacgataacccagagccagacgtgaatcctccatcgtcttaaaccagcttgatggtttggtgtctcttttgccatatgataatgtcggcagatttaagaaacaagttaggggaatgaatgattctttgatgttttttcagcaaccttttgagttctgtgaaaacgctgcattgattagaacagtgacaactgactagtattttggcccaagttagaaaatcagaatatgtgaaaaatgc

SEQ ID NO: 27139 - protein, 471 aa, Arabidopsis thaliana
  peptide (1)..(471): Ceres Seq. ID no. 12726091
  misc_feature (1)..(442): Homolog of NCBI NO: 12698880 NR Description: histone deacetylase HD1 [Oryza sativa]
  misc_feature (3)..(416): Homolog of NCBI NO: 3023947 NR Description: Probable histone deacetylase (RPD3 homolog)
  misc_feature (4)..(471): Homolog of NCBI NO: 9022439 NR Description: histone deacetylase [Mesembryanthemum
  misc_feature (3)..(416): Homolog of NCBI NO: 14550104 NR Description: histone deacetylase HDA101 [Zea mays]
  misc_feature (4)..(453): Homolog of NCBI NO: 15233694 NR Description: Histone deacetylase
  misc_feature (4)..(453): Homolog of NCBI NO: 2318131 NR Description: histone deacetylase [Arabidopsis thaliana]
  misc_feature (20)..(433): Homolog of NCBI NO: 17017398 NR Description: histone deacetylase [Zea mays]
  misc_feature (1)..(433): Homolog of NCBI NO: 4193320 NR Description: histone deacetylase [Zea mays]
  misc_feature (1)..(471): Homolog of NCBI NO: 11066141 NR Description: putative histone deacetylase [Arabidopsis
  misc_feature (1)..(471): Homolog of NCBI NO: 15242626 NR Description: histone deacetylase
MEADESGISLPSGPDGRKRRVSYFYEPTIGDYYYGQGHPMKPHRIRMAHSLIIHYHLHRRLEISRPSLADASDIGRFHSPEYVDFLASVSPESMGDPSAARNLRRFNVGEDCPVFDGLFDFCRASAGGSIGAAVKLNRQDADIAINWGGGLHHAKKSEASGFCYVNDIVLGILELLKMFKRVLYIDIDVHHGDGVEEAFYTTDRVMTVSFHKFGDFFPGTGHIRDVGAEKGKYYALNVPLNDGMDDESFRSLFRPLIQKVMEVYQPEAVVLQCGADSLSGDRLGCFNLSVKGHADCLRFLRSYNVPLMVLGGGGYTIRNVARCWCYETAVAVGVEPDNKLPYNEYFEYFGPDYTLHVDPSPMENLNTPKDMERIRNTLLEQLSGLIHAPSVQFQHTPPVNRVLDEPEDDMETRPKPRIWSGTATYESDSDDDDKPLHGYSCRGGATTDRDSTGEDEMDDDNPEPDVNPPSS

SEQ ID NO: 27140 - protein, 432 aa, Arabidopsis thaliana
  peptide (1)..(432): Ceres Seq. ID no. 12726092
  misc_feature (1)..(403): Homolog of NCBI NO: 12698880 NR Description: histone deacetylase HD1 [Oryza sativa]
  misc_feature (1)..(377): Homolog of NCBI NO: 3023947 NR Description: Probable histone deacetylase (RPD3 homolog)
  misc_feature (1)..(432): Homolog of NCBI NO: 9022439 NR Description: histone deacetylase [Mesembryanthemum
  misc_feature (1)..(377): Homolog of NCBI NO: 14550104 NR Description: histone deacetylase HDA101 [Zea mays]
  misc_feature (1)..(414): Homolog of NCBI NO: 15233694 NR Description: Histone deacetylase
  misc_feature (1)..(414): Homolog of NCBI NO: 2318131 NR Description: histone deacetylase [Arabidopsis thaliana]
  misc_feature (1)..(394): Homolog of NCBI NO: 17017398 NR Description: histone deacetylase [Zea mays]
  misc_feature (1)..(394): Homolog of NCBI NO: 4193320 NR Description: histone deacetylase [Zea mays]
  misc_feature (1)..(432): Homolog of NCBI NO: 11066141 NR Description: putative histone deacetylase [Arabidopsis
  misc_feature (1)..(432): Homolog of NCBI NO: 15242626 NR Description: histone deacetylase
MKPHRIRMAHSLIIHYHLHRRLEISRPSLADASDIGRFHSPEYVDFLASVSPESMGDPSAARNLRRFNVGEDCPVFDGLFDFCRASAGGSIGAAVKLNRQDADIAINWGGGLHHAKKSEASGFCYVNDIVLGILELLKMFKRVLYIDIDVHHGDGVEEAFYTTDRVMTVSFHKFGDFFPGTGHIRDVGAEKGKYYALNVPLNDGMDDESFRSLFRPLIQKVMEVYQPEAVVLQCGADSLSGDRLGCFNLSVKGHADCLRFLRSYNVPLMVLGGGGYTIRNVARCWCYETAVAVGVEPDNKLPYNEYFEYFGPDYTLHVDPSPMENLNTPKDMERIRNTLLEQLSGLIHAPSVQFQHTPPVNRVLDEPEDDMETRPKPRIWSGTATYESDSDDDDKPLHGYSCRGGATTDRDSTGEDEMDDDNPEPDVNPPSS

SEQ ID NO: 27141 - protein, 425 aa, Arabidopsis thaliana
  peptide (1)..(425): Ceres Seq. ID no. 12726093
  misc_feature (1)..(396): Homolog of NCBI NO: 12698880 NR Description: histone deacetylase HD1 [Oryza sativa]
  misc_feature (1)..(370): Homolog of NCBI NO: 3023947 NR Description: Probable histone deacetylase (RPD3 homolog)
  misc_feature (1)..(425): Homolog of NCBI NO: 9022439 NR Description: histone deacetylase [Mesembryanthemum
  misc_feature (1)..(370): Homolog of NCBI NO: 14550104 NR Description: histone deacetylase HDA101 [Zea mays]
  misc_feature (1)..(407): Homolog of NCBI NO: 15233694 NR Description: Histone deacetylase
  misc_feature (1)..(407): Homolog of NCBI NO: 2318131 NR Description: histone deacetylase [Arabidopsis thaliana]
  misc_feature (1)..(387): Homolog of NCBI NO: 17017398 NR Description: histone deacetylase [Zea mays]
  misc_feature (1)..(387): Homolog of NCBI NO: 4193320 NR Description: histone deacetylase [Zea mays]
  misc_feature (1)..(425): Homolog of NCBI NO: 11066141 NR Description: putative histone deacetylase [Arabidopsis
  misc_feature (1)..(425): Homolog of NCBI NO: 15242626 NR Description: histone deacetylase
MAHSLIIHYHLHRRLEISRPSLADASDIGRFHSPEYVDFLASVSPESMGDPSAARNLRRFNVGEDCPVFDGLFDFCRASAGGSIGAAVKLNRQDADIAINWGGGLHHAKKSEASGFCYVNDIVLGILELLKMFKRVLYIDIDVHHGDGVEEAFYTTDRVMTVSFHKFGDFFPGTGHIRDVGAEKGKYYALNVPLNDGMDDESFRSLFRPLIQKVMEVYQPEAVVLQCGADSLSGDRLGCFNLSVKGHADCLRFLRSYNVPLMVLGGGGYTIRNVARCWCYETAVAVGVEPDNKLPYNEYFEYFGPDYTLHVDPSPMENLNTPKDMERIRNTLLEQLSGLIHAPSVQFQHTPPVNRVLDEPEDDMETRPKPRIWSGTATYESDSDDDDKPLHGYSCRGGATTDRDSTGEDEMDDDNPEPDVNPPSS

SEQ ID NO: 27142 - DNA, 896 bp, Arabidopsis thaliana
  misc_feature (1)..(896): Ceres Seq. ID no. 12331402
  misc_feature: MA Experiment ID: 108434 Result: Down-regulated in Transcription
  misc_feature: MA Experiment 108434 PARAMETER Experiment Name: At_Root_Tips_cDNA_P Parameter: Tissue Value: Root Tips
  misc_feature: MA Experiment ID: 108463 Result: Up-regulated in Transcription
  misc_feature: MA Experiment 108463 PARAMETER Experiment Name: At_Germinating_Seeds_cDNA_P Parameter: Age (day) Value: 3 vs. 0
  misc_feature: MA Experiment 108463 PARAMETER Experiment Name: At_Germinating_Seeds_cDNA_P Parameter: Tissue Value: Germinating Seeds
  misc_feature: MA Experiment ID: 108464 Result: Up-regulated in Transcription
  misc_feature: MA Experiment 108464 PARAMETER Experiment Name: At_Germinating_Seeds_cDNA_P Parameter: Age (day) Value: 4 vs. 0
  misc_feature: MA Experiment 108464 PARAMETER Experiment Name: At_Germinating_Seeds_cDNA_P Parameter: Tissue Value: Germinating Seeds
  misc_feature: MA Experiment ID: 108488 Result: Down-regulated in Transcription
  misc_feature: MA Experiment ID: 108573 Result: Up-regulated in Transcription
  misc_feature: MA Experiment 108573 PARAMETER Experiment Name: At_Drought_cDNA_P Parameter: Timepoint (hr) Value: 6
  misc_feature: MA Experiment 108573 PARAMETER Experiment Name: At_Drought_cDNA_P Parameter: Tissue Value: Aerial
  misc_feature: MA Experiment 108573 PARAMETER Experiment Name: At_Drought_cDNA_P Parameter: Treatment Value: Drought vs. No Drought
  misc_feature: MA Experiment ID: 108577 Result: Down-regulated in Transcription
  misc_feature: MA Experiment 108577 PARAMETER Experiment Name: At_42deg_Heat_cDNA_P Parameter: Temperature (deg C) Value: 42 vs. 22
  misc_feature: MA Experiment 108577 PARAMETER Experiment Name: At_42deg_Heat_cDNA_P Parameter: Timepoint (hr) Value: 6
  misc_feature: MA Experiment 108577 PARAMETER Experiment Name: At_42deg_Heat_cDNA_P Parameter: Tissue Value: Aerial
  misc_feature: MA Experiment ID: 108579 Result: Up-regulated in Transcription
  misc_feature: MA Experiment 108579 PARAMETER Experiment Name: At_4deg_Cold_cDNA_P Parameter: Temperature (deg C) Value: 4 vs. 22
  misc_feature: MA Experiment 108579 PARAMETER Experiment Name: At_4deg_Cold_cDNA_P Parameter: Timepoint (hr) Value: 6
  misc_feature: MA Experiment 108579 PARAMETER Experiment Name: At_4deg_Cold_cDNA_P Parameter: Tissue Value: Aerial
  misc_feature: MA Experiment ID: 108585 Result: Up-regulated in Transcription
  misc_feature: MA Experiment 108585 PARAMETER Experiment Name: At_5mM_NaNP_cDNA_P Parameter: Timepoint (hr) Value: 6
  misc_feature: MA Experiment 108585 PARAMETER Experiment Name: At_5mM_NaNP_cDNA_P Parameter: Tissue Value: Aerial
  misc_feature: MA Experiment 108585 PARAMETER Experiment Name: At_5mM_NaNP_cDNA_P Parameter: Treatment Value: null
  misc_feature: MA Experiment ID: 108595 Result: Up-regulated in Transcription
  misc_feature: MA Experiment 108595 PARAMETER Experiment Name: At_Ler-pi_Ovule_cDNA_P Parameter: Plant Line Value: null
  misc_feature: MA Experiment ID: 108667 Result: Up-regulated in Transcription
  misc_feature: MA Experiment 108667 PARAMETER Experiment Name: At_2mM_SA_cDNA_P Parameter: Plant Line Value: WS
  misc_feature: MA Experiment 108667 PARAMETER Experiment Name: At_2mM_SA_cDNA_P Parameter: Timepoint (hr) Value: 1
  misc_feature: MA Experiment 108667 PARAMETER Experiment Name: At_2mM_SA_cDNA_P Parameter: Treatment Value: 2mM SA vs. No Treatment
  misc_feature: MA Experiment ID: 108668 Result: Up-regulated in Transcription
  misc_feature: MA Experiment 108668 PARAMETER Experiment Name: At_2mM_SA_cDNA_P Parameter: Plant Line Value: WS
  misc_feature: MA Experiment 108668 PARAMETER Experiment Name: At_2mM_SA_cDNA_P Parameter: Timepoint (hr) Value: 6
  misc_feature: MA Experiment 108668 PARAMETER Experiment Name: At_2mM_SA_cDNA_P Parameter: Treatment Value: 2mM SA vs. No Treatment
  misc_feature: MA Experiment ID: 20000089 Result: Down-regulated in Transcription
  misc_feature: MA Experiment ID: 20000144 Result: Down-regulated in Transcription
  misc_feature: MA Experiment 20000144 PARAMETER Experiment Name: At_42deg_Heat_cDNA_P Parameter: Temperature (deg C) Value: 42 vs. 22
  misc_feature: MA Experiment 20000144 PARAMETER Experiment Name: At_42deg_Heat_cDNA_P Parameter: Timepoint (hr) Value: 1
  misc_feature: MA Experiment 20000144 PARAMETER Experiment Name: At_42deg_Heat_cDNA_P Parameter: Tissue Value: Aerial
  misc_feature: MA Experiment ID: 20000171 Result: Down-regulated in Transcription
  misc_feature: MA Experiment 20000171 PARAMETER Experiment Name: At_42deg_Heat_P Parameter: Age (day) Value: 14
  misc_feature: MA Experiment 20000171 PARAMETER Experiment Name: At_42deg_Heat_P Parameter: Organism Value: A. thaliana
  misc_feature: MA Experiment 20000171 PARAMETER Experiment Name: At_42deg_Heat_P Parameter: Plant Line Value: WS
  misc_feature: MA Experiment 20000171 PARAMETER Experiment Name: At_42deg_Heat_P Parameter: Temperature (deg C) Value: 42 vs. 22
  misc_feature: MA Experiment 20000171 PARAMETER Experiment Name: At_42deg_Heat_P Parameter: Timepoint (hr) Value: 1
  misc_feature: MA Experiment 20000171 PARAMETER Experiment Name: At_42deg_Heat_P Parameter: Tissue Value: Aerial
  misc_feature: MA Experiment ID: 20000182 Result: Up-regulated in Transcription
  misc_feature: MA Experiment 20000182 PARAMETER Experiment Name: At_2mM_SA_P Parameter: Age (day) Value: 14
  misc_feature: MA Experiment 20000182 PARAMETER Experiment Name: At_2mM_SA_P Parameter: Organism Value: A. thaliana
  misc_feature: MA Experiment 20000182 PARAMETER Experiment Name: At_2mM_SA_P Parameter: Plant Line Value: WS
  misc_feature: MA Experiment 20000182 PARAMETER Experiment Name: At_2mM_SA_P Parameter: Timepoint (hr) Value: 6
  misc_feature: MA Experiment 20000182 PARAMETER Experiment Name: At_2mM_SA_P Parameter: Tissue Value: Aerial
  misc_feature: MA Experiment 20000182 PARAMETER Experiment Name: At_2mM_SA_P Parameter: Treatment Value: 2mM SA vs. No Treatment
  misc_feature: MA Experiment ID: 20000224 Result: Down-regulated in Transcription
  misc_feature: MA Experiment ID: 20000234 Result: Down-regulated in Transcription
  misc_feature: MA Experiment 20000234 PARAMETER Experiment Name: At_Siliques_P Parameter: Age (day) Value: 21
  misc_feature: MA Experiment 20000234 PARAMETER Experiment Name: At_Siliques_P Parameter: Organism Value: A. thaliana
  misc_feature: MA Experiment 20000234 PARAMETER Experiment Name: At_Siliques_P Parameter: Plant Line Value: WS
  misc_feature: MA Experiment 20000234 PARAMETER Experiment Name: At_Siliques_P Parameter: Tissue Value: Less Than 5mm Siliques vs. Whole Plant
  misc_feature: MA Experiment ID: 20000235 Result: Down-regulated in Transcription
  misc_feature: MA Experiment 20000235 PARAMETER Experiment Name: At_Siliques_P Parameter: Age (day) Value: 21
  misc_feature: MA Experiment 20000235 PARAMETER Experiment Name: At_Siliques_P Parameter: Organism Value: A. thaliana
  misc_feature: MA Experiment 20000235 PARAMETER Experiment Name: At_Siliques_P Parameter: Plant Line Value: WS
  misc_feature: MA Experiment 20000235 PARAMETER Experiment Name: At_Siliques_P Parameter: Tissue Value: 5-10mm Siliques vs. Whole Plant
  misc_feature: MA Experiment ID: 20000265 Result: Down-regulated in Transcription
  misc_feature: MA Experiment 20000265 PARAMETER Experiment Name: At_Open_Flower_P Parameter: Age (day) Value: 21
  misc_feature: MA Experiment 20000265 PARAMETER Experiment Name: At_Open_Flower_P Parameter: Plant Line Value: WS
  misc_feature: MA Experiment 20000265 PARAMETER Experiment Name: At_Open_Flower_P Parameter: Tissue Value: Closed Flower vs. Whole Plant
  misc_feature: MA Experiment ID: 20000436 Result: Up-regulated in Transcription
  misc_feature: MA Experiment 20000436 PARAMETER Experiment Name: At_Drought_P Parameter: Age (day) Value: 7
  misc_feature: MA Experiment 20000436 PARAMETER Experiment Name: At_Drought_P Parameter: Organism Value: A. thaliana
  misc_feature: MA Experiment 20000436 PARAMETER Experiment Name: At_Drought_P Parameter: Plant Line Value: WS
  misc_feature: MA Experiment 20000436 PARAMETER Experiment Name: At_Drought_P Parameter: Timepoint (hr) Value: 12
  misc_feature: MA Experiment 20000436 PARAMETER Experiment Name: At_Drought_P Parameter: Tissue Value: Whole Plant
  misc_feature: MA Experiment 20000436 PARAMETER Experiment Name: At_Drought_P Parameter: Treatment Value: Drought vs. No Drought
  misc_feature: MA Experiment ID: 20000438 Result: Down-regulated in Transcription
  misc_feature: MA Experiment 20000438 PARAMETER Experiment Name: At_Shoots__P Parameter: Age (day) Value: 14
  misc_feature: MA Experiment 20000438 PARAMETER Experiment Name: At_Shoots__P Parameter: Tissue Value: Shoots vs. Whole Plant
  misc_feature: MA Experiment ID: 20000460 Result: Up-regulated in Transcription
  misc_feature: MA Experiment 20000460 PARAMETER Experiment Name: At_10percent_PEG_P Parameter: Age (day) Value: 12
  misc_feature: MA Experiment 20000460 PARAMETER Experiment Name: At_10percent_PEG_P Parameter: Organism Value: A. thaliana
  misc_feature: MA Experiment 20000460 PARAMETER Experiment Name: At_10percent_PEG_P Parameter: Plant Line Value: WS
  misc_feature: MA Experiment 20000460 PARAMETER Experiment Name: At_10percent_PEG_P Parameter: Timepoint (day) Value: 12
  misc_feature: MA Experiment 20000460 PARAMETER Experiment Name: At_10percent_PEG_P Parameter: Tissue Value: Whole Plant
  misc_feature: MA Experiment 20000460 PARAMETER Experiment Name: At_10percent_PEG_P Parameter: Treatment Value: 10percent PEG vs. No Treatment
  misc_feature: MA Experiment ID: 20000495 Result: Down-regulated in Transcription
  misc_feature: MA Experiment 20000495 PARAMETER Experiment Name: At_Guard_Cells_P Parameter: Harvest Date Value: 8/2/2002
  misc_feature: MA Experiment 20000495 PARAMETER Experiment Name: At_Guard_Cells_P Parameter: Organism Value: A. thaliana
  misc_feature: MA Experiment 20000495 PARAMETER Experiment Name: At_Guard_Cells_P Parameter: Tissue Value: Guard Cells vs. Leaves
  misc_feature: MA Experiment ID: 20001247 Result: Up-regulated in Transcription
  misc_feature: MA Experiment 20001247 PARAMETER Experiment Name: At_Far-red-induction_P Parameter: Age (day) Value: 7
  misc_feature: MA Experiment 20001247 PARAMETER Experiment Name: At_Far-red-induction_P Parameter: Light Value: Far-red vs. White
  misc_feature: MA Experiment 20001247 PARAMETER Experiment Name: At_Far-red-induction_P Parameter: Organism Value: A. thaliana
  misc_feature: MA Experiment 20001247 PARAMETER Experiment Name: At_Far-red-induction_P Parameter: Plant Line Value: Columbia
  misc_feature: MA Experiment 20001247 PARAMETER Experiment Name: At_Far-red-induction_P Parameter: Timepoint (hr) Value: 1
  misc_feature: MA Experiment 20001247 PARAMETER Experiment Name: At_Far-red-induction_P Parameter: Tissue Value: Whole Plant
  misc_feature: MA Experiment ID: 20001451 Result: Up-regulated in Transcription
  misc_feature: MA Experiment 20001451 PARAMETER Experiment Name: At_Far-red-induction_P Parameter: Age (day) Value: 7
  misc_feature: MA Experiment 20001451 PARAMETER Experiment Name: At_Far-red-induction_P Parameter: Light Value: Far-red vs. White
  misc_feature: MA Experiment 20001451 PARAMETER Experiment Name: At_Far-red-induction_P Parameter: Organism Value: A. thaliana
  misc_feature: MA Experiment 20001451 PARAMETER Experiment Name: At_Far-red-induction_P Parameter: Plant Line Value: Columbia
  misc_feature: MA Experiment 20001451 PARAMETER Experiment Name: At_Far-red-induction_P Parameter: Timepoint (hr) Value: 24
  misc_feature: MA Experiment 20001451 PARAMETER Experiment Name: At_Far-red-induction_P Parameter: Tissue Value: Whole Plant
  misc_feature: MA Experiment ID: 20001905 Result: Up-regulated in Transcription
  misc_feature: MA Experiment 20001905 PARAMETER Experiment Name: At_Drought_Reproduction_P Parameter: Age (day) Value: 40
  misc_feature: MA Experiment 20001905 PARAMETER Experiment Name: At_Drought_Reproduction_P Parameter: Organism Value: A. thaliana
  misc_feature: MA Experiment 20001905 PARAMETER Experiment Name: At_Drought_Reproduction_P Parameter: Plant Line Value: WS
  misc_feature: MA Experiment 20001905 PARAMETER Experiment Name: At_Drought_Reproduction_P Parameter: Timepoint (day) Value: 10
  misc_feature: MA Experiment 20001905 PARAMETER Experiment Name: At_Drought_Reproduction_P Parameter: Tissue Value: Rosettes
  misc_feature: MA Experiment 20001905 PARAMETER Experiment Name: At_Drought_Reproduction_P Parameter: Treatment Value: Drought vs. No Drought
atcgatcactgaatcttcttcttcttcttcttcttcttcttccttctctcaagaacagattttttttaaacgagcttgatcaataaattctctcaagatctatggcggaagagcatcgatgtcagacaccagaaagcaaccgtctctgtgttaacaactgtggcttcctcggcagctccgccaccatgaatctctgttctaattgttacggcgatctttgtctcaaacaacaacaacaatcctcctccatcaaatccaccgttgaatcttccctctctttatctcctccgtcgtcatcatcatcggagatctcttctccgatcatccctcctctccttaaaaatccatcagtcaagctagaggtaccggagaaaaaggcggtgatttcgctgccgacgacggagcagaatcagcaacagaggccgaatcggtgcacgacgtgtaggaaacgggtcgggttaaccggattcaagtgccggtgcggtacgatgttttgcggggttcataggtacccggagatccatggatgcagctacgatttcaaatcggccggacgtgaagagatcgcgaaagcgaatccgttggtgaaagcagcgaagcttcagaagatatgatcagagccgttcgatgcgttgacttttcctctcgtaatcttcatttctacgcgtatgtgtgtcctccgtcccccgagaaatacggatggtgtcgatttgattgatctcagccgttggatcaaaaatggtttattattgtaaaagattgattatgtattaatcaaagggacacgtgtcacgtggttttaggatggagacgctttcgctttctctccttcattttattttctttttcctttcagaaagaaataagattattcgcgttggctttttctttttatc

SEQ ID NO: 27143 - protein, 170 aa, Arabidopsis thaliana
  peptide (1)..(170): Ceres Seq. ID no. 12331403
  misc_feature (111)..(151): Pfam Name: AN1-like Zinc finger Pfam Description: AN1-like Zinc finger
  misc_feature (3)..(170): Homolog of NCBI NO: 11361253 NR Description: hypothetical protein p85RF [imported] - Prunus
  misc_feature (10)..(170): Homolog of NCBI NO: 15234402 NR Description: putative protein
  misc_feature (14)..(169): Homolog of NCBI NO: 15235819 NR Description: similar to zinc finger - like protein
  misc_feature (4)..(170): Homolog of NCBI NO: 35187687 NR Description: zinc-finger protein [Oryza sativa (indica
  misc_feature (7)..(170): Homolog of NCBI NO: 25082726 NR Description: expressed protein [Arabidopsis thaliana]
  misc_feature (7)..(170): Homolog of NCBI NO: 18403408 NR Description: expressed protein
  misc_feature (1)..(170): Homolog of NCBI NO: 15225894 NR Description: putative zinc finger protein
  misc_feature (1)..(170): Homolog of NCBI NO: 18404102 NR Description: expressed protein
  misc_feature (1)..(170): Homolog of NCBI NO: 14596167 NR Description: zinc finger-like protein [Arabidopsis thaliana]
  misc_feature (1)..(170): Homolog of NCBI NO: 15231686 NR Description: zinc finger - like protein
MAEEHRCQTPESNRLCVNNCGFLGSSATMNLCSNCYGDLCLKQQQQSSSIKSTVESSLSLSPPSSSSSEISSPIIPPLLKNPSVKLEVPEKKAVISLPTTEQNQQQRPNRCTTCRKRVGLTGFKCRCGTMFCGVHRYPEIHGCSYDFKSAGREEIAKANPLVKAAKLQKI

SEQ ID NO: 27144 - protein, 142 aa, Arabidopsis thaliana
  peptide (1)..(142): Ceres Seq. ID no. 12331404
  misc_feature (83)..(123): Pfam Name: AN1-like Zinc finger Pfam Description: AN1-like Zinc finger
  misc_feature (1)..(142): Homolog of NCBI NO: 15234402 NR Description: putative protein
  misc_feature (1)..(141): Homolog of NCBI NO: 15235819 NR Description: similar to zinc finger - like protein
  misc_feature (1)..(142): Homolog of NCBI NO: 35187687 NR Description: zinc-finger protein [Oryza sativa (indica
  misc_feature (1)..(142): Homolog of NCBI NO: 25082726 NR Description: expressed protein [Arabidopsis thaliana]
  misc_feature (1)..(142): Homolog of NCBI NO: 18403408 NR Description: expressed protein
  misc_feature (1)..(142): Homolog of NCBI NO: 11361253 NR Description: hypothetical protein p85RF [imported] - Prunus
  misc_feature (1)..(142): Homolog of NCBI NO: 15225894 NR Description: putative zinc finger protein
  misc_feature (1)..(142): Homolog of NCBI NO: 18404102 NR Description: expressed protein
  misc_feature (1)..(142): Homolog of NCBI NO: 14596167 NR Description: zinc finger-like protein [Arabidopsis thaliana]
  misc_feature (1)..(142): Homolog of NCBI NO: 15231686 NR Description: zinc finger - like protein
MNLCSNCYGDLCLKQQQQSSSIKSTVESSLSLSPPSSSSSEISSPIIPPLLKNPSVKLEVPEKKAVISLPTTEQNQQQRPNRCTTCRKRVGLTGFKCRCGTMFCGVHRYPEIHGCSYDFKSAGREEIAKANPLVKAAKLQKI

SEQ ID NO: 27145 - DNA, 784 bp, Arabidopsis thaliana
  misc_feature (1)..(784): Ceres Seq. ID no. 12323441
  misc_feature: MA Experiment ID: 20000794 Result: Up-regulated in Transcription
  misc_feature: MA Experiment 20000794 PARAMETER Experiment Name: At_Petals_P Parameter: Age (day) Value: 23-25 days
  misc_feature: MA Experiment 20000794 PARAMETER Experiment Name: At_Petals_P Parameter: Plant Line Value: WS
  misc_feature: MA Experiment 20000794 PARAMETER Experiment Name: At_Petals_P Parameter: Tissue Value: Petals vs. Whole plant
gagctgagatgctgaacctgcaagtaaccgggaagacgatcttatctagtattcgttgtcagagaaagatgtcgtctacttgttcttcgtacgcatttgggccgtacaaaatcgatccccgtgaagtgttctacgcaacgcctctctcttatgccatggttaatctccgtccgcttcttcctggtcatgttcttgtctgcccgagacgccttgtgccacgatttactgatcttacagctgatgagaccagtgacctgtggcttactgctcagaaggttggctctaagcttgagaccttccataatgcgtcttctctcacattagccatccaagatggccctcaagcgggacagactgttccccatgtacacattcatatcttgcctcgtaaaggtggtgactttgagaagaatgatgaaatctatgatgctcttgatgagaaggagaaggaactgaagcagaagcttgatctagataaagaccgggttgataggagcattcaggagatggctgacgaggcttcccaatacagatctcttttcgattgctagttatcatttatcaatatcaaatcaaaccaagctatccagtagctttaataaggaccattgtgacaagtgactttcagtttgaaattttatgtcagagactttgattcaaatttgtaatttctttctaatgtcgcccaatctgggtataaactaagagttatagctttggttgacactacttagtgagattagaatcaactccttcatgttataaagaaaaattcccacttgct

SEQ ID NO: 27146 - protein, 182 aa, Arabidopsis thaliana
  peptide (1)..(182): Ceres Seq. ID no. 12323442
  misc_feature (14)..(179): Homolog of NCBI NO: 17556280 NR Description: Nitrilase and fragile histidine triad fusion
  misc_feature (29)..(180): Homolog of NCBI NO: 11120730 NR Description: fragile histidine triad protein [Rattus
  misc_feature (29)..(180): Homolog of NCBI NO: 4503719 NR Description: fragile histidine triad gene
  misc_feature (32)..(173): Homolog of NCBI NO: 40738785 NR Description: hypothetical protein AN6189.2 [Aspergillus
  misc_feature (32)..(181): Homolog of NCBI NO: 28828402 NR Description: similar to diadenosine tetraphosphatase
  misc_feature (28)..(180): Homolog of NCBI NO: 37589828 NR Description: Unknown (protein for MGC:73176) [Danio rerio]
  misc_feature (28)..(180): Homolog of NCBI NO: 27542770 NR Description: ATPase-like protein [Sorghum bicolor]
  misc_feature (23)..(182): Homolog of NCBI NO: 8777325 NR Description: bis(5'-adenosyl)-triphosphatase-like protein
  misc_feature (3)..(182): Homolog of NCBI NO: 30697031 NR Description: bis(5'-adenosyl)-triphosphatase-related
  misc_feature (3)..(182): Homolog of NCBI NO: 27808510 NR Description: At5g58240 [Arabidopsis thaliana]
AEMLNLQVTGKTILSSIRCQRKMSSTCSSYAFGPYKIDPREVFYATPLSYAMVNLRPLLPGHVLVCPRRLVPRFTDLTADETSDLWLTAQKVGSKLETFHNASSLTLAIQDGPQAGQTVPHVHIHILPRKGGDFEKNDEIYDALDEKEKELKQKLDLDKDRVDRSIQEMADEASQYRSLFDC

SEQ ID NO: 27147 - protein, 180 aa, Arabidopsis thaliana
  peptide (1)..(180): Ceres Seq. ID no. 12323443
  misc_feature (12)..(177): Homolog of NCBI NO: 17556280 NR Description: Nitrilase and fragile histidine triad fusion
  misc_feature (27)..(178): Homolog of NCBI NO: 11120730 NR Description: fragile histidine triad protein [Rattus
  misc_feature (27)..(178): Homolog of NCBI NO: 4503719 NR Description: fragile histidine triad gene
  misc_feature (30)..(171): Homolog of NCBI NO: 40738785 NR Description: hypothetical protein AN6189.2 [Aspergillus
  misc_feature (30)..(179): Homolog of NCBI NO: 28828402 NR Description: similar to diadenosine tetraphosphatase
  misc_feature (26)..(178): Homolog of NCBI NO: 37589828 NR Description: Unknown (protein for MGC:73176) [Danio rerio]
  misc_feature (26)..(178): Homolog of NCBI NO: 27542770 NR Description: ATPase-like protein [Sorghum bicolor]
  misc_feature (21)..(180): Homolog of NCBI NO: 8777325 NR Description: bis(5'-adenosyl)-triphosphatase-like protein
  misc_feature (1)..(180): Homolog of NCBI NO: 30697031 NR Description: bis(5'-adenosyl)-triphosphatase-related
  misc_feature (1)..(180): Homolog of NCBI NO: 27808510 NR Description: At5g58240 [Arabidopsis thaliana]
MLNLQVTGKTILSSIRCQRKMSSTCSSYAFGPYKIDPREVFYATPLSYAMVNLRPLLPGHVLVCPRRLVPRFTDLTADETSDLWLTAQKVGSKLETFHNASSLTLAIQDGPQAGQTVPHVHIHILPRKGGDFEKNDEIYDALDEKEKELKQKLDLDKDRVDRSIQEMADEASQYRSLFDC

SEQ ID NO: 27148 - protein, 160 aa, Arabidopsis thaliana
  peptide (1)..(160): Ceres Seq. ID no. 12323444
  misc_feature (1)..(157): Homolog of NCBI NO: 17556280 NR Description: Nitrilase and fragile histidine triad fusion
  misc_feature (7)..(158): Homolog of NCBI NO: 11120730 NR Description: fragile histidine triad protein [Rattus
  misc_feature (7)..(158): Homolog of NCBI NO: 4503719 NR Description: fragile histidine triad gene
  misc_feature (10)..(151): Homolog of NCBI NO: 40738785 NR Description: hypothetical protein AN6189.2 [Aspergillus
  misc_feature (10)..(159): Homolog of NCBI NO: 28828402 NR Description: similar to diadenosine tetraphosphatase
  misc_feature (6)..(158): Homolog of NCBI NO: 37589828 NR Description: Unknown (protein for MGC:73176) [Danio rerio]
  misc_feature (6)..(158): Homolog of NCBI NO: 27542770 NR Description: ATPase-like protein [Sorghum bicolor]
  misc_feature (1)..(160): Homolog of NCBI NO: 8777325 NR Description: bis(5'-adenosyl)-triphosphatase-like protein
  misc_feature (1)..(160): Homolog of NCBI NO: 30697031 NR Description: bis(5'-adenosyl)-triphosphatase-related
  misc_feature (1)..(160): Homolog of NCBI NO: 27808510 NR Description: At5g58240 [Arabidopsis thaliana]
MSSTCSSYAFGPYKIDPREVFYATPLSYAMVNLRPLLPGHVLVCPRRLVPRFTDLTADETSDLWLTAQKVGSKLETFHNASSLTLAIQDGPQAGQTVPHVHIHILPRKGGDFEKNDEIYDALDEKEKELKQKLDLDKDRVDRSIQEMADEASQYRSLFDC

SEQ ID NO: 27149 - DNA, 935 bp, Arabidopsis thaliana
  misc_feature (1)..(935): Ceres Seq. ID no. 12394305
  misc_feature: MA Experiment ID: 108435 Result: Down-regulated in Transcription
  misc_feature: MA Experiment 108435 PARAMETER Experiment Name: At_stm_Mutants_cDNA_P Parameter: Plant Line Value: wt Landsburg vs stm
  misc_feature: MA Experiment 108435 PARAMETER Experiment Name: At_stm_Mutants_cDNA_P Parameter: Tissue Value: Shoot Apical Meristem Region
  misc_feature: MA Experiment ID: 108463 Result: Up-regulated in Transcription
  misc_feature: MA Experiment 108463 PARAMETER Experiment Name: At_Germinating_Seeds_cDNA_P Parameter: Age (day) Value: 3 vs. 0
  misc_feature: MA Experiment 108463 PARAMETER Experiment Name: At_Germinating_Seeds_cDNA_P Parameter: Tissue Value: Germinating Seeds
  misc_feature: MA Experiment ID: 108464 Result: Up-regulated in Transcription
  misc_feature: MA Experiment 108464 PARAMETER Experiment Name: At_Germinating_Seeds_cDNA_P Parameter: Age (day) Value: 4 vs. 0
  misc_feature: MA Experiment 108464 PARAMETER Experiment Name: At_Germinating_Seeds_cDNA_P Parameter: Tissue Value: Germinating Seeds
  misc_feature: MA Experiment ID: 108488 Result: Down-regulated in Transcription
  misc_feature: MA Experiment ID: 108561 Result: Up-regulated in Transcription
  misc_feature: MA Experiment 108561 PARAMETER Experiment Name: At_100uM_ABA_cDNA_P Parameter: Timepoint (hr) Value: 6
  misc_feature: MA Experiment 108561 PARAMETER Experiment Name: At_100uM_ABA_cDNA_P Parameter: Tissue Value: Aerial
  misc_feature: MA Experiment 108561 PARAMETER Experiment Name: At_100uM_ABA_cDNA_P Parameter: Treatment Value: 100uM ABA vs. No Treatment
  misc_feature: MA Experiment ID: 108572 Result: Up-regulated in Transcription
  misc_feature: MA Experiment 108572 PARAMETER Experiment Name: At_Drought_cDNA_P Parameter: Timepoint (hr) Value: 1
  misc_feature: MA Experiment 108572 PARAMETER Experiment Name: At_Drought_cDNA_P Parameter: Tissue Value: Aerial
  misc_feature: MA Experiment 108572 PARAMETER Experiment Name: At_Drought_cDNA_P Parameter: Treatment Value: Drought vs. No Drought
  misc_feature: MA Experiment ID: 108573 Result: Up-regulated in Transcription
  misc_feature: MA Experiment 108573 PARAMETER Experiment Name: At_Drought_cDNA_P Parameter: Timepoint (hr) Value: 6
  misc_feature: MA Experiment 108573 PARAMETER Experiment Name: At_Drought_cDNA_P Parameter: Tissue Value: Aerial
  misc_feature: MA Experiment 108573 PARAMETER Experiment Name: At_Drought_cDNA_P Parameter: Treatment Value: Drought vs. No Drought
  misc_feature: MA Experiment ID: 108579 Result: Down-regulated in Transcription
  misc_feature: MA Experiment 108579 PARAMETER Experiment Name: At_4deg_Cold_cDNA_P Parameter: Temperature (deg C) Value: 4 vs. 22
  misc_feature: MA Experiment 108579 PARAMETER Experiment Name: At_4deg_Cold_cDNA_P Parameter: Timepoint (hr) Value: 6
  misc_feature: MA Experiment 108579 PARAMETER Experiment Name: At_4deg_Cold_cDNA_P Parameter: Tissue Value: Aerial
  misc_feature: MA Experiment ID: 108585 Result: Up-regulated in Transcription
  misc_feature: MA Experiment 108585 PARAMETER Experiment Name: At_5mM_NaNP_cDNA_P Parameter: Timepoint (hr) Value: 6
  misc_feature: MA Experiment 108585 PARAMETER Experiment Name: At_5mM_NaNP_cDNA_P Parameter: Tissue Value: Aerial
  misc_feature: MA Experiment 108585 PARAMETER Experiment Name: At_5mM_NaNP_cDNA_P Parameter: Treatment Value: null
  misc_feature: MA Experiment ID: 108605 Result: Up-regulated in Transcription
  misc_feature: MA Experiment 108605 PARAMETER Experiment Name: At_100uM_ABA_cDNA_P Parameter: Timepoint (hr) Value: 6
  misc_feature: MA Experiment 108605 PARAMETER Experiment Name: At_100uM_ABA_cDNA_P Parameter: Tissue Value: Aerial
  misc_feature: MA Experiment 108605 PARAMETER Experiment Name: At_100uM_ABA_cDNA_P Parameter: Treatment Value: 100uM ABA vs. No Treatment
  misc_feature: MA Experiment ID: 108607 Result: Up-regulated in Transcription
  misc_feature: MA Experiment 108607 PARAMETER Experiment Name: At_100uM_ABA_cDNA_P Parameter: Timepoint (hr) Value: 4
  misc_feature: MA Experiment 108607 PARAMETER Experiment Name: At_100uM_ABA_cDNA_P Parameter: Tissue Value: Aerial
  misc_feature: MA Experiment 108607 PARAMETER Experiment Name: At_100uM_ABA_cDNA_P Parameter: Treatment Value: 100uM ABA vs. No Treatment
  misc_feature: MA Experiment ID: 108609 Result: Up-regulated in Transcription
  misc_feature: MA Experiment 108609 PARAMETER Experiment Name: At_100uM_ABA_cDNA_P Parameter: Timepoint (hr) Value: 24
  misc_feature: MA Experiment 108609 PARAMETER Experiment Name: At_100uM_ABA_cDNA_P Parameter: Tissue Value: Aerial
  misc_feature: MA Experiment 108609 PARAMETER Experiment Name: At_100uM_ABA_cDNA_P Parameter: Treatment Value: 100uM ABA vs. No Treatment
  misc_feature: MA Experiment ID: 108668 Result: Up-regulated in Transcription
  misc_feature: MA Experiment 108668 PARAMETER Experiment Name: At_2mM_SA_cDNA_P Parameter: Plant Line Value: WS
  misc_feature: MA Experiment 108668 PARAMETER Experiment Name: At_2mM_SA_cDNA_P Parameter: Timepoint (hr) Value: 6
  misc_feature: MA Experiment 108668 PARAMETER Experiment Name: At_2mM_SA_cDNA_P Parameter: Treatment Value: 2mM SA vs. No Treatment
  misc_feature: MA Experiment ID: 20000089 Result: Down-regulated in Transcription
  misc_feature: MA Experiment ID: 20000090 Result: Down-regulated in Transcription
  misc_feature: MA Experiment ID: 20000169 Result: Up-regulated in Transcription
  misc_feature: MA Experiment 20000169 PARAMETER Experiment Name: At_100uM_ABA_P Parameter: Age (day) Value: 14
  misc_feature: MA Experiment 20000169 PARAMETER Experiment Name: At_100uM_ABA_P Parameter: Organism Value: A. thaliana
  misc_feature: MA Experiment 20000169 PARAMETER Experiment Name: At_100uM_ABA_P Parameter: Plant Line Value: WS
  misc_feature: MA Experiment 20000169 PARAMETER Experiment Name: At_100uM_ABA_P Parameter: Timepoint (hr) Value: 6
  misc_feature: MA Experiment 20000169 PARAMETER Experiment Name: At_100uM_ABA_P Parameter: Tissue Value: Aerial
  misc_feature: MA Experiment 20000169 PARAMETER Experiment Name: At_100uM_ABA_P Parameter: Treatment Value: 100uM ABA vs. No Treatment
  misc_feature: MA Experiment ID: 20000180 Result: Up-regulated in Transcription
  misc_feature: MA Experiment 20000180 PARAMETER Experiment Name: At_Germinating_Seeds_P Parameter: Age (hr) Value: 24 vs. 0
  misc_feature: MA Experiment 20000180 PARAMETER Experiment Name: At_Germinating_Seeds_P Parameter: Tissue Value: Germinating Seeds
  misc_feature: MA Experiment ID: 20000182 Result: Up-regulated in Transcription
  misc_feature: MA Experiment 20000182 PARAMETER Experiment Name: At_2mM_SA_P Parameter: Age (day) Value: 14
  misc_feature: MA Experiment 20000182 PARAMETER Experiment Name: At_2mM_SA_P Parameter: Organism Value: A. thaliana
  misc_feature: MA Experiment 20000182 PARAMETER Experiment Name: At_2mM_SA_P Parameter: Plant Line Value: WS
  misc_feature: MA Experiment 20000182 PARAMETER Experiment Name: At_2mM_SA_P Parameter: Timepoint (hr) Value: 6
  misc_feature: MA Experiment 20000182 PARAMETER Experiment Name: At_2mM_SA_P Parameter: Tissue Value: Aerial
  misc_feature: MA Experiment 20000182 PARAMETER Experiment Name: At_2mM_SA_P Parameter: Treatment Value: 2mM SA vs. No Treatment
  misc_feature: MA Experiment ID: 20000185 Result: Down-regulated in Transcription
  misc_feature: MA Experiment 20000185 PARAMETER Experiment Name: At_Roots__P Parameter: Age (day) Value: 7 vs. 21
  misc_feature: MA Experiment 20000185 PARAMETER Experiment Name: At_Roots__P Parameter: Organism Value: A. thaliana
  misc_feature: MA Experiment 20000185 PARAMETER Experiment Name: At_Roots__P Parameter: Tissue Value: Roots vs. Whole Plant
  misc_feature: MA Experiment ID: 20000439 Result: Down-regulated in Transcription
  misc_feature: MA Experiment 20000439 PARAMETER Experiment Name: At_Roots__P Parameter: Age (day) Value: 14 vs. 21
  misc_feature: MA Experiment 20000439 PARAMETER Experiment Name: At_Roots__P Parameter: Organism Value: A. thaliana
  misc_feature: MA Experiment 20000439 PARAMETER Experiment Name: At_Roots__P Parameter: Tissue Value: Roots vs. Whole Plant
  misc_feature: MA Experiment ID: 20000496 Result: Down-regulated in Transcription
  misc_feature: MA Experiment 20000496 PARAMETER Experiment Name: At_Guard_Cells_P Parameter: Harvest Date Value: 7/19/2002
  misc_feature: MA Experiment 20000496 PARAMETER Experiment Name: At_Guard_Cells_P Parameter: Organism Value: Canola
  misc_feature: MA Experiment 20000496 PARAMETER Experiment Name: At_Guard_Cells_P Parameter: Tissue Value: Guard Cells vs. Leaves
  misc_feature: MA Experiment ID: 20000573 Result: Up-regulated in Transcription
  misc_feature: MA Experiment 20000573 PARAMETER Experiment Name: At_100uM_ABA_Mutants__P Parameter: Organism Value: A. thaliana
  misc_feature: MA Experiment 20000573 PARAMETER Experiment Name: At_100uM_ABA_Mutants__P Parameter: Plant Line Value: CS22 vs. Ler wt
  misc_feature: MA Experiment 20000573 PARAMETER Experiment Name: At_100uM_ABA_Mutants__P Parameter: Timepoint (hr) Value: N/A
  misc_feature: MA Experiment 20000573 PARAMETER Experiment Name: At_100uM_ABA_Mutants__P Parameter: Tissue Value: Whole Plant
  misc_feature: MA Experiment 20000573 PARAMETER Experiment Name: At_100uM_ABA_Mutants__P Parameter: Treatment Value: None
  misc_feature: MA Experiment ID: 20001450 Result: Up-regulated in Transcription
  misc_feature: MA Experiment 20001450 PARAMETER Experiment Name: At_Far-red-induction_P Parameter: Age (day) Value: 7
  misc_feature: MA Experiment 20001450 PARAMETER Experiment Name: At_Far-red-induction_P Parameter: Light Value: Far-red vs. White
  misc_feature: MA Experiment 20001450 PARAMETER Experiment Name: At_Far-red-induction_P Parameter: Organism Value: A. thaliana
  misc_feature: MA Experiment 20001450 PARAMETER Experiment Name: At_Far-red-induction_P Parameter: Plant Line Value: Columbia
  misc_feature: MA Experiment 20001450 PARAMETER Experiment Name: At_Far-red-induction_P Parameter: Timepoint (hr) Value: 8
  misc_feature: MA Experiment 20001450 PARAMETER Experiment Name: At_Far-red-induction_P Parameter: Tissue Value: Whole Plant
  misc_feature: MA Experiment ID: 20001555 Result: Up-regulated in Transcription
  misc_feature: MA Experiment 20001555 PARAMETER Experiment Name: At_Drought_Soil_Dry_P Parameter: Age (day) Value: 24
  misc_feature: MA Experiment 20001555 PARAMETER Experiment Name: At_Drought_Soil_Dry_P Parameter: Organism Value: A. thaliana
  misc_feature: MA Experiment 20001555 PARAMETER Experiment Name: At_Drought_Soil_Dry_P Parameter: Plant Line Value: WS
  misc_feature: MA Experiment 20001555 PARAMETER Experiment Name: At_Drought_Soil_Dry_P Parameter: Post Timepoint (hr) Value: None
  misc_feature: MA Experiment 20001555 PARAMETER Experiment Name: At_Drought_Soil_Dry_P Parameter: Post-Treatment Value: None
  misc_feature: MA Experiment 20001555 PARAMETER Experiment Name: At_Drought_Soil_Dry_P Parameter: Timepoint (day) Value: 10
  misc_feature: MA Experiment 20001555 PARAMETER Experiment Name: At_Drought_Soil_Dry_P Parameter: Treatment Value: Drought vs. No Drought
  misc_feature: MA Experiment ID: 20001556 Result: Up-regulated in Transcription
  misc_feature: MA Experiment 20001556 PARAMETER Experiment Name: At_Drought_Soil_Dry_P Parameter: Age (day) Value: 26
  misc_feature: MA Experiment 20001556 PARAMETER Experiment Name: At_Drought_Soil_Dry_P Parameter: Organism Value: A. thaliana
  misc_feature: MA Experiment 20001556 PARAMETER Experiment Name: At_Drought_Soil_Dry_P Parameter: Plant Line Value: WS
  misc_feature: MA Experiment 20001556 PARAMETER Experiment Name: At_Drought_Soil_Dry_P Parameter: Post Timepoint (hr) Value: None
  misc_feature: MA Experiment 20001556 PARAMETER Experiment Name: At_Drought_Soil_Dry_P Parameter: Post-Treatment Value: None
  misc_feature: MA Experiment 20001556 PARAMETER Experiment Name: At_Drought_Soil_Dry_P Parameter: Timepoint (day) Value: 12
  misc_feature: MA Experiment 20001556 PARAMETER Experiment Name: At_Drought_Soil_Dry_P Parameter: Treatment Value: Drought vs. No Drought
  misc_feature: MA Experiment ID: 20001559 Result: Up-regulated in Transcription
  misc_feature: MA Experiment 20001559 PARAMETER Experiment Name: At_Drought_Soil_Dry_P Parameter: Age (day) Value: 28
  misc_feature: MA Experiment 20001559 PARAMETER Experiment Name: At_Drought_Soil_Dry_P Parameter: Organism Value: A. thaliana
  misc_feature: MA Experiment 20001559 PARAMETER Experiment Name: At_Drought_Soil_Dry_P Parameter: Plant Line Value: WS
  misc_feature: MA Experiment 20001559 PARAMETER Experiment Name: At_Drought_Soil_Dry_P Parameter: Post Timepoint (hr) Value: 29
  misc_feature: MA Experiment 20001559 PARAMETER Experiment Name: At_Drought_Soil_Dry_P Parameter: Post-Treatment Value: Re-Water vs. No Drought
  misc_feature: MA Experiment 20001559 PARAMETER Experiment Name: At_Drought_Soil_Dry_P Parameter: Timepoint (day) Value: 14
  misc_feature: MA Experiment 20001559 PARAMETER Experiment Name: At_Drought_Soil_Dry_P Parameter: Treatment Value: Drought vs. No Drought
  misc_feature: MA Experiment ID: 20001904 Result: Up-regulated in Transcription
  misc_feature: MA Experiment 20001904 PARAMETER Experiment Name: At_Drought_Reproduction_P Parameter: Age (day) Value: 37
  misc_feature: MA Experiment 20001904 PARAMETER Experiment Name: At_Drought_Reproduction_P Parameter: Organism Value: A. thaliana
  misc_feature: MA Experiment 20001904 PARAMETER Experiment Name: At_Drought_Reproduction_P Parameter: Plant Line Value: WS
  misc_feature: MA Experiment 20001904 PARAMETER Experiment Name: At_Drought_Reproduction_P Parameter: Timepoint (day) Value: 7
  misc_feature: MA Experiment 20001904 PARAMETER Experiment Name: At_Drought_Reproduction_P Parameter: Tissue Value: Rosettes
  misc_feature: MA Experiment 20001904 PARAMETER Experiment Name: At_Drought_Reproduction_P Parameter: Treatment Value: Drought vs. No Drought
  misc_feature: MA Experiment ID: 20001905 Result: Up-regulated in Transcription
  misc_feature: MA Experiment 20001905 PARAMETER Experiment Name: At_Drought_Reproduction_P Parameter: Age (day) Value: 40
  misc_feature: MA Experiment 20001905 PARAMETER Experiment Name: At_Drought_Reproduction_P Parameter: Organism Value: A. thaliana
  misc_feature: MA Experiment 20001905 PARAMETER Experiment Name: At_Drought_Reproduction_P Parameter: Plant Line Value: WS
  misc_feature: MA Experiment 20001905 PARAMETER Experiment Name: At_Drought_Reproduction_P Parameter: Timepoint (day) Value: 10
  misc_feature: MA Experiment 20001905 PARAMETER Experiment Name: At_Drought_Reproduction_P Parameter: Tissue Value: Rosettes
  misc_feature: MA Experiment 20001905 PARAMETER Experiment Name: At_Drought_Reproduction_P Parameter: Treatment Value: Drought vs. No Drought
  misc_feature: MA Experiment ID: 20001906 Result: Up-regulated in Transcription
  misc_feature: MA Experiment 20001906 PARAMETER Experiment Name: At_Drought_Reproduction_P Parameter: Age (day) Value: 35
  misc_feature: MA Experiment 20001906 PARAMETER Experiment Name: At_Drought_Reproduction_P Parameter: Organism Value: A. thaliana
  misc_feature: MA Experiment 20001906 PARAMETER Experiment Name: At_Drought_Reproduction_P Parameter: Plant Line Value: WS
  misc_feature: MA Experiment 20001906 PARAMETER Experiment Name: At_Drought_Reproduction_P Parameter: Timepoint (day) Value: 5
  misc_feature: MA Experiment 20001906 PARAMETER Experiment Name: At_Drought_Reproduction_P Parameter: Tissue Value: Siliques
  misc_feature: MA Experiment 20001906 PARAMETER Experiment Name: At_Drought_Reproduction_P Parameter: Treatment Value: Drought vs. No Drought
  misc_feature: MA Experiment ID: 20001908 Result: Up-regulated in Transcription
  misc_feature: MA Experiment 20001908 PARAMETER Experiment Name: At_Drought_Reproduction_P Parameter: Age (day) Value: 40
  misc_feature: MA Experiment 20001908 PARAMETER Experiment Name: At_Drought_Reproduction_P Parameter: Organism Value: A. thaliana
  misc_feature: MA Experiment 20001908 PARAMETER Experiment Name: At_Drought_Reproduction_P Parameter: Plant Line Value: WS
  misc_feature: MA Experiment 20001908 PARAMETER Experiment Name: At_Drought_Reproduction_P Parameter: Timepoint (day) Value: 10
  misc_feature: MA Experiment 20001908 PARAMETER Experiment Name: At_Drought_Reproduction_P Parameter: Tissue Value: Siliques
  misc_feature: MA Experiment 20001908 PARAMETER Experiment Name: At_Drought_Reproduction_P Parameter: Treatment Value: Drought vs. No Drought
  misc_feature: MA Experiment ID: 20001911 Result: Up-regulated in Transcription
  misc_feature: MA Experiment 20001911 PARAMETER Experiment Name: At_Drought_Reproduction_P Parameter: Age (day) Value: 40
  misc_feature: MA Experiment 20001911 PARAMETER Experiment Name: At_Drought_Reproduction_P Parameter: Organism Value: A. thaliana
  misc_feature: MA Experiment 20001911 PARAMETER Experiment Name: At_Drought_Reproduction_P Parameter: Plant Line Value: WS
  misc_feature: MA Experiment 20001911 PARAMETER Experiment Name: At_Drought_Reproduction_P Parameter: Timepoint (day) Value: 10
  misc_feature: MA Experiment 20001911 PARAMETER Experiment Name: At_Drought_Reproduction_P Parameter: Tissue Value: Flowers
  misc_feature: MA Experiment 20001911 PARAMETER Experiment Name: At_Drought_Reproduction_P Parameter: Treatment Value: Drought vs. No Drought
gttaaaaggtgagatagtgtaaaagcattgatcaagattcatgcaatgggaggagaaggtggtgctgagcccgttattcactttgtgtttgttcatggagccagtcacggagcttggtgttggtataaactcaccactcttctcgacgccgccgggttcaaatcaacctccgtagatctcaccggcgctggcatcagcctcatagactctaacatcgtcttcgactccgatcaatataaccgtcctctcttctctctcttgtccgatctccctcctcaccacaaagtcatactcgttggacatagcatcggtggaggaagtgtcaccgaagctctttgcaagttcactgacaaaatctccatggccatttacctcgcggcttccatggttcaacccggatccatcccttctccgcatctttcaaacatacatgtgggagaagaagatatatgggagtacacatatggtgaaggtaccgataaaccacccaccgggagtcctcatgaaaccggagtttatacgccattattactatagccaaagccctcttgaggacgtaactttgtcatctaagctgttgcgtcctgctcctatgagggcctttcaagatcttgataagctacctccaaatcccgaggccgagaaagttcctcgagtttacatcaagactgctaaggataatctatttgattctgtgcgacaagaccttttggtggagaattggccaccttctcagctgtatgtcttggaggatagtgaccattcggctttcttctctgtcccaactaccttattcgcgtatctcctccgtgcggtttcttttcttcaacgataaacttaaacttcatccttcctaaattccgatctgataacaaactaattgggaataattagatgatttgtttggaaggtgataggtatgatattatgatttt

SEQ ID NO: 27150 - protein, 163 aa, Arabidopsis thaliana
  peptide (1)..(163): Ceres Seq. ID no. 12394306
  misc_feature (13)..(158): Homolog of NCBI NO: 30681236 NR Description: hydrolase family [Arabidopsis thaliana]
  misc_feature (13)..(158): Homolog of NCBI NO: 7485010 NR Description: host response protein homolog T5L19.30 -
  misc_feature (12)..(163): Homolog of NCBI NO: 15230077 NR Description: alpha/beta hydrolase, putative; protein id:
  misc_feature (13)..(158): Homolog of NCBI NO: 25518661 NR Description: hypothetical protein F12G12.19 - Arabidopsis
  misc_feature (13)..(158): Homolog of NCBI NO: 21595837 NR Description: polyneuridine aldehyde esterase, putative
  misc_feature (13)..(158): Homolog of NCBI NO: 15218463 NR Description: polyneuridine aldehyde esterase, putative
  misc_feature (12)..(151): Homolog of NCBI NO: 15228391 NR Description: putative alpha-hydroxynitrile lyase
  misc_feature (12)..(149): Homolog of NCBI NO: 15237165 NR Description: polyneuridine aldehyde esterase-like
  misc_feature (1)..(150): Homolog of NCBI NO: 15235844 NR Description: cyanohydrin lyase like protein
  misc_feature (1)..(150): Homolog of NCBI NO: 15866583 NR Description: hypothetical protein [Capsella rubella]
MGGEGGAEPVIHFVFVHGASHGAWCWYKLTTLLDAAGFKSTSVDLTGAGISLIDSNIVFDSDQYNRPLFSLLSDLPPHHKVILVGHSIGGGSVTEALCKFTDKISMAIYLAASMVQPGSIPSPHLSNIHVGEEDIWEYTYGEGTDKPPTGSPHETGVYTPLLL

SEQ ID NO: 27151 - protein, 134 aa, Arabidopsis thaliana
  peptide (1)..(134): Ceres Seq. ID no. 12394307
  misc_feature (18)..(126): Homolog of NCBI NO: 30681236 NR Description: hydrolase family [Arabidopsis thaliana]
  misc_feature (18)..(126): Homolog of NCBI NO: 7485010 NR Description: host response protein homolog T5L19.30 -
  misc_feature (18)..(126): Homolog of NCBI NO: 15230077 NR Description: alpha/beta hydrolase, putative; protein id:
  misc_feature (20)..(126): Homolog of NCBI NO: 21595837 NR Description: polyneuridine aldehyde esterase, putative
  misc_feature (20)..(126): Homolog of NCBI NO: 25518661 NR Description: hypothetical protein F12G12.19 - Arabidopsis
  misc_feature (20)..(126): Homolog of NCBI NO: 15218463 NR Description: polyneuridine aldehyde esterase, putative
  misc_feature (16)..(128): Homolog of NCBI NO: 15228391 NR Description: putative alpha-hydroxynitrile lyase
  misc_feature (1)..(134): Homolog of NCBI NO: 15235844 NR Description: cyanohydrin lyase like protein
  misc_feature (16)..(132): Homolog of NCBI NO: 15237165 NR Description: polyneuridine aldehyde esterase-like
  misc_feature (20)..(134): Homolog of NCBI NO: 15866583 NR Description: hypothetical protein [Capsella rubella]
MWEKKIYGSTHMVKVPINHPPGVLMKPEFIRHYYYSQSPLEDVTLSSKLLRPAPMRAFQDLDKLPPNPEAEKVPRVYIKTAKDNLFDSVRQDLLVENWPPSQLYVLEDSDHSAFFSVPTTLFAYLLRAVSFLQR

SEQ ID NO: 27152 - protein, 123 aa, Arabidopsis thaliana
  peptide (1)..(123): Ceres Seq. ID no. 12394308
  misc_feature (7)..(115): Homolog of NCBI NO: 30681236 NR Description: hydrolase family [Arabidopsis thaliana]
  misc_feature (7)..(115): Homolog of NCBI NO: 7485010 NR Description: host response protein homolog T5L19.30 -
  misc_feature (7)..(115): Homolog of NCBI NO: 15230077 NR Description: alpha/beta hydrolase, putative; protein id:
  misc_feature (9)..(115): Homolog of NCBI NO: 21595837 NR Description: polyneuridine aldehyde esterase, putative
  misc_feature (9)..(115): Homolog of NCBI NO: 25518661 NR Description: hypothetical protein F12G12.19 - Arabidopsis
  misc_feature (9)..(115): Homolog of NCBI NO: 15218463 NR Description: polyneuridine aldehyde esterase, putative
  misc_feature (5)..(117): Homolog of NCBI NO: 15228391 NR Description: putative alpha-hydroxynitrile lyase
  misc_feature (1)..(123): Homolog of NCBI NO: 15235844 NR Description: cyanohydrin lyase like protein
  misc_feature (5)..(121): Homolog of NCBI NO: 15237165 NR Description: polyneuridine aldehyde esterase-like
  misc_feature (9)..(123): Homolog of NCBI NO: 15866583 NR Description: hypothetical protein [Capsella rubella]
MVKVPINHPPGVLMKPEFIRHYYYSQSPLEDVTLSSKLLRPAPMRAFQDLDKLPPNPEAEKVPRVYIKTAKDNLFDSVRQDLLVENWPPSQLYVLEDSDHSAFFSVPTTLFAYLLRAVSFLQR

SEQ ID NO: 27153 - DNA, 843 bp, Arabidopsis thaliana
  misc_feature (1)..(843): Ceres Seq. ID no. 12323614
  misc_feature: MA Experiment ID: 108434 Result: Up-regulated in Transcription
  misc_feature: MA Experiment 108434 PARAMETER Experiment Name: At_Root_Tips_cDNA_P Parameter: Tissue Value: Root Tips
  misc_feature: MA Experiment ID: 108461 Result: Down-regulated in Transcription
  misc_feature: MA Experiment 108461 PARAMETER Experiment Name: At_Germinating_Seeds_cDNA_P Parameter: Age (day) Value: 1 vs. 0
  misc_feature: MA Experiment 108461 PARAMETER Experiment Name: At_Germinating_Seeds_cDNA_P Parameter: Tissue Value: Germinating Seeds
  misc_feature: MA Experiment ID: 108462 Result: Down-regulated in Transcription
  misc_feature: MA Experiment 108462 PARAMETER Experiment Name: At_Germinating_Seeds_cDNA_P Parameter: Age (day) Value: 2 vs. 0
  misc_feature: MA Experiment 108462 PARAMETER Experiment Name: At_Germinating_Seeds_cDNA_P Parameter: Tissue Value: Germinating Seeds
  misc_feature: MA Experiment ID: 108463 Result: Down-regulated in Transcription
  misc_feature: MA Experiment 108463 PARAMETER Experiment Name: At_Germinating_Seeds_cDNA_P Parameter: Age (day) Value: 3 vs. 0
  misc_feature: MA Experiment 108463 PARAMETER Experiment Name: At_Germinating_Seeds_cDNA_P Parameter: Tissue Value: Germinating Seeds
  misc_feature: MA Experiment ID: 108464 Result: Down-regulated in Transcription
  misc_feature: MA Experiment 108464 PARAMETER Experiment Name: At_Germinating_Seeds_cDNA_P Parameter: Age (day) Value: 4 vs. 0
  misc_feature: MA Experiment 108464 PARAMETER Experiment Name: At_Germinating_Seeds_cDNA_P Parameter: Tissue Value: Germinating Seeds
  misc_feature: MA Experiment ID: 108488 Result: Up-regulated in Transcription
  misc_feature: MA Experiment ID: 108573 Result: Down-regulated in Transcription
  misc_feature: MA Experiment 108573 PARAMETER Experiment Name: At_Drought_cDNA_P Parameter: Timepoint (hr) Value: 6
  misc_feature: MA Experiment 108573 PARAMETER Experiment Name: At_Drought_cDNA_P Parameter: Tissue Value: Aerial
  misc_feature: MA Experiment 108573 PARAMETER Experiment Name: At_Drought_cDNA_P Parameter: Treatment Value: Drought vs. No Drought
  misc_feature: MA Experiment ID: 20000089 Result: Up-regulated in Transcription
  misc_feature: MA Experiment ID: 20000180 Result: Down-regulated in Transcription
  misc_feature: MA Experiment 20000180 PARAMETER Experiment Name: At_Germinating_Seeds_P Parameter: Age (hr) Value: 24 vs. 0
  misc_feature: MA Experiment 20000180 PARAMETER Experiment Name: At_Germinating_Seeds_P Parameter: Tissue Value: Germinating Seeds
  misc_feature: MA Experiment ID: 20000794 Result: Down-regulated in Transcription
  misc_feature: MA Experiment 20000794 PARAMETER Experiment Name: At_Petals_P Parameter: Age (day) Value: 23-25 days
  misc_feature: MA Experiment 20000794 PARAMETER Experiment Name: At_Petals_P Parameter: Plant Line Value: WS
  misc_feature: MA Experiment 20000794 PARAMETER Experiment Name: At_Petals_P Parameter: Tissue Value: Petals vs. Whole plant
  misc_feature: MA Experiment ID: 20001248 Result: Up-regulated in Transcription
  misc_feature: MA Experiment 20001248 PARAMETER Experiment Name: At_Far-red-induction_P Parameter: Age (day) Value: 7
  misc_feature: MA Experiment 20001248 PARAMETER Experiment Name: At_Far-red-induction_P Parameter: Light Value: Far-red vs. White
  misc_feature: MA Experiment 20001248 PARAMETER Experiment Name: At_Far-red-induction_P Parameter: Organism Value: A. thaliana
  misc_feature: MA Experiment 20001248 PARAMETER Experiment Name: At_Far-red-induction_P Parameter: Plant Line Value: Columbia
  misc_feature: MA Experiment 20001248 PARAMETER Experiment Name: At_Far-red-induction_P Parameter: Timepoint (hr) Value: 4
  misc_feature: MA Experiment 20001248 PARAMETER Experiment Name: At_Far-red-induction_P Parameter: Tissue Value: Whole Plant
  misc_feature: MA Experiment ID: 20001558 Result: Up-regulated in Transcription
  misc_feature: MA Experiment 20001558 PARAMETER Experiment Name: At_Drought_Soil_Dry_P Parameter: Age (day) Value: 27
  misc_feature: MA Experiment 20001558 PARAMETER Experiment Name: At_Drought_Soil_Dry_P Parameter: Organism Value: A. thaliana
  misc_feature: MA Experiment 20001558 PARAMETER Experiment Name: At_Drought_Soil_Dry_P Parameter: Plant Line Value: WS
  misc_feature: MA Experiment 20001558 PARAMETER Experiment Name: At_Drought_Soil_Dry_P Parameter: Post Timepoint (hr) Value: 6
  misc_feature: MA Experiment 20001558 PARAMETER Experiment Name: At_Drought_Soil_Dry_P Parameter: Post-Treatment Value: Re-Water vs. No Drought
  misc_feature: MA Experiment 20001558 PARAMETER Experiment Name: At_Drought_Soil_Dry_P Parameter: Timepoint (day) Value: 13
  misc_feature: MA Experiment 20001558 PARAMETER Experiment Name: At_Drought_Soil_Dry_P Parameter: Treatment Value: Drought vs. No Drought
  misc_feature: MA Experiment ID: 20001757 Result: Up-regulated in Transcription
  misc_feature: MA Experiment 20001757 PARAMETER Experiment Name: At_50mM_NH4NO3_L-to-H_P Parameter: Timepoint (hr) Value: 6
  misc_feature: MA Experiment 20001757 PARAMETER Experiment Name: At_50mM_NH4NO3_L-to-H_P Parameter: Tissue Value: Leaf
  misc_feature: MA Experiment 20001757 PARAMETER Experiment Name: At_50mM_NH4NO3_L-to-H_P Parameter: Treatment Value: 50mM NH4NO3 vs 100mM Mannitol
aaaccctttccgccgcgaacttcatctctctgctttttcttctccatcgcgaaaataaaaaatcagtgagagagatggcgaggtcgagaagaaagtacaggaactctagggctaaagttcgcgttgctcttcctaagaagaaccctaatatctttaaaccagctttcaacttccctcccaagctccgcgctctcatgggagacgatgtccctgaatgggacgatcaagctagcgttatccagaactacaaatcctttggcgtcatctctaaccctaatttgcttggtatccgagctcgtaccgaccatatgattcaggatgattccctcaacgttcctccacctgtagagccaccgactgatgatcctattgctaaggagttcgagcccattgattctggaagcgaacttgaggaagacgatcttaagacagcattggggaagcaaagaaaagatggaaagagtgctcctttacagccgcttaccactatgcaacgcacacatataaggcgtttggtggagaaacatggtgatgacattgagggcatgtaccgagacaggaagctaaactcgatgcagcattcggttgcaacacttcgaaagctatgtacgagatatcagatttacaaagacaagaacccgattttagtttcatgatgatgatgatgatctctgtatcctttgttcaattttgttataaacttgcaacaacactacaatggttatgaagtttctataaatcagaattcagtattttttctattcagaagcatctttatgaggtgaagaggacatatgcaaacttataaaccatatttaatgcttaagagttttcagttttttc

SEQ ID NO: 27154 - protein, 217 aa, Arabidopsis thaliana
  peptide (1)..(217): Ceres Seq. ID no. 12323615
  misc_feature (25)..(139): Homolog of NCBI NO: 25372996 NR Description: hypothetical protein F22D16.13 - Arabidopsis
  misc_feature (25)..(217): Homolog of NCBI NO: 18379024 NR Description: expressed protein
TLSAANFISLLFLLHRENKKSVREMARSRRKYRNSRAKVRVALPKKNPNIFKPAFNFPPKLRALMGDDVPEWDDQASVIQNYKSFGVISNPNLLGIRARTDHMIQDDSLNVPPPVEPPTDDPIAKEFEPIDSGSELEEDDLKTALGKQRKDGKSAPLQPLTTMQRTHIRRLVEKHGDDIEGMYRDRKLNSMQHSVATLRKLCTRYQIYKDKNPILVS

SEQ ID NO: 27155 - protein, 193 aa, Arabidopsis thaliana
  peptide (1)..(193): Ceres Seq. ID no. 12323616
  misc_feature (1)..(115): Homolog of NCBI NO: 25372996 NR Description: hypothetical protein F22D16.13 - Arabidopsis
  misc_feature (1)..(193): Homolog of NCBI NO: 18379024 NR Description: expressed protein
MARSRRKYRNSRAKVRVALPKKNPNIFKPAFNFPPKLRALMGDDVPEWDDQASVIQNYKSFGVISNPNLLGIRARTDHMIQDDSLNVPPPVEPPTDDPIAKEFEPIDSGSELEEDDLKTALGKQRKDGKSAPLQPLTTMQRTHIRRLVEKHGDDIEGMYRDRKLNSMQHSVATLRKLCTRYQIYKDKNPILVS

SEQ ID NO: 27156 - protein, 153 aa, Arabidopsis thaliana
  peptide (1)..(153): Ceres Seq. ID no. 12323617
  misc_feature (1)..(75): Homolog of NCBI NO: 25372996 NR Description: hypothetical protein F22D16.13 - Arabidopsis
  misc_feature (1)..(153): Homolog of NCBI NO: 18379024 NR Description: expressed protein
MGDDVPEWDDQASVIQNYKSFGVISNPNLLGIRARTDHMIQDDSLNVPPPVEPPTDDPIAKEFEPIDSGSELEEDDLKTALGKQRKDGKSAPLQPLTTMQRTHIRRLVEKHGDDIEGMYRDRKLNSMQHSVATLRKLCTRYQIYKDKNPILVS

SEQ ID NO: 27157 - DNA, 989 bp, Arabidopsis thaliana
  misc_feature (1)..(989): Ceres Seq. ID no. 13493806
  misc_feature: MA Experiment ID: 108473 Result: Down-regulated in Transcription
  misc_feature: MA Experiment 108473 PARAMETER Experiment Name: At_Drought_Flowers_cDNA_P Parameter: Timepoint (hr) Value: 7 d
  misc_feature: MA Experiment 108473 PARAMETER Experiment Name: At_Drought_Flowers_cDNA_P Parameter: Tissue Value: Flower
  misc_feature: MA Experiment 108473 PARAMETER Experiment Name: At_Drought_Flowers_cDNA_P Parameter: Treatment Value: Drought vs. No Drought
  misc_feature: MA Experiment ID: 108573 Result: Down-regulated in Transcription
  misc_feature: MA Experiment 108573 PARAMETER Experiment Name: At_Drought_cDNA_P Parameter: Timepoint (hr) Value: 6
  misc_feature: MA Experiment 108573 PARAMETER Experiment Name: At_Drought_cDNA_P Parameter: Tissue Value: Aerial
  misc_feature: MA Experiment 108573 PARAMETER Experiment Name: At_Drought_cDNA_P Parameter: Treatment Value: Drought vs. No Drought
  misc_feature: MA Experiment ID: 108577 Result: Down-regulated in Transcription
  misc_feature: MA Experiment 108577 PARAMETER Experiment Name: At_42deg_Heat_cDNA_P Parameter: Temperature (deg C) Value: 42 vs. 22
  misc_feature: MA Experiment 108577 PARAMETER Experiment Name: At_42deg_Heat_cDNA_P Parameter: Timepoint (hr) Value: 6
  misc_feature: MA Experiment 108577 PARAMETER Experiment Name: At_42deg_Heat_cDNA_P Parameter: Tissue Value: Aerial
  misc_feature: MA Experiment ID: 20000111 Result: Down-regulated in Transcription
  misc_feature: MA Experiment 20000111 PARAMETER Experiment Name: At_42deg_Heat_cDNA_P Parameter: Temperature (deg C) Value: 42 vs. 22
  misc_feature: MA Experiment 20000111 PARAMETER Experiment Name: At_42deg_Heat_cDNA_P Parameter: Timepoint (hr) Value: 6
  misc_feature: MA Experiment 20000111 PARAMETER Experiment Name: At_42deg_Heat_cDNA_P Parameter: Tissue Value: Aerial
  misc_feature: MA Experiment ID: 20000112 Result: Down-regulated in Transcription
  misc_feature: MA Experiment 20000112 PARAMETER Experiment Name: At_42deg_Heat_cDNA_P Parameter: Temperature (deg C) Value: 42 vs. 22
  misc_feature: MA Experiment 20000112 PARAMETER Experiment Name: At_42deg_Heat_cDNA_P Parameter: Timepoint (hr) Value: 2
  misc_feature: MA Experiment 20000112 PARAMETER Experiment Name: At_42deg_Heat_cDNA_P Parameter: Tissue Value: Aerial
  misc_feature: MA Experiment ID: 20000113 Result: Down-regulated in Transcription
  misc_feature: MA Experiment 20000113 PARAMETER Experiment Name: At_42deg_Heat_cDNA_P Parameter: Temperature (deg C) Value: 42 vs. 22
  misc_feature: MA Experiment 20000113 PARAMETER Experiment Name: At_42deg_Heat_cDNA_P Parameter: Timepoint (hr) Value: 8
  misc_feature: MA Experiment 20000113 PARAMETER Experiment Name: At_42deg_Heat_cDNA_P Parameter: Tissue Value: Aerial
  misc_feature: MA Experiment ID: 20000171 Result: Down-regulated in Transcription
  misc_feature: MA Experiment 20000171 PARAMETER Experiment Name: At_42deg_Heat_P Parameter: Age (day) Value: 14
  misc_feature: MA Experiment 20000171 PARAMETER Experiment Name: At_42deg_Heat_P Parameter: Organism Value: A. thaliana
  misc_feature: MA Experiment 20000171 PARAMETER Experiment Name: At_42deg_Heat_P Parameter: Plant Line Value: WS
  misc_feature: MA Experiment 20000171 PARAMETER Experiment Name: At_42deg_Heat_P Parameter: Temperature (deg C) Value: 42 vs. 22
  misc_feature: MA Experiment 20000171 PARAMETER Experiment Name: At_42deg_Heat_P Parameter: Timepoint (hr) Value: 1
  misc_feature: MA Experiment 20000171 PARAMETER Experiment Name: At_42deg_Heat_P Parameter: Tissue Value: Aerial
  misc_feature: MA Experiment ID: 20000173 Result: Down-regulated in Transcription
  misc_feature: MA Experiment 20000173 PARAMETER Experiment Name: At_42deg_Heat_P Parameter: Age (day) Value: 14
  misc_feature: MA Experiment 20000173 PARAMETER Experiment Name: At_42deg_Heat_P Parameter: Organism Value: A. thaliana
  misc_feature: MA Experiment 20000173 PARAMETER Experiment Name: At_42deg_Heat_P Parameter: Plant Line Value: WS
  misc_feature: MA Experiment 20000173 PARAMETER Experiment Name: At_42deg_Heat_P Parameter: Temperature (deg C) Value: 42 vs. 22
  misc_feature: MA Experiment 20000173 PARAMETER Experiment Name: At_42deg_Heat_P Parameter: Timepoint (hr) Value: 6
  misc_feature: MA Experiment 20000173 PARAMETER Experiment Name: At_42deg_Heat_P Parameter: Tissue Value: Aerial
  misc_feature: MA Experiment ID: 20000185 Result: Down-regulated in Transcription
  misc_feature: MA Experiment 20000185 PARAMETER Experiment Name: At_Roots__P Parameter: Age (day) Value: 7 vs. 21
  misc_feature: MA Experiment 20000185 PARAMETER Experiment Name: At_Roots__P Parameter: Organism Value: A. thaliana
  misc_feature: MA Experiment 20000185 PARAMETER Experiment Name: At_Roots__P Parameter: Tissue Value: Roots vs. Whole Plant
  misc_feature: MA Experiment ID: 20000437 Result: Down-regulated in Transcription
  misc_feature: MA Experiment 20000437 PARAMETER Experiment Name: At_Drought_P Parameter: Age (day) Value: 8
  misc_feature: MA Experiment 20000437 PARAMETER Experiment Name: At_Drought_P Parameter: Organism Value: A. thaliana
  misc_feature: MA Experiment 20000437 PARAMETER Experiment Name: At_Drought_P Parameter: Plant Line Value: WS
  misc_feature: MA Experiment 20000437 PARAMETER Experiment Name: At_Drought_P Parameter: Timepoint (hr) Value: 24
  misc_feature: MA Experiment 20000437 PARAMETER Experiment Name: At_Drought_P Parameter: Tissue Value: Whole Plant
  misc_feature: MA Experiment 20000437 PARAMETER Experiment Name: At_Drought_P Parameter: Treatment Value: Drought vs. No Drought
  misc_feature: MA Experiment ID: 20000439 Result: Down-regulated in Transcription
  misc_feature: MA Experiment 20000439 PARAMETER Experiment Name: At_Roots__P Parameter: Age (day) Value: 14 vs. 21
  misc_feature: MA Experiment 20000439 PARAMETER Experiment Name: At_Roots__P Parameter: Organism Value: A. thaliana
  misc_feature: MA Experiment 20000439 PARAMETER Experiment Name: At_Roots__P Parameter: Tissue Value: Roots vs. Whole Plant
  misc_feature: MA Experiment ID: 20000451 Result: Down-regulated in Transcription
  misc_feature: MA Experiment 20000451 PARAMETER Experiment Name: At_CS6879_Shoots-Roots_P Parameter: Age (day) Value: 14
  misc_feature: MA Experiment 20000451 PARAMETER Experiment Name: At_CS6879_Shoots-Roots_P Parameter: Organism Value: A. thaliana
  misc_feature: MA Experiment 20000451 PARAMETER Experiment Name: At_CS6879_Shoots-Roots_P Parameter: Plant Line Value: CS6879 vs. WS
  misc_feature: MA Experiment 20000451 PARAMETER Experiment Name: At_CS6879_Shoots-Roots_P Parameter: Tissue Value: Roots
  misc_feature: MA Experiment ID: 20000452 Result: Down-regulated in Transcription
  misc_feature: MA Experiment 20000452 PARAMETER Experiment Name: At_CS6879_Shoots-Roots_P Parameter: Age (day) Value: 14
  misc_feature: MA Experiment 20000452 PARAMETER Experiment Name: At_CS6879_Shoots-Roots_P Parameter: Organism Value: A. thaliana
  misc_feature: MA Experiment 20000452 PARAMETER Experiment Name: At_CS6879_Shoots-Roots_P Parameter: Plant Line Value: CS6879 vs. WS
  misc_feature: MA Experiment 20000452 PARAMETER Experiment Name: At_CS6879_Shoots-Roots_P Parameter: Tissue Value: Shoots
  misc_feature: MA Experiment ID: 20000495 Result: Down-regulated in Transcription
  misc_feature: MA Experiment 20000495 PARAMETER Experiment Name: At_Guard_Cells_P Parameter: Harvest Date Value: 8/2/2002
  misc_feature: MA Experiment 20000495 PARAMETER Experiment Name: At_Guard_Cells_P Parameter: Organism Value: A. thaliana
  misc_feature: MA Experiment 20000495 PARAMETER Experiment Name: At_Guard_Cells_P Parameter: Tissue Value: Guard Cells vs. Leaves
  misc_feature: MA Experiment ID: 20000573 Result: Down-regulated in Transcription
  misc_feature: MA Experiment 20000573 PARAMETER Experiment Name: At_100uM_ABA_Mutants__P Parameter: Organism Value: A. thaliana
  misc_feature: MA Experiment 20000573 PARAMETER Experiment Name: At_100uM_ABA_Mutants__P Parameter: Plant Line Value: CS22 vs. Ler wt
  misc_feature: MA Experiment 20000573 PARAMETER Experiment Name: At_100uM_ABA_Mutants__P Parameter: Timepoint (hr) Value: N/A
  misc_feature: MA Experiment 20000573 PARAMETER Experiment Name: At_100uM_ABA_Mutants__P Parameter: Tissue Value: Whole Plant
  misc_feature: MA Experiment 20000573 PARAMETER Experiment Name: At_100uM_ABA_Mutants__P Parameter: Treatment Value: None
  misc_feature: MA Experiment ID: 20000574 Result: Down-regulated in Transcription
  misc_feature: MA Experiment 20000574 PARAMETER Experiment Name: At_100uM_ABA_Mutants__P Parameter: Organism Value: A. thaliana
  misc_feature: MA Experiment 20000574 PARAMETER Experiment Name: At_100uM_ABA_Mutants__P Parameter: Plant Line Value: CS23 vs. Ler wt
  misc_feature: MA Experiment 20000574 PARAMETER Experiment Name: At_100uM_ABA_Mutants__P Parameter: Timepoint (hr) Value: N/A
  misc_feature: MA Experiment 20000574 PARAMETER Experiment Name: At_100uM_ABA_Mutants__P Parameter: Tissue Value: Whole Plant
  misc_feature: MA Experiment 20000574 PARAMETER Experiment Name: At_100uM_ABA_Mutants__P Parameter: Treatment Value: None
  misc_feature: MA Experiment ID: 20001248 Result: Down-regulated in Transcription
  misc_feature: MA Experiment 20001248 PARAMETER Experiment Name: At_Far-red-induction_P Parameter: Age (day) Value: 7
  misc_feature: MA Experiment 20001248 PARAMETER Experiment Name: At_Far-red-induction_P Parameter: Light Value: Far-red vs. White
  misc_feature: MA Experiment 20001248 PARAMETER Experiment Name: At_Far-red-induction_P Parameter: Organism Value: A. thaliana
  misc_feature: MA Experiment 20001248 PARAMETER Experiment Name: At_Far-red-induction_P Parameter: Plant Line Value: Columbia
  misc_feature: MA Experiment 20001248 PARAMETER Experiment Name: At_Far-red-induction_P Parameter: Timepoint (hr) Value: 4
  misc_feature: MA Experiment 20001248 PARAMETER Experiment Name: At_Far-red-induction_P Parameter: Tissue Value: Whole Plant
  misc_feature: MA Experiment ID: 20001556 Result: Down-regulated in Transcription
  misc_feature: MA Experiment 20001556 PARAMETER Experiment Name: At_Drought_Soil_Dry_P Parameter: Age (day) Value: 26
  misc_feature: MA Experiment 20001556 PARAMETER Experiment Name: At_Drought_Soil_Dry_P Parameter: Organism Value: A. thaliana
  misc_feature: MA Experiment 20001556 PARAMETER Experiment Name: At_Drought_Soil_Dry_P Parameter: Plant Line Value: WS
  misc_feature: MA Experiment 20001556 PARAMETER Experiment Name: At_Drought_Soil_Dry_P Parameter: Post Timepoint (hr) Value: None
  misc_feature: MA Experiment 20001556 PARAMETER Experiment Name: At_Drought_Soil_Dry_P Parameter: Post-Treatment Value: None
  misc_feature: MA Experiment 20001556 PARAMETER Experiment Name: At_Drought_Soil_Dry_P Parameter: Timepoint (day) Value: 12
  misc_feature: MA Experiment 20001556 PARAMETER Experiment Name: At_Drought_Soil_Dry_P Parameter: Treatment Value: Drought vs. No Drought
  misc_feature: MA Experiment ID: 20001559 Result: Down-regulated in Transcription
  misc_feature: MA Experiment 20001559 PARAMETER Experiment Name: At_Drought_Soil_Dry_P Parameter: Age (day) Value: 28
  misc_feature: MA Experiment 20001559 PARAMETER Experiment Name: At_Drought_Soil_Dry_P Parameter: Organism Value: A. thaliana
  misc_feature: MA Experiment 20001559 PARAMETER Experiment Name: At_Drought_Soil_Dry_P Parameter: Plant Line Value: WS
  misc_feature: MA Experiment 20001559 PARAMETER Experiment Name: At_Drought_Soil_Dry_P Parameter: Post Timepoint (hr) Value: 29
  misc_feature: MA Experiment 20001559 PARAMETER Experiment Name: At_Drought_Soil_Dry_P Parameter: Post-Treatment Value: Re-Water vs. No Drought
  misc_feature: MA Experiment 20001559 PARAMETER Experiment Name: At_Drought_Soil_Dry_P Parameter: Timepoint (day) Value: 14
  misc_feature: MA Experiment 20001559 PARAMETER Experiment Name: At_Drought_Soil_Dry_P Parameter: Treatment Value: Drought vs. No Drought
acataataaaccaaacccaacaaagaaaatcaaattttcaaaccaaaaaaaaaaaaaatgagaactttagaagaatcgaagatctctattgtcttcttgttgcttcttctcttctcaatcttcatcagttccagtcaccaggcaaatgaggtattaccagctgaaggagataatgagatgatgatggtgccattgggggaggagaagtttatggtaatgaatgaaacaagaaggaaacttggaagttttcagatatgttcagtttgtacttgttgtggtggtgctaaaggtctttgcttgccttctccttgttgctatgctattaactgcaatatccctaatagaccctttggttactgttctttcactcccaaaacttgcaattgctttggttgccatatctgagatcttctacttcattgtaatttgggagagaaacaagtgaatctaaatcttgattcatcttcaagtgtgaaagggaggaaaaaaagaagaatatctgttcttggtttgagtcttctacttattttttgtctataatttatttttcagtcttcattaaatttcattacctactatctcagcaacatcatcatcctcattaattaattgtctttttgcatttgccattttttcataattttctagggttttttttgttttgagaatcttgttcacacttcaagcaagatttgtttcttcttctctgttcaatcaattctctctatctgtctttctctctctcttttttttttttttcattctcttgtttacttcatcattttgtttcttatgtgttttaagaaagttaaaagttagaatttagcatattttggaaaagagtcattgtttggttaagctggcaattggaagagtatttaatatgatgatgatgatggtattgatggtgatggtggtgatagtgaagctgttaaagttaagtctttgtaatgagtgacatgttaagaaaatggatcaagtttagtgcc

SEQ ID NO: 27158 - protein, 115 aa, Arabidopsis thaliana
  peptide (1)..(115): Ceres Seq. ID no. 13493807
  misc_feature (4)..(115): Homolog of NCBI NO: 18412619 NR Description: expressed protein [Arabidopsis thaliana]
  misc_feature (13)..(115): Homolog of NCBI NO: 34906984 NR Description: P0413C03.15 [Oryza sativa (japonica
  misc_feature (11)..(115): Homolog of NCBI NO: 21954063 NR Description: unknown protein [Arabidopsis thaliana]
  misc_feature (1)..(53): Homolog of NCBI NO: 7487806 NR Description: hypothetical protein T8F5.7 - Arabidopsis
  misc_feature (1)..(115): Homolog of NCBI NO: 21593890 NR Description: unknown [Arabidopsis thaliana]
  misc_feature (1)..(115): Homolog of NCBI NO: 18408246 NR Description: expressed protein [Arabidopsis thaliana]
MRTLEESKISIVFLLLLLFSIFISSSHQANEVLPAEGDNEMMMVPLGEEKFMVMNETRRKLGSFQICSVCTCCGGAKGLCLPSPCCYAINCNIPNRPFGYCSFTPKTCNCFGCHI

SEQ ID NO: 27159 - protein, 75 aa, Arabidopsis thaliana
  peptide (1)..(75): Ceres Seq. ID no. 13493808
  misc_feature (1)..(75): Homolog of NCBI NO: 18412619 NR Description: expressed protein [Arabidopsis thaliana]
  misc_feature (1)..(75): Homolog of NCBI NO: 34906984 NR Description: P0413C03.15 [Oryza sativa (japonica
  misc_feature (1)..(75): Homolog of NCBI NO: 21954063 NR Description: unknown protein [Arabidopsis thaliana]
  misc_feature (1)..(13): Homolog of NCBI NO: 7487806 NR Description: hypothetical protein T8F5.7 - Arabidopsis
  misc_feature (1)..(75): Homolog of NCBI NO: 21593890 NR Description: unknown [Arabidopsis thaliana]
  misc_feature (1)..(75): Homolog of NCBI NO: 18408246 NR Description: expressed protein [Arabidopsis thaliana]
MMMVPLGEEKFMVMNETRRKLGSFQICSVCTCCGGAKGLCLPSPCCYAINCNIPNRPFGYCSFTPKTCNCFGCHI

SEQ ID NO: 27160 - protein, 74 aa, Arabidopsis thaliana
  peptide (1)..(74): Ceres Seq. ID no. 13493809
  misc_feature (1)..(74): Homolog of NCBI NO: 18412619 NR Description: expressed protein [Arabidopsis thaliana]
  misc_feature (1)..(74): Homolog of NCBI NO: 34906984 NR Description: P0413C03.15 [Oryza sativa (japonica
  misc_feature (1)..(74): Homolog of NCBI NO: 21954063 NR Description: unknown protein [Arabidopsis thaliana]
  misc_feature (1)..(12): Homolog of NCBI NO: 7487806 NR Description: hypothetical protein T8F5.7 - Arabidopsis
  misc_feature (1)..(74): Homolog of NCBI NO: 21593890 NR Description: unknown [Arabidopsis thaliana]
  misc_feature (1)..(74): Homolog of NCBI NO: 18408246 NR Description: expressed protein [Arabidopsis thaliana]
MMVPLGEEKFMVMNETRRKLGSFQICSVCTCCGGAKGLCLPSPCCYAINCNIPNRPFGYCSFTPKTCNCFGCHI

SEQ ID NO: 27161 - DNA, 531 bp, Arabidopsis thaliana
  misc_feature (1)..(531): Ceres Seq. ID no. 12323348
  misc_feature: MA Experiment ID: 108434 Result: Down-regulated in Transcription
  misc_feature: MA Experiment 108434 PARAMETER Experiment Name: At_Root_Tips_cDNA_P Parameter: Tissue Value: Root Tips
  misc_feature: MA Experiment ID: 108462 Result: Up-regulated in Transcription
  misc_feature: MA Experiment 108462 PARAMETER Experiment Name: At_Germinating_Seeds_cDNA_P Parameter: Age (day) Value: 2 vs. 0
  misc_feature: MA Experiment 108462 PARAMETER Experiment Name: At_Germinating_Seeds_cDNA_P Parameter: Tissue Value: Germinating Seeds
  misc_feature: MA Experiment ID: 108463 Result: Up-regulated in Transcription
  misc_feature: MA Experiment 108463 PARAMETER Experiment Name: At_Germinating_Seeds_cDNA_P Parameter: Age (day) Value: 3 vs. 0
  misc_feature: MA Experiment 108463 PARAMETER Experiment Name: At_Germinating_Seeds_cDNA_P Parameter: Tissue Value: Germinating Seeds
  misc_feature: MA Experiment ID: 108464 Result: Up-regulated in Transcription
  misc_feature: MA Experiment 108464 PARAMETER Experiment Name: At_Germinating_Seeds_cDNA_P Parameter: Age (day) Value: 4 vs. 0
  misc_feature: MA Experiment 108464 PARAMETER Experiment Name: At_Germinating_Seeds_cDNA_P Parameter: Tissue Value: Germinating Seeds
  misc_feature: MA Experiment ID: 108585 Result: Up-regulated in Transcription
  misc_feature: MA Experiment 108585 PARAMETER Experiment Name: At_5mM_NaNP_cDNA_P Parameter: Timepoint (hr) Value: 6
  misc_feature: MA Experiment 108585 PARAMETER Experiment Name: At_5mM_NaNP_cDNA_P Parameter: Tissue Value: Aerial
  misc_feature: MA Experiment 108585 PARAMETER Experiment Name: At_5mM_NaNP_cDNA_P Parameter: Treatment Value: null
  misc_feature: MA Experiment ID: 108607 Result: Up-regulated in Transcription
  misc_feature: MA Experiment 108607 PARAMETER Experiment Name: At_100uM_ABA_cDNA_P Parameter: Timepoint (hr) Value: 4
  misc_feature: MA Experiment 108607 PARAMETER Experiment Name: At_100uM_ABA_cDNA_P Parameter: Tissue Value: Aerial
  misc_feature: MA Experiment 108607 PARAMETER Experiment Name: At_100uM_ABA_cDNA_P Parameter: Treatment Value: 100uM ABA vs. No Treatment
  misc_feature: MA Experiment ID: 108668 Result: Up-regulated in Transcription
  misc_feature: MA Experiment 108668 PARAMETER Experiment Name: At_2mM_SA_cDNA_P Parameter: Plant Line Value: WS
  misc_feature: MA Experiment 108668 PARAMETER Experiment Name: At_2mM_SA_cDNA_P Parameter: Timepoint (hr) Value: 6
  misc_feature: MA Experiment 108668 PARAMETER Experiment Name: At_2mM_SA_cDNA_P Parameter: Treatment Value: 2mM SA vs. No Treatment
  misc_feature: MA Experiment ID: 20000069 Result: Up-regulated in Transcription
  misc_feature: MA Experiment 20000069 PARAMETER Experiment Name: At_100uM_ABA_Mutants_cDNA_P Parameter: Plant Line Value: CS23
  misc_feature: MA Experiment 20000069 PARAMETER Experiment Name: At_100uM_ABA_Mutants_cDNA_P Parameter: Timepoint (hr) Value: 6
  misc_feature: MA Experiment 20000069 PARAMETER Experiment Name: At_100uM_ABA_Mutants_cDNA_P Parameter: Tissue Value: Aerial
  misc_feature: MA Experiment 20000069 PARAMETER Experiment Name: At_100uM_ABA_Mutants_cDNA_P Parameter: Treatment Value: 100uM ABA vs. No Treatment
  misc_feature: MA Experiment ID: 20000087 Result: Up-regulated in Transcription
  misc_feature: MA Experiment 20000087 PARAMETER Experiment Name: At_100uM_ABA_Mutants_cDNA_P Parameter: Plant Line Value: WS
  misc_feature: MA Experiment 20000087 PARAMETER Experiment Name: At_100uM_ABA_Mutants_cDNA_P Parameter: Timepoint (hr) Value: 6
  misc_feature: MA Experiment 20000087 PARAMETER Experiment Name: At_100uM_ABA_Mutants_cDNA_P Parameter: Tissue Value: Aerial
  misc_feature: MA Experiment 20000087 PARAMETER Experiment Name: At_100uM_ABA_Mutants_cDNA_P Parameter: Treatment Value: 100uM ABA vs. No Treatment
  misc_feature: MA Experiment ID: 20000089 Result: Up-regulated in Transcription
  misc_feature: MA Experiment ID: 20000111 Result: Down-regulated in Transcription
  misc_feature: MA Experiment 20000111 PARAMETER Experiment Name: At_42deg_Heat_cDNA_P Parameter: Temperature (deg C) Value: 42 vs. 22
  misc_feature: MA Experiment 20000111 PARAMETER Experiment Name: At_42deg_Heat_cDNA_P Parameter: Timepoint (hr) Value: 6
  misc_feature: MA Experiment 20000111 PARAMETER Experiment Name: At_42deg_Heat_cDNA_P Parameter: Tissue Value: Aerial
  misc_feature: MA Experiment ID: 20000113 Result: Down-regulated in Transcription
  misc_feature: MA Experiment 20000113 PARAMETER Experiment Name: At_42deg_Heat_cDNA_P Parameter: Temperature (deg C) Value: 42 vs. 22
  misc_feature: MA Experiment 20000113 PARAMETER Experiment Name: At_42deg_Heat_cDNA_P Parameter: Timepoint (hr) Value: 8
  misc_feature: MA Experiment 20000113 PARAMETER Experiment Name: At_42deg_Heat_cDNA_P Parameter: Tissue Value: Aerial
  misc_feature: MA Experiment ID: 20000117 Result: Up-regulated in Transcription
  misc_feature: MA Experiment 20000117 PARAMETER Experiment Name: At_100uM_ABA_Mutants_cDNA_P Parameter: Plant Line Value: Columbia
  misc_feature: MA Experiment 20000117 PARAMETER Experiment Name: At_100uM_ABA_Mutants_cDNA_P Parameter: Timepoint (hr) Value: 6
  misc_feature: MA Experiment 20000117 PARAMETER Experiment Name: At_100uM_ABA_Mutants_cDNA_P Parameter: Tissue Value: Aerial
  misc_feature: MA Experiment 20000117 PARAMETER Experiment Name: At_100uM_ABA_Mutants_cDNA_P Parameter: Treatment Value: 100uM ABA vs. No Treatment
  misc_feature: MA Experiment ID: 20000307 Result: Up-regulated in Transcription
  misc_feature: MA Experiment 20000307 PARAMETER Experiment Name: At_Germinating_Seeds_Sub_P Parameter: Age (hr) Value: 24 vs. 0
  misc_feature: MA Experiment 20000307 PARAMETER Experiment Name: At_Germinating_Seeds_Sub_P Parameter: Organism Value: A. thaliana
  misc_feature: MA Experiment 20000307 PARAMETER Experiment Name: At_Germinating_Seeds_Sub_P Parameter: Plant Line Value: WS
  misc_feature: MA Experiment 20000307 PARAMETER Experiment Name: At_Germinating_Seeds_Sub_P Parameter: Tissue Value: Germinating Seeds
  misc_feature: MA Experiment ID: 20000315 Result: Down-regulated in Transcription
  misc_feature: MA Experiment 20000315 PARAMETER Experiment Name: At_14day_Shoots-Roots_Sub_P Parameter: Age (day) Value: 14
  misc_feature: MA Experiment 20000315 PARAMETER Experiment Name: At_14day_Shoots-Roots_Sub_P Parameter: Organism Value: A. thaliana
  misc_feature: MA Experiment 20000315 PARAMETER Experiment Name: At_14day_Shoots-Roots_Sub_P Parameter: Plant Line Value: WS
  misc_feature: MA Experiment 20000315 PARAMETER Experiment Name: At_14day_Shoots-Roots_Sub_P Parameter: Tissue Value: Shoots vs. Whole Plant
  misc_feature: MA Experiment ID: 20000328 Result: Down-regulated in Transcription
  misc_feature: MA Experiment 20000328 PARAMETER Experiment Name: At_42deg_Heat_Sub_P Parameter: Age (day) Value: 14
  misc_feature: MA Experiment 20000328 PARAMETER Experiment Name: At_42deg_Heat_Sub_P Parameter: Organism Value: A. thaliana
  misc_feature: MA Experiment 20000328 PARAMETER Experiment Name: At_42deg_Heat_Sub_P Parameter: Plant Line Value: WS
  misc_feature: MA Experiment 20000328 PARAMETER Experiment Name: At_42deg_Heat_Sub_P Parameter: Temperature (deg C) Value: 42 vs. 22
  misc_feature: MA Experiment 20000328 PARAMETER Experiment Name: At_42deg_Heat_Sub_P Parameter: Timepoint (hr) Value: 6
  misc_feature: MA Experiment 20000328 PARAMETER Experiment Name: At_42deg_Heat_Sub_P Parameter: Tissue Value: Aerial
  misc_feature: MA Experiment ID: 20000347 Result: Up-regulated in Transcription
  misc_feature: MA Experiment 20000347 PARAMETER Experiment Name: At_2mM_SA_Sub_P Parameter: Age (day) Value: 14
  misc_feature: MA Experiment 20000347 PARAMETER Experiment Name: At_2mM_SA_Sub_P Parameter: Organism Value: A. thaliana
  misc_feature: MA Experiment 20000347 PARAMETER Experiment Name: At_2mM_SA_Sub_P Parameter: Plant Line Value: WS
  misc_feature: MA Experiment 20000347 PARAMETER Experiment Name: At_2mM_SA_Sub_P Parameter: Timepoint (hr) Value: 6
  misc_feature: MA Experiment 20000347 PARAMETER Experiment Name: At_2mM_SA_Sub_P Parameter: Tissue Value: Aerial
  misc_feature: MA Experiment 20000347 PARAMETER Experiment Name: At_2mM_SA_Sub_P Parameter: Treatment Value: 2mM SA vs. No Treatment
aagtgttagcttttgatctttcttatattcttctctgaaatagtaacacactgtgaagagtttttcctacatctgaattttgtctgatccaggaaaaagaagaaaatggcgtttgtgacaactgcggaagtttgtgacgcgaatcaagagctgattcggagtggtcagctacgagctttgcaacccattttccagatttatggccgtcgacaaatattctcaggaccagttgtcactgtcaaagtttttgaagacaatggcttaatccgtcaattcatcgaggagaaaggaaacggtagagttcttgtggtggatggtggagggagtcaacgatgtgcaatactcggatttgtgatggtgaatggctttatgcagatactgatgggattcttgtctcccaaattgagttatccgtttaataaaaaaggctttgatcagttaccaaaaaaaaaaaacagaacgtggtttgtgttcatcttcttgttacttaagagattgttgaattataatggaaaataaatttttgttttg

SEQ ID NO: 27162 - protein, 137 aa, Arabidopsis thaliana
  peptide (1)..(137): Ceres Seq. ID no. 12323349
  misc_feature (2)..(81): Pfam Name: Demethylmenaquinone methyltransferase Pfam Description: Demethylmenaquinone methyltransferase
  misc_feature (6)..(81): Homolog of NCBI NO: 23059662 NR Description: hypothetical protein [Pseudomonas fluorescens
  misc_feature (1)..(81): Homolog of NCBI NO: 34497095 NR Description: S-adenosylmethionine:2-demethylmenaquinone
  misc_feature (1)..(81): Homolog of NCBI NO: 22978085 NR Description: hypothetical protein [Ralstonia metallidurans]
  misc_feature (4)..(81): Homolog of NCBI NO: 17546073 NR Description: PROBABLE
  misc_feature (1)..(81): Homolog of NCBI NO: 22982141 NR Description: hypothetical protein [Burkholderia fungorum]
  misc_feature (1)..(81): Homolog of NCBI NO: 15241161 NR Description: expressed protein; protein id: At5g56260.1
  misc_feature (4)..(81): Homolog of NCBI NO: 34910724 NR Description: S-adenosylmethionine:2-demethylmenaquinone
  misc_feature (1)..(81): Homolog of NCBI NO: 15232963 NR Description: expressed protein
  misc_feature (1)..(81): Homolog of NCBI NO: 21537415 NR Description: S-adenosylmethionine:2-demethylmenaquinone
  misc_feature (1)..(81): Homolog of NCBI NO: 15237348 NR Description: expressed protein
MAFVTTAEVCDANQELIRSGQLRALQPIFQIYGRRQIFSGPVVTVKVFEDNGLIRQFIEEKGNGRVLVVDGGGSQRCAILGFVMVNGFMQILMGFLSPKLSYPFNKKGFDQLPKKKNRTWFVFIFLLLKRLLNYNGK

SEQ ID NO: 27163 - DNA, 606 bp, Arabidopsis thaliana
  misc_feature (1)..(606): Ceres Seq. ID no. 12394295
  misc_feature: MA Experiment ID: 108434 Result: Down-regulated in Transcription
  misc_feature: MA Experiment 108434 PARAMETER Experiment Name: At_Root_Tips_cDNA_P Parameter: Tissue Value: Root Tips
  misc_feature: MA Experiment ID: 108488 Result: Down-regulated in Transcription
  misc_feature: MA Experiment ID: 108595 Result: Up-regulated in Transcription
  misc_feature: MA Experiment 108595 PARAMETER Experiment Name: At_Ler-pi_Ovule_cDNA_P Parameter: Plant Line Value: null
  misc_feature: MA Experiment ID: 108605 Result: Up-regulated in Transcription
  misc_feature: MA Experiment 108605 PARAMETER Experiment Name: At_100uM_ABA_cDNA_P Parameter: Timepoint (hr) Value: 6
  misc_feature: MA Experiment 108605 PARAMETER Experiment Name: At_100uM_ABA_cDNA_P Parameter: Tissue Value: Aerial
  misc_feature: MA Experiment 108605 PARAMETER Experiment Name: At_100uM_ABA_cDNA_P Parameter: Treatment Value: 100uM ABA vs. No Treatment
  misc_feature: MA Experiment ID: 108607 Result: Up-regulated in Transcription
  misc_feature: MA Experiment 108607 PARAMETER Experiment Name: At_100uM_ABA_cDNA_P Parameter: Timepoint (hr) Value: 4
  misc_feature: MA Experiment 108607 PARAMETER Experiment Name: At_100uM_ABA_cDNA_P Parameter: Tissue Value: Aerial
  misc_feature: MA Experiment 108607 PARAMETER Experiment Name: At_100uM_ABA_cDNA_P Parameter: Treatment Value: 100uM ABA vs. No Treatment
  misc_feature: MA Experiment ID: 108609 Result: Up-regulated in Transcription
  misc_feature: MA Experiment 108609 PARAMETER Experiment Name: At_100uM_ABA_cDNA_P Parameter: Timepoint (hr) Value: 24
  misc_feature: MA Experiment 108609 PARAMETER Experiment Name: At_100uM_ABA_cDNA_P Parameter: Tissue Value: Aerial
  misc_feature: MA Experiment 108609 PARAMETER Experiment Name: At_100uM_ABA_cDNA_P Parameter: Treatment Value: 100uM ABA vs. No Treatment
  misc_feature: MA Experiment ID: 108668 Result: Up-regulated in Transcription
  misc_feature: MA Experiment 108668 PARAMETER Experiment Name: At_2mM_SA_cDNA_P Parameter: Plant Line Value: WS
  misc_feature: MA Experiment 108668 PARAMETER Experiment Name: At_2mM_SA_cDNA_P Parameter: Timepoint (hr) Value: 6
  misc_feature: MA Experiment 108668 PARAMETER Experiment Name: At_2mM_SA_cDNA_P Parameter: Treatment Value: 2mM SA vs. No Treatment
  misc_feature: MA Experiment ID: 20000180 Result: Up-regulated in Transcription
  misc_feature: MA Experiment 20000180 PARAMETER Experiment Name: At_Germinating_Seeds_P Parameter: Age (hr) Value: 24 vs. 0
  misc_feature: MA Experiment 20000180 PARAMETER Experiment Name: At_Germinating_Seeds_P Parameter: Tissue Value: Germinating Seeds
  misc_feature: MA Experiment ID: 20001248 Result: Down-regulated in Transcription
  misc_feature: MA Experiment 20001248 PARAMETER Experiment Name: At_Far-red-induction_P Parameter: Age (day) Value: 7
  misc_feature: MA Experiment 20001248 PARAMETER Experiment Name: At_Far-red-induction_P Parameter: Light Value: Far-red vs. White
  misc_feature: MA Experiment 20001248 PARAMETER Experiment Name: At_Far-red-induction_P Parameter: Organism Value: A. thaliana
  misc_feature: MA Experiment 20001248 PARAMETER Experiment Name: At_Far-red-induction_P Parameter: Plant Line Value: Columbia
  misc_feature: MA Experiment 20001248 PARAMETER Experiment Name: At_Far-red-induction_P Parameter: Timepoint (hr) Value: 4
  misc_feature: MA Experiment 20001248 PARAMETER Experiment Name: At_Far-red-induction_P Parameter: Tissue Value: Whole Plant
  misc_feature: MA Experiment ID: 20001557 Result: Down-regulated in Transcription
  misc_feature: MA Experiment 20001557 PARAMETER Experiment Name: At_Drought_Soil_Dry_P Parameter: Age (day) Value: 27
  misc_feature: MA Experiment 20001557 PARAMETER Experiment Name: At_Drought_Soil_Dry_P Parameter: Organism Value: A. thaliana
  misc_feature: MA Experiment 20001557 PARAMETER Experiment Name: At_Drought_Soil_Dry_P Parameter: Plant Line Value: WS
  misc_feature: MA Experiment 20001557 PARAMETER Experiment Name: At_Drought_Soil_Dry_P Parameter: Post Timepoint (hr) Value: 3
  misc_feature: MA Experiment 20001557 PARAMETER Experiment Name: At_Drought_Soil_Dry_P Parameter: Post-Treatment Value: Re-Water vs. No Drought
  misc_feature: MA Experiment 20001557 PARAMETER Experiment Name: At_Drought_Soil_Dry_P Parameter: Timepoint (day) Value: 13
  misc_feature: MA Experiment 20001557 PARAMETER Experiment Name: At_Drought_Soil_Dry_P Parameter: Treatment Value: Drought vs. No Drought
  misc_feature: MA Experiment ID: 20001558 Result: Down-regulated in Transcription
  misc_feature: MA Experiment 20001558 PARAMETER Experiment Name: At_Drought_Soil_Dry_P Parameter: Age (day) Value: 27
  misc_feature: MA Experiment 20001558 PARAMETER Experiment Name: At_Drought_Soil_Dry_P Parameter: Organism Value: A. thaliana
  misc_feature: MA Experiment 20001558 PARAMETER Experiment Name: At_Drought_Soil_Dry_P Parameter: Plant Line Value: WS
  misc_feature: MA Experiment 20001558 PARAMETER Experiment Name: At_Drought_Soil_Dry_P Parameter: Post Timepoint (hr) Value: 6
  misc_feature: MA Experiment 20001558 PARAMETER Experiment Name: At_Drought_Soil_Dry_P Parameter: Post-Treatment Value: Re-Water vs. No Drought
  misc_feature: MA Experiment 20001558 PARAMETER Experiment Name: At_Drought_Soil_Dry_P Parameter: Timepoint (day) Value: 13
  misc_feature: MA Experiment 20001558 PARAMETER Experiment Name: At_Drought_Soil_Dry_P Parameter: Treatment Value: Drought vs. No Drought
  misc_feature: Phenotype: WHOLE PLANT Color-Dark Green
  misc_feature: Phenotype: WHOLE PLANT Size-Large
  misc_feature: Phenotype: INFLORESCENCE Flowering Time-Late Flowering
  misc_feature: Phenotype: INFLORESCENCE Flowering Time-Late Flowering
  misc_feature: Phenotype: INFLORESCENCE Height-Tall
  misc_feature: Phenotype: INFLORESCENCE Strength-Strong
  misc_feature: Phenotype: FERTILITY Fertility-Sterile
  misc_feature: Phenotype: INFLORESCENCE Height-Tall
  misc_feature: Phenotype: FERTILITY Fertility-Reduced
  misc_feature: Phenotype: INFLORESCENCE Flowering Time-Late Flowering
  misc_feature: Phenotype: INFLORESCENCE Height-Tall
  misc_feature: Phenotype: FERTILITY Fertility-Reduced
  misc_feature: Phenotype: FERTILITY Fertility-Reduced
atcttcaccaaattctctcaatcactcaatggcgatttctcaagctcagcctctgcttcttctcctcttatcagtcttcttcttacctgctttgcacgccacttctttcacctactgcgataagaggctcgatcccgttaaggtcacgggtgtgaagatctcccctgaccctgttgtgagtggtgcagccgcaacatttaagatttttggttctactggcgaagacatctctggaggaaaagtagtgatcagggttttatacgttgggattcctgtccataccgaaactcatgacctctgcgatgagacggcatgtccggttgcacctggcagctttgtgctttctcattctcaaacactcccttcaattacaccacctggtacttacacgctaaagatgacaatcaacgacaagaatggcggaagactaacgtgtatcagcttcaaattcaagatcacagtaggttctgcggtctttgctagttaagttttatggtgtaaattgtgtctttgtgaatctctctctcgtttacttttgtggtgtccaaataaagaatgctctttagagacttgagttgatctacatgaaacaaagagtcacaaacc

SEQ ID NO: 27164 - protein, 161 aa, Arabidopsis thaliana
  peptide (1)..(161): Ceres Seq. ID no. 12394296
  misc_feature (32)..(152): Pfam Name: ML domain Pfam Description: ML domain
  misc_feature (38)..(146): Homolog of NCBI NO: 4322563 NR Description: phosphatidylglycerol/phosphatidylinositol
  misc_feature (10)..(156): Homolog of NCBI NO: 22330033 NR Description: unknown protein; protein id: At1g45015.1
  misc_feature (10)..(153): Homolog of NCBI NO: 18397991 NR Description: Expressed protein
  misc_feature (10)..(153): Homolog of NCBI NO: 21618166 NR Description: unknown [Arabidopsis thaliana]
  misc_feature (17)..(158): Homolog of NCBI NO: 21593850 NR Description: unknown [Arabidopsis thaliana]
  misc_feature (17)..(158): Homolog of NCBI NO: 15240063 NR Description: putative protein
  misc_feature (10)..(152): Homolog of NCBI NO: 34899866 NR Description: OJ1714_H10.15 [Oryza sativa (japonica
  misc_feature (21)..(158): Homolog of NCBI NO: 21554315 NR Description: unknown [Arabidopsis thaliana]
  misc_feature (21)..(158): Homolog of NCBI NO: 18399355 NR Description: expressed protein
  misc_feature (10)..(161): Homolog of NCBI NO: 15229872 NR Description: putative protein
SSPNSLNHSMAISQAQPLLLLLLSVFFLPALHATSFTYCDKRLDPVKVTGVKISPDPVVSGAAATFKIFGSTGEDISGGKVVIRVLYVGIPVHTETHDLCDETACPVAPGSFVLSHSQTLPSITPPGTYTLKMTINDKNGGRLTCISFKFKITVGSAVFAS

SEQ ID NO: 27165 - protein, 152 aa, Arabidopsis thaliana
  peptide (1)..(152): Ceres Seq. ID no. 12394297
  misc_feature (23)..(143): Pfam Name: ML domain Pfam Description: ML domain
  misc_feature (29)..(137): Homolog of NCBI NO: 4322563 NR Description: phosphatidylglycerol/phosphatidylinositol
  misc_feature (1)..(147): Homolog of NCBI NO: 22330033 NR Description: unknown protein; protein id: At1g45015.1
  misc_feature (1)..(144): Homolog of NCBI NO: 18397991 NR Description: Expressed protein
  misc_feature (1)..(144): Homolog of NCBI NO: 21618166 NR Description: unknown [Arabidopsis thaliana]
  misc_feature (8)..(149): Homolog of NCBI NO: 21593850 NR Description: unknown [Arabidopsis thaliana]
  misc_feature (8)..(149): Homolog of NCBI NO: 15240063 NR Description: putative protein
  misc_feature (1)..(143): Homolog of NCBI NO: 34899866 NR Description: OJ1714_H10.15 [Oryza sativa (japonica
  misc_feature (12)..(149): Homolog of NCBI NO: 21554315 NR Description: unknown [Arabidopsis thaliana]
  misc_feature (12)..(149): Homolog of NCBI NO: 18399355 NR Description: expressed protein
  misc_feature (1)..(152): Homolog of NCBI NO: 15229872 NR Description: putative protein
MAISQAQPLLLLLLSVFFLPALHATSFTYCDKRLDPVKVTGVKISPDPVVSGAAATFKIFGSTGEDISGGKVVIRVLYVGIPVHTETHDLCDETACPVAPGSFVLSHSQTLPSITPPGTYTLKMTINDKNGGRLTCISFKFKITVGSAVFAS

SEQ ID NO: 27166 - DNA, 723 bp, Arabidopsis thaliana
  misc_feature (1)..(723): Ceres Seq. ID no. 12370198
  misc_feature: MA Experiment ID: 108435 Result: Down-regulated in Transcription
  misc_feature: MA Experiment 108435 PARAMETER Experiment Name: At_stm_Mutants_cDNA_P Parameter: Plant Line Value: wt Landsburg vs stm
  misc_feature: MA Experiment 108435 PARAMETER Experiment Name: At_stm_Mutants_cDNA_P Parameter: Tissue Value: Shoot Apical Meristem Region
  misc_feature: MA Experiment ID: 108461 Result: Up-regulated in Transcription
  misc_feature: MA Experiment 108461 PARAMETER Experiment Name: At_Germinating_Seeds_cDNA_P Parameter: Age (day) Value: 1 vs. 0
  misc_feature: MA Experiment 108461 PARAMETER Experiment Name: At_Germinating_Seeds_cDNA_P Parameter: Tissue Value: Germinating Seeds
  misc_feature: MA Experiment ID: 108462 Result: Up-regulated in Transcription
  misc_feature: MA Experiment 108462 PARAMETER Experiment Name: At_Germinating_Seeds_cDNA_P Parameter: Age (day) Value: 2 vs. 0
  misc_feature: MA Experiment 108462 PARAMETER Experiment Name: At_Germinating_Seeds_cDNA_P Parameter: Tissue Value: Germinating Seeds
  misc_feature: MA Experiment ID: 108463 Result: Up-regulated in Transcription
  misc_feature: MA Experiment 108463 PARAMETER Experiment Name: At_Germinating_Seeds_cDNA_P Parameter: Age (day) Value: 3 vs. 0
  misc_feature: MA Experiment 108463 PARAMETER Experiment Name: At_Germinating_Seeds_cDNA_P Parameter: Tissue Value: Germinating Seeds
  misc_feature: MA Experiment ID: 108464 Result: Up-regulated in Transcription
  misc_feature: MA Experiment 108464 PARAMETER Experiment Name: At_Germinating_Seeds_cDNA_P Parameter: Age (day) Value: 4 vs. 0
  misc_feature: MA Experiment 108464 PARAMETER Experiment Name: At_Germinating_Seeds_cDNA_P Parameter: Tissue Value: Germinating Seeds
  misc_feature: MA Experiment ID: 108573 Result: Down-regulated in Transcription
  misc_feature: MA Experiment 108573 PARAMETER Experiment Name: At_Drought_cDNA_P Parameter: Timepoint (hr) Value: 6
  misc_feature: MA Experiment 108573 PARAMETER Experiment Name: At_Drought_cDNA_P Parameter: Tissue Value: Aerial
  misc_feature: MA Experiment 108573 PARAMETER Experiment Name: At_Drought_cDNA_P Parameter: Treatment Value: Drought vs. No Drought
  misc_feature: MA Experiment ID: 108585 Result: Down-regulated in Transcription
  misc_feature: MA Experiment 108585 PARAMETER Experiment Name: At_5mM_NaNP_cDNA_P Parameter: Timepoint (hr) Value: 6
  misc_feature: MA Experiment 108585 PARAMETER Experiment Name: At_5mM_NaNP_cDNA_P Parameter: Tissue Value: Aerial
  misc_feature: MA Experiment 108585 PARAMETER Experiment Name: At_5mM_NaNP_cDNA_P Parameter: Treatment Value: null
  misc_feature: MA Experiment ID: 108595 Result: Down-regulated in Transcription
  misc_feature: MA Experiment 108595 PARAMETER Experiment Name: At_Ler-pi_Ovule_cDNA_P Parameter: Plant Line Value: null
  misc_feature: MA Experiment ID: 108668 Result: Down-regulated in Transcription
  misc_feature: MA Experiment 108668 PARAMETER Experiment Name: At_2mM_SA_cDNA_P Parameter: Plant Line Value: WS
  misc_feature: MA Experiment 108668 PARAMETER Experiment Name: At_2mM_SA_cDNA_P Parameter: Timepoint (hr) Value: 6
  misc_feature: MA Experiment 108668 PARAMETER Experiment Name: At_2mM_SA_cDNA_P Parameter: Treatment Value: 2mM SA vs. No Treatment
  misc_feature: MA Experiment ID: 20000070 Result: Down-regulated in Transcription
  misc_feature: MA Experiment 20000070 PARAMETER Experiment Name: At_100uM_ABA_Mutants_cDNA_P Parameter: Plant Line Value: CS24
  misc_feature: MA Experiment 20000070 PARAMETER Experiment Name: At_100uM_ABA_Mutants_cDNA_P Parameter: Timepoint (hr) Value: 6
  misc_feature: MA Experiment 20000070 PARAMETER Experiment Name: At_100uM_ABA_Mutants_cDNA_P Parameter: Tissue Value: Aerial
  misc_feature: MA Experiment 20000070 PARAMETER Experiment Name: At_100uM_ABA_Mutants_cDNA_P Parameter: Treatment Value: 100uM ABA vs. No Treatment
  misc_feature: MA Experiment ID: 20000086 Result: Down-regulated in Transcription
  misc_feature: MA Experiment 20000086 PARAMETER Experiment Name: At_100uM_ABA_Mutants_cDNA_P Parameter: Plant Line Value: CS22
  misc_feature: MA Experiment 20000086 PARAMETER Experiment Name: At_100uM_ABA_Mutants_cDNA_P Parameter: Timepoint (hr) Value: 6
  misc_feature: MA Experiment 20000086 PARAMETER Experiment Name: At_100uM_ABA_Mutants_cDNA_P Parameter: Tissue Value: Aerial
  misc_feature: MA Experiment 20000086 PARAMETER Experiment Name: At_100uM_ABA_Mutants_cDNA_P Parameter: Treatment Value: 100uM ABA vs. No Treatment
  misc_feature: MA Experiment ID: 20000087 Result: Down-regulated in Transcription
  misc_feature: MA Experiment 20000087 PARAMETER Experiment Name: At_100uM_ABA_Mutants_cDNA_P Parameter: Plant Line Value: WS
  misc_feature: MA Experiment 20000087 PARAMETER Experiment Name: At_100uM_ABA_Mutants_cDNA_P Parameter: Timepoint (hr) Value: 6
  misc_feature: MA Experiment 20000087 PARAMETER Experiment Name: At_100uM_ABA_Mutants_cDNA_P Parameter: Tissue Value: Aerial
  misc_feature: MA Experiment 20000087 PARAMETER Experiment Name: At_100uM_ABA_Mutants_cDNA_P Parameter: Treatment Value: 100uM ABA vs. No Treatment
  misc_feature: MA Experiment ID: 20000088 Result: Down-regulated in Transcription
  misc_feature: MA Experiment 20000088 PARAMETER Experiment Name: At_100uM_ABA_Mutants_cDNA_P Parameter: Plant Line Value: Landsberg
  misc_feature: MA Experiment 20000088 PARAMETER Experiment Name: At_100uM_ABA_Mutants_cDNA_P Parameter: Timepoint (hr) Value: 6
  misc_feature: MA Experiment 20000088 PARAMETER Experiment Name: At_100uM_ABA_Mutants_cDNA_P Parameter: Tissue Value: Aerial
  misc_feature: MA Experiment 20000088 PARAMETER Experiment Name: At_100uM_ABA_Mutants_cDNA_P Parameter: Treatment Value: 100uM ABA vs. No Treatment
  misc_feature: MA Experiment ID: 20000090 Result: Down-regulated in Transcription
  misc_feature: MA Experiment ID: 20000113 Result: Down-regulated in Transcription
  misc_feature: MA Experiment 20000113 PARAMETER Experiment Name: At_42deg_Heat_cDNA_P Parameter: Temperature (deg C) Value: 42 vs. 22
  misc_feature: MA Experiment 20000113 PARAMETER Experiment Name: At_42deg_Heat_cDNA_P Parameter: Timepoint (hr) Value: 8
  misc_feature: MA Experiment 20000113 PARAMETER Experiment Name: At_42deg_Heat_cDNA_P Parameter: Tissue Value: Aerial
  misc_feature: MA Experiment ID: 20000117 Result: Down-regulated in Transcription
  misc_feature: MA Experiment 20000117 PARAMETER Experiment Name: At_100uM_ABA_Mutants_cDNA_P Parameter: Plant Line Value: Columbia
  misc_feature: MA Experiment 20000117 PARAMETER Experiment Name: At_100uM_ABA_Mutants_cDNA_P Parameter: Timepoint (hr) Value: 6
  misc_feature: MA Experiment 20000117 PARAMETER Experiment Name: At_100uM_ABA_Mutants_cDNA_P Parameter: Tissue Value: Aerial
  misc_feature: MA Experiment 20000117 PARAMETER Experiment Name: At_100uM_ABA_Mutants_cDNA_P Parameter: Treatment Value: 100uM ABA vs. No Treatment
  misc_feature: MA Experiment ID: 20000173 Result: Down-regulated in Transcription
  misc_feature: MA Experiment 20000173 PARAMETER Experiment Name: At_42deg_Heat_P Parameter: Age (day) Value: 14
  misc_feature: MA Experiment 20000173 PARAMETER Experiment Name: At_42deg_Heat_P Parameter: Organism Value: A. thaliana
  misc_feature: MA Experiment 20000173 PARAMETER Experiment Name: At_42deg_Heat_P Parameter: Plant Line Value: WS
  misc_feature: MA Experiment 20000173 PARAMETER Experiment Name: At_42deg_Heat_P Parameter: Temperature (deg C) Value: 42 vs. 22
  misc_feature: MA Experiment 20000173 PARAMETER Experiment Name: At_42deg_Heat_P Parameter: Timepoint (hr) Value: 6
  misc_feature: MA Experiment 20000173 PARAMETER Experiment Name: At_42deg_Heat_P Parameter: Tissue Value: Aerial
  misc_feature: MA Experiment ID: 20000182 Result: Down-regulated in Transcription
  misc_feature: MA Experiment 20000182 PARAMETER Experiment Name: At_2mM_SA_P Parameter: Age (day) Value: 14
  misc_feature: MA Experiment 20000182 PARAMETER Experiment Name: At_2mM_SA_P Parameter: Organism Value: A. thaliana
  misc_feature: MA Experiment 20000182 PARAMETER Experiment Name: At_2mM_SA_P Parameter: Plant Line Value: WS
  misc_feature: MA Experiment 20000182 PARAMETER Experiment Name: At_2mM_SA_P Parameter: Timepoint (hr) Value: 6
  misc_feature: MA Experiment 20000182 PARAMETER Experiment Name: At_2mM_SA_P Parameter: Tissue Value: Aerial
  misc_feature: MA Experiment 20000182 PARAMETER Experiment Name: At_2mM_SA_P Parameter: Treatment Value: 2mM SA vs. No Treatment
  misc_feature: MA Experiment ID: 20000185 Result: Down-regulated in Transcription
  misc_feature: MA Experiment 20000185 PARAMETER Experiment Name: At_Roots__P Parameter: Age (day) Value: 7 vs. 21
  misc_feature: MA Experiment 20000185 PARAMETER Experiment Name: At_Roots__P Parameter: Organism Value: A. thaliana
  misc_feature: MA Experiment 20000185 PARAMETER Experiment Name: At_Roots__P Parameter: Tissue Value: Roots vs. Whole Plant
  misc_feature: MA Experiment ID: 20000264 Result: Down-regulated in Transcription
  misc_feature: MA Experiment 20000264 PARAMETER Experiment Name: At_Open_Flower_P Parameter: Age (day) Value: 21
  misc_feature: MA Experiment 20000264 PARAMETER Experiment Name: At_Open_Flower_P Parameter: Plant Line Value: WS
  misc_feature: MA Experiment 20000264 PARAMETER Experiment Name: At_Open_Flower_P Parameter: Tissue Value: Open Flower vs. Whole Plant
  misc_feature: MA Experiment ID: 20000438 Result: Up-regulated in Transcription
  misc_feature: MA Experiment 20000438 PARAMETER Experiment Name: At_Shoots__P Parameter: Age (day) Value: 14
  misc_feature: MA Experiment 20000438 PARAMETER Experiment Name: At_Shoots__P Parameter: Tissue Value: Shoots vs. Whole Plant
  misc_feature: MA Experiment ID: 20000439 Result: Down-regulated in Transcription
  misc_feature: MA Experiment 20000439 PARAMETER Experiment Name: At_Roots__P Parameter: Age (day) Value: 14 vs. 21
  misc_feature: MA Experiment 20000439 PARAMETER Experiment Name: At_Roots__P Parameter: Organism Value: A. thaliana
  misc_feature: MA Experiment 20000439 PARAMETER Experiment Name: At_Roots__P Parameter: Tissue Value: Roots vs. Whole Plant
  misc_feature: MA Experiment ID: 20000495 Result: Down-regulated in Transcription
  misc_feature: MA Experiment 20000495 PARAMETER Experiment Name: At_Guard_Cells_P Parameter: Harvest Date Value: 8/2/2002
  misc_feature: MA Experiment 20000495 PARAMETER Experiment Name: At_Guard_Cells_P Parameter: Organism Value: A. thaliana
  misc_feature: MA Experiment 20000495 PARAMETER Experiment Name: At_Guard_Cells_P Parameter: Tissue Value: Guard Cells vs. Leaves
  misc_feature: MA Experiment ID: 20000527 Result: Up-regulated in Transcription
  misc_feature: MA Experiment 20000527 PARAMETER Experiment Name: At_10percent_PEG_P Parameter: Age (day) Value: 20
  misc_feature: MA Experiment 20000527 PARAMETER Experiment Name: At_10percent_PEG_P Parameter: Organism Value: A. thaliana
  misc_feature: MA Experiment 20000527 PARAMETER Experiment Name: At_10percent_PEG_P Parameter: Plant Line Value: WS
  misc_feature: MA Experiment 20000527 PARAMETER Experiment Name: At_10percent_PEG_P Parameter: Timepoint (day) Value: 20
  misc_feature: MA Experiment 20000527 PARAMETER Experiment Name: At_10percent_PEG_P Parameter: Tissue Value: Whole Plant
  misc_feature: MA Experiment 20000527 PARAMETER Experiment Name: At_10percent_PEG_P Parameter: Treatment Value: 10percent PEG vs. No Treatment
  misc_feature: MA Experiment ID: 20000794 Result: Down-regulated in Transcription
  misc_feature: MA Experiment 20000794 PARAMETER Experiment Name: At_Petals_P Parameter: Age (day) Value: 23-25 days
  misc_feature: MA Experiment 20000794 PARAMETER Experiment Name: At_Petals_P Parameter: Plant Line Value: WS
  misc_feature: MA Experiment 20000794 PARAMETER Experiment Name: At_Petals_P Parameter: Tissue Value: Petals vs. Whole plant
  misc_feature: MA Experiment ID: 20001248 Result: Down-regulated in Transcription
  misc_feature: MA Experiment 20001248 PARAMETER Experiment Name: At_Far-red-induction_P Parameter: Age (day) Value: 7
  misc_feature: MA Experiment 20001248 PARAMETER Experiment Name: At_Far-red-induction_P Parameter: Light Value: Far-red vs. White
  misc_feature: MA Experiment 20001248 PARAMETER Experiment Name: At_Far-red-induction_P Parameter: Organism Value: A. thaliana
  misc_feature: MA Experiment 20001248 PARAMETER Experiment Name: At_Far-red-induction_P Parameter: Plant Line Value: Columbia
  misc_feature: MA Experiment 20001248 PARAMETER Experiment Name: At_Far-red-induction_P Parameter: Timepoint (hr) Value: 4
  misc_feature: MA Experiment 20001248 PARAMETER Experiment Name: At_Far-red-induction_P Parameter: Tissue Value: Whole Plant
  misc_feature: MA Experiment ID: 20001450 Result: Down-regulated in Transcription
  misc_feature: MA Experiment 20001450 PARAMETER Experiment Name: At_Far-red-induction_P Parameter: Age (day) Value: 7
  misc_feature: MA Experiment 20001450 PARAMETER Experiment Name: At_Far-red-induction_P Parameter: Light Value: Far-red vs. White
  misc_feature: MA Experiment 20001450 PARAMETER Experiment Name: At_Far-red-induction_P Parameter: Organism Value: A. thaliana
  misc_feature: MA Experiment 20001450 PARAMETER Experiment Name: At_Far-red-induction_P Parameter: Plant Line Value: Columbia
  misc_feature: MA Experiment 20001450 PARAMETER Experiment Name: At_Far-red-induction_P Parameter: Timepoint (hr) Value: 8
  misc_feature: MA Experiment 20001450 PARAMETER Experiment Name: At_Far-red-induction_P Parameter: Tissue Value: Whole Plant
  misc_feature: MA Experiment ID: 20001557 Result: Down-regulated in Transcription
  misc_feature: MA Experiment 20001557 PARAMETER Experiment Name: At_Drought_Soil_Dry_P Parameter: Age (day) Value: 27
  misc_feature: MA Experiment 20001557 PARAMETER Experiment Name: At_Drought_Soil_Dry_P Parameter: Organism Value: A. thaliana
  misc_feature: MA Experiment 20001557 PARAMETER Experiment Name: At_Drought_Soil_Dry_P Parameter: Plant Line Value: WS
  misc_feature: MA Experiment 20001557 PARAMETER Experiment Name: At_Drought_Soil_Dry_P Parameter: Post Timepoint (hr) Value: 3
  misc_feature: MA Experiment 20001557 PARAMETER Experiment Name: At_Drought_Soil_Dry_P Parameter: Post-Treatment Value: Re-Water vs. No Drought
  misc_feature: MA Experiment 20001557 PARAMETER Experiment Name: At_Drought_Soil_Dry_P Parameter: Timepoint (day) Value: 13
  misc_feature: MA Experiment 20001557 PARAMETER Experiment Name: At_Drought_Soil_Dry_P Parameter: Treatment Value: Drought vs. No Drought
  misc_feature: MA Experiment ID: 20001905 Result: Down-regulated in Transcription
  misc_feature: MA Experiment 20001905 PARAMETER Experiment Name: At_Drought_Reproduction_P Parameter: Age (day) Value: 40
  misc_feature: MA Experiment 20001905 PARAMETER Experiment Name: At_Drought_Reproduction_P Parameter: Organism Value: A. thaliana
  misc_feature: MA Experiment 20001905 PARAMETER Experiment Name: At_Drought_Reproduction_P Parameter: Plant Line Value: WS
  misc_feature: MA Experiment 20001905 PARAMETER Experiment Name: At_Drought_Reproduction_P Parameter: Timepoint (day) Value: 10
  misc_feature: MA Experiment 20001905 PARAMETER Experiment Name: At_Drought_Reproduction_P Parameter: Tissue Value: Rosettes
  misc_feature: MA Experiment 20001905 PARAMETER Experiment Name: At_Drought_Reproduction_P Parameter: Treatment Value: Drought vs. No Drought
  misc_feature: MA Experiment ID: 20001906 Result: Down-regulated in Transcription
  misc_feature: MA Experiment 20001906 PARAMETER Experiment Name: At_Drought_Reproduction_P Parameter: Age (day) Value: 35
  misc_feature: MA Experiment 20001906 PARAMETER Experiment Name: At_Drought_Reproduction_P Parameter: Organism Value: A. thaliana
  misc_feature: MA Experiment 20001906 PARAMETER Experiment Name: At_Drought_Reproduction_P Parameter: Plant Line Value: WS
  misc_feature: MA Experiment 20001906 PARAMETER Experiment Name: At_Drought_Reproduction_P Parameter: Timepoint (day) Value: 5
  misc_feature: MA Experiment 20001906 PARAMETER Experiment Name: At_Drought_Reproduction_P Parameter: Tissue Value: Siliques
  misc_feature: MA Experiment 20001906 PARAMETER Experiment Name: At_Drought_Reproduction_P Parameter: Treatment Value: Drought vs. No Drought
  misc_feature: MA Experiment ID: 20001908 Result: Down-regulated in Transcription
  misc_feature: MA Experiment 20001908 PARAMETER Experiment Name: At_Drought_Reproduction_P Parameter: Age (day) Value: 40
  misc_feature: MA Experiment 20001908 PARAMETER Experiment Name: At_Drought_Reproduction_P Parameter: Organism Value: A. thaliana
  misc_feature: MA Experiment 20001908 PARAMETER Experiment Name: At_Drought_Reproduction_P Parameter: Plant Line Value: WS
  misc_feature: MA Experiment 20001908 PARAMETER Experiment Name: At_Drought_Reproduction_P Parameter: Timepoint (day) Value: 10
  misc_feature: MA Experiment 20001908 PARAMETER Experiment Name: At_Drought_Reproduction_P Parameter: Tissue Value: Siliques
  misc_feature: MA Experiment 20001908 PARAMETER Experiment Name: At_Drought_Reproduction_P Parameter: Treatment Value: Drought vs. No Drought
atatccttaagaaaaacaaaaacaaaaatcaaatgagctccttcaccaccaccaacactccgccaccgtatctcctccggaaaatttatcatcgccgtgtaaaccaaccgttctccgtcgtatgttgcaccggagaaccccaacaagacatcttcacccgccggagaaccttgacttcactaataacattcacggtcatcggcggtgctacgtcatcagcattagcacaggagaaatgggggacaaggtcattcataaaggagaaatattttatgccgggactatcacctgaggatgcggcggcgcgtataaaacagacggctgaaggattaagagacatgagggagatgttggaccacatgtcgtggaggtacgttatattctacataagattgaaacaggcttatctgtctcaggatctcaccaacgccatgaacatcttgccggagagtcgccggaatgattacgttcaggcggcaaacgagcttgtcgaaaacatgagtgagttggatttctatgtacggacgccaaaggtgtacgagtcctatctttactacgagaagacattgaaatcgatagacaatgttgtggagtttcttgcttaattcagttgtattgtatatatgtctttcttcattcttcacatgaaatctctggactcgttacattagatataaaattaaaagacttaataatgtatattcaagaaacatttcgtttgcg

SEQ ID NO: 27167 - protein, 200 aa, Arabidopsis thaliana
  peptide (1)..(200): Ceres Seq. ID no. 12370199
  misc_feature (13)..(200): Pfam Name: Oxygen evolving enhancer protein 3 (PsbQ) Pfam Description: Oxygen evolving enhancer protein 3 (PsbQ)
  misc_feature (67)..(196): Homolog of NCBI NO: 34393258 NR Description: putative Oxygen-evolving enhancer protein 3-1,
  misc_feature (76)..(196): Homolog of NCBI NO: 131397 NR Description: Oxygen-evolving enhancer protein 3, chloroplast (OEE3) (16 kDa subunit of oxygen evolving system of photosystem
  misc_feature (81)..(196): Homolog of NCBI NO: 11134066 NR Description: Oxygen-evolving enhancer protein 3-2, chloroplast (OEE3) (16 kDa subunit of oxygen evolving system of photosystem (OEC 16 kDa subunit) (Ferredoxin-NADP reductase binding protein)
  misc_feature (85)..(196): Homolog of NCBI NO: 11134057 NR Description: Oxygen-evolving enhancer protein 3-1, chloroplast (OEE3) (16 kDa subunit of oxygen evolving system of photosystem
  misc_feature (67)..(200): Homolog of NCBI NO: 31096349 NR Description: oxygen-evolving enhancer protein 3 precursor
  misc_feature (85)..(196): Homolog of NCBI NO: 15233587 NR Description: oxygen-evolving complex protein 16, chloroplast
  misc_feature (76)..(196): Homolog of NCBI NO: 34810268 NR Description: Chain A, Crystal Structure Of Psbq Polypeptide Of
  misc_feature (85)..(196): Homolog of NCBI NO: 15234637 NR Description: oxygen-evolving complex protein 16, chloroplast
  misc_feature (85)..(195): Homolog of NCBI NO: 8131595 NR Description: oxygen evolving enhancer protein 3 [Bruguiera
  misc_feature (11)..(200): Homolog of NCBI NO: 18394073 NR Description: PsbQ domain protein family
ILKKNKNKNQMSSFTTTNTPPPYLLRKIYHRRVNQPFSVVCCTGEPQQDIFTRRRTLTSLITFTVIGGATSSALAQEKWGTRSFIKEKYFMPGLSPEDAAARIKQTAEGLRDMREMLDHMSWRYVIFYIRLKQAYLSQDLTNAMNILPESRRNDYVQAANELVENMSELDFYVRTPKVYESYLYYEKTLKSIDNVVEFLA

SEQ ID NO: 27168 - protein, 190 aa, Arabidopsis thaliana
  peptide (1)..(190): Ceres Seq. ID no. 12370200
  misc_feature (3)..(190): Pfam Name: Oxygen evolving enhancer protein 3 (PsbQ) Pfam Description: Oxygen evolving enhancer protein 3 (PsbQ)
  misc_feature (57)..(186): Homolog of NCBI NO: 34393258 NR Description: putative Oxygen-evolving enhancer protein 3-1,
  misc_feature (66)..(186): Homolog of NCBI NO: 131397 NR Description: Oxygen-evolving enhancer protein 3, chloroplast (OEE3) (16 kDa subunit of oxygen evolving system of photosystem
  misc_feature (71)..(186): Homolog of NCBI NO: 11134066 NR Description: Oxygen-evolving enhancer protein 3-2, chloroplast (OEE3) (16 kDa subunit of oxygen evolving system of photosystem (OEC 16 kDa subunit) (Ferredoxin-NADP reductase binding protein)
  misc_feature (75)..(186): Homolog of NCBI NO: 11134057 NR Description: Oxygen-evolving enhancer protein 3-1, chloroplast (OEE3) (16 kDa subunit of oxygen evolving system of photosystem
  misc_feature (57)..(190): Homolog of NCBI NO: 31096349 NR Description: oxygen-evolving enhancer protein 3 precursor
  misc_feature (75)..(186): Homolog of NCBI NO: 15233587 NR Description: oxygen-evolving complex protein 16, chloroplast
  misc_feature (66)..(186): Homolog of NCBI NO: 34810268 NR Description: Chain A, Crystal Structure Of Psbq Polypeptide Of
  misc_feature (75)..(186): Homolog of NCBI NO: 15234637 NR Description: oxygen-evolving complex protein 16, chloroplast
  misc_feature (75)..(185): Homolog of NCBI NO: 8131595 NR Description: oxygen evolving enhancer protein 3 [Bruguiera
  misc_feature (1)..(190): Homolog of NCBI NO: 18394073 NR Description: PsbQ domain protein family
MSSFTTTNTPPPYLLRKIYHRRVNQPFSVVCCTGEPQQDIFTRRRTLTSLITFTVIGGATSSALAQEKWGTRSFIKEKYFMPGLSPEDAAARIKQTAEGLRDMREMLDHMSWRYVIFYIRLKQAYLSQDLTNAMNILPESRRNDYVQAANELVENMSELDFYVRTPKVYESYLYYEKTLKSIDNVVEFLA

SEQ ID NO: 27169 - protein, 110 aa, Arabidopsis thaliana
  peptide (1)..(110): Ceres Seq. ID no. 12370201
  misc_feature (1)..(110): Pfam Name: Oxygen evolving enhancer protein 3 (PsbQ) Pfam Description: Oxygen evolving enhancer protein 3 (PsbQ)
  misc_feature (1)..(106): Homolog of NCBI NO: 34393258 NR Description: putative Oxygen-evolving enhancer protein 3-1,
  misc_feature (1)..(106): Homolog of NCBI NO: 131397 NR Description: Oxygen-evolving enhancer protein 3, chloroplast (OEE3) (16 kDa subunit of oxygen evolving system of photosystem
  misc_feature (1)..(106): Homolog of NCBI NO: 11134066 NR Description: Oxygen-evolving enhancer protein 3-2, chloroplast (OEE3) (16 kDa subunit of oxygen evolving system of photosystem (OEC 16 kDa subunit) (Ferredoxin-NADP reductase binding protein)
  misc_feature (1)..(106): Homolog of NCBI NO: 11134057 NR Description: Oxygen-evolving enhancer protein 3-1, chloroplast (OEE3) (16 kDa subunit of oxygen evolving system of photosystem
  misc_feature (1)..(110): Homolog of NCBI NO: 31096349 NR Description: oxygen-evolving enhancer protein 3 precursor
  misc_feature (1)..(106): Homolog of NCBI NO: 15233587 NR Description: oxygen-evolving complex protein 16, chloroplast
  misc_feature (1)..(106): Homolog of NCBI NO: 34810268 NR Description: Chain A, Crystal Structure Of Psbq Polypeptide Of
  misc_feature (1)..(106): Homolog of NCBI NO: 15234637 NR Description: oxygen-evolving complex protein 16, chloroplast
  misc_feature (1)..(105): Homolog of NCBI NO: 8131595 NR Description: oxygen evolving enhancer protein 3 [Bruguiera
  misc_feature (1)..(110): Homolog of NCBI NO: 18394073 NR Description: PsbQ domain protein family
MPGLSPEDAAARIKQTAEGLRDMREMLDHMSWRYVIFYIRLKQAYLSQDLTNAMNILPESRRNDYVQAANELVENMSELDFYVRTPKVYESYLYYEKTLKSIDNVVEFLA

SEQ ID NO: 27170 - DNA, 858 bp, Arabidopsis thaliana
  misc_feature (1)..(858): Ceres Seq. ID no. 12323629
  misc_feature: MA Experiment ID: 108435 Result: Up-regulated in Transcription
  misc_feature: MA Experiment 108435 PARAMETER Experiment Name: At_stm_Mutants_cDNA_P Parameter: Plant Line Value: wt Landsburg vs stm
  misc_feature: MA Experiment 108435 PARAMETER Experiment Name: At_stm_Mutants_cDNA_P Parameter: Tissue Value: Shoot Apical Meristem Region
  misc_feature: MA Experiment ID: 108462 Result: Up-regulated in Transcription
  misc_feature: MA Experiment 108462 PARAMETER Experiment Name: At_Germinating_Seeds_cDNA_P Parameter: Age (day) Value: 2 vs. 0
  misc_feature: MA Experiment 108462 PARAMETER Experiment Name: At_Germinating_Seeds_cDNA_P Parameter: Tissue Value: Germinating Seeds
  misc_feature: MA Experiment ID: 108463 Result: Up-regulated in Transcription
  misc_feature: MA Experiment 108463 PARAMETER Experiment Name: At_Germinating_Seeds_cDNA_P Parameter: Age (day) Value: 3 vs. 0
  misc_feature: MA Experiment 108463 PARAMETER Experiment Name: At_Germinating_Seeds_cDNA_P Parameter: Tissue Value: Germinating Seeds
  misc_feature: MA Experiment ID: 108464 Result: Up-regulated in Transcription
  misc_feature: MA Experiment 108464 PARAMETER Experiment Name: At_Germinating_Seeds_cDNA_P Parameter: Age (day) Value: 4 vs. 0
  misc_feature: MA Experiment 108464 PARAMETER Experiment Name: At_Germinating_Seeds_cDNA_P Parameter: Tissue Value: Germinating Seeds
  misc_feature: MA Experiment ID: 108561 Result: Down-regulated in Transcription
  misc_feature: MA Experiment 108561 PARAMETER Experiment Name: At_100uM_ABA_cDNA_P Parameter: Timepoint (hr) Value: 6
  misc_feature: MA Experiment 108561 PARAMETER Experiment Name: At_100uM_ABA_cDNA_P Parameter: Tissue Value: Aerial
  misc_feature: MA Experiment 108561 PARAMETER Experiment Name: At_100uM_ABA_cDNA_P Parameter: Treatment Value: 100uM ABA vs. No Treatment
  misc_feature: MA Experiment ID: 108573 Result: Down-regulated in Transcription
  misc_feature: MA Experiment 108573 PARAMETER Experiment Name: At_Drought_cDNA_P Parameter: Timepoint (hr) Value: 6
  misc_feature: MA Experiment 108573 PARAMETER Experiment Name: At_Drought_cDNA_P Parameter: Tissue Value: Aerial
  misc_feature: MA Experiment 108573 PARAMETER Experiment Name: At_Drought_cDNA_P Parameter: Treatment Value: Drought vs. No Drought
  misc_feature: MA Experiment ID: 108577 Result: Down-regulated in Transcription
  misc_feature: MA Experiment 108577 PARAMETER Experiment Name: At_42deg_Heat_cDNA_P Parameter: Temperature (deg C) Value: 42 vs. 22
  misc_feature: MA Experiment 108577 PARAMETER Experiment Name: At_42deg_Heat_cDNA_P Parameter: Timepoint (hr) Value: 6
  misc_feature: MA Experiment 108577 PARAMETER Experiment Name: At_42deg_Heat_cDNA_P Parameter: Tissue Value: Aerial
  misc_feature: MA Experiment ID: 108595 Result: Up-regulated in Transcription
  misc_feature: MA Experiment 108595 PARAMETER Experiment Name: At_Ler-pi_Ovule_cDNA_P Parameter: Plant Line Value: null
  misc_feature: MA Experiment ID: 108607 Result: Down-regulated in Transcription
  misc_feature: MA Experiment 108607 PARAMETER Experiment Name: At_100uM_ABA_cDNA_P Parameter: Timepoint (hr) Value: 4
  misc_feature: MA Experiment 108607 PARAMETER Experiment Name: At_100uM_ABA_cDNA_P Parameter: Tissue Value: Aerial
  misc_feature: MA Experiment 108607 PARAMETER Experiment Name: At_100uM_ABA_cDNA_P Parameter: Treatment Value: 100uM ABA vs. No Treatment
  misc_feature: MA Experiment ID: 20000070 Result: Down-regulated in Transcription
  misc_feature: MA Experiment 20000070 PARAMETER Experiment Name: At_100uM_ABA_Mutants_cDNA_P Parameter: Plant Line Value: CS24
  misc_feature: MA Experiment 20000070 PARAMETER Experiment Name: At_100uM_ABA_Mutants_cDNA_P Parameter: Timepoint (hr) Value: 6
  misc_feature: MA Experiment 20000070 PARAMETER Experiment Name: At_100uM_ABA_Mutants_cDNA_P Parameter: Tissue Value: Aerial
  misc_feature: MA Experiment 20000070 PARAMETER Experiment Name: At_100uM_ABA_Mutants_cDNA_P Parameter: Treatment Value: 100uM ABA vs. No Treatment
  misc_feature: MA Experiment ID: 20000071 Result: Down-regulated in Transcription
  misc_feature: MA Experiment 20000071 PARAMETER Experiment Name: At_100uM_ABA_Mutants_cDNA_P Parameter: Plant Line Value: CS8104
  misc_feature: MA Experiment 20000071 PARAMETER Experiment Name: At_100uM_ABA_Mutants_cDNA_P Parameter: Timepoint (hr) Value: 6
  misc_feature: MA Experiment 20000071 PARAMETER Experiment Name: At_100uM_ABA_Mutants_cDNA_P Parameter: Tissue Value: Aerial
  misc_feature: MA Experiment 20000071 PARAMETER Experiment Name: At_100uM_ABA_Mutants_cDNA_P Parameter: Treatment Value: 100uM ABA vs. No Treatment
  misc_feature: MA Experiment ID: 20000088 Result: Down-regulated in Transcription
  misc_feature: MA Experiment 20000088 PARAMETER Experiment Name: At_100uM_ABA_Mutants_cDNA_P Parameter: Plant Line Value: Landsberg
  misc_feature: MA Experiment 20000088 PARAMETER Experiment Name: At_100uM_ABA_Mutants_cDNA_P Parameter: Timepoint (hr) Value: 6
  misc_feature: MA Experiment 20000088 PARAMETER Experiment Name: At_100uM_ABA_Mutants_cDNA_P Parameter: Tissue Value: Aerial
  misc_feature: MA Experiment 20000088 PARAMETER Experiment Name: At_100uM_ABA_Mutants_cDNA_P Parameter: Treatment Value: 100uM ABA vs. No Treatment
  misc_feature: MA Experiment ID: 20000113 Result: Up-regulated in Transcription
  misc_feature: MA Experiment 20000113 PARAMETER Experiment Name: At_42deg_Heat_cDNA_P Parameter: Temperature (deg C) Value: 42 vs. 22
  misc_feature: MA Experiment 20000113 PARAMETER Experiment Name: At_42deg_Heat_cDNA_P Parameter: Timepoint (hr) Value: 8
  misc_feature: MA Experiment 20000113 PARAMETER Experiment Name: At_42deg_Heat_cDNA_P Parameter: Tissue Value: Aerial
  misc_feature: MA Experiment ID: 20000182 Result: Down-regulated in Transcription
  misc_feature: MA Experiment 20000182 PARAMETER Experiment Name: At_2mM_SA_P Parameter: Age (day) Value: 14
  misc_feature: MA Experiment 20000182 PARAMETER Experiment Name: At_2mM_SA_P Parameter: Organism Value: A. thaliana
  misc_feature: MA Experiment 20000182 PARAMETER Experiment Name: At_2mM_SA_P Parameter: Plant Line Value: WS
  misc_feature: MA Experiment 20000182 PARAMETER Experiment Name: At_2mM_SA_P Parameter: Timepoint (hr) Value: 6
  misc_feature: MA Experiment 20000182 PARAMETER Experiment Name: At_2mM_SA_P Parameter: Tissue Value: Aerial
  misc_feature: MA Experiment 20000182 PARAMETER Experiment Name: At_2mM_SA_P Parameter: Treatment Value: 2mM SA vs. No Treatment
  misc_feature: MA Experiment ID: 20000184 Result: Down-regulated in Transcription
  misc_feature: MA Experiment 20000184 PARAMETER Experiment Name: At_Shoots__P Parameter: Age (day) Value: 7
  misc_feature: MA Experiment 20000184 PARAMETER Experiment Name: At_Shoots__P Parameter: Tissue Value: Shoots vs. Whole Plant
  misc_feature: MA Experiment ID: 20000185 Result: Down-regulated in Transcription
  misc_feature: MA Experiment 20000185 PARAMETER Experiment Name: At_Roots__P Parameter: Age (day) Value: 7 vs. 21
  misc_feature: MA Experiment 20000185 PARAMETER Experiment Name: At_Roots__P Parameter: Organism Value: A. thaliana
  misc_feature: MA Experiment 20000185 PARAMETER Experiment Name: At_Roots__P Parameter: Tissue Value: Roots vs. Whole Plant
  misc_feature: MA Experiment ID: 20000234 Result: Up-regulated in Transcription
  misc_feature: MA Experiment 20000234 PARAMETER Experiment Name: At_Siliques_P Parameter: Age (day) Value: 21
  misc_feature: MA Experiment 20000234 PARAMETER Experiment Name: At_Siliques_P Parameter: Organism Value: A. thaliana
  misc_feature: MA Experiment 20000234 PARAMETER Experiment Name: At_Siliques_P Parameter: Plant Line Value: WS
  misc_feature: MA Experiment 20000234 PARAMETER Experiment Name: At_Siliques_P Parameter: Tissue Value: Less Than 5mm Siliques vs. Whole Plant
  misc_feature: MA Experiment ID: 20000264 Result: Down-regulated in Transcription
  misc_feature: MA Experiment 20000264 PARAMETER Experiment Name: At_Open_Flower_P Parameter: Age (day) Value: 21
  misc_feature: MA Experiment 20000264 PARAMETER Experiment Name: At_Open_Flower_P Parameter: Plant Line Value: WS
  misc_feature: MA Experiment 20000264 PARAMETER Experiment Name: At_Open_Flower_P Parameter: Tissue Value: Open Flower vs. Whole Plant
  misc_feature: MA Experiment ID: 20000436 Result: Down-regulated in Transcription
  misc_feature: MA Experiment 20000436 PARAMETER Experiment Name: At_Drought_P Parameter: Age (day) Value: 7
  misc_feature: MA Experiment 20000436 PARAMETER Experiment Name: At_Drought_P Parameter: Organism Value: A. thaliana
  misc_feature: MA Experiment 20000436 PARAMETER Experiment Name: At_Drought_P Parameter: Plant Line Value: WS
  misc_feature: MA Experiment 20000436 PARAMETER Experiment Name: At_Drought_P Parameter: Timepoint (hr) Value: 12
  misc_feature: MA Experiment 20000436 PARAMETER Experiment Name: At_Drought_P Parameter: Tissue Value: Whole Plant
  misc_feature: MA Experiment 20000436 PARAMETER Experiment Name: At_Drought_P Parameter: Treatment Value: Drought vs. No Drought
  misc_feature: MA Experiment ID: 20000438 Result: Down-regulated in Transcription
  misc_feature: MA Experiment 20000438 PARAMETER Experiment Name: At_Shoots__P Parameter: Age (day) Value: 14
  misc_feature: MA Experiment 20000438 PARAMETER Experiment Name: At_Shoots__P Parameter: Tissue Value: Shoots vs. Whole Plant
  misc_feature: MA Experiment ID: 20000439 Result: Down-regulated in Transcription
  misc_feature: MA Experiment 20000439 PARAMETER Experiment Name: At_Roots__P Parameter: Age (day) Value: 14 vs. 21
  misc_feature: MA Experiment 20000439 PARAMETER Experiment Name: At_Roots__P Parameter: Organism Value: A. thaliana
  misc_feature: MA Experiment 20000439 PARAMETER Experiment Name: At_Roots__P Parameter: Tissue Value: Roots vs. Whole Plant
  misc_feature: MA Experiment ID: 20000453 Result: Down-regulated in Transcription
  misc_feature: MA Experiment 20000453 PARAMETER Experiment Name: At_100uM_ABA_P Parameter: Age (day) Value: 15
  misc_feature: MA Experiment 20000453 PARAMETER Experiment Name: At_100uM_ABA_P Parameter: Organism Value: A. thaliana
  misc_feature: MA Experiment 20000453 PARAMETER Experiment Name: At_100uM_ABA_P Parameter: Plant Line Value: WS
  misc_feature: MA Experiment 20000453 PARAMETER Experiment Name: At_100uM_ABA_P Parameter: Timepoint (hr) Value: 24
  misc_feature: MA Experiment 20000453 PARAMETER Experiment Name: At_100uM_ABA_P Parameter: Tissue Value: Aerial
  misc_feature: MA Experiment 20000453 PARAMETER Experiment Name: At_100uM_ABA_P Parameter: Treatment Value: 100uM ABA vs. No Treatment
  misc_feature: MA Experiment ID: 20000460 Result: Down-regulated in Transcription
  misc_feature: MA Experiment 20000460 PARAMETER Experiment Name: At_10percent_PEG_P Parameter: Age (day) Value: 12
  misc_feature: MA Experiment 20000460 PARAMETER Experiment Name: At_10percent_PEG_P Parameter: Organism Value: A. thaliana
  misc_feature: MA Experiment 20000460 PARAMETER Experiment Name: At_10percent_PEG_P Parameter: Plant Line Value: WS
  misc_feature: MA Experiment 20000460 PARAMETER Experiment Name: At_10percent_PEG_P Parameter: Timepoint (day) Value: 12
  misc_feature: MA Experiment 20000460 PARAMETER Experiment Name: At_10percent_PEG_P Parameter: Tissue Value: Whole Plant
  misc_feature: MA Experiment 20000460 PARAMETER Experiment Name: At_10percent_PEG_P Parameter: Treatment Value: 10percent PEG vs. No Treatment
  misc_feature: MA Experiment ID: 20000794 Result: Down-regulated in Transcription
  misc_feature: MA Experiment 20000794 PARAMETER Experiment Name: At_Petals_P Parameter: Age (day) Value: 23-25 days
  misc_feature: MA Experiment 20000794 PARAMETER Experiment Name: At_Petals_P Parameter: Plant Line Value: WS
  misc_feature: MA Experiment 20000794 PARAMETER Experiment Name: At_Petals_P Parameter: Tissue Value: Petals vs. Whole plant
  misc_feature: MA Experiment ID: 20001247 Result: Up-regulated in Transcription
  misc_feature: MA Experiment 20001247 PARAMETER Experiment Name: At_Far-red-induction_P Parameter: Age (day) Value: 7
  misc_feature: MA Experiment 20001247 PARAMETER Experiment Name: At_Far-red-induction_P Parameter: Light Value: Far-red vs. White
  misc_feature: MA Experiment 20001247 PARAMETER Experiment Name: At_Far-red-induction_P Parameter: Organism Value: A. thaliana
  misc_feature: MA Experiment 20001247 PARAMETER Experiment Name: At_Far-red-induction_P Parameter: Plant Line Value: Columbia
  misc_feature: MA Experiment 20001247 PARAMETER Experiment Name: At_Far-red-induction_P Parameter: Timepoint (hr) Value: 1
  misc_feature: MA Experiment 20001247 PARAMETER Experiment Name: At_Far-red-induction_P Parameter: Tissue Value: Whole Plant
  misc_feature: MA Experiment ID: 20001451 Result: Up-regulated in Transcription
  misc_feature: MA Experiment 20001451 PARAMETER Experiment Name: At_Far-red-induction_P Parameter: Age (day) Value: 7
  misc_feature: MA Experiment 20001451 PARAMETER Experiment Name: At_Far-red-induction_P Parameter: Light Value: Far-red vs. White
  misc_feature: MA Experiment 20001451 PARAMETER Experiment Name: At_Far-red-induction_P Parameter: Organism Value: A. thaliana
  misc_feature: MA Experiment 20001451 PARAMETER Experiment Name: At_Far-red-induction_P Parameter: Plant Line Value: Columbia
  misc_feature: MA Experiment 20001451 PARAMETER Experiment Name: At_Far-red-induction_P Parameter: Timepoint (hr) Value: 24
  misc_feature: MA Experiment 20001451 PARAMETER Experiment Name: At_Far-red-induction_P Parameter: Tissue Value: Whole Plant
  misc_feature: MA Experiment ID: 20001556 Result: Down-regulated in Transcription
  misc_feature: MA Experiment 20001556 PARAMETER Experiment Name: At_Drought_Soil_Dry_P Parameter: Age (day) Value: 26
  misc_feature: MA Experiment 20001556 PARAMETER Experiment Name: At_Drought_Soil_Dry_P Parameter: Organism Value: A. thaliana
  misc_feature: MA Experiment 20001556 PARAMETER Experiment Name: At_Drought_Soil_Dry_P Parameter: Plant Line Value: WS
  misc_feature: MA Experiment 20001556 PARAMETER Experiment Name: At_Drought_Soil_Dry_P Parameter: Post Timepoint (hr) Value: None
  misc_feature: MA Experiment 20001556 PARAMETER Experiment Name: At_Drought_Soil_Dry_P Parameter: Post-Treatment Value: None
  misc_feature: MA Experiment 20001556 PARAMETER Experiment Name: At_Drought_Soil_Dry_P Parameter: Timepoint (day) Value: 12
  misc_feature: MA Experiment 20001556 PARAMETER Experiment Name: At_Drought_Soil_Dry_P Parameter: Treatment Value: Drought vs. No Drought
  misc_feature: MA Experiment ID: 20001557 Result: Down-regulated in Transcription
  misc_feature: MA Experiment 20001557 PARAMETER Experiment Name: At_Drought_Soil_Dry_P Parameter: Age (day) Value: 27
  misc_feature: MA Experiment 20001557 PARAMETER Experiment Name: At_Drought_Soil_Dry_P Parameter: Organism Value: A. thaliana
  misc_feature: MA Experiment 20001557 PARAMETER Experiment Name: At_Drought_Soil_Dry_P Parameter: Plant Line Value: WS
  misc_feature: MA Experiment 20001557 PARAMETER Experiment Name: At_Drought_Soil_Dry_P Parameter: Post Timepoint (hr) Value: 3
  misc_feature: MA Experiment 20001557 PARAMETER Experiment Name: At_Drought_Soil_Dry_P Parameter: Post-Treatment Value: Re-Water vs. No Drought
  misc_feature: MA Experiment 20001557 PARAMETER Experiment Name: At_Drought_Soil_Dry_P Parameter: Timepoint (day) Value: 13
  misc_feature: MA Experiment 20001557 PARAMETER Experiment Name: At_Drought_Soil_Dry_P Parameter: Treatment Value: Drought vs. No Drought
  misc_feature: MA Experiment ID: 20001558 Result: Down-regulated in Transcription
  misc_feature: MA Experiment 20001558 PARAMETER Experiment Name: At_Drought_Soil_Dry_P Parameter: Age (day) Value: 27
  misc_feature: MA Experiment 20001558 PARAMETER Experiment Name: At_Drought_Soil_Dry_P Parameter: Organism Value: A. thaliana
  misc_feature: MA Experiment 20001558 PARAMETER Experiment Name: At_Drought_Soil_Dry_P Parameter: Plant Line Value: WS
  misc_feature: MA Experiment 20001558 PARAMETER Experiment Name: At_Drought_Soil_Dry_P Parameter: Post Timepoint (hr) Value: 6
  misc_feature: MA Experiment 20001558 PARAMETER Experiment Name: At_Drought_Soil_Dry_P Parameter: Post-Treatment Value: Re-Water vs. No Drought
  misc_feature: MA Experiment 20001558 PARAMETER Experiment Name: At_Drought_Soil_Dry_P Parameter: Timepoint (day) Value: 13
  misc_feature: MA Experiment 20001558 PARAMETER Experiment Name: At_Drought_Soil_Dry_P Parameter: Treatment Value: Drought vs. No Drought
  misc_feature: MA Experiment ID: 20001560 Result: Down-regulated in Transcription
  misc_feature: MA Experiment 20001560 PARAMETER Experiment Name: At_Drought_Soil_Dry_P Parameter: Age (day) Value: 28
  misc_feature: MA Experiment 20001560 PARAMETER Experiment Name: At_Drought_Soil_Dry_P Parameter: Organism Value: A. thaliana
  misc_feature: MA Experiment 20001560 PARAMETER Experiment Name: At_Drought_Soil_Dry_P Parameter: Plant Line Value: WS
  misc_feature: MA Experiment 20001560 PARAMETER Experiment Name: At_Drought_Soil_Dry_P Parameter: Post Timepoint (hr) Value: None
  misc_feature: MA Experiment 20001560 PARAMETER Experiment Name: At_Drought_Soil_Dry_P Parameter: Post-Treatment Value: None
  misc_feature: MA Experiment 20001560 PARAMETER Experiment Name: At_Drought_Soil_Dry_P Parameter: Timepoint (day) Value: 14
  misc_feature: MA Experiment 20001560 PARAMETER Experiment Name: At_Drought_Soil_Dry_P Parameter: Treatment Value: Drought vs. No Drought
  misc_feature: MA Experiment ID: 20001757 Result: Up-regulated in Transcription
  misc_feature: MA Experiment 20001757 PARAMETER Experiment Name: At_50mM_NH4NO3_L-to-H_P Parameter: Timepoint (hr) Value: 6
  misc_feature: MA Experiment 20001757 PARAMETER Experiment Name: At_50mM_NH4NO3_L-to-H_P Parameter: Tissue Value: Leaf
  misc_feature: MA Experiment 20001757 PARAMETER Experiment Name: At_50mM_NH4NO3_L-to-H_P Parameter: Treatment Value: 50mM NH4NO3 vs 100mM Mannitol
  misc_feature: MA Experiment ID: 20001904 Result: Down-regulated in Transcription
  misc_feature: MA Experiment 20001904 PARAMETER Experiment Name: At_Drought_Reproduction_P Parameter: Age (day) Value: 37
  misc_feature: MA Experiment 20001904 PARAMETER Experiment Name: At_Drought_Reproduction_P Parameter: Organism Value: A. thaliana
  misc_feature: MA Experiment 20001904 PARAMETER Experiment Name: At_Drought_Reproduction_P Parameter: Plant Line Value: WS
  misc_feature: MA Experiment 20001904 PARAMETER Experiment Name: At_Drought_Reproduction_P Parameter: Timepoint (day) Value: 7
  misc_feature: MA Experiment 20001904 PARAMETER Experiment Name: At_Drought_Reproduction_P Parameter: Tissue Value: Rosettes
  misc_feature: MA Experiment 20001904 PARAMETER Experiment Name: At_Drought_Reproduction_P Parameter: Treatment Value: Drought vs. No Drought
  misc_feature: MA Experiment ID: 20001906 Result: Down-regulated in Transcription
  misc_feature: MA Experiment 20001906 PARAMETER Experiment Name: At_Drought_Reproduction_P Parameter: Age (day) Value: 35
  misc_feature: MA Experiment 20001906 PARAMETER Experiment Name: At_Drought_Reproduction_P Parameter: Organism Value: A. thaliana
  misc_feature: MA Experiment 20001906 PARAMETER Experiment Name: At_Drought_Reproduction_P Parameter: Plant Line Value: WS
  misc_feature: MA Experiment 20001906 PARAMETER Experiment Name: At_Drought_Reproduction_P Parameter: Timepoint (day) Value: 5
  misc_feature: MA Experiment 20001906 PARAMETER Experiment Name: At_Drought_Reproduction_P Parameter: Tissue Value: Siliques
  misc_feature: MA Experiment 20001906 PARAMETER Experiment Name: At_Drought_Reproduction_P Parameter: Treatment Value: Drought vs. No Drought
cgcaacggaaaacaaatccgccaatggaagcggctctgagcatcttcaagctctcgttccttctcacccttctctccggcggttcagaccttatcgactcgttgccgccgaattgtaaccgagccgagtgtccgagttatgaggttgtccacgccgggaatggctacgagattcatcgctacaacaccaccgtttggatttctaccgaaccaattcaagatatctctctcaacgaagcttctggcaacggttggaaccaattgtctgattacatgaacgggaacaacgattatcaccagaggatagagatagcacttccttatatcacccaagtctctcagaacttgagcaccttcatagtctctttcttcgttcccaaggcattccaacctgatccacctccgggaaacaacctccacgtacagagatgggactcgaggtacgtggcggtgaagcaaattagtggatatgttgcggatcatagaattggaaaacaagtggctgagctgaaggccagcctacaaggtaccgtatgggccaaggcaattgagaaaagcagagaaaccggcggtgtccgatcggcttgggcttacacggtggcgcaatttagctggccgttccagtggagtcagcgggtcaatgagatttggtttccgtttgaaatggaagatgaagaaactgttagtatcgttactcagtgaaaaaaaaaatgaacactttttatctttttatggtgtagtgacaaagcaaagccattgagataagcctatctcctaaaagttgttaaataactgtccattgtcttactctcgtcagcacattccctaaagaaaagaaaatcaaaagagtactttttcc

SEQ ID NO: 27171 - protein, 232 aa, Arabidopsis thaliana
  peptide (1)..(232): Ceres Seq. ID no. 12323630
  misc_feature (40)..(220): Pfam Name: SOUL heme-binding protein Pfam Description: SOUL heme-binding protein
  misc_feature (101)..(221): Homolog of NCBI NO: 16323115 NR Description: At1g78460/F3F9_3 [Arabidopsis thaliana]
  misc_feature (34)..(217): Homolog of NCBI NO: 34904402 NR Description: unnamed protein product [Oryza sativa (japonica
  misc_feature (8)..(221): Homolog of NCBI NO: 15218357 NR Description: hypothetical protein; protein id: At1g78460.1
  misc_feature (20)..(223): Homolog of NCBI NO: 34903864 NR Description: unnamed protein product [Oryza sativa (japonica
  misc_feature (8)..(222): Homolog of NCBI NO: 15220033 NR Description: SOUL-like protein
  misc_feature (8)..(232): Homolog of NCBI NO: 18411970 NR Description: expressed protein
  misc_feature (8)..(232): Homolog of NCBI NO: 21593898 NR Description: SOUL-like protein [Arabidopsis thaliana]
QRKTNPPMEAALSIFKLSFLLTLLSGGSDLIDSLPPNCNRAECPSYEVVHAGNGYEIHRYNTTVWISTEPIQDISLNEASGNGWNQLSDYMNGNNDYHQRIEIALPYITQVSQNLSTFIVSFFVPKAFQPDPPPGNNLHVQRWDSRYVAVKQISGYVADHRIGKQVAELKASLQGTVWAKAIEKSRETGGVRSAWAYTVAQFSWPFQWSQRVNEIWFPFEMEDEETVSIVTQ

SEQ ID NO: 27172 - protein, 225 aa, Arabidopsis thaliana
  peptide (1)..(225): Ceres Seq. ID no. 12323631
  misc_feature (33)..(213): Pfam Name: SOUL heme-binding protein Pfam Description: SOUL heme-binding protein
  misc_feature (1)..(225): Homolog of NCBI NO: 18411970 NR Description: expressed protein
  misc_feature (94)..(214): Homolog of NCBI NO: 16323115 NR Description: At1g78460/F3F9_3 [Arabidopsis thaliana]
  misc_feature (1)..(214): Homolog of NCBI NO: 15218357 NR Description: hypothetical protein; protein id: At1g78460.1
  misc_feature (1)..(215): Homolog of NCBI NO: 15220033 NR Description: SOUL-like protein
  misc_feature (13)..(216): Homolog of NCBI NO: 34903864 NR Description: unnamed protein product [Oryza sativa (japonica
  misc_feature (27)..(210): Homolog of NCBI NO: 34904402 NR Description: unnamed protein product [Oryza sativa (japonica
  misc_feature (1)..(225): Homolog of NCBI NO: 21593898 NR Description: SOUL-like protein [Arabidopsis thaliana]
MEAALSIFKLSFLLTLLSGGSDLIDSLPPNCNRAECPSYEVVHAGNGYEIHRYNTTVWISTEPIQDISLNEASGNGWNQLSDYMNGNNDYHQRIEIALPYITQVSQNLSTFIVSFFVPKAFQPDPPPGNNLHVQRWDSRYVAVKQISGYVADHRIGKQVAELKASLQGTVWAKAIEKSRETGGVRSAWAYTVAQFSWPFQWSQRVNEIWFPFEMEDEETVSIVTQ

SEQ ID NO: 27173 - protein, 142 aa, Arabidopsis thaliana
  peptide (1)..(142): Ceres Seq. ID no. 12323632
  misc_feature (1)..(130): Pfam Name: SOUL heme-binding protein Pfam Description: SOUL heme-binding protein
  misc_feature (11)..(131): Homolog of NCBI NO: 16323115 NR Description: At1g78460/F3F9_3 [Arabidopsis thaliana]
  misc_feature (1)..(127): Homolog of NCBI NO: 34904402 NR Description: unnamed protein product [Oryza sativa (japonica
  misc_feature (1)..(131): Homolog of NCBI NO: 15218357 NR Description: hypothetical protein; protein id: At1g78460.1
  misc_feature (1)..(133): Homolog of NCBI NO: 34903864 NR Description: unnamed protein product [Oryza sativa (japonica
  misc_feature (1)..(132): Homolog of NCBI NO: 15220033 NR Description: SOUL-like protein
  misc_feature (1)..(142): Homolog of NCBI NO: 18411970 NR Description: expressed protein
  misc_feature (1)..(142): Homolog of NCBI NO: 21593898 NR Description: SOUL-like protein [Arabidopsis thaliana]
MNGNNDYHQRIEIALPYITQVSQNLSTFIVSFFVPKAFQPDPPPGNNLHVQRWDSRYVAVKQISGYVADHRIGKQVAELKASLQGTVWAKAIEKSRETGGVRSAWAYTVAQFSWPFQWSQRVNEIWFPFEMEDEETVSIVTQ

SEQ ID NO: 27174 - DNA, 952 bp, Arabidopsis thaliana
  misc_feature (1)..(952): Ceres Seq. ID no. 13487348
  misc_feature: MA Experiment ID: 108462 Result: Down-regulated in Transcription
  misc_feature: MA Experiment 108462 PARAMETER Experiment Name: At_Germinating_Seeds_cDNA_P Parameter: Age (day) Value: 2 vs. 0
  misc_feature: MA Experiment 108462 PARAMETER Experiment Name: At_Germinating_Seeds_cDNA_P Parameter: Tissue Value: Germinating Seeds
  misc_feature: MA Experiment ID: 108463 Result: Down-regulated in Transcription
  misc_feature: MA Experiment 108463 PARAMETER Experiment Name: At_Germinating_Seeds_cDNA_P Parameter: Age (day) Value: 3 vs. 0
  misc_feature: MA Experiment 108463 PARAMETER Experiment Name: At_Germinating_Seeds_cDNA_P Parameter: Tissue Value: Germinating Seeds
  misc_feature: MA Experiment ID: 108464 Result: Down-regulated in Transcription
  misc_feature: MA Experiment 108464 PARAMETER Experiment Name: At_Germinating_Seeds_cDNA_P Parameter: Age (day) Value: 4 vs. 0
  misc_feature: MA Experiment 108464 PARAMETER Experiment Name: At_Germinating_Seeds_cDNA_P Parameter: Tissue Value: Germinating Seeds
  misc_feature: MA Experiment ID: 108595 Result: Down-regulated in Transcription
  misc_feature: MA Experiment 108595 PARAMETER Experiment Name: At_Ler-pi_Ovule_cDNA_P Parameter: Plant Line Value: null
  misc_feature: MA Experiment ID: 20001911 Result: Up-regulated in Transcription
  misc_feature: MA Experiment 20001911 PARAMETER Experiment Name: At_Drought_Reproduction_P Parameter: Age (day) Value: 40
  misc_feature: MA Experiment 20001911 PARAMETER Experiment Name: At_Drought_Reproduction_P Parameter: Organism Value: A. thaliana
  misc_feature: MA Experiment 20001911 PARAMETER Experiment Name: At_Drought_Reproduction_P Parameter: Plant Line Value: WS
  misc_feature: MA Experiment 20001911 PARAMETER Experiment Name: At_Drought_Reproduction_P Parameter: Timepoint (day) Value: 10
  misc_feature: MA Experiment 20001911 PARAMETER Experiment Name: At_Drought_Reproduction_P Parameter: Tissue Value: Flowers
  misc_feature: MA Experiment 20001911 PARAMETER Experiment Name: At_Drought_Reproduction_P Parameter: Treatment Value: Drought vs. No Drought
gcgaaagaataaaagtgtgacaaattaagaagagagaaatggggaaagacggagaaggagacaagaagcgagaaacaatggcggtgatgagcttaatgaaggatcaacagaatccaattcaacagtttcaagtcaaattcaaggagattgagactggtttcaagtcgtggttatcaaaacagaagttaccggtggaagccgccgttgtcacggccatgggtggtgttcagggagcttttatcggtggtttaatgggaactttatctcctgaaatgcctcaggctggtattgaccctcaagctatggcttcgctaaagcaaactcaggctcttgttggtgggcctttggttcaagctcggaactttgctgctataactggtgttaatgctggtattgcttgtgttatgaaacggattagaggcaaggaggatttagaatctgctgtggtcgcagcattcggatctggagttgcatattctcttgtgagcgcaggattacaaggacagcctatgaatgcaatcaccactgctgctggtttcgctgtttttcaaggagtgtttttcaagttgggtgaaaggttctctaaaccaagtgttgaagatccatattacacccggggaagatctatgttgttgaaactgggtctagagaagtatgagaagaacttcaagaaaggtttattagctgacccaactctgccattgctcactgatagcgcgctaagagacgtgagcatcccgcctggaccaaggctactgatacttgatcacatccaaagggaccctgagctaaagggcaagcggggaagtcgtggttgagacttgagagcctctctccttcttctgcagaatctttgttgttgtaagatgttataaggatctcaagcacctattattcttaaatattattggttgatgttgctagcaagaaaaattgaatacaaccttaaaag

SEQ ID NO: 27175 - protein, 259 aa, Arabidopsis thaliana
  peptide (1)..(259): Ceres Seq. ID no. 13487349
  misc_feature (43)..(181): Pfam Name: Tim17/Tim22/Tim23 family Pfam Description: Tim17/Tim22/Tim23 family
  misc_feature (25)..(247): Homolog of NCBI NO: 32487911 NR Description: OJ000315_02.15 [Oryza sativa (japonica
  misc_feature (1)..(255): Homolog of NCBI NO: 15229167 NR Description: expressed protein [Arabidopsis thaliana]
  misc_feature (14)..(259): Homolog of NCBI NO: 21593899 NR Description: unknown [Arabidopsis thaliana]
  misc_feature (1)..(259): Homolog of NCBI NO: 15238598 NR Description: expressed protein [Arabidopsis thaliana]
MGKDGEGDKKRETMAVMSLMKDQQNPIQQFQVKFKEIETGFKSWLSKQKLPVEAAVVTAMGGVQGAFIGGLMGTLSPEMPQAGIDPQAMASLKQTQALVGGPLVQARNFAAITGVNAGIACVMKRIRGKEDLESAVVAAFGSGVAYSLVSAGLQGQPMNAITTAAGFAVFQGVFFKLGERFSKPSVEDPYYTRGRSMLLKLGLEKYEKNFKKGLLADPTLPLLTDSALRDVSIPPGPRLLILDHIQRDPELKGKRGSRG

SEQ ID NO: 27176 - protein, 246 aa, Arabidopsis thaliana
  peptide (1)..(246): Ceres Seq. ID no. 13487350
  misc_feature (30)..(168): Pfam Name: Tim17/Tim22/Tim23 family Pfam Description: Tim17/Tim22/Tim23 family
  misc_feature (12)..(234): Homolog of NCBI NO: 32487911 NR Description: OJ000315_02.15 [Oryza sativa (japonica
  misc_feature (1)..(242): Homolog of NCBI NO: 15229167 NR Description: expressed protein [Arabidopsis thaliana]
  misc_feature (1)..(246): Homolog of NCBI NO: 21593899 NR Description: unknown [Arabidopsis thaliana]
  misc_feature (1)..(246): Homolog of NCBI NO: 15238598 NR Description: expressed protein [Arabidopsis thaliana]
MAVMSLMKDQQNPIQQFQVKFKEIETGFKSWLSKQKLPVEAAVVTAMGGVQGAFIGGLMGTLSPEMPQAGIDPQAMASLKQTQALVGGPLVQARNFAAITGVNAGIACVMKRIRGKEDLESAVVAAFGSGVAYSLVSAGLQGQPMNAITTAAGFAVFQGVFFKLGERFSKPSVEDPYYTRGRSMLLKLGLEKYEKNFKKGLLADPTLPLLTDSALRDVSIPPGPRLLILDHIQRDPELKGKRGSRG

SEQ ID NO: 27177 - protein, 243 aa, Arabidopsis thaliana
  peptide (1)..(243): Ceres Seq. ID no. 13487351
  misc_feature (27)..(165): Pfam Name: Tim17/Tim22/Tim23 family Pfam Description: Tim17/Tim22/Tim23 family
  misc_feature (9)..(231): Homolog of NCBI NO: 32487911 NR Description: OJ000315_02.15 [Oryza sativa (japonica
  misc_feature (1)..(239): Homolog of NCBI NO: 15229167 NR Description: expressed protein [Arabidopsis thaliana]
  misc_feature (1)..(243): Homolog of NCBI NO: 21593899 NR Description: unknown [Arabidopsis thaliana]
  misc_feature (1)..(243): Homolog of NCBI NO: 15238598 NR Description: expressed protein [Arabidopsis thaliana]
MSLMKDQQNPIQQFQVKFKEIETGFKSWLSKQKLPVEAAVVTAMGGVQGAFIGGLMGTLSPEMPQAGIDPQAMASLKQTQALVGGPLVQARNFAAITGVNAGIACVMKRIRGKEDLESAVVAAFGSGVAYSLVSAGLQGQPMNAITTAAGFAVFQGVFFKLGERFSKPSVEDPYYTRGRSMLLKLGLEKYEKNFKKGLLADPTLPLLTDSALRDVSIPPGPRLLILDHIQRDPELKGKRGSRG

SEQ ID NO: 27178 - DNA, 1060 bp, Arabidopsis thaliana
  misc_feature (1)..(1060): Ceres Seq. ID no. 12389200
  misc_feature: MA Experiment ID: 108572 Result: Up-regulated in Transcription
  misc_feature: MA Experiment 108572 PARAMETER Experiment Name: At_Drought_cDNA_P Parameter: Timepoint (hr) Value: 1
  misc_feature: MA Experiment 108572 PARAMETER Experiment Name: At_Drought_cDNA_P Parameter: Tissue Value: Aerial
  misc_feature: MA Experiment 108572 PARAMETER Experiment Name: At_Drought_cDNA_P Parameter: Treatment Value: Drought vs. No Drought
  misc_feature: MA Experiment ID: 108573 Result: Up-regulated in Transcription
  misc_feature: MA Experiment 108573 PARAMETER Experiment Name: At_Drought_cDNA_P Parameter: Timepoint (hr) Value: 6
  misc_feature: MA Experiment 108573 PARAMETER Experiment Name: At_Drought_cDNA_P Parameter: Tissue Value: Aerial
  misc_feature: MA Experiment 108573 PARAMETER Experiment Name: At_Drought_cDNA_P Parameter: Treatment Value: Drought vs. No Drought
  misc_feature: MA Experiment ID: 108579 Result: Down-regulated in Transcription
  misc_feature: MA Experiment 108579 PARAMETER Experiment Name: At_4deg_Cold_cDNA_P Parameter: Temperature (deg C) Value: 4 vs. 22
  misc_feature: MA Experiment 108579 PARAMETER Experiment Name: At_4deg_Cold_cDNA_P Parameter: Timepoint (hr) Value: 6
  misc_feature: MA Experiment 108579 PARAMETER Experiment Name: At_4deg_Cold_cDNA_P Parameter: Tissue Value: Aerial
  misc_feature: MA Experiment ID: 20000071 Result: Up-regulated in Transcription
  misc_feature: MA Experiment 20000071 PARAMETER Experiment Name: At_100uM_ABA_Mutants_cDNA_P Parameter: Plant Line Value: CS8104
  misc_feature: MA Experiment 20000071 PARAMETER Experiment Name: At_100uM_ABA_Mutants_cDNA_P Parameter: Timepoint (hr) Value: 6
  misc_feature: MA Experiment 20000071 PARAMETER Experiment Name: At_100uM_ABA_Mutants_cDNA_P Parameter: Tissue Value: Aerial
  misc_feature: MA Experiment 20000071 PARAMETER Experiment Name: At_100uM_ABA_Mutants_cDNA_P Parameter: Treatment Value: 100uM ABA vs. No Treatment
  misc_feature: MA Experiment ID: 20000224 Result: Down-regulated in Transcription
  misc_feature: MA Experiment ID: 20000437 Result: Up-regulated in Transcription
  misc_feature: MA Experiment 20000437 PARAMETER Experiment Name: At_Drought_P Parameter: Age (day) Value: 8
  misc_feature: MA Experiment 20000437 PARAMETER Experiment Name: At_Drought_P Parameter: Organism Value: A. thaliana
  misc_feature: MA Experiment 20000437 PARAMETER Experiment Name: At_Drought_P Parameter: Plant Line Value: WS
  misc_feature: MA Experiment 20000437 PARAMETER Experiment Name: At_Drought_P Parameter: Timepoint (hr) Value: 24
  misc_feature: MA Experiment 20000437 PARAMETER Experiment Name: At_Drought_P Parameter: Tissue Value: Whole Plant
  misc_feature: MA Experiment 20000437 PARAMETER Experiment Name: At_Drought_P Parameter: Treatment Value: Drought vs. No Drought
  misc_feature: MA Experiment ID: 20000439 Result: Up-regulated in Transcription
  misc_feature: MA Experiment 20000439 PARAMETER Experiment Name: At_Roots__P Parameter: Age (day) Value: 14 vs. 21
  misc_feature: MA Experiment 20000439 PARAMETER Experiment Name: At_Roots__P Parameter: Organism Value: A. thaliana
  misc_feature: MA Experiment 20000439 PARAMETER Experiment Name: At_Roots__P Parameter: Tissue Value: Roots vs. Whole Plant
  misc_feature: MA Experiment ID: 20000794 Result: Up-regulated in Transcription
  misc_feature: MA Experiment 20000794 PARAMETER Experiment Name: At_Petals_P Parameter: Age (day) Value: 23-25 days
  misc_feature: MA Experiment 20000794 PARAMETER Experiment Name: At_Petals_P Parameter: Plant Line Value: WS
  misc_feature: MA Experiment 20000794 PARAMETER Experiment Name: At_Petals_P Parameter: Tissue Value: Petals vs. Whole plant
aaatttcgaaacagagtgactattacgagaagcgaaatggatacgtcgcttctacttccgatcatcgacctttcttcgccgggaaaaatttccactgctaaattgattcgtcaggcatgtcttgaacatggattcttctatgtaaagaatcatggaatctcggaagaattaatggaaggggtttttaaggagagcaaaggcttctttaatctcccattagaggaaaagatggctttactccgccgtgatttgctcggttatactccgttgtatgctgagaaacttgacccgtccttgagctccataggtgattccaaggaaagcttctattttggctctttggaaggtgttctagctcaacgttacccaaatcaatggccttctgaaggtatcttgccatcatggaggcaaaccatggaaacttactacaagaatgtcctgtccgtgggtagaaaattgcttggcttgattgccttagcattggatttagatgaggacttcttcgaaaaagttggagccttgaatgatcctacagcagttgttcgcctcttacgctatccaggtgaagtgatttcgtcagatgttgaaacgtatggtgcctcagctcactcagattatggaatggtcactcttcttttgactgatggagttccaggacttcaggtttgtagagacaaatcgaaacaaccacacatttgggaagatgtccctggaattaaaggggcgtttatcgtcaacattggtgatatgatggagagatggaccaatggattgttccggtctacattgcatagagtgatgccggtgggaaaagaacgttactcggtggtgttcttcttagatcccaatccagattgtaatgtgaaatgcttggagagttgttgcagcgaaacttgtccccctagattcccgcctatcctcgccggtgactatattaaggagcgtttcaggctaacatacgccacttcctagtctatgtttgttacgaaatgtaagaaaataataatgttcaaacttctacgtaccataatgtttaattagtggaaacttatggaacttg

SEQ ID NO: 27179 - protein, 323 aa, Arabidopsis thaliana
  peptide (1)..(323): Ceres Seq. ID no. 12389201
  misc_feature (177)..(282): Pfam Name: 2OG-Fe(II) oxygenase superfamily Pfam Description: 2OG-Fe(II) oxygenase superfamily
  misc_feature (19)..(320): Homolog of NCBI NO: 37536198 NR Description: putative gibberellin oxidase
  misc_feature (19)..(320): Homolog of NCBI NO: 27311283 NR Description: putative gibberellin 20-oxidase
  misc_feature (77)..(260): Homolog of NCBI NO: 30683804 NR Description: oxidoreductase, 2OG-Fe(II) oxygenase family
  misc_feature (19)..(320): Homolog of NCBI NO: 37536200 NR Description: putative gibberellin 20-oxidase
  misc_feature (13)..(322): Homolog of NCBI NO: 8919874 NR Description: hypothetical protein [Capsella rubella]
  misc_feature (13)..(322): Homolog of NCBI NO: 7594582 NR Description: hypothetical protein [Arabidopsis thaliana]
  misc_feature (10)..(322): Homolog of NCBI NO: 18414746 NR Description: gibberellin oxidase-like protein; protein id:
  misc_feature (13)..(322): Homolog of NCBI NO: 8919875 NR Description: hypothetical protein [Capsella rubella]
  misc_feature (77)..(323): Homolog of NCBI NO: 30683798 NR Description: oxidoreductase, 2OG-Fe(II) oxygenase family
  misc_feature (19)..(323): Homolog of NCBI NO: 7594580 NR Description: hypothetical protein [Arabidopsis thaliana]
KFRNRVTITRSEMDTSLLLPIIDLSSPGKISTAKLIRQACLEHGFFYVKNHGISEELMEGVFKESKGFFNLPLEEKMALLRRDLLGYTPLYAEKLDPSLSSIGDSKESFYFGSLEGVLAQRYPNQWPSEGILPSWRQTMETYYKNVLSVGRKLLGLIALALDLDEDFFEKVGALNDPTAVVRLLRYPGEVISSDVETYGASAHSDYGMVTLLLTDGVPGLQVCRDKSKQPHIWEDVPGIKGAFIVNIGDMMERWTNGLFRSTLHRVMPVGKERYSVVFFLDPNPDCNVKCLESCCSETCPPRFPPILAGDYIKERFRLTYATS

SEQ ID NO: 27180 - protein, 311 aa, Arabidopsis thaliana
  peptide (1)..(311): Ceres Seq. ID no. 12389202
  misc_feature (165)..(270): Pfam Name: 2OG-Fe(II) oxygenase superfamily Pfam Description: 2OG-Fe(II) oxygenase superfamily
  misc_feature (7)..(308): Homolog of NCBI NO: 37536198 NR Description: putative gibberellin oxidase
  misc_feature (7)..(308): Homolog of NCBI NO: 27311283 NR Description: putative gibberellin 20-oxidase
  misc_feature (65)..(248): Homolog of NCBI NO: 30683804 NR Description: oxidoreductase, 2OG-Fe(II) oxygenase family
  misc_feature (7)..(308): Homolog of NCBI NO: 37536200 NR Description: putative gibberellin 20-oxidase
  misc_feature (1)..(310): Homolog of NCBI NO: 8919874 NR Description: hypothetical protein [Capsella rubella]
  misc_feature (1)..(310): Homolog of NCBI NO: 7594582 NR Description: hypothetical protein [Arabidopsis thaliana]
  misc_feature (1)..(310): Homolog of NCBI NO: 18414746 NR Description: gibberellin oxidase-like protein; protein id:
  misc_feature (1)..(310): Homolog of NCBI NO: 8919875 NR Description: hypothetical protein [Capsella rubella]
  misc_feature (65)..(311): Homolog of NCBI NO: 30683798 NR Description: oxidoreductase, 2OG-Fe(II) oxygenase family
  misc_feature (7)..(311): Homolog of NCBI NO: 7594580 NR Description: hypothetical protein [Arabidopsis thaliana]
MDTSLLLPIIDLSSPGKISTAKLIRQACLEHGFFYVKNHGISEELMEGVFKESKGFFNLPLEEKMALLRRDLLGYTPLYAEKLDPSLSSIGDSKESFYFGSLEGVLAQRYPNQWPSEGILPSWRQTMETYYKNVLSVGRKLLGLIALALDLDEDFFEKVGALNDPTAVVRLLRYPGEVISSDVETYGASAHSDYGMVTLLLTDGVPGLQVCRDKSKQPHIWEDVPGIKGAFIVNIGDMMERWTNGLFRSTLHRVMPVGKERYSVVFFLDPNPDCNVKCLESCCSETCPPRFPPILAGDYIKERFRLTYATS

SEQ ID NO: 27181 - protein, 266 aa, Arabidopsis thaliana
  peptide (1)..(266): Ceres Seq. ID no. 12389203
  misc_feature (120)..(225): Pfam Name: 2OG-Fe(II) oxygenase superfamily Pfam Description: 2OG-Fe(II) oxygenase superfamily
  misc_feature (1)..(263): Homolog of NCBI NO: 37536198 NR Description: putative gibberellin oxidase
  misc_feature (1)..(263): Homolog of NCBI NO: 27311283 NR Description: putative gibberellin 20-oxidase
  misc_feature (20)..(203): Homolog of NCBI NO: 30683804 NR Description: oxidoreductase, 2OG-Fe(II) oxygenase family
  misc_feature (1)..(263): Homolog of NCBI NO: 37536200 NR Description: putative gibberellin 20-oxidase
  misc_feature (1)..(265): Homolog of NCBI NO: 8919874 NR Description: hypothetical protein [Capsella rubella]
  misc_feature (1)..(265): Homolog of NCBI NO: 7594582 NR Description: hypothetical protein [Arabidopsis thaliana]
  misc_feature (1)..(265): Homolog of NCBI NO: 18414746 NR Description: gibberellin oxidase-like protein; protein id:
  misc_feature (1)..(265): Homolog of NCBI NO: 8919875 NR Description: hypothetical protein [Capsella rubella]
  misc_feature (20)..(266): Homolog of NCBI NO: 30683798 NR Description: oxidoreductase, 2OG-Fe(II) oxygenase family
  misc_feature (1)..(266): Homolog of NCBI NO: 7594580 NR Description: hypothetical protein [Arabidopsis thaliana]
MEGVFKESKGFFNLPLEEKMALLRRDLLGYTPLYAEKLDPSLSSIGDSKESFYFGSLEGVLAQRYPNQWPSEGILPSWRQTMETYYKNVLSVGRKLLGLIALALDLDEDFFEKVGALNDPTAVVRLLRYPGEVISSDVETYGASAHSDYGMVTLLLTDGVPGLQVCRDKSKQPHIWEDVPGIKGAFIVNIGDMMERWTNGLFRSTLHRVMPVGKERYSVVFFLDPNPDCNVKCLESCCSETCPPRFPPILAGDYIKERFRLTYATS

SEQ ID NO: 27182 - DNA, 851 bp, Arabidopsis thaliana
  misc_feature (1)..(851): Ceres Seq. ID no. 12323350
  misc_feature: MA Experiment ID: 108434 Result: Down-regulated in Transcription
  misc_feature: MA Experiment 108434 PARAMETER Experiment Name: At_Root_Tips_cDNA_P Parameter: Tissue Value: Root Tips
  misc_feature: MA Experiment ID: 108435 Result: Down-regulated in Transcription
  misc_feature: MA Experiment 108435 PARAMETER Experiment Name: At_stm_Mutants_cDNA_P Parameter: Plant Line Value: wt Landsburg vs stm
  misc_feature: MA Experiment 108435 PARAMETER Experiment Name: At_stm_Mutants_cDNA_P Parameter: Tissue Value: Shoot Apical Meristem Region
  misc_feature: MA Experiment ID: 108461 Result: Up-regulated in Transcription
  misc_feature: MA Experiment 108461 PARAMETER Experiment Name: At_Germinating_Seeds_cDNA_P Parameter: Age (day) Value: 1 vs. 0
  misc_feature: MA Experiment 108461 PARAMETER Experiment Name: At_Germinating_Seeds_cDNA_P Parameter: Tissue Value: Germinating Seeds
  misc_feature: MA Experiment ID: 108462 Result: Up-regulated in Transcription
  misc_feature: MA Experiment 108462 PARAMETER Experiment Name: At_Germinating_Seeds_cDNA_P Parameter: Age (day) Value: 2 vs. 0
  misc_feature: MA Experiment 108462 PARAMETER Experiment Name: At_Germinating_Seeds_cDNA_P Parameter: Tissue Value: Germinating Seeds
  misc_feature: MA Experiment ID: 108463 Result: Up-regulated in Transcription
  misc_feature: MA Experiment 108463 PARAMETER Experiment Name: At_Germinating_Seeds_cDNA_P Parameter: Age (day) Value: 3 vs. 0
  misc_feature: MA Experiment 108463 PARAMETER Experiment Name: At_Germinating_Seeds_cDNA_P Parameter: Tissue Value: Germinating Seeds
  misc_feature: MA Experiment ID: 108464 Result: Up-regulated in Transcription
  misc_feature: MA Experiment 108464 PARAMETER Experiment Name: At_Germinating_Seeds_cDNA_P Parameter: Age (day) Value: 4 vs. 0
  misc_feature: MA Experiment 108464 PARAMETER Experiment Name: At_Germinating_Seeds_cDNA_P Parameter: Tissue Value: Germinating Seeds
  misc_feature: MA Experiment ID: 108488 Result: Up-regulated in Transcription
  misc_feature: MA Experiment ID: 108594 Result: Down-regulated in Transcription
  misc_feature: MA Experiment 108594 PARAMETER Experiment Name: At_Ler-rhl_Root_cDNA_P Parameter: Plant Line Value: null
  misc_feature: MA Experiment ID: 108595 Result: Down-regulated in Transcription
  misc_feature: MA Experiment 108595 PARAMETER Experiment Name: At_Ler-pi_Ovule_cDNA_P Parameter: Plant Line Value: null
  misc_feature: MA Experiment ID: 20000072 Result: Down-regulated in Transcription
  misc_feature: MA Experiment 20000072 PARAMETER Experiment Name: At_100uM_ABA_Mutants_cDNA_P Parameter: Plant Line Value: CS8105
  misc_feature: MA Experiment 20000072 PARAMETER Experiment Name: At_100uM_ABA_Mutants_cDNA_P Parameter: Timepoint (hr) Value: 6
  misc_feature: MA Experiment 20000072 PARAMETER Experiment Name: At_100uM_ABA_Mutants_cDNA_P Parameter: Tissue Value: Aerial
  misc_feature: MA Experiment 20000072 PARAMETER Experiment Name: At_100uM_ABA_Mutants_cDNA_P Parameter: Treatment Value: 100uM ABA vs. No Treatment
  misc_feature: MA Experiment ID: 20000087 Result: Down-regulated in Transcription
  misc_feature: MA Experiment 20000087 PARAMETER Experiment Name: At_100uM_ABA_Mutants_cDNA_P Parameter: Plant Line Value: WS
  misc_feature: MA Experiment 20000087 PARAMETER Experiment Name: At_100uM_ABA_Mutants_cDNA_P Parameter: Timepoint (hr) Value: 6
  misc_feature: MA Experiment 20000087 PARAMETER Experiment Name: At_100uM_ABA_Mutants_cDNA_P Parameter: Tissue Value: Aerial
  misc_feature: MA Experiment 20000087 PARAMETER Experiment Name: At_100uM_ABA_Mutants_cDNA_P Parameter: Treatment Value: 100uM ABA vs. No Treatment
  misc_feature: MA Experiment ID: 20000117 Result: Down-regulated in Transcription
  misc_feature: MA Experiment 20000117 PARAMETER Experiment Name: At_100uM_ABA_Mutants_cDNA_P Parameter: Plant Line Value: Columbia
  misc_feature: MA Experiment 20000117 PARAMETER Experiment Name: At_100uM_ABA_Mutants_cDNA_P Parameter: Timepoint (hr) Value: 6
  misc_feature: MA Experiment 20000117 PARAMETER Experiment Name: At_100uM_ABA_Mutants_cDNA_P Parameter: Tissue Value: Aerial
  misc_feature: MA Experiment 20000117 PARAMETER Experiment Name: At_100uM_ABA_Mutants_cDNA_P Parameter: Treatment Value: 100uM ABA vs. No Treatment
  misc_feature: MA Experiment ID: 20000180 Result: Up-regulated in Transcription
  misc_feature: MA Experiment 20000180 PARAMETER Experiment Name: At_Germinating_Seeds_P Parameter: Age (hr) Value: 24 vs. 0
  misc_feature: MA Experiment 20000180 PARAMETER Experiment Name: At_Germinating_Seeds_P Parameter: Tissue Value: Germinating Seeds
  misc_feature: MA Experiment ID: 20000184 Result: Up-regulated in Transcription
  misc_feature: MA Experiment 20000184 PARAMETER Experiment Name: At_Shoots__P Parameter: Age (day) Value: 7
  misc_feature: MA Experiment 20000184 PARAMETER Experiment Name: At_Shoots__P Parameter: Tissue Value: Shoots vs. Whole Plant
  misc_feature: MA Experiment ID: 20000185 Result: Down-regulated in Transcription
  misc_feature: MA Experiment 20000185 PARAMETER Experiment Name: At_Roots__P Parameter: Age (day) Value: 7 vs. 21
  misc_feature: MA Experiment 20000185 PARAMETER Experiment Name: At_Roots__P Parameter: Organism Value: A. thaliana
  misc_feature: MA Experiment 20000185 PARAMETER Experiment Name: At_Roots__P Parameter: Tissue Value: Roots vs. Whole Plant
  misc_feature: MA Experiment ID: 20000264 Result: Down-regulated in Transcription
  misc_feature: MA Experiment 20000264 PARAMETER Experiment Name: At_Open_Flower_P Parameter: Age (day) Value: 21
  misc_feature: MA Experiment 20000264 PARAMETER Experiment Name: At_Open_Flower_P Parameter: Plant Line Value: WS
  misc_feature: MA Experiment 20000264 PARAMETER Experiment Name: At_Open_Flower_P Parameter: Tissue Value: Open Flower vs. Whole Plant
  misc_feature: MA Experiment ID: 20000436 Result: Down-regulated in Transcription
  misc_feature: MA Experiment 20000436 PARAMETER Experiment Name: At_Drought_P Parameter: Age (day) Value: 7
  misc_feature: MA Experiment 20000436 PARAMETER Experiment Name: At_Drought_P Parameter: Organism Value: A. thaliana
  misc_feature: MA Experiment 20000436 PARAMETER Experiment Name: At_Drought_P Parameter: Plant Line Value: WS
  misc_feature: MA Experiment 20000436 PARAMETER Experiment Name: At_Drought_P Parameter: Timepoint (hr) Value: 12
  misc_feature: MA Experiment 20000436 PARAMETER Experiment Name: At_Drought_P Parameter: Tissue Value: Whole Plant
  misc_feature: MA Experiment 20000436 PARAMETER Experiment Name: At_Drought_P Parameter: Treatment Value: Drought vs. No Drought
  misc_feature: MA Experiment ID: 20000437 Result: Down-regulated in Transcription
  misc_feature: MA Experiment 20000437 PARAMETER Experiment Name: At_Drought_P Parameter: Age (day) Value: 8
  misc_feature: MA Experiment 20000437 PARAMETER Experiment Name: At_Drought_P Parameter: Organism Value: A. thaliana
  misc_feature: MA Experiment 20000437 PARAMETER Experiment Name: At_Drought_P Parameter: Plant Line Value: WS
  misc_feature: MA Experiment 20000437 PARAMETER Experiment Name: At_Drought_P Parameter: Timepoint (hr) Value: 24
  misc_feature: MA Experiment 20000437 PARAMETER Experiment Name: At_Drought_P Parameter: Tissue Value: Whole Plant
  misc_feature: MA Experiment 20000437 PARAMETER Experiment Name: At_Drought_P Parameter: Treatment Value: Drought vs. No Drought
  misc_feature: MA Experiment ID: 20000438 Result: Up-regulated in Transcription
  misc_feature: MA Experiment 20000438 PARAMETER Experiment Name: At_Shoots__P Parameter: Age (day) Value: 14
  misc_feature: MA Experiment 20000438 PARAMETER Experiment Name: At_Shoots__P Parameter: Tissue Value: Shoots vs. Whole Plant
  misc_feature: MA Experiment ID: 20000439 Result: Down-regulated in Transcription
  misc_feature: MA Experiment 20000439 PARAMETER Experiment Name: At_Roots__P Parameter: Age (day) Value: 14 vs. 21
  misc_feature: MA Experiment 20000439 PARAMETER Experiment Name: At_Roots__P Parameter: Organism Value: A. thaliana
  misc_feature: MA Experiment 20000439 PARAMETER Experiment Name: At_Roots__P Parameter: Tissue Value: Roots vs. Whole Plant
  misc_feature: MA Experiment ID: 20000794 Result: Down-regulated in Transcription
  misc_feature: MA Experiment 20000794 PARAMETER Experiment Name: At_Petals_P Parameter: Age (day) Value: 23-25 days
  misc_feature: MA Experiment 20000794 PARAMETER Experiment Name: At_Petals_P Parameter: Plant Line Value: WS
  misc_feature: MA Experiment 20000794 PARAMETER Experiment Name: At_Petals_P Parameter: Tissue Value: Petals vs. Whole plant
  misc_feature: MA Experiment ID: 20001248 Result: Down-regulated in Transcription
  misc_feature: MA Experiment 20001248 PARAMETER Experiment Name: At_Far-red-induction_P Parameter: Age (day) Value: 7
  misc_feature: MA Experiment 20001248 PARAMETER Experiment Name: At_Far-red-induction_P Parameter: Light Value: Far-red vs. White
  misc_feature: MA Experiment 20001248 PARAMETER Experiment Name: At_Far-red-induction_P Parameter: Organism Value: A. thaliana
  misc_feature: MA Experiment 20001248 PARAMETER Experiment Name: At_Far-red-induction_P Parameter: Plant Line Value: Columbia
  misc_feature: MA Experiment 20001248 PARAMETER Experiment Name: At_Far-red-induction_P Parameter: Timepoint (hr) Value: 4
  misc_feature: MA Experiment 20001248 PARAMETER Experiment Name: At_Far-red-induction_P Parameter: Tissue Value: Whole Plant
  misc_feature: MA Experiment ID: 20001450 Result: Down-regulated in Transcription
  misc_feature: MA Experiment 20001450 PARAMETER Experiment Name: At_Far-red-induction_P Parameter: Age (day) Value: 7
  misc_feature: MA Experiment 20001450 PARAMETER Experiment Name: At_Far-red-induction_P Parameter: Light Value: Far-red vs. White
  misc_feature: MA Experiment 20001450 PARAMETER Experiment Name: At_Far-red-induction_P Parameter: Organism Value: A. thaliana
  misc_feature: MA Experiment 20001450 PARAMETER Experiment Name: At_Far-red-induction_P Parameter: Plant Line Value: Columbia
  misc_feature: MA Experiment 20001450 PARAMETER Experiment Name: At_Far-red-induction_P Parameter: Timepoint (hr) Value: 8
  misc_feature: MA Experiment 20001450 PARAMETER Experiment Name: At_Far-red-induction_P Parameter: Tissue Value: Whole Plant
  misc_feature: MA Experiment ID: 20001555 Result: Down-regulated in Transcription
  misc_feature: MA Experiment 20001555 PARAMETER Experiment Name: At_Drought_Soil_Dry_P Parameter: Age (day) Value: 24
  misc_feature: MA Experiment 20001555 PARAMETER Experiment Name: At_Drought_Soil_Dry_P Parameter: Organism Value: A. thaliana
  misc_feature: MA Experiment 20001555 PARAMETER Experiment Name: At_Drought_Soil_Dry_P Parameter: Plant Line Value: WS
  misc_feature: MA Experiment 20001555 PARAMETER Experiment Name: At_Drought_Soil_Dry_P Parameter: Post Timepoint (hr) Value: None
  misc_feature: MA Experiment 20001555 PARAMETER Experiment Name: At_Drought_Soil_Dry_P Parameter: Post-Treatment Value: None
  misc_feature: MA Experiment 20001555 PARAMETER Experiment Name: At_Drought_Soil_Dry_P Parameter: Timepoint (day) Value: 10
  misc_feature: MA Experiment 20001555 PARAMETER Experiment Name: At_Drought_Soil_Dry_P Parameter: Treatment Value: Drought vs. No Drought
  misc_feature: MA Experiment ID: 20001556 Result: Down-regulated in Transcription
  misc_feature: MA Experiment 20001556 PARAMETER Experiment Name: At_Drought_Soil_Dry_P Parameter: Age (day) Value: 26
  misc_feature: MA Experiment 20001556 PARAMETER Experiment Name: At_Drought_Soil_Dry_P Parameter: Organism Value: A. thaliana
  misc_feature: MA Experiment 20001556 PARAMETER Experiment Name: At_Drought_Soil_Dry_P Parameter: Plant Line Value: WS
  misc_feature: MA Experiment 20001556 PARAMETER Experiment Name: At_Drought_Soil_Dry_P Parameter: Post Timepoint (hr) Value: None
  misc_feature: MA Experiment 20001556 PARAMETER Experiment Name: At_Drought_Soil_Dry_P Parameter: Post-Treatment Value: None
  misc_feature: MA Experiment 20001556 PARAMETER Experiment Name: At_Drought_Soil_Dry_P Parameter: Timepoint (day) Value: 12
  misc_feature: MA Experiment 20001556 PARAMETER Experiment Name: At_Drought_Soil_Dry_P Parameter: Treatment Value: Drought vs. No Drought
  misc_feature: MA Experiment ID: 20001557 Result: Down-regulated in Transcription
  misc_feature: MA Experiment 20001557 PARAMETER Experiment Name: At_Drought_Soil_Dry_P Parameter: Age (day) Value: 27
  misc_feature: MA Experiment 20001557 PARAMETER Experiment Name: At_Drought_Soil_Dry_P Parameter: Organism Value: A. thaliana
  misc_feature: MA Experiment 20001557 PARAMETER Experiment Name: At_Drought_Soil_Dry_P Parameter: Plant Line Value: WS
  misc_feature: MA Experiment 20001557 PARAMETER Experiment Name: At_Drought_Soil_Dry_P Parameter: Post Timepoint (hr) Value: 3
  misc_feature: MA Experiment 20001557 PARAMETER Experiment Name: At_Drought_Soil_Dry_P Parameter: Post-Treatment Value: Re-Water vs. No Drought
  misc_feature: MA Experiment 20001557 PARAMETER Experiment Name: At_Drought_Soil_Dry_P Parameter: Timepoint (day) Value: 13
  misc_feature: MA Experiment 20001557 PARAMETER Experiment Name: At_Drought_Soil_Dry_P Parameter: Treatment Value: Drought vs. No Drought
  misc_feature: MA Experiment ID: 20001559 Result: Down-regulated in Transcription
  misc_feature: MA Experiment 20001559 PARAMETER Experiment Name: At_Drought_Soil_Dry_P Parameter: Age (day) Value: 28
  misc_feature: MA Experiment 20001559 PARAMETER Experiment Name: At_Drought_Soil_Dry_P Parameter: Organism Value: A. thaliana
  misc_feature: MA Experiment 20001559 PARAMETER Experiment Name: At_Drought_Soil_Dry_P Parameter: Plant Line Value: WS
  misc_feature: MA Experiment 20001559 PARAMETER Experiment Name: At_Drought_Soil_Dry_P Parameter: Post Timepoint (hr) Value: 29
  misc_feature: MA Experiment 20001559 PARAMETER Experiment Name: At_Drought_Soil_Dry_P Parameter: Post-Treatment Value: Re-Water vs. No Drought
  misc_feature: MA Experiment 20001559 PARAMETER Experiment Name: At_Drought_Soil_Dry_P Parameter: Timepoint (day) Value: 14
  misc_feature: MA Experiment 20001559 PARAMETER Experiment Name: At_Drought_Soil_Dry_P Parameter: Treatment Value: Drought vs. No Drought
  misc_feature: MA Experiment ID: 20001757 Result: Up-regulated in Transcription
  misc_feature: MA Experiment 20001757 PARAMETER Experiment Name: At_50mM_NH4NO3_L-to-H_P Parameter: Timepoint (hr) Value: 6
  misc_feature: MA Experiment 20001757 PARAMETER Experiment Name: At_50mM_NH4NO3_L-to-H_P Parameter: Tissue Value: Leaf
  misc_feature: MA Experiment 20001757 PARAMETER Experiment Name: At_50mM_NH4NO3_L-to-H_P Parameter: Treatment Value: 50mM NH4NO3 vs 100mM Mannitol
  misc_feature: MA Experiment ID: 20001904 Result: Down-regulated in Transcription
  misc_feature: MA Experiment 20001904 PARAMETER Experiment Name: At_Drought_Reproduction_P Parameter: Age (day) Value: 37
  misc_feature: MA Experiment 20001904 PARAMETER Experiment Name: At_Drought_Reproduction_P Parameter: Organism Value: A. thaliana
  misc_feature: MA Experiment 20001904 PARAMETER Experiment Name: At_Drought_Reproduction_P Parameter: Plant Line Value: WS
  misc_feature: MA Experiment 20001904 PARAMETER Experiment Name: At_Drought_Reproduction_P Parameter: Timepoint (day) Value: 7
  misc_feature: MA Experiment 20001904 PARAMETER Experiment Name: At_Drought_Reproduction_P Parameter: Tissue Value: Rosettes
  misc_feature: MA Experiment 20001904 PARAMETER Experiment Name: At_Drought_Reproduction_P Parameter: Treatment Value: Drought vs. No Drought
  misc_feature: MA Experiment ID: 20001906 Result: Down-regulated in Transcription
  misc_feature: MA Experiment 20001906 PARAMETER Experiment Name: At_Drought_Reproduction_P Parameter: Age (day) Value: 35
  misc_feature: MA Experiment 20001906 PARAMETER Experiment Name: At_Drought_Reproduction_P Parameter: Organism Value: A. thaliana
  misc_feature: MA Experiment 20001906 PARAMETER Experiment Name: At_Drought_Reproduction_P Parameter: Plant Line Value: WS
  misc_feature: MA Experiment 20001906 PARAMETER Experiment Name: At_Drought_Reproduction_P Parameter: Timepoint (day) Value: 5
  misc_feature: MA Experiment 20001906 PARAMETER Experiment Name: At_Drought_Reproduction_P Parameter: Tissue Value: Siliques
  misc_feature: MA Experiment 20001906 PARAMETER Experiment Name: At_Drought_Reproduction_P Parameter: Treatment Value: Drought vs. No Drought
aataatcatcggcttcaattttcgtcttgagaaagaaaaacaaaatggcttcgatgggtggattacacggtgcatctccggcggttcttgaaggaagcttaaagatcaatggctccagccgtctgaatggctctggaagagtggcggtggctcaaaggtctagacttgtcgtcagagctcagcagagtgaggagacttctcgccggtccgtgattgggcttgttgctgctggtttagctggtggctcgtttgttcaggctgtcctcgccgatgctatttcgatcaaagttggccctcctccagctccttccggtggccttcctgggacagataactcagaccaagcaagagactttgcattggcattgaaagacaggttttacttacagccattgccaccaacagaagctgcagctagagccaaagaatctgcaaaggatatcataaatgtgaagccattgatcgacaggaaagcttggccatatgttcaaaacgatcttcgttccaaggcttcttatcttcgttatgatcttaacacaatcatttcctccaaacccaaggatgagaagaagtcactcaaggatctcaccaccaagctcttcgataccatcgacaatctggattatgcggcgaagaagaagagtccttcgcaggctgagaagtactatgctgagacagtctctgctttgaacgaagttcttgccaagcttggttaagcattttaatttctgcatttttcttgtaaattattattcttggtttttgttcttgagtactttagactcaaattcgtgaatctgaatttatgtttcacgttttcaccaagtaatggcaatttcttgagtatgcgt

SEQ ID NO: 27183 - protein, 223 aa, Arabidopsis thaliana
  peptide (1)..(223): Ceres Seq. ID no. 12323351
  misc_feature (26)..(223): Pfam Name: Oxygen evolving enhancer protein 3 (PsbQ) Pfam Description: Oxygen evolving enhancer protein 3 (PsbQ)
  misc_feature (76)..(223): Homolog of NCBI NO: 34810268 NR Description: Chain A, Crystal Structure Of Psbq Polypeptide Of
  misc_feature (71)..(223): Homolog of NCBI NO: 11134066 NR Description: Oxygen-evolving enhancer protein 3-2, chloroplast (OEE3) (16 kDa subunit of oxygen evolving system of photosystem (OEC 16 kDa subunit) (Ferredoxin-NADP reductase binding protein)
  misc_feature (14)..(223): Homolog of NCBI NO: 11133850 NR Description: Oxygen-evolving enhancer protein 3, chloroplast (OEE3) (16 kDa subunit of oxygen evolving system of photosystem
  misc_feature (1)..(223): Homolog of NCBI NO: 11134057 NR Description: Oxygen-evolving enhancer protein 3-1, chloroplast (OEE3) (16 kDa subunit of oxygen evolving system of photosystem
  misc_feature (38)..(223): Homolog of NCBI NO: 34393258 NR Description: putative Oxygen-evolving enhancer protein 3-1,
  misc_feature (2)..(222): Homolog of NCBI NO: 31096349 NR Description: oxygen-evolving enhancer protein 3 precursor
  misc_feature (1)..(223): Homolog of NCBI NO: 131397 NR Description: Oxygen-evolving enhancer protein 3, chloroplast (OEE3) (16 kDa subunit of oxygen evolving system of photosystem
  misc_feature (1)..(223): Homolog of NCBI NO: 15234637 NR Description: oxygen-evolving complex protein 16, chloroplast
  misc_feature (1)..(223): Homolog of NCBI NO: 4583542 NR Description: 16 kDa polypeptide of oxygen-evolving complex
  misc_feature (1)..(223): Homolog of NCBI NO: 15233587 NR Description: oxygen-evolving complex protein 16, chloroplast
MASMGGLHGASPAVLEGSLKINGSSRLNGSGRVAVAQRSRLVVRAQQSEETSRRSVIGLVAAGLAGGSFVQAVLADAISIKVGPPPAPSGGLPGTDNSDQARDFALALKDRFYLQPLPPTEAAARAKESAKDIINVKPLIDRKAWPYVQNDLRSKASYLRYDLNTIISSKPKDEKKSLKDLTTKLFDTIDNLDYAAKKKSPSQAEKYYAETVSALNEVLAKLG

SEQ ID NO: 27184 - protein, 220 aa, Arabidopsis thaliana
  peptide (1)..(220): Ceres Seq. ID no. 12323352
  misc_feature (23)..(220): Pfam Name: Oxygen evolving enhancer protein 3 (PsbQ) Pfam Description: Oxygen evolving enhancer protein 3 (PsbQ)
  misc_feature (73)..(220): Homolog of NCBI NO: 34810268 NR Description: Chain A, Crystal Structure Of Psbq Polypeptide Of
  misc_feature (68)..(220): Homolog of NCBI NO: 11134066 NR Description: Oxygen-evolving enhancer protein 3-2, chloroplast (OEE3) (16 kDa subunit of oxygen evolving system of photosystem (OEC 16 kDa subunit) (Ferredoxin-NADP reductase binding protein)
  misc_feature (11)..(220): Homolog of NCBI NO: 11133850 NR Description: Oxygen-evolving enhancer protein 3, chloroplast (OEE3) (16 kDa subunit of oxygen evolving system of photosystem
  misc_feature (1)..(220): Homolog of NCBI NO: 11134057 NR Description: Oxygen-evolving enhancer protein 3-1, chloroplast (OEE3) (16 kDa subunit of oxygen evolving system of photosystem
  misc_feature (35)..(220): Homolog of NCBI NO: 34393258 NR Description: putative Oxygen-evolving enhancer protein 3-1,
  misc_feature (1)..(219): Homolog of NCBI NO: 31096349 NR Description: oxygen-evolving enhancer protein 3 precursor
  misc_feature (1)..(220): Homolog of NCBI NO: 131397 NR Description: Oxygen-evolving enhancer protein 3, chloroplast (OEE3) (16 kDa subunit of oxygen evolving system of photosystem
  misc_feature (1)..(220): Homolog of NCBI NO: 15234637 NR Description: oxygen-evolving complex protein 16, chloroplast
  misc_feature (1)..(220): Homolog of NCBI NO: 4583542 NR Description: 16 kDa polypeptide of oxygen-evolving complex
  misc_feature (1)..(220): Homolog of NCBI NO: 15233587 NR Description: oxygen-evolving complex protein 16, chloroplast
MGGLHGASPAVLEGSLKINGSSRLNGSGRVAVAQRSRLVVRAQQSEETSRRSVIGLVAAGLAGGSFVQAVLADAISIKVGPPPAPSGGLPGTDNSDQARDFALALKDRFYLQPLPPTEAAARAKESAKDIINVKPLIDRKAWPYVQNDLRSKASYLRYDLNTIISSKPKDEKKSLKDLTTKLFDTIDNLDYAAKKKSPSQAEKYYAETVSALNEVLAKLG

SEQ ID NO: 27185 - DNA, 867 bp, Arabidopsis thaliana
  misc_feature (1)..(867): Ceres Seq. ID no. 12323768
  misc_feature: MA Experiment ID: 108434 Result: Up-regulated in Transcription
  misc_feature: MA Experiment 108434 PARAMETER Experiment Name: At_Root_Tips_cDNA_P Parameter: Tissue Value: Root Tips
  misc_feature: MA Experiment ID: 108463 Result: Down-regulated in Transcription
  misc_feature: MA Experiment 108463 PARAMETER Experiment Name: At_Germinating_Seeds_cDNA_P Parameter: Age (day) Value: 3 vs. 0
  misc_feature: MA Experiment 108463 PARAMETER Experiment Name: At_Germinating_Seeds_cDNA_P Parameter: Tissue Value: Germinating Seeds
  misc_feature: MA Experiment ID: 108464 Result: Down-regulated in Transcription
  misc_feature: MA Experiment 108464 PARAMETER Experiment Name: At_Germinating_Seeds_cDNA_P Parameter: Age (day) Value: 4 vs. 0
  misc_feature: MA Experiment 108464 PARAMETER Experiment Name: At_Germinating_Seeds_cDNA_P Parameter: Tissue Value: Germinating Seeds
  misc_feature: MA Experiment ID: 108579 Result: Down-regulated in Transcription
  misc_feature: MA Experiment 108579 PARAMETER Experiment Name: At_4deg_Cold_cDNA_P Parameter: Temperature (deg C) Value: 4 vs. 22
  misc_feature: MA Experiment 108579 PARAMETER Experiment Name: At_4deg_Cold_cDNA_P Parameter: Timepoint (hr) Value: 6
  misc_feature: MA Experiment 108579 PARAMETER Experiment Name: At_4deg_Cold_cDNA_P Parameter: Tissue Value: Aerial
acaattttctgttaaaatgtttggcccattgtcgccgtagattgtcttctccgttcgaaatcgcatccatcgccgtcgtcgtcggtgacgaaaaccaccgcgtaaaaccgtttcctaaatcagatgttcaatcttagaagtatctcttagaagctctcttgtatgaaaaaatgggactgttaagcataatccggaagatcaagaagaaagagaaggagatgcgtattcttatggttggacttgataattctgggaagacgacgattgttctgaaaataaacggagaagacacaagtgtgattagtccaactcttggattcaacatcaaaaccattatctaccaaaagtatacgctaaatatatgggatgttggtgggcaaaagactataagatcgtattggaggaattactttgagcagactgatggtttggtttgggtggttgatagttctgatcttaggaggttagatgattgcaagatggaacttgacaatctcttgaaagaagagaggctagctggttcatctttgctgatactagcaaataagcaggatattcaaggtgcactaacacctgatgaaattggcaaggtgctaaacttagagtccatggataaaagccggcactggaagatagtgggttgcagcgcatacacgggtgaaggtttgttggaaggattcgattggttggttcaagacattgcctccaggatttacatgcttgactaatcgactactgcattgcacaatcaatggcttgttatactcaactatatgcagtgactttgtattggctctaagtttttccttcagttctattgtaacgatgattagacaaaacataaatatttccaagacgaactcttct

SEQ ID NO: 27186 - protein, 185 aa, Arabidopsis thaliana
  peptide (1)..(185): Ceres Seq. ID no. 12323769
  misc_feature (2)..(177): Pfam Name: ADP-ribosylation factor family Pfam Description: ADP-ribosylation factor family
  misc_feature (1)..(185): Homolog of NCBI NO: 38494384 NR Description: ADP-ribosylation factor-like 2 [Silurana
  misc_feature (1)..(185): Homolog of NCBI NO: 13928996 NR Description: ADP-ribosylation-like 2 [Rattus norvegicus]
  misc_feature (1)..(185): Homolog of NCBI NO: 4929218 NR Description: arf-like protein 2 [Mus musculus]
  misc_feature (1)..(185): Homolog of NCBI NO: 4502229 NR Description: ADP-ribosylation factor-like 2; ADP=ribosylation
  misc_feature (1)..(185): Homolog of NCBI NO: 31980988 NR Description: ADP-ribosylation-like 2; arf-like protein 2 [Mus
  misc_feature (1)..(185): Homolog of NCBI NO: 21465906 NR Description: Chain A, Complex Of Arl2 And Pde Delta, Crystal
  misc_feature (1)..(185): Homolog of NCBI NO: 21465908 NR Description: Chain A, Complex Of Arl2 And Pde Delta, Crystal
  misc_feature (1)..(185): Homolog of NCBI NO: 30584891 NR Description: Homo sapiens ADP-ribosylation factor-like 2
  misc_feature (1)..(185): Homolog of NCBI NO: 12803413 NR Description: ADP-ribosylation factor-like 2 [Homo sapiens]
  misc_feature (1)..(185): Homolog of NCBI NO: 15224165 NR Description: putative ADP-ribosylation factor
MGLLSIIRKIKKKEKEMRILMVGLDNSGKTTIVLKINGEDTSVISPTLGFNIKTIIYQKYTLNIWDVGGQKTIRSYWRNYFEQTDGLVWVVDSSDLRRLDDCKMELDNLLKEERLAGSSLLILANKQDIQGALTPDEIGKVLNLESMDKSRHWKIVGCSAYTGEGLLEGFDWLVQDIASRIYMLD

SEQ ID NO: 27187 - protein, 169 aa, Arabidopsis thaliana
  peptide (1)..(169): Ceres Seq. ID no. 12323770
  misc_feature (1)..(161): Pfam Name: ADP-ribosylation factor family Pfam Description: ADP-ribosylation factor family
  misc_feature (1)..(169): Homolog of NCBI NO: 38494384 NR Description: ADP-ribosylation factor-like 2 [Silurana
  misc_feature (1)..(169): Homolog of NCBI NO: 13928996 NR Description: ADP-ribosylation-like 2 [Rattus norvegicus]
  misc_feature (1)..(169): Homolog of NCBI NO: 4929218 NR Description: arf-like protein 2 [Mus musculus]
  misc_feature (1)..(169): Homolog of NCBI NO: 4502229 NR Description: ADP-ribosylation factor-like 2; ADP=ribosylation
  misc_feature (1)..(169): Homolog of NCBI NO: 31980988 NR Description: ADP-ribosylation-like 2; arf-like protein 2 [Mus
  misc_feature (1)..(169): Homolog of NCBI NO: 21465906 NR Description: Chain A, Complex Of Arl2 And Pde Delta, Crystal
  misc_feature (1)..(169): Homolog of NCBI NO: 21465908 NR Description: Chain A, Complex Of Arl2 And Pde Delta, Crystal
  misc_feature (1)..(169): Homolog of NCBI NO: 30584891 NR Description: Homo sapiens ADP-ribosylation factor-like 2
  misc_feature (1)..(169): Homolog of NCBI NO: 12803413 NR Description: ADP-ribosylation factor-like 2 [Homo sapiens]
  misc_feature (1)..(169): Homolog of NCBI NO: 15224165 NR Description: putative ADP-ribosylation factor
MRILMVGLDNSGKTTIVLKINGEDTSVISPTLGFNIKTIIYQKYTLNIWDVGGQKTIRSYWRNYFEQTDGLVWVVDSSDLRRLDDCKMELDNLLKEERLAGSSLLILANKQDIQGALTPDEIGKVLNLESMDKSRHWKIVGCSAYTGEGLLEGFDWLVQDIASRIYMLD

SEQ ID NO: 27188 - protein, 165 aa, Arabidopsis thaliana
  peptide (1)..(165): Ceres Seq. ID no. 12323771
  misc_feature (1)..(157): Pfam Name: ADP-ribosylation factor family Pfam Description: ADP-ribosylation factor family
  misc_feature (1)..(165): Homolog of NCBI NO: 38494384 NR Description: ADP-ribosylation factor-like 2 [Silurana
  misc_feature (1)..(165): Homolog of NCBI NO: 13928996 NR Description: ADP-ribosylation-like 2 [Rattus norvegicus]
  misc_feature (1)..(165): Homolog of NCBI NO: 4929218 NR Description: arf-like protein 2 [Mus musculus]
  misc_feature (1)..(165): Homolog of NCBI NO: 4502229 NR Description: ADP-ribosylation factor-like 2; ADP=ribosylation
  misc_feature (1)..(165): Homolog of NCBI NO: 31980988 NR Description: ADP-ribosylation-like 2; arf-like protein 2 [Mus
  misc_feature (1)..(165): Homolog of NCBI NO: 21465906 NR Description: Chain A, Complex Of Arl2 And Pde Delta, Crystal
  misc_feature (1)..(165): Homolog of NCBI NO: 21465908 NR Description: Chain A, Complex Of Arl2 And Pde Delta, Crystal
  misc_feature (1)..(165): Homolog of NCBI NO: 30584891 NR Description: Homo sapiens ADP-ribosylation factor-like 2
  misc_feature (1)..(165): Homolog of NCBI NO: 12803413 NR Description: ADP-ribosylation factor-like 2 [Homo sapiens]
  misc_feature (1)..(165): Homolog of NCBI NO: 15224165 NR Description: putative ADP-ribosylation factor
MVGLDNSGKTTIVLKINGEDTSVISPTLGFNIKTIIYQKYTLNIWDVGGQKTIRSYWRNYFEQTDGLVWVVDSSDLRRLDDCKMELDNLLKEERLAGSSLLILANKQDIQGALTPDEIGKVLNLESMDKSRHWKIVGCSAYTGEGLLEGFDWLVQDIASRIYMLD

SEQ ID NO: 27189 - DNA, 605 bp, Arabidopsis thaliana
  misc_feature (1)..(605): Ceres Seq. ID no. 12338302
  misc_feature: MA Experiment ID: 108434 Result: Up-regulated in Transcription
  misc_feature: MA Experiment 108434 PARAMETER Experiment Name: At_Root_Tips_cDNA_P Parameter: Tissue Value: Root Tips
  misc_feature: MA Experiment ID: 108462 Result: Up-regulated in Transcription
  misc_feature: MA Experiment 108462 PARAMETER Experiment Name: At_Germinating_Seeds_cDNA_P Parameter: Age (day) Value: 2 vs. 0
  misc_feature: MA Experiment 108462 PARAMETER Experiment Name: At_Germinating_Seeds_cDNA_P Parameter: Tissue Value: Germinating Seeds
  misc_feature: MA Experiment ID: 108572 Result: Down-regulated in Transcription
  misc_feature: MA Experiment 108572 PARAMETER Experiment Name: At_Drought_cDNA_P Parameter: Timepoint (hr) Value: 1
  misc_feature: MA Experiment 108572 PARAMETER Experiment Name: At_Drought_cDNA_P Parameter: Tissue Value: Aerial
  misc_feature: MA Experiment 108572 PARAMETER Experiment Name: At_Drought_cDNA_P Parameter: Treatment Value: Drought vs. No Drought
  misc_feature: MA Experiment ID: 108573 Result: Down-regulated in Transcription
  misc_feature: MA Experiment 108573 PARAMETER Experiment Name: At_Drought_cDNA_P Parameter: Timepoint (hr) Value: 6
  misc_feature: MA Experiment 108573 PARAMETER Experiment Name: At_Drought_cDNA_P Parameter: Tissue Value: Aerial
  misc_feature: MA Experiment 108573 PARAMETER Experiment Name: At_Drought_cDNA_P Parameter: Treatment Value: Drought vs. No Drought
  misc_feature: MA Experiment ID: 108576 Result: Down-regulated in Transcription
  misc_feature: MA Experiment 108576 PARAMETER Experiment Name: At_42deg_Heat_cDNA_P Parameter: Temperature (deg C) Value: 42 vs. 22
  misc_feature: MA Experiment 108576 PARAMETER Experiment Name: At_42deg_Heat_cDNA_P Parameter: Timepoint (hr) Value: 1
  misc_feature: MA Experiment 108576 PARAMETER Experiment Name: At_42deg_Heat_cDNA_P Parameter: Tissue Value: Aerial
  misc_feature: MA Experiment ID: 108577 Result: Down-regulated in Transcription
  misc_feature: MA Experiment 108577 PARAMETER Experiment Name: At_42deg_Heat_cDNA_P Parameter: Temperature (deg C) Value: 42 vs. 22
  misc_feature: MA Experiment 108577 PARAMETER Experiment Name: At_42deg_Heat_cDNA_P Parameter: Timepoint (hr) Value: 6
  misc_feature: MA Experiment 108577 PARAMETER Experiment Name: At_42deg_Heat_cDNA_P Parameter: Tissue Value: Aerial
  misc_feature: MA Experiment ID: 108579 Result: Up-regulated in Transcription
  misc_feature: MA Experiment 108579 PARAMETER Experiment Name: At_4deg_Cold_cDNA_P Parameter: Temperature (deg C) Value: 4 vs. 22
  misc_feature: MA Experiment 108579 PARAMETER Experiment Name: At_4deg_Cold_cDNA_P Parameter: Timepoint (hr) Value: 6
  misc_feature: MA Experiment 108579 PARAMETER Experiment Name: At_4deg_Cold_cDNA_P Parameter: Tissue Value: Aerial
  misc_feature: MA Experiment ID: 20000093 Result: Down-regulated in Transcription
  misc_feature: MA Experiment 20000093 PARAMETER Experiment Name: At_42deg_Heat_cDNA_P Parameter: Temperature (deg C) Value: 42 vs. 22
  misc_feature: MA Experiment 20000093 PARAMETER Experiment Name: At_42deg_Heat_cDNA_P Parameter: Timepoint (hr) Value: 0.5
  misc_feature: MA Experiment 20000093 PARAMETER Experiment Name: At_42deg_Heat_cDNA_P Parameter: Tissue Value: Aerial
  misc_feature: MA Experiment ID: 20000111 Result: Down-regulated in Transcription
  misc_feature: MA Experiment 20000111 PARAMETER Experiment Name: At_42deg_Heat_cDNA_P Parameter: Temperature (deg C) Value: 42 vs. 22
  misc_feature: MA Experiment 20000111 PARAMETER Experiment Name: At_42deg_Heat_cDNA_P Parameter: Timepoint (hr) Value: 6
  misc_feature: MA Experiment 20000111 PARAMETER Experiment Name: At_42deg_Heat_cDNA_P Parameter: Tissue Value: Aerial
  misc_feature: MA Experiment ID: 20000113 Result: Down-regulated in Transcription
  misc_feature: MA Experiment 20000113 PARAMETER Experiment Name: At_42deg_Heat_cDNA_P Parameter: Temperature (deg C) Value: 42 vs. 22
  misc_feature: MA Experiment 20000113 PARAMETER Experiment Name: At_42deg_Heat_cDNA_P Parameter: Timepoint (hr) Value: 8
  misc_feature: MA Experiment 20000113 PARAMETER Experiment Name: At_42deg_Heat_cDNA_P Parameter: Tissue Value: Aerial
  misc_feature: MA Experiment ID: 20000144 Result: Down-regulated in Transcription
  misc_feature: MA Experiment 20000144 PARAMETER Experiment Name: At_42deg_Heat_cDNA_P Parameter: Temperature (deg C) Value: 42 vs. 22
  misc_feature: MA Experiment 20000144 PARAMETER Experiment Name: At_42deg_Heat_cDNA_P Parameter: Timepoint (hr) Value: 1
  misc_feature: MA Experiment 20000144 PARAMETER Experiment Name: At_42deg_Heat_cDNA_P Parameter: Tissue Value: Aerial
  misc_feature: MA Experiment ID: 20000171 Result: Down-regulated in Transcription
  misc_feature: MA Experiment 20000171 PARAMETER Experiment Name: At_42deg_Heat_P Parameter: Age (day) Value: 14
  misc_feature: MA Experiment 20000171 PARAMETER Experiment Name: At_42deg_Heat_P Parameter: Organism Value: A. thaliana
  misc_feature: MA Experiment 20000171 PARAMETER Experiment Name: At_42deg_Heat_P Parameter: Plant Line Value: WS
  misc_feature: MA Experiment 20000171 PARAMETER Experiment Name: At_42deg_Heat_P Parameter: Temperature (deg C) Value: 42 vs. 22
  misc_feature: MA Experiment 20000171 PARAMETER Experiment Name: At_42deg_Heat_P Parameter: Timepoint (hr) Value: 1
  misc_feature: MA Experiment 20000171 PARAMETER Experiment Name: At_42deg_Heat_P Parameter: Tissue Value: Aerial
  misc_feature: MA Experiment ID: 20000173 Result: Down-regulated in Transcription
  misc_feature: MA Experiment 20000173 PARAMETER Experiment Name: At_42deg_Heat_P Parameter: Age (day) Value: 14
  misc_feature: MA Experiment 20000173 PARAMETER Experiment Name: At_42deg_Heat_P Parameter: Organism Value: A. thaliana
  misc_feature: MA Experiment 20000173 PARAMETER Experiment Name: At_42deg_Heat_P Parameter: Plant Line Value: WS
  misc_feature: MA Experiment 20000173 PARAMETER Experiment Name: At_42deg_Heat_P Parameter: Temperature (deg C) Value: 42 vs. 22
  misc_feature: MA Experiment 20000173 PARAMETER Experiment Name: At_42deg_Heat_P Parameter: Timepoint (hr) Value: 6
  misc_feature: MA Experiment 20000173 PARAMETER Experiment Name: At_42deg_Heat_P Parameter: Tissue Value: Aerial
  misc_feature: MA Experiment ID: 20000179 Result: Up-regulated in Transcription
  misc_feature: MA Experiment 20000179 PARAMETER Experiment Name: At_Germinating_Seeds_P Parameter: Age (hr) Value: 6 vs. 0
  misc_feature: MA Experiment 20000179 PARAMETER Experiment Name: At_Germinating_Seeds_P Parameter: Tissue Value: Germinating Seeds
  misc_feature: MA Experiment ID: 20000180 Result: Up-regulated in Transcription
  misc_feature: MA Experiment 20000180 PARAMETER Experiment Name: At_Germinating_Seeds_P Parameter: Age (hr) Value: 24 vs. 0
  misc_feature: MA Experiment 20000180 PARAMETER Experiment Name: At_Germinating_Seeds_P Parameter: Tissue Value: Germinating Seeds
  misc_feature: MA Experiment ID: 20000185 Result: Up-regulated in Transcription
  misc_feature: MA Experiment 20000185 PARAMETER Experiment Name: At_Roots__P Parameter: Age (day) Value: 7 vs. 21
  misc_feature: MA Experiment 20000185 PARAMETER Experiment Name: At_Roots__P Parameter: Organism Value: A. thaliana
  misc_feature: MA Experiment 20000185 PARAMETER Experiment Name: At_Roots__P Parameter: Tissue Value: Roots vs. Whole Plant
  misc_feature: MA Experiment ID: 20000234 Result: Up-regulated in Transcription
  misc_feature: MA Experiment 20000234 PARAMETER Experiment Name: At_Siliques_P Parameter: Age (day) Value: 21
  misc_feature: MA Experiment 20000234 PARAMETER Experiment Name: At_Siliques_P Parameter: Organism Value: A. thaliana
  misc_feature: MA Experiment 20000234 PARAMETER Experiment Name: At_Siliques_P Parameter: Plant Line Value: WS
  misc_feature: MA Experiment 20000234 PARAMETER Experiment Name: At_Siliques_P Parameter: Tissue Value: Less Than 5mm Siliques vs. Whole Plant
  misc_feature: MA Experiment ID: 20000264 Result: Up-regulated in Transcription
  misc_feature: MA Experiment 20000264 PARAMETER Experiment Name: At_Open_Flower_P Parameter: Age (day) Value: 21
  misc_feature: MA Experiment 20000264 PARAMETER Experiment Name: At_Open_Flower_P Parameter: Plant Line Value: WS
  misc_feature: MA Experiment 20000264 PARAMETER Experiment Name: At_Open_Flower_P Parameter: Tissue Value: Open Flower vs. Whole Plant
  misc_feature: MA Experiment ID: 20000265 Result: Up-regulated in Transcription
  misc_feature: MA Experiment 20000265 PARAMETER Experiment Name: At_Open_Flower_P Parameter: Age (day) Value: 21
  misc_feature: MA Experiment 20000265 PARAMETER Experiment Name: At_Open_Flower_P Parameter: Plant Line Value: WS
  misc_feature: MA Experiment 20000265 PARAMETER Experiment Name: At_Open_Flower_P Parameter: Tissue Value: Closed Flower vs. Whole Plant
  misc_feature: MA Experiment ID: 20000437 Result: Down-regulated in Transcription
  misc_feature: MA Experiment 20000437 PARAMETER Experiment Name: At_Drought_P Parameter: Age (day) Value: 8
  misc_feature: MA Experiment 20000437 PARAMETER Experiment Name: At_Drought_P Parameter: Organism Value: A. thaliana
  misc_feature: MA Experiment 20000437 PARAMETER Experiment Name: At_Drought_P Parameter: Plant Line Value: WS
  misc_feature: MA Experiment 20000437 PARAMETER Experiment Name: At_Drought_P Parameter: Timepoint (hr) Value: 24
  misc_feature: MA Experiment 20000437 PARAMETER Experiment Name: At_Drought_P Parameter: Tissue Value: Whole Plant
  misc_feature: MA Experiment 20000437 PARAMETER Experiment Name: At_Drought_P Parameter: Treatment Value: Drought vs. No Drought
  misc_feature: MA Experiment ID: 20000439 Result: Up-regulated in Transcription
  misc_feature: MA Experiment 20000439 PARAMETER Experiment Name: At_Roots__P Parameter: Age (day) Value: 14 vs. 21
  misc_feature: MA Experiment 20000439 PARAMETER Experiment Name: At_Roots__P Parameter: Organism Value: A. thaliana
  misc_feature: MA Experiment 20000439 PARAMETER Experiment Name: At_Roots__P Parameter: Tissue Value: Roots vs. Whole Plant
  misc_feature: MA Experiment ID: 20000445 Result: Down-regulated in Transcription
  misc_feature: MA Experiment 20000445 PARAMETER Experiment Name: At_100uM_NAA__P Parameter: Age (day) Value: 14
  misc_feature: MA Experiment 20000445 PARAMETER Experiment Name: At_100uM_NAA__P Parameter: Organism Value: A. thaliana
  misc_feature: MA Experiment 20000445 PARAMETER Experiment Name: At_100uM_NAA__P Parameter: Plant Line Value: WS
  misc_feature: MA Experiment 20000445 PARAMETER Experiment Name: At_100uM_NAA__P Parameter: Timepoint (hr) Value: 6
  misc_feature: MA Experiment 20000445 PARAMETER Experiment Name: At_100uM_NAA__P Parameter: Tissue Value: Aerial
  misc_feature: MA Experiment 20000445 PARAMETER Experiment Name: At_100uM_NAA__P Parameter: Treatment Value: 100uM NAA vs. No Treatment
  misc_feature: MA Experiment ID: 20001248 Result: Down-regulated in Transcription
  misc_feature: MA Experiment 20001248 PARAMETER Experiment Name: At_Far-red-induction_P Parameter: Age (day) Value: 7
  misc_feature: MA Experiment 20001248 PARAMETER Experiment Name: At_Far-red-induction_P Parameter: Light Value: Far-red vs. White
  misc_feature: MA Experiment 20001248 PARAMETER Experiment Name: At_Far-red-induction_P Parameter: Organism Value: A. thaliana
  misc_feature: MA Experiment 20001248 PARAMETER Experiment Name: At_Far-red-induction_P Parameter: Plant Line Value: Columbia
  misc_feature: MA Experiment 20001248 PARAMETER Experiment Name: At_Far-red-induction_P Parameter: Timepoint (hr) Value: 4
  misc_feature: MA Experiment 20001248 PARAMETER Experiment Name: At_Far-red-induction_P Parameter: Tissue Value: Whole Plant
  misc_feature: MA Experiment ID: 20001450 Result: Down-regulated in Transcription
  misc_feature: MA Experiment 20001450 PARAMETER Experiment Name: At_Far-red-induction_P Parameter: Age (day) Value: 7
  misc_feature: MA Experiment 20001450 PARAMETER Experiment Name: At_Far-red-induction_P Parameter: Light Value: Far-red vs. White
  misc_feature: MA Experiment 20001450 PARAMETER Experiment Name: At_Far-red-induction_P Parameter: Organism Value: A. thaliana
  misc_feature: MA Experiment 20001450 PARAMETER Experiment Name: At_Far-red-induction_P Parameter: Plant Line Value: Columbia
  misc_feature: MA Experiment 20001450 PARAMETER Experiment Name: At_Far-red-induction_P Parameter: Timepoint (hr) Value: 8
  misc_feature: MA Experiment 20001450 PARAMETER Experiment Name: At_Far-red-induction_P Parameter: Tissue Value: Whole Plant
  misc_feature: MA Experiment ID: 20001757 Result: Up-regulated in Transcription
  misc_feature: MA Experiment 20001757 PARAMETER Experiment Name: At_50mM_NH4NO3_L-to-H_P Parameter: Timepoint (hr) Value: 6
  misc_feature: MA Experiment 20001757 PARAMETER Experiment Name: At_50mM_NH4NO3_L-to-H_P Parameter: Tissue Value: Leaf
  misc_feature: MA Experiment 20001757 PARAMETER Experiment Name: At_50mM_NH4NO3_L-to-H_P Parameter: Treatment Value: 50mM NH4NO3 vs 100mM Mannitol
  misc_feature: MA Experiment ID: 20001911 Result: Down-regulated in Transcription
  misc_feature: MA Experiment 20001911 PARAMETER Experiment Name: At_Drought_Reproduction_P Parameter: Age (day) Value: 40
  misc_feature: MA Experiment 20001911 PARAMETER Experiment Name: At_Drought_Reproduction_P Parameter: Organism Value: A. thaliana
  misc_feature: MA Experiment 20001911 PARAMETER Experiment Name: At_Drought_Reproduction_P Parameter: Plant Line Value: WS
  misc_feature: MA Experiment 20001911 PARAMETER Experiment Name: At_Drought_Reproduction_P Parameter: Timepoint (day) Value: 10
  misc_feature: MA Experiment 20001911 PARAMETER Experiment Name: At_Drought_Reproduction_P Parameter: Tissue Value: Flowers
  misc_feature: MA Experiment 20001911 PARAMETER Experiment Name: At_Drought_Reproduction_P Parameter: Treatment Value: Drought vs. No Drought
ccataacaacaaattcgattcttataactgtttccctctcatctttacacaaaagtattctaatcgatttcaatggcgggtcgtggtaaaacactcggatctgggtctgcgaagaaggcaacaacaagaagcagcaaagccggtctccaattccctgtgggtcgtatcgctcgtttcttgaagaaaggtaaatacgccgaacgtgttggtgccggagctccggtttacttagccgccgttctctaatacctcccgccgaggtattggaattggctggaaacgcagcgagggataacaagaagacgaggattgttccaaggcatattcaattggcggtgaggaacgatgaagaattgagcaaattgcttggagatgtgactattgctaatggaggtgtgatgcctaacattcacaatcttcttcttcctaagaagaccggtgcttccaagccatctgctgaagacgattgattaatcaaccaaatccactctcttgtgttttttgagtttttaaggctttttaagagtaatttagattagatctatggtgaagaaagaatctatcttttgtgttttttgaattgaattgaatgttcatatgctttc

SEQ ID NO: 27190 - protein, 59 aa, Arabidopsis thaliana
  peptide (1)..(59): Ceres Seq. ID no. 12338303
HNNKFDSYNCFPLIFTQKYSNRFQWRVVVKHSDLGLRRRQQQEAAKPVSNSLWVVSLVS

SEQ ID NO: 27191 - protein, 57 aa, Arabidopsis thaliana
  peptide (1)..(57): Ceres Seq. ID no. 12338304
  misc_feature (4)..(57): Pfam Name: Core histone H2A/H2B/H3/H4 Pfam Description: Core histone H2A/H2B/H3/H4
  misc_feature (1)..(57): Homolog of NCBI NO: 7439702 NR Description: histone H2A (clone TH254) - wheat
  misc_feature (1)..(57): Homolog of NCBI NO: 34393263 NR Description: histone H2A [Oryza sativa (japonica
  misc_feature (1)..(57): Homolog of NCBI NO: 34393264 NR Description: putative histone H2A [Oryza sativa (japonica
  misc_feature (1)..(57): Homolog of NCBI NO: 2130105 NR Description: histone H2A.4 - wheat
  misc_feature (1)..(57): Homolog of NCBI NO: 29837243 NR Description: putative histone H2A [Oryza sativa (japonica
  misc_feature (1)..(57): Homolog of NCBI NO: 21617982 NR Description: histone H2A-like protein [Arabidopsis thaliana]
  misc_feature (1)..(57): Homolog of NCBI NO: 15237024 NR Description: histone H2A- like protein
  misc_feature (1)..(57): Homolog of NCBI NO: 15239697 NR Description: histone H2A (gb|AAF64418.1)
  misc_feature (1)..(57): Homolog of NCBI NO: 15232330 NR Description: histone H2A, putative
  misc_feature (1)..(57): Homolog of NCBI NO: 15223708 NR Description: histone H2A, putative
MAGRGKTLGSGSAKKATTRSSKAGLQFPVGRIARFLKKGKYAERVGAGAPVYLAAVL

SEQ ID NO: 27192 - DNA, 982 bp, Arabidopsis thaliana
  misc_feature (1)..(982): Ceres Seq. ID no. 12394298
  misc_feature: MA Experiment ID: 108434 Result: Up-regulated in Transcription
  misc_feature: MA Experiment 108434 PARAMETER Experiment Name: At_Root_Tips_cDNA_P Parameter: Tissue Value: Root Tips
  misc_feature: MA Experiment ID: 108462 Result: Down-regulated in Transcription
  misc_feature: MA Experiment 108462 PARAMETER Experiment Name: At_Germinating_Seeds_cDNA_P Parameter: Age (day) Value: 2 vs. 0
  misc_feature: MA Experiment 108462 PARAMETER Experiment Name: At_Germinating_Seeds_cDNA_P Parameter: Tissue Value: Germinating Seeds
  misc_feature: MA Experiment ID: 108464 Result: Down-regulated in Transcription
  misc_feature: MA Experiment 108464 PARAMETER Experiment Name: At_Germinating_Seeds_cDNA_P Parameter: Age (day) Value: 4 vs. 0
  misc_feature: MA Experiment 108464 PARAMETER Experiment Name: At_Germinating_Seeds_cDNA_P Parameter: Tissue Value: Germinating Seeds
  misc_feature: MA Experiment ID: 20000111 Result: Up-regulated in Transcription
  misc_feature: MA Experiment 20000111 PARAMETER Experiment Name: At_42deg_Heat_cDNA_P Parameter: Temperature (deg C) Value: 42 vs. 22
  misc_feature: MA Experiment 20000111 PARAMETER Experiment Name: At_42deg_Heat_cDNA_P Parameter: Timepoint (hr) Value: 6
  misc_feature: MA Experiment 20000111 PARAMETER Experiment Name: At_42deg_Heat_cDNA_P Parameter: Tissue Value: Aerial
  misc_feature: MA Experiment ID: 20000173 Result: Up-regulated in Transcription
  misc_feature: MA Experiment 20000173 PARAMETER Experiment Name: At_42deg_Heat_P Parameter: Age (day) Value: 14
  misc_feature: MA Experiment 20000173 PARAMETER Experiment Name: At_42deg_Heat_P Parameter: Organism Value: A. thaliana
  misc_feature: MA Experiment 20000173 PARAMETER Experiment Name: At_42deg_Heat_P Parameter: Plant Line Value: WS
  misc_feature: MA Experiment 20000173 PARAMETER Experiment Name: At_42deg_Heat_P Parameter: Temperature (deg C) Value: 42 vs. 22
  misc_feature: MA Experiment 20000173 PARAMETER Experiment Name: At_42deg_Heat_P Parameter: Timepoint (hr) Value: 6
  misc_feature: MA Experiment 20000173 PARAMETER Experiment Name: At_42deg_Heat_P Parameter: Tissue Value: Aerial
  misc_feature: MA Experiment ID: 20000184 Result: Up-regulated in Transcription
  misc_feature: MA Experiment 20000184 PARAMETER Experiment Name: At_Shoots__P Parameter: Age (day) Value: 7
  misc_feature: MA Experiment 20000184 PARAMETER Experiment Name: At_Shoots__P Parameter: Tissue Value: Shoots vs. Whole Plant
  misc_feature: MA Experiment ID: 20000224 Result: Up-regulated in Transcription
  misc_feature: MA Experiment ID: 20000227 Result: Up-regulated in Transcription
  misc_feature: MA Experiment 20000227 PARAMETER Experiment Name: At_Root-Tips-vs-Tops_P Parameter: Tissue Value: Root Tips vs. Root Tops
  misc_feature: MA Experiment ID: 20000437 Result: Up-regulated in Transcription
  misc_feature: MA Experiment 20000437 PARAMETER Experiment Name: At_Drought_P Parameter: Age (day) Value: 8
  misc_feature: MA Experiment 20000437 PARAMETER Experiment Name: At_Drought_P Parameter: Organism Value: A. thaliana
  misc_feature: MA Experiment 20000437 PARAMETER Experiment Name: At_Drought_P Parameter: Plant Line Value: WS
  misc_feature: MA Experiment 20000437 PARAMETER Experiment Name: At_Drought_P Parameter: Timepoint (hr) Value: 24
  misc_feature: MA Experiment 20000437 PARAMETER Experiment Name: At_Drought_P Parameter: Tissue Value: Whole Plant
  misc_feature: MA Experiment 20000437 PARAMETER Experiment Name: At_Drought_P Parameter: Treatment Value: Drought vs. No Drought
  misc_feature: MA Experiment ID: 20000527 Result: Down-regulated in Transcription
  misc_feature: MA Experiment 20000527 PARAMETER Experiment Name: At_10percent_PEG_P Parameter: Age (day) Value: 20
  misc_feature: MA Experiment 20000527 PARAMETER Experiment Name: At_10percent_PEG_P Parameter: Organism Value: A. thaliana
  misc_feature: MA Experiment 20000527 PARAMETER Experiment Name: At_10percent_PEG_P Parameter: Plant Line Value: WS
  misc_feature: MA Experiment 20000527 PARAMETER Experiment Name: At_10percent_PEG_P Parameter: Timepoint (day) Value: 20
  misc_feature: MA Experiment 20000527 PARAMETER Experiment Name: At_10percent_PEG_P Parameter: Tissue Value: Whole Plant
  misc_feature: MA Experiment 20000527 PARAMETER Experiment Name: At_10percent_PEG_P Parameter: Treatment Value: 10percent PEG vs. No Treatment
  misc_feature: MA Experiment ID: 20001556 Result: Up-regulated in Transcription
  misc_feature: MA Experiment 20001556 PARAMETER Experiment Name: At_Drought_Soil_Dry_P Parameter: Age (day) Value: 26
  misc_feature: MA Experiment 20001556 PARAMETER Experiment Name: At_Drought_Soil_Dry_P Parameter: Organism Value: A. thaliana
  misc_feature: MA Experiment 20001556 PARAMETER Experiment Name: At_Drought_Soil_Dry_P Parameter: Plant Line Value: WS
  misc_feature: MA Experiment 20001556 PARAMETER Experiment Name: At_Drought_Soil_Dry_P Parameter: Post Timepoint (hr) Value: None
  misc_feature: MA Experiment 20001556 PARAMETER Experiment Name: At_Drought_Soil_Dry_P Parameter: Post-Treatment Value: None
  misc_feature: MA Experiment 20001556 PARAMETER Experiment Name: At_Drought_Soil_Dry_P Parameter: Timepoint (day) Value: 12
  misc_feature: MA Experiment 20001556 PARAMETER Experiment Name: At_Drought_Soil_Dry_P Parameter: Treatment Value: Drought vs. No Drought
  misc_feature: MA Experiment ID: 20001906 Result: Up-regulated in Transcription
  misc_feature: MA Experiment 20001906 PARAMETER Experiment Name: At_Drought_Reproduction_P Parameter: Age (day) Value: 35
  misc_feature: MA Experiment 20001906 PARAMETER Experiment Name: At_Drought_Reproduction_P Parameter: Organism Value: A. thaliana
  misc_feature: MA Experiment 20001906 PARAMETER Experiment Name: At_Drought_Reproduction_P Parameter: Plant Line Value: WS
  misc_feature: MA Experiment 20001906 PARAMETER Experiment Name: At_Drought_Reproduction_P Parameter: Timepoint (day) Value: 5
  misc_feature: MA Experiment 20001906 PARAMETER Experiment Name: At_Drought_Reproduction_P Parameter: Tissue Value: Siliques
  misc_feature: MA Experiment 20001906 PARAMETER Experiment Name: At_Drought_Reproduction_P Parameter: Treatment Value: Drought vs. No Drought
aaagcccaaatgttgctcaaggcttctcccgctctctctctcttgagctccggctccaccggcggtggaaatctgtttcctccgtcgagaaattcgtcgaatcgtctgttttctccgagtggatctaagttttctgttcaggcggcgaaaggaacgaacacgaagtcgttaaccggagttgtattcgaaccttttgaggaagtgaagaaagaactggacctcgttcccactaccccttttgtttctctcgctcgccacaagttctccgacgatgctgaatctgccatcaacgatcagatcaacgtggagtacaacgtctcgtatgtctaccatgccctgtatgcctactttgacagagacaatgtcggcttgaaaggtttcgccaagttttttaacgattcgagtcttgaagaacgaggtcatgctgagatgtttatggagtatcagaacaagcgtggtgggagagtgaagctgcagtctattttgatgcccgtctctgagtttgatcacgaggagaagggagatgcattgcatgcgatggagcttgcattgtctttggagaaacttacaaatgaaaagcttctgaagttacaaagtgttggtgtgaagaacaatgatgttcagctggttgattttgtagaatctgagtttctaggcgagcaggtcgaagctatcaagaaaatctcagagtacgttgcacagctaagaagaataggaaagggtcatggagtgtggcattttgatcaaatgcttctcaatgatgaggtttaaggaaggagagttcagcttctgagtttgatgacaatcttccttgtgctatatggcaccgttctatctctataacgacgtctctaagtttggtcggagaaaagtgttcttgctcgttctttcttttctttgtttttggttaaccgaatgcttgtgagtgtgtacttaataatgtaactcgtagtctgataataaatgcaagtcccactgtttc

SEQ ID NO: 27193 - protein, 256 aa, Arabidopsis thaliana
  peptide (1)..(256): Ceres Seq. ID no. 12394299
  misc_feature (93)..(238): Pfam Name: Ferritin-like domain Pfam Description: Ferritin-like domain
  misc_feature (4)..(256): Homolog of NCBI NO: 15228431 NR Description: ferritin subunit, putative
  misc_feature (4)..(256): Homolog of NCBI NO: 21593905 NR Description: ferritin subunit, putative [Arabidopsis thaliana]
KAQMLLKASPALSLLSSGSTGGGNLFPPSRNSSNRLFSPSGSKFSVQAAKGTNTKSLTGVVFEPFEEVKKELDLVPTTPFVSLARHKFSDDAESAINDQINVEYNVSYVYHALYAYFDRDNVGLKGFAKFFNDSSLEERGHAEMFMEYQNKRGGRVKLQSILMPVSEFDHEEKGDALHAMELALSLEKLTNEKLLKLQSVGVKNNDVQLVDFVESEFLGEQVEAIKKISEYVAQLRRIGKGHGVWHFDQMLLNDEV

SEQ ID NO: 27194 - protein, 253 aa, Arabidopsis thaliana
  peptide (1)..(253): Ceres Seq. ID no. 12394300
  misc_feature (90)..(235): Pfam Name: Ferritin-like domain Pfam Description: Ferritin-like domain
  misc_feature (1)..(253): Homolog of NCBI NO: 15228431 NR Description: ferritin subunit, putative
  misc_feature (1)..(253): Homolog of NCBI NO: 21593905 NR Description: ferritin subunit, putative [Arabidopsis thaliana]
MLLKASPALSLLSSGSTGGGNLFPPSRNSSNRLFSPSGSKFSVQAAKGTNTKSLTGVVFEPFEEVKKELDLVPTTPFVSLARHKFSDDAESAINDQINVEYNVSYVYHALYAYFDRDNVGLKGFAKFFNDSSLEERGHAEMFMEYQNKRGGRVKLQSILMPVSEFDHEEKGDALHAMELALSLEKLTNEKLLKLQSVGVKNNDVQLVDFVESEFLGEQVEAIKKISEYVAQLRRIGKGHGVWHFDQMLLNDEV

SEQ ID NO: 27195 - DNA, 782 bp, Arabidopsis thaliana
  misc_feature (1)..(782): Ceres Seq. ID no. 12338783
  misc_feature: MA Experiment ID: 108433 Result: Down-regulated in Transcription
  misc_feature: MA Experiment 108433 PARAMETER Experiment Name: At_rhl_Mutant2_cDNA_P Parameter: Age (day) Value: 7
  misc_feature: MA Experiment 108433 PARAMETER Experiment Name: At_rhl_Mutant2_cDNA_P Parameter: Organism Value: A. thaliana
  misc_feature: MA Experiment 108433 PARAMETER Experiment Name: At_rhl_Mutant2_cDNA_P Parameter: Plant Line Value: rhl Mutant vs. wt landsburg
  misc_feature: MA Experiment 108433 PARAMETER Experiment Name: At_rhl_Mutant2_cDNA_P Parameter: Tissue Value: Roots
  misc_feature: MA Experiment ID: 108435 Result: Down-regulated in Transcription
  misc_feature: MA Experiment 108435 PARAMETER Experiment Name: At_stm_Mutants_cDNA_P Parameter: Plant Line Value: wt Landsburg vs stm
  misc_feature: MA Experiment 108435 PARAMETER Experiment Name: At_stm_Mutants_cDNA_P Parameter: Tissue Value: Shoot Apical Meristem Region
  misc_feature: MA Experiment ID: 108462 Result: Up-regulated in Transcription
  misc_feature: MA Experiment 108462 PARAMETER Experiment Name: At_Germinating_Seeds_cDNA_P Parameter: Age (day) Value: 2 vs. 0
  misc_feature: MA Experiment 108462 PARAMETER Experiment Name: At_Germinating_Seeds_cDNA_P Parameter: Tissue Value: Germinating Seeds
  misc_feature: MA Experiment ID: 108464 Result: Up-regulated in Transcription
  misc_feature: MA Experiment 108464 PARAMETER Experiment Name: At_Germinating_Seeds_cDNA_P Parameter: Age (day) Value: 4 vs. 0
  misc_feature: MA Experiment 108464 PARAMETER Experiment Name: At_Germinating_Seeds_cDNA_P Parameter: Tissue Value: Germinating Seeds
  misc_feature: MA Experiment ID: 108469 Result: Down-regulated in Transcription
  misc_feature: MA Experiment ID: 108488 Result: Up-regulated in Transcription
  misc_feature: MA Experiment ID: 20000069 Result: Up-regulated in Transcription
  misc_feature: MA Experiment 20000069 PARAMETER Experiment Name: At_100uM_ABA_Mutants_cDNA_P Parameter: Plant Line Value: CS23
  misc_feature: MA Experiment 20000069 PARAMETER Experiment Name: At_100uM_ABA_Mutants_cDNA_P Parameter: Timepoint (hr) Value: 6
  misc_feature: MA Experiment 20000069 PARAMETER Experiment Name: At_100uM_ABA_Mutants_cDNA_P Parameter: Tissue Value: Aerial
  misc_feature: MA Experiment 20000069 PARAMETER Experiment Name: At_100uM_ABA_Mutants_cDNA_P Parameter: Treatment Value: 100uM ABA vs. No Treatment
  misc_feature: MA Experiment ID: 20000070 Result: Up-regulated in Transcription
  misc_feature: MA Experiment 20000070 PARAMETER Experiment Name: At_100uM_ABA_Mutants_cDNA_P Parameter: Plant Line Value: CS24
  misc_feature: MA Experiment 20000070 PARAMETER Experiment Name: At_100uM_ABA_Mutants_cDNA_P Parameter: Timepoint (hr) Value: 6
  misc_feature: MA Experiment 20000070 PARAMETER Experiment Name: At_100uM_ABA_Mutants_cDNA_P Parameter: Tissue Value: Aerial
  misc_feature: MA Experiment 20000070 PARAMETER Experiment Name: At_100uM_ABA_Mutants_cDNA_P Parameter: Treatment Value: 100uM ABA vs. No Treatment
  misc_feature: MA Experiment ID: 20000072 Result: Up-regulated in Transcription
  misc_feature: MA Experiment 20000072 PARAMETER Experiment Name: At_100uM_ABA_Mutants_cDNA_P Parameter: Plant Line Value: CS8105
  misc_feature: MA Experiment 20000072 PARAMETER Experiment Name: At_100uM_ABA_Mutants_cDNA_P Parameter: Timepoint (hr) Value: 6
  misc_feature: MA Experiment 20000072 PARAMETER Experiment Name: At_100uM_ABA_Mutants_cDNA_P Parameter: Tissue Value: Aerial
  misc_feature: MA Experiment 20000072 PARAMETER Experiment Name: At_100uM_ABA_Mutants_cDNA_P Parameter: Treatment Value: 100uM ABA vs. No Treatment
  misc_feature: MA Experiment ID: 20000087 Result: Up-regulated in Transcription
  misc_feature: MA Experiment 20000087 PARAMETER Experiment Name: At_100uM_ABA_Mutants_cDNA_P Parameter: Plant Line Value: WS
  misc_feature: MA Experiment 20000087 PARAMETER Experiment Name: At_100uM_ABA_Mutants_cDNA_P Parameter: Timepoint (hr) Value: 6
  misc_feature: MA Experiment 20000087 PARAMETER Experiment Name: At_100uM_ABA_Mutants_cDNA_P Parameter: Tissue Value: Aerial
  misc_feature: MA Experiment 20000087 PARAMETER Experiment Name: At_100uM_ABA_Mutants_cDNA_P Parameter: Treatment Value: 100uM ABA vs. No Treatment
  misc_feature: MA Experiment ID: 20000088 Result: Up-regulated in Transcription
  misc_feature: MA Experiment 20000088 PARAMETER Experiment Name: At_100uM_ABA_Mutants_cDNA_P Parameter: Plant Line Value: Landsberg
  misc_feature: MA Experiment 20000088 PARAMETER Experiment Name: At_100uM_ABA_Mutants_cDNA_P Parameter: Timepoint (hr) Value: 6
  misc_feature: MA Experiment 20000088 PARAMETER Experiment Name: At_100uM_ABA_Mutants_cDNA_P Parameter: Tissue Value: Aerial
  misc_feature: MA Experiment 20000088 PARAMETER Experiment Name: At_100uM_ABA_Mutants_cDNA_P Parameter: Treatment Value: 100uM ABA vs. No Treatment
  misc_feature: MA Experiment ID: 20000093 Result: Down-regulated in Transcription
  misc_feature: MA Experiment 20000093 PARAMETER Experiment Name: At_42deg_Heat_cDNA_P Parameter: Temperature (deg C) Value: 42 vs. 22
  misc_feature: MA Experiment 20000093 PARAMETER Experiment Name: At_42deg_Heat_cDNA_P Parameter: Timepoint (hr) Value: 0.5
  misc_feature: MA Experiment 20000093 PARAMETER Experiment Name: At_42deg_Heat_cDNA_P Parameter: Tissue Value: Aerial
  misc_feature: MA Experiment ID: 20000112 Result: Down-regulated in Transcription
  misc_feature: MA Experiment 20000112 PARAMETER Experiment Name: At_42deg_Heat_cDNA_P Parameter: Temperature (deg C) Value: 42 vs. 22
  misc_feature: MA Experiment 20000112 PARAMETER Experiment Name: At_42deg_Heat_cDNA_P Parameter: Timepoint (hr) Value: 2
  misc_feature: MA Experiment 20000112 PARAMETER Experiment Name: At_42deg_Heat_cDNA_P Parameter: Tissue Value: Aerial
  misc_feature: MA Experiment ID: 20000144 Result: Down-regulated in Transcription
  misc_feature: MA Experiment 20000144 PARAMETER Experiment Name: At_42deg_Heat_cDNA_P Parameter: Temperature (deg C) Value: 42 vs. 22
  misc_feature: MA Experiment 20000144 PARAMETER Experiment Name: At_42deg_Heat_cDNA_P Parameter: Timepoint (hr) Value: 1
  misc_feature: MA Experiment 20000144 PARAMETER Experiment Name: At_42deg_Heat_cDNA_P Parameter: Tissue Value: Aerial
  misc_feature: MA Experiment ID: 20000171 Result: Down-regulated in Transcription
  misc_feature: MA Experiment 20000171 PARAMETER Experiment Name: At_42deg_Heat_P Parameter: Age (day) Value: 14
  misc_feature: MA Experiment 20000171 PARAMETER Experiment Name: At_42deg_Heat_P Parameter: Organism Value: A. thaliana
  misc_feature: MA Experiment 20000171 PARAMETER Experiment Name: At_42deg_Heat_P Parameter: Plant Line Value: WS
  misc_feature: MA Experiment 20000171 PARAMETER Experiment Name: At_42deg_Heat_P Parameter: Temperature (deg C) Value: 42 vs. 22
  misc_feature: MA Experiment 20000171 PARAMETER Experiment Name: At_42deg_Heat_P Parameter: Timepoint (hr) Value: 1
  misc_feature: MA Experiment 20000171 PARAMETER Experiment Name: At_42deg_Heat_P Parameter: Tissue Value: Aerial
  misc_feature: MA Experiment ID: 20000173 Result: Down-regulated in Transcription
  misc_feature: MA Experiment 20000173 PARAMETER Experiment Name: At_42deg_Heat_P Parameter: Age (day) Value: 14
  misc_feature: MA Experiment 20000173 PARAMETER Experiment Name: At_42deg_Heat_P Parameter: Organism Value: A. thaliana
  misc_feature: MA Experiment 20000173 PARAMETER Experiment Name: At_42deg_Heat_P Parameter: Plant Line Value: WS
  misc_feature: MA Experiment 20000173 PARAMETER Experiment Name: At_42deg_Heat_P Parameter: Temperature (deg C) Value: 42 vs. 22
  misc_feature: MA Experiment 20000173 PARAMETER Experiment Name: At_42deg_Heat_P Parameter: Timepoint (hr) Value: 6
  misc_feature: MA Experiment 20000173 PARAMETER Experiment Name: At_42deg_Heat_P Parameter: Tissue Value: Aerial
  misc_feature: MA Experiment ID: 20000179 Result: Up-regulated in Transcription
  misc_feature: MA Experiment 20000179 PARAMETER Experiment Name: At_Germinating_Seeds_P Parameter: Age (hr) Value: 6 vs. 0
  misc_feature: MA Experiment 20000179 PARAMETER Experiment Name: At_Germinating_Seeds_P Parameter: Tissue Value: Germinating Seeds
  misc_feature: MA Experiment ID: 20000180 Result: Up-regulated in Transcription
  misc_feature: MA Experiment 20000180 PARAMETER Experiment Name: At_Germinating_Seeds_P Parameter: Age (hr) Value: 24 vs. 0
  misc_feature: MA Experiment 20000180 PARAMETER Experiment Name: At_Germinating_Seeds_P Parameter: Tissue Value: Germinating Seeds
  misc_feature: MA Experiment ID: 20000182 Result: Down-regulated in Transcription
  misc_feature: MA Experiment 20000182 PARAMETER Experiment Name: At_2mM_SA_P Parameter: Age (day) Value: 14
  misc_feature: MA Experiment 20000182 PARAMETER Experiment Name: At_2mM_SA_P Parameter: Organism Value: A. thaliana
  misc_feature: MA Experiment 20000182 PARAMETER Experiment Name: At_2mM_SA_P Parameter: Plant Line Value: WS
  misc_feature: MA Experiment 20000182 PARAMETER Experiment Name: At_2mM_SA_P Parameter: Timepoint (hr) Value: 6
  misc_feature: MA Experiment 20000182 PARAMETER Experiment Name: At_2mM_SA_P Parameter: Tissue Value: Aerial
  misc_feature: MA Experiment 20000182 PARAMETER Experiment Name: At_2mM_SA_P Parameter: Treatment Value: 2mM SA vs. No Treatment
  misc_feature: MA Experiment ID: 20000184 Result: Up-regulated in Transcription
  misc_feature: MA Experiment 20000184 PARAMETER Experiment Name: At_Shoots__P Parameter: Age (day) Value: 7
  misc_feature: MA Experiment 20000184 PARAMETER Experiment Name: At_Shoots__P Parameter: Tissue Value: Shoots vs. Whole Plant
  misc_feature: MA Experiment ID: 20000224 Result: Down-regulated in Transcription
  misc_feature: MA Experiment ID: 20000227 Result: Up-regulated in Transcription
  misc_feature: MA Experiment 20000227 PARAMETER Experiment Name: At_Root-Tips-vs-Tops_P Parameter: Tissue Value: Root Tips vs. Root Tops
  misc_feature: MA Experiment ID: 20000438 Result: Up-regulated in Transcription
  misc_feature: MA Experiment 20000438 PARAMETER Experiment Name: At_Shoots__P Parameter: Age (day) Value: 14
  misc_feature: MA Experiment 20000438 PARAMETER Experiment Name: At_Shoots__P Parameter: Tissue Value: Shoots vs. Whole Plant
  misc_feature: MA Experiment ID: 20000439 Result: Down-regulated in Transcription
  misc_feature: MA Experiment 20000439 PARAMETER Experiment Name: At_Roots__P Parameter: Age (day) Value: 14 vs. 21
  misc_feature: MA Experiment 20000439 PARAMETER Experiment Name: At_Roots__P Parameter: Organism Value: A. thaliana
  misc_feature: MA Experiment 20000439 PARAMETER Experiment Name: At_Roots__P Parameter: Tissue Value: Roots vs. Whole Plant
  misc_feature: MA Experiment ID: 20000495 Result: Down-regulated in Transcription
  misc_feature: MA Experiment 20000495 PARAMETER Experiment Name: At_Guard_Cells_P Parameter: Harvest Date Value: 8/2/2002
  misc_feature: MA Experiment 20000495 PARAMETER Experiment Name: At_Guard_Cells_P Parameter: Organism Value: A. thaliana
  misc_feature: MA Experiment 20000495 PARAMETER Experiment Name: At_Guard_Cells_P Parameter: Tissue Value: Guard Cells vs. Leaves
  misc_feature: MA Experiment ID: 20000794 Result: Down-regulated in Transcription
  misc_feature: MA Experiment 20000794 PARAMETER Experiment Name: At_Petals_P Parameter: Age (day) Value: 23-25 days
  misc_feature: MA Experiment 20000794 PARAMETER Experiment Name: At_Petals_P Parameter: Plant Line Value: WS
  misc_feature: MA Experiment 20000794 PARAMETER Experiment Name: At_Petals_P Parameter: Tissue Value: Petals vs. Whole plant
  misc_feature: MA Experiment ID: 20001451 Result: Down-regulated in Transcription
  misc_feature: MA Experiment 20001451 PARAMETER Experiment Name: At_Far-red-induction_P Parameter: Age (day) Value: 7
  misc_feature: MA Experiment 20001451 PARAMETER Experiment Name: At_Far-red-induction_P Parameter: Light Value: Far-red vs. White
  misc_feature: MA Experiment 20001451 PARAMETER Experiment Name: At_Far-red-induction_P Parameter: Organism Value: A. thaliana
  misc_feature: MA Experiment 20001451 PARAMETER Experiment Name: At_Far-red-induction_P Parameter: Plant Line Value: Columbia
  misc_feature: MA Experiment 20001451 PARAMETER Experiment Name: At_Far-red-induction_P Parameter: Timepoint (hr) Value: 24
  misc_feature: MA Experiment 20001451 PARAMETER Experiment Name: At_Far-red-induction_P Parameter: Tissue Value: Whole Plant
  misc_feature: MA Experiment ID: 20001905 Result: Down-regulated in Transcription
  misc_feature: MA Experiment 20001905 PARAMETER Experiment Name: At_Drought_Reproduction_P Parameter: Age (day) Value: 40
  misc_feature: MA Experiment 20001905 PARAMETER Experiment Name: At_Drought_Reproduction_P Parameter: Organism Value: A. thaliana
  misc_feature: MA Experiment 20001905 PARAMETER Experiment Name: At_Drought_Reproduction_P Parameter: Plant Line Value: WS
  misc_feature: MA Experiment 20001905 PARAMETER Experiment Name: At_Drought_Reproduction_P Parameter: Timepoint (day) Value: 10
  misc_feature: MA Experiment 20001905 PARAMETER Experiment Name: At_Drought_Reproduction_P Parameter: Tissue Value: Rosettes
  misc_feature: MA Experiment 20001905 PARAMETER Experiment Name: At_Drought_Reproduction_P Parameter: Treatment Value: Drought vs. No Drought
atatatcttatggatcggacgctcttgggcttttcttgaaaccactataaaacctatctcaattctttcattttctccacacccaattcactcacaacctagctagctagtgaacagtattttctatataccaaaaatggcttcaagttccatagctcttttcttggctctcaatcttctctttttcacaacaatctccgcctgtggtagctgtactccgtgcggcggaggttgcccctctcccaagccaaagccaactcctaaaccaaccccaagccctagctctggctcgagcaagtgccctaaagacaccctcaagctcggtgtctgcgctaatgtgctcaacggcctcctggacttgacccttggcaagccaccggtagccatgctgcagcctcatccaaggactcgctgatgttgaggcagccgtttgtctctgcaccgctcttaaggctaacattcttggaatcaacttgaacctcccaatatctttaagtctactccttaatgtttgcagcaaacaacttcctcctggcttccaatgctaaaaaccatattgatatataatttaaatacacttatgtgtgtattaatttatcttcttgttttaaagagacagggtgattctctatactcttatattgtgtctttatatatcttgatctgtggtttcttctactctgcttgctctggtgttcattggggtgatccgtaagattcctgaagtttacagtttcattatttcctattatatatactcttaccattgggggtattgttgc

SEQ ID NO: 27196 - protein, 92 aa, Arabidopsis thaliana
  peptide (1)..(92): Ceres Seq. ID no. 12338784
  misc_feature (3)..(81): Homolog of NCBI NO: 10798758 NR Description: P-rich protein Nt-SubC29 [Nicotiana tabacum]
  misc_feature (2)..(82): Homolog of NCBI NO: 7484770 NR Description: extensin like protein - black poplar
  misc_feature (3)..(82): Homolog of NCBI NO: 21360370 NR Description: extensin-like protein [Citrus junos]
  misc_feature (4)..(82): Homolog of NCBI NO: 629597 NR Description: proline-rich protein - rape
  misc_feature (3)..(82): Homolog of NCBI NO: 15221484 NR Description: similar to 14KD proline-rich protein DC2.15
  misc_feature (1)..(82): Homolog of NCBI NO: 13561927 NR Description: extensin-like protein [Brassica napus]
  misc_feature (1)..(82): Homolog of NCBI NO: 15221201 NR Description: pEARLI 1-like protein
MASSSIALFLALNLLFFTTISACGSCTPCGGGCPSPKPKPTPKPTPSPSSGSSKCPKDTLKLGVCANVLNGLLDLTLGKPPVAMLQPHPRTR

SEQ ID NO: 27197 - protein, 57 aa, Arabidopsis thaliana
  peptide (1)..(57): Ceres Seq. ID no. 12338785
MLKTILIYNLNTLMCVLIYLLVLKRQGDSLYSYIVSLYILICGFFYSACSGVHWGDP

SEQ ID NO: 27198 - DNA, 667 bp, Arabidopsis thaliana
  misc_feature (1)..(667): Ceres Seq. ID no. 12389191
  misc_feature: MA Experiment ID: 108434 Result: Up-regulated in Transcription
  misc_feature: MA Experiment 108434 PARAMETER Experiment Name: At_Root_Tips_cDNA_P Parameter: Tissue Value: Root Tips
  misc_feature: MA Experiment ID: 108462 Result: Down-regulated in Transcription
  misc_feature: MA Experiment 108462 PARAMETER Experiment Name: At_Germinating_Seeds_cDNA_P Parameter: Age (day) Value: 2 vs. 0
  misc_feature: MA Experiment 108462 PARAMETER Experiment Name: At_Germinating_Seeds_cDNA_P Parameter: Tissue Value: Germinating Seeds
  misc_feature: MA Experiment ID: 108463 Result: Down-regulated in Transcription
  misc_feature: MA Experiment 108463 PARAMETER Experiment Name: At_Germinating_Seeds_cDNA_P Parameter: Age (day) Value: 3 vs. 0
  misc_feature: MA Experiment 108463 PARAMETER Experiment Name: At_Germinating_Seeds_cDNA_P Parameter: Tissue Value: Germinating Seeds
  misc_feature: MA Experiment ID: 108464 Result: Down-regulated in Transcription
  misc_feature: MA Experiment 108464 PARAMETER Experiment Name: At_Germinating_Seeds_cDNA_P Parameter: Age (day) Value: 4 vs. 0
  misc_feature: MA Experiment 108464 PARAMETER Experiment Name: At_Germinating_Seeds_cDNA_P Parameter: Tissue Value: Germinating Seeds
  misc_feature: MA Experiment ID: 108488 Result: Up-regulated in Transcription
  misc_feature: MA Experiment ID: 20000794 Result: Down-regulated in Transcription
  misc_feature: MA Experiment 20000794 PARAMETER Experiment Name: At_Petals_P Parameter: Age (day) Value: 23-25 days
  misc_feature: MA Experiment 20000794 PARAMETER Experiment Name: At_Petals_P Parameter: Plant Line Value: WS
  misc_feature: MA Experiment 20000794 PARAMETER Experiment Name: At_Petals_P Parameter: Tissue Value: Petals vs. Whole plant
  misc_feature: MA Experiment ID: 20001558 Result: Up-regulated in Transcription
  misc_feature: MA Experiment 20001558 PARAMETER Experiment Name: At_Drought_Soil_Dry_P Parameter: Age (day) Value: 27
  misc_feature: MA Experiment 20001558 PARAMETER Experiment Name: At_Drought_Soil_Dry_P Parameter: Organism Value: A. thaliana
  misc_feature: MA Experiment 20001558 PARAMETER Experiment Name: At_Drought_Soil_Dry_P Parameter: Plant Line Value: WS
  misc_feature: MA Experiment 20001558 PARAMETER Experiment Name: At_Drought_Soil_Dry_P Parameter: Post Timepoint (hr) Value: 6
  misc_feature: MA Experiment 20001558 PARAMETER Experiment Name: At_Drought_Soil_Dry_P Parameter: Post-Treatment Value: Re-Water vs. No Drought
  misc_feature: MA Experiment 20001558 PARAMETER Experiment Name: At_Drought_Soil_Dry_P Parameter: Timepoint (day) Value: 13
  misc_feature: MA Experiment 20001558 PARAMETER Experiment Name: At_Drought_Soil_Dry_P Parameter: Treatment Value: Drought vs. No Drought
  misc_feature: MA Experiment ID: 20001560 Result: Up-regulated in Transcription
  misc_feature: MA Experiment 20001560 PARAMETER Experiment Name: At_Drought_Soil_Dry_P Parameter: Age (day) Value: 28
  misc_feature: MA Experiment 20001560 PARAMETER Experiment Name: At_Drought_Soil_Dry_P Parameter: Organism Value: A. thaliana
  misc_feature: MA Experiment 20001560 PARAMETER Experiment Name: At_Drought_Soil_Dry_P Parameter: Plant Line Value: WS
  misc_feature: MA Experiment 20001560 PARAMETER Experiment Name: At_Drought_Soil_Dry_P Parameter: Post Timepoint (hr) Value: None
  misc_feature: MA Experiment 20001560 PARAMETER Experiment Name: At_Drought_Soil_Dry_P Parameter: Post-Treatment Value: None
  misc_feature: MA Experiment 20001560 PARAMETER Experiment Name: At_Drought_Soil_Dry_P Parameter: Timepoint (day) Value: 14
  misc_feature: MA Experiment 20001560 PARAMETER Experiment Name: At_Drought_Soil_Dry_P Parameter: Treatment Value: Drought vs. No Drought
  misc_feature: MA Experiment ID: 20001757 Result: Up-regulated in Transcription
  misc_feature: MA Experiment 20001757 PARAMETER Experiment Name: At_50mM_NH4NO3_L-to-H_P Parameter: Timepoint (hr) Value: 6
  misc_feature: MA Experiment 20001757 PARAMETER Experiment Name: At_50mM_NH4NO3_L-to-H_P Parameter: Tissue Value: Leaf
  misc_feature: MA Experiment 20001757 PARAMETER Experiment Name: At_50mM_NH4NO3_L-to-H_P Parameter: Treatment Value: 50mM NH4NO3 vs 100mM Mannitol
  misc_feature: MA Experiment ID: 20001911 Result: Down-regulated in Transcription
  misc_feature: MA Experiment 20001911 PARAMETER Experiment Name: At_Drought_Reproduction_P Parameter: Age (day) Value: 40
  misc_feature: MA Experiment 20001911 PARAMETER Experiment Name: At_Drought_Reproduction_P Parameter: Organism Value: A. thaliana
  misc_feature: MA Experiment 20001911 PARAMETER Experiment Name: At_Drought_Reproduction_P Parameter: Plant Line Value: WS
  misc_feature: MA Experiment 20001911 PARAMETER Experiment Name: At_Drought_Reproduction_P Parameter: Timepoint (day) Value: 10
  misc_feature: MA Experiment 20001911 PARAMETER Experiment Name: At_Drought_Reproduction_P Parameter: Tissue Value: Flowers
  misc_feature: MA Experiment 20001911 PARAMETER Experiment Name: At_Drought_Reproduction_P Parameter: Treatment Value: Drought vs. No Drought
ctcttcttcctctaattgcttttctccgtcactgagtaccttgcctctcgagctcccaatcttaagtagaggattgagcttaaggcaagatggtaagaatcagtgttcttaacgatgctctcaagagcatgtacaatgctgagaaacgaggcaagaggcaggtcatgatcaggccttcctccaaagtgattatcaagtttctgattgtcatgcagaagcacggttacattggtgagtttgagtatgtcgatgaccacagatctggcaagatcgtcgttgaattgaacggaaggttgaacaagtgtggtgttatcagcccacgttttgatgttggtgtcaaggaaattgaaggttggactgcccgtttgctcccttctagacagtttggttacatcgtgctgactacatctgctggcattatggaccatgaagaagctagaaggaagaatgttggaggcaaggttctcggcttcttctattgaagttttattttatgcggaaacagattttcattgagttatttttaacttttgtcctccattttctctgaaactacctttctctttctttcgaattttgtgataactttgatggatagtgttctgaaatcactctttttggtttggagcccttttttagacttcggatgcactcgtaaaattattct

SEQ ID NO: 27199 - protein, 130 aa, Arabidopsis thaliana; identical to SEQ ID NO: 23618
  peptide (1)..(130): Ceres Seq. ID no. 12389192
  misc_feature (5)..(130): Pfam Name: Ribosomal protein S8 Pfam Description: Ribosomal protein S8
  misc_feature (1)..(130): Homolog of NCBI NO: 6323399 NR Description: Homology to rat S15a; Rps22bp [Saccharomyces
  misc_feature (1)..(130): Homolog of NCBI NO: 6322271 NR Description: Homology to rat S15a; Rps22ap [Saccharomyces
  misc_feature (1)..(130): Homolog of NCBI NO: 15225502 NR Description: 40S ribosomal protein S15A; protein id:
  misc_feature (1)..(130): Homolog of NCBI NO: 2130985 NR Description: r-protein BnS15a [Brassica napus]
  misc_feature (1)..(130): Homolog of NCBI NO: 28411802 NR Description: ribosomal protein S15 [Oryza sativa (japonica
  misc_feature (1)..(130): Homolog of NCBI NO: 13560779 NR Description: cytoplasmic ribosomal protein S15a [Daucus carota]
  misc_feature (1)..(130): Homolog of NCBI NO: 6683481 NR Description: wrp15a [Citrullus lanatus]
  misc_feature (1)..(130): Homolog of NCBI NO: 15231316 NR Description: cytoplasmic ribosomal protein S15a -like
  misc_feature (1)..(130): Homolog of NCBI NO: 133793 NR Description: 40S RIBOSOMAL PROTEIN S15A (PPCB8)
  misc_feature (1)..(130): Homolog of NCBI NO: 15223001 NR Description: ribosomal protein S15

SEQ ID NO: 27200 - protein, 117 aa, Arabidopsis thaliana; identical to SEQ ID NO: 23619
  peptide (1)..(117): Ceres Seq. ID no. 12389193
  misc_feature (1)..(117): Pfam Name: Ribosomal protein S8 Pfam Description: Ribosomal protein S8
  misc_feature (1)..(117): Homolog of NCBI NO: 6323399 NR Description: Homology to rat S15a; Rps22bp [Saccharomyces
  misc_feature (1)..(117): Homolog of NCBI NO: 6322271 NR Description: Homology to rat S15a; Rps22ap [Saccharomyces
  misc_feature (1)..(117): Homolog of NCBI NO: 15225502 NR Description: 40S ribosomal protein S15A; protein id:
  misc_feature (1)..(117): Homolog of NCBI NO: 2130985 NR Description: r-protein BnS15a [Brassica napus]
  misc_feature (1)..(117): Homolog of NCBI NO: 28411802 NR Description: ribosomal protein S15 [Oryza sativa (japonica
  misc_feature (1)..(117): Homolog of NCBI NO: 13560779 NR Description: cytoplasmic ribosomal protein S15a [Daucus carota]
  misc_feature (1)..(117): Homolog of NCBI NO: 6683481 NR Description: wrp15a [Citrullus lanatus]
  misc_feature (1)..(117): Homolog of NCBI NO: 15231316 NR Description: cytoplasmic ribosomal protein S15a -like
  misc_feature (1)..(117): Homolog of NCBI NO: 133793 NR Description: 40S RIBOSOMAL PROTEIN S15A (PPCB8)
  misc_feature (1)..(117): Homolog of NCBI NO: 15223001 NR Description: ribosomal protein S15

SEQ ID NO: 27201 - protein, 105 aa, Arabidopsis thaliana; identical to SEQ ID NO: 23620
  peptide (1)..(105): Ceres Seq. ID no. 12389194
  misc_feature (1)..(105): Pfam Name: Ribosomal protein S8 Pfam Description: Ribosomal protein S8
  misc_feature (1)..(105): Homolog of NCBI NO: 6323399 NR Description: Homology to rat S15a; Rps22bp [Saccharomyces
  misc_feature (1)..(105): Homolog of NCBI NO: 6322271 NR Description: Homology to rat S15a; Rps22ap [Saccharomyces
  misc_feature (1)..(105): Homolog of NCBI NO: 15225502 NR Description: 40S ribosomal protein S15A; protein id:
  misc_feature (1)..(105): Homolog of NCBI NO: 2130985 NR Description: r-protein BnS15a [Brassica napus]
  misc_feature (1)..(105): Homolog of NCBI NO: 28411802 NR Description: ribosomal protein S15 [Oryza sativa (japonica
  misc_feature (1)..(105): Homolog of NCBI NO: 13560779 NR Description: cytoplasmic ribosomal protein S15a [Daucus carota]
  misc_feature (1)..(105): Homolog of NCBI NO: 6683481 NR Description: wrp15a [Citrullus lanatus]
  misc_feature (1)..(105): Homolog of NCBI NO: 15231316 NR Description: cytoplasmic ribosomal protein S15a -like
  misc_feature (1)..(105): Homolog of NCBI NO: 133793 NR Description: 40S RIBOSOMAL PROTEIN S15A (PPCB8)
  misc_feature (1)..(105): Homolog of NCBI NO: 15223001 NR Description: ribosomal protein S15

SEQ ID NO: 27202 - DNA, 782 bp, Arabidopsis thaliana
  misc_feature (1)..(782): Ceres Seq. ID no. 12393279
  misc_feature: MA Experiment ID: 108434 Result: Down-regulated in Transcription
  misc_feature: MA Experiment 108434 PARAMETER Experiment Name: At_Root_Tips_cDNA_P Parameter: Tissue Value: Root Tips
  misc_feature: MA Experiment ID: 108561 Result: Down-regulated in Transcription
  misc_feature: MA Experiment 108561 PARAMETER Experiment Name: At_100uM_ABA_cDNA_P Parameter: Timepoint (hr) Value: 6
  misc_feature: MA Experiment 108561 PARAMETER Experiment Name: At_100uM_ABA_cDNA_P Parameter: Tissue Value: Aerial
  misc_feature: MA Experiment 108561 PARAMETER Experiment Name: At_100uM_ABA_cDNA_P Parameter: Treatment Value: 100uM ABA vs. No Treatment
  misc_feature: MA Experiment ID: 20000030 Result: Down-regulated in Transcription
  misc_feature: MA Experiment 20000030 PARAMETER Experiment Name: At_CS6630_Roots_cDNA_P Parameter: Plant Line Value: CS6630 vs. WS
  misc_feature: MA Experiment 20000030 PARAMETER Experiment Name: At_CS6630_Roots_cDNA_P Parameter: Tissue Value: Roots
  misc_feature: MA Experiment ID: 20000227 Result: Down-regulated in Transcription
  misc_feature: MA Experiment 20000227 PARAMETER Experiment Name: At_Root-Tips-vs-Tops_P Parameter: Tissue Value: Root Tips vs. Root Tops
  misc_feature: MA Experiment ID: 20000451 Result: Down-regulated in Transcription
  misc_feature: MA Experiment 20000451 PARAMETER Experiment Name: At_CS6879_Shoots-Roots_P Parameter: Age (day) Value: 14
  misc_feature: MA Experiment 20000451 PARAMETER Experiment Name: At_CS6879_Shoots-Roots_P Parameter: Organism Value: A. thaliana
  misc_feature: MA Experiment 20000451 PARAMETER Experiment Name: At_CS6879_Shoots-Roots_P Parameter: Plant Line Value: CS6879 vs. WS
  misc_feature: MA Experiment 20000451 PARAMETER Experiment Name: At_CS6879_Shoots-Roots_P Parameter: Tissue Value: Roots
  misc_feature: MA Experiment ID: 20000460 Result: Down-regulated in Transcription
  misc_feature: MA Experiment 20000460 PARAMETER Experiment Name: At_10percent_PEG_P Parameter: Age (day) Value: 12
  misc_feature: MA Experiment 20000460 PARAMETER Experiment Name: At_10percent_PEG_P Parameter: Organism Value: A. thaliana
  misc_feature: MA Experiment 20000460 PARAMETER Experiment Name: At_10percent_PEG_P Parameter: Plant Line Value: WS
  misc_feature: MA Experiment 20000460 PARAMETER Experiment Name: At_10percent_PEG_P Parameter: Timepoint (day) Value: 12
  misc_feature: MA Experiment 20000460 PARAMETER Experiment Name: At_10percent_PEG_P Parameter: Tissue Value: Whole Plant
  misc_feature: MA Experiment 20000460 PARAMETER Experiment Name: At_10percent_PEG_P Parameter: Treatment Value: 10percent PEG vs. No Treatment
  misc_feature: MA Experiment ID: 20000527 Result: Down-regulated in Transcription
  misc_feature: MA Experiment 20000527 PARAMETER Experiment Name: At_10percent_PEG_P Parameter: Age (day) Value: 20
  misc_feature: MA Experiment 20000527 PARAMETER Experiment Name: At_10percent_PEG_P Parameter: Organism Value: A. thaliana
  misc_feature: MA Experiment 20000527 PARAMETER Experiment Name: At_10percent_PEG_P Parameter: Plant Line Value: WS
  misc_feature: MA Experiment 20000527 PARAMETER Experiment Name: At_10percent_PEG_P Parameter: Timepoint (day) Value: 20
  misc_feature: MA Experiment 20000527 PARAMETER Experiment Name: At_10percent_PEG_P Parameter: Tissue Value: Whole Plant
  misc_feature: MA Experiment 20000527 PARAMETER Experiment Name: At_10percent_PEG_P Parameter: Treatment Value: 10percent PEG vs. No Treatment
  misc_feature: MA Experiment ID: 20000576 Result: Down-regulated in Transcription
  misc_feature: MA Experiment 20000576 PARAMETER Experiment Name: At_100uM_ABA_Mutants__P Parameter: Organism Value: A. thaliana
  misc_feature: MA Experiment 20000576 PARAMETER Experiment Name: At_100uM_ABA_Mutants__P Parameter: Plant Line Value: CS23
  misc_feature: MA Experiment 20000576 PARAMETER Experiment Name: At_100uM_ABA_Mutants__P Parameter: Timepoint (hr) Value: 6
  misc_feature: MA Experiment 20000576 PARAMETER Experiment Name: At_100uM_ABA_Mutants__P Parameter: Tissue Value: Whole Plant
  misc_feature: MA Experiment 20000576 PARAMETER Experiment Name: At_100uM_ABA_Mutants__P Parameter: Treatment Value: 1uM ABA vs. No Treatment
  misc_feature: MA Experiment ID: 20000606 Result: Down-regulated in Transcription
  misc_feature: MA Experiment 20000606 PARAMETER Experiment Name: At_CS8548_Mutant_P Parameter: Age (day) Value: 14
  misc_feature: MA Experiment 20000606 PARAMETER Experiment Name: At_CS8548_Mutant_P Parameter: Plant Line Value: CS8548 vs. wt
  misc_feature: MA Experiment 20000606 PARAMETER Experiment Name: At_CS8548_Mutant_P Parameter: Tissue Value: Whole Plant
  misc_feature: MA Experiment ID: 20001247 Result: Down-regulated in Transcription
  misc_feature: MA Experiment 20001247 PARAMETER Experiment Name: At_Far-red-induction_P Parameter: Age (day) Value: 7
  misc_feature: MA Experiment 20001247 PARAMETER Experiment Name: At_Far-red-induction_P Parameter: Light Value: Far-red vs. White
  misc_feature: MA Experiment 20001247 PARAMETER Experiment Name: At_Far-red-induction_P Parameter: Organism Value: A. thaliana
  misc_feature: MA Experiment 20001247 PARAMETER Experiment Name: At_Far-red-induction_P Parameter: Plant Line Value: Columbia
  misc_feature: MA Experiment 20001247 PARAMETER Experiment Name: At_Far-red-induction_P Parameter: Timepoint (hr) Value: 1
  misc_feature: MA Experiment 20001247 PARAMETER Experiment Name: At_Far-red-induction_P Parameter: Tissue Value: Whole Plant
  misc_feature: MA Experiment ID: 20001450 Result: Down-regulated in Transcription
  misc_feature: MA Experiment 20001450 PARAMETER Experiment Name: At_Far-red-induction_P Parameter: Age (day) Value: 7
  misc_feature: MA Experiment 20001450 PARAMETER Experiment Name: At_Far-red-induction_P Parameter: Light Value: Far-red vs. White
  misc_feature: MA Experiment 20001450 PARAMETER Experiment Name: At_Far-red-induction_P Parameter: Organism Value: A. thaliana
  misc_feature: MA Experiment 20001450 PARAMETER Experiment Name: At_Far-red-induction_P Parameter: Plant Line Value: Columbia
  misc_feature: MA Experiment 20001450 PARAMETER Experiment Name: At_Far-red-induction_P Parameter: Timepoint (hr) Value: 8
  misc_feature: MA Experiment 20001450 PARAMETER Experiment Name: At_Far-red-induction_P Parameter: Tissue Value: Whole Plant
atatatataacgtgttcaatcctcacttcaaaaacccacaaaaactttagaacgaaaaaagatgaaaatctttaactcatctcaaaacctattcttggccataacctttttccttgttctcatagttcatctaaaagcccaagacagtcctcaagactttttggcagttcacaaccgagcacgagccgaggttggggtgggacccttaagatgggacgagaaggtggctgcttatgcccgtaactatgctaaccagcgtaaaggtgactgcgctatgaaacactcgagcgggtcctatggagagaacatcgcttggagcagcggtagcatgacaggcgtagcagcagttgacatgtgggtggacgagcaatttgactacgattatgattccaatacatgtgcatgggacaaacagtgtggccactatactcaggttgtgtggagaaactcggagaggttgggatgtgcaaaagtgagatgcaacaatggtcaaacctttatcacttgcaactacgatcctcccggtaactgggttggcgagtggccttactaaaagaaaactccatttaaatgttttcgaatatatgttatccacatgtatatatgtattgtttccatgttgttcagttataccaatcatctatcgtcagctaataaagattggtttgtgtggtcctggtccggtccggtcttcttttgtaccacatgtataatgtatgcgtggatttttataatggaataagaaaaatgcaatgctacggcttgcacttgctttgtttgcc

SEQ ID NO: 27203 - protein, 163 aa, Arabidopsis thaliana
  peptide (1)..(163): Ceres Seq. ID no. 12393280
  misc_feature (34)..(150): Pfam Name: SCP-like extracellular protein Pfam Description: SCP-like extracellular protein
  misc_feature (3)..(163): Homolog of NCBI NO: 130826 NR Description: Pathogenesis-related protein 1A precursor (PR-1A)
  misc_feature (3)..(163): Homolog of NCBI NO: 130828 NR Description: Pathogenesis-related protein 1C precursor (PR-1C)
  misc_feature (7)..(163): Homolog of NCBI NO: 282959 NR Description: pathogenesis-related protein 1b - common tobacco
  misc_feature (9)..(163): Homolog of NCBI NO: 13560653 NR Description: pathogenesis-related protein PR-1 precursor
  misc_feature (11)..(163): Homolog of NCBI NO: 15225974 NR Description: pathogenesis-related PR-1-like protein
  misc_feature (3)..(163): Homolog of NCBI NO: 100370 NR Description: pathogenesis-related protein 1 - common tobacco
  misc_feature (3)..(163): Homolog of NCBI NO: 15239598 NR Description: pathogenesis-related protein - like; protein id:
  misc_feature (1)..(163): Homolog of NCBI NO: 15225965 NR Description: putative pathogenesis related-1 (PR1) protein
  misc_feature (1)..(163): Homolog of NCBI NO: 1228950 NR Description: pathogenesis-related protein 1 [Arabidopsis
  misc_feature (1)..(163): Homolog of NCBI NO: 15235056 NR Description: pathogenesis-related protein 1 precursor, 19.3K
MKIFNSSQNLFLAITFFLVLIVHLKAQDSPQDFLAVHNRARAEVGVGPLRWDEKVAAYARNYANQRKGDCAMKHSSGSYGENIAWSSGSMTGVAAVDMWVDEQFDYDYDSNTCAWDKQCGHYTQVVWRNSERLGCAKVRCNNGQTFITCNYDPPGNWVGEWPY

SEQ ID NO: 27204 - protein, 92 aa, Arabidopsis thaliana
  peptide (1)..(92): Ceres Seq. ID no. 12393281
  misc_feature (1)..(79): Pfam Name: SCP-like extracellular protein Pfam Description: SCP-like extracellular protein
  misc_feature (1)..(92): Homolog of NCBI NO: 130826 NR Description: Pathogenesis-related protein 1A precursor (PR-1A)
  misc_feature (1)..(92): Homolog of NCBI NO: 130828 NR Description: Pathogenesis-related protein 1C precursor (PR-1C)
  misc_feature (1)..(92): Homolog of NCBI NO: 282959 NR Description: pathogenesis-related protein 1b - common tobacco
  misc_feature (1)..(92): Homolog of NCBI NO: 13560653 NR Description: pathogenesis-related protein PR-1 precursor
  misc_feature (1)..(92): Homolog of NCBI NO: 15225974 NR Description: pathogenesis-related PR-1-like protein
  misc_feature (1)..(92): Homolog of NCBI NO: 100370 NR Description: pathogenesis-related protein 1 - common tobacco
  misc_feature (1)..(92): Homolog of NCBI NO: 15239598 NR Description: pathogenesis-related protein - like; protein id:
  misc_feature (1)..(92): Homolog of NCBI NO: 15225965 NR Description: putative pathogenesis related-1 (PR1) protein
  misc_feature (1)..(92): Homolog of NCBI NO: 1228950 NR Description: pathogenesis-related protein 1 [Arabidopsis
  misc_feature (1)..(92): Homolog of NCBI NO: 15235056 NR Description: pathogenesis-related protein 1 precursor, 19.3K
MKHSSGSYGENIAWSSGSMTGVAAVDMWVDEQFDYDYDSNTCAWDKQCGHYTQVVWRNSERLGCAKVRCNNGQTFITCNYDPPGNWVGEWPY

SEQ ID NO: 27205 - DNA, 524 bp, Arabidopsis thaliana
  misc_feature (1)..(524): Ceres Seq. ID no. 12336485
  misc_feature: MA Experiment ID: 108461 Result: Up-regulated in Transcription
  misc_feature: MA Experiment 108461 PARAMETER Experiment Name: At_Germinating_Seeds_cDNA_P Parameter: Age (day) Value: 1 vs. 0
  misc_feature: MA Experiment 108461 PARAMETER Experiment Name: At_Germinating_Seeds_cDNA_P Parameter: Tissue Value: Germinating Seeds
  misc_feature: MA Experiment ID: 108462 Result: Up-regulated in Transcription
  misc_feature: MA Experiment 108462 PARAMETER Experiment Name: At_Germinating_Seeds_cDNA_P Parameter: Age (day) Value: 2 vs. 0
  misc_feature: MA Experiment 108462 PARAMETER Experiment Name: At_Germinating_Seeds_cDNA_P Parameter: Tissue Value: Germinating Seeds
  misc_feature: MA Experiment ID: 108463 Result: Up-regulated in Transcription
  misc_feature: MA Experiment 108463 PARAMETER Experiment Name: At_Germinating_Seeds_cDNA_P Parameter: Age (day) Value: 3 vs. 0
  misc_feature: MA Experiment 108463 PARAMETER Experiment Name: At_Germinating_Seeds_cDNA_P Parameter: Tissue Value: Germinating Seeds
  misc_feature: MA Experiment ID: 108464 Result: Up-regulated in Transcription
  misc_feature: MA Experiment 108464 PARAMETER Experiment Name: At_Germinating_Seeds_cDNA_P Parameter: Age (day) Value: 4 vs. 0
  misc_feature: MA Experiment 108464 PARAMETER Experiment Name: At_Germinating_Seeds_cDNA_P Parameter: Tissue Value: Germinating Seeds
  misc_feature: MA Experiment ID: 108573 Result: Down-regulated in Transcription
  misc_feature: MA Experiment 108573 PARAMETER Experiment Name: At_Drought_cDNA_P Parameter: Timepoint (hr) Value: 6
  misc_feature: MA Experiment 108573 PARAMETER Experiment Name: At_Drought_cDNA_P Parameter: Tissue Value: Aerial
  misc_feature: MA Experiment 108573 PARAMETER Experiment Name: At_Drought_cDNA_P Parameter: Treatment Value: Drought vs. No Drought
  misc_feature: MA Experiment ID: 20000179 Result: Up-regulated in Transcription
  misc_feature: MA Experiment 20000179 PARAMETER Experiment Name: At_Germinating_Seeds_P Parameter: Age (hr) Value: 6 vs. 0
  misc_feature: MA Experiment 20000179 PARAMETER Experiment Name: At_Germinating_Seeds_P Parameter: Tissue Value: Germinating Seeds
  misc_feature: MA Experiment ID: 20000180 Result: Up-regulated in Transcription
  misc_feature: MA Experiment 20000180 PARAMETER Experiment Name: At_Germinating_Seeds_P Parameter: Age (hr) Value: 24 vs. 0
  misc_feature: MA Experiment 20000180 PARAMETER Experiment Name: At_Germinating_Seeds_P Parameter: Tissue Value: Germinating Seeds
  misc_feature: MA Experiment ID: 20000224 Result: Down-regulated in Transcription
  misc_feature: MA Experiment ID: 20000794 Result: Down-regulated in Transcription
  misc_feature: MA Experiment 20000794 PARAMETER Experiment Name: At_Petals_P Parameter: Age (day) Value: 23-25 days
  misc_feature: MA Experiment 20000794 PARAMETER Experiment Name: At_Petals_P Parameter: Plant Line Value: WS
  misc_feature: MA Experiment 20000794 PARAMETER Experiment Name: At_Petals_P Parameter: Tissue Value: Petals vs. Whole plant
  misc_feature: MA Experiment ID: 20001557 Result: Down-regulated in Transcription
  misc_feature: MA Experiment 20001557 PARAMETER Experiment Name: At_Drought_Soil_Dry_P Parameter: Age (day) Value: 27
  misc_feature: MA Experiment 20001557 PARAMETER Experiment Name: At_Drought_Soil_Dry_P Parameter: Organism Value: A. thaliana
  misc_feature: MA Experiment 20001557 PARAMETER Experiment Name: At_Drought_Soil_Dry_P Parameter: Plant Line Value: WS
  misc_feature: MA Experiment 20001557 PARAMETER Experiment Name: At_Drought_Soil_Dry_P Parameter: Post Timepoint (hr) Value: 3
  misc_feature: MA Experiment 20001557 PARAMETER Experiment Name: At_Drought_Soil_Dry_P Parameter: Post-Treatment Value: Re-Water vs. No Drought
  misc_feature: MA Experiment 20001557 PARAMETER Experiment Name: At_Drought_Soil_Dry_P Parameter: Timepoint (day) Value: 13
  misc_feature: MA Experiment 20001557 PARAMETER Experiment Name: At_Drought_Soil_Dry_P Parameter: Treatment Value: Drought vs. No Drought
  misc_feature: MA Experiment ID: 20001558 Result: Down-regulated in Transcription
  misc_feature: MA Experiment 20001558 PARAMETER Experiment Name: At_Drought_Soil_Dry_P Parameter: Age (day) Value: 27
  misc_feature: MA Experiment 20001558 PARAMETER Experiment Name: At_Drought_Soil_Dry_P Parameter: Organism Value: A. thaliana
  misc_feature: MA Experiment 20001558 PARAMETER Experiment Name: At_Drought_Soil_Dry_P Parameter: Plant Line Value: WS
  misc_feature: MA Experiment 20001558 PARAMETER Experiment Name: At_Drought_Soil_Dry_P Parameter: Post Timepoint (hr) Value: 6
  misc_feature: MA Experiment 20001558 PARAMETER Experiment Name: At_Drought_Soil_Dry_P Parameter: Post-Treatment Value: Re-Water vs. No Drought
  misc_feature: MA Experiment 20001558 PARAMETER Experiment Name: At_Drought_Soil_Dry_P Parameter: Timepoint (day) Value: 13
  misc_feature: MA Experiment 20001558 PARAMETER Experiment Name: At_Drought_Soil_Dry_P Parameter: Treatment Value: Drought vs. No Drought
  misc_feature: MA Experiment ID: 20001911 Result: Down-regulated in Transcription
  misc_feature: MA Experiment 20001911 PARAMETER Experiment Name: At_Drought_Reproduction_P Parameter: Age (day) Value: 40
  misc_feature: MA Experiment 20001911 PARAMETER Experiment Name: At_Drought_Reproduction_P Parameter: Organism Value: A. thaliana
  misc_feature: MA Experiment 20001911 PARAMETER Experiment Name: At_Drought_Reproduction_P Parameter: Plant Line Value: WS
  misc_feature: MA Experiment 20001911 PARAMETER Experiment Name: At_Drought_Reproduction_P Parameter: Timepoint (day) Value: 10
  misc_feature: MA Experiment 20001911 PARAMETER Experiment Name: At_Drought_Reproduction_P Parameter: Tissue Value: Flowers
  misc_feature: MA Experiment 20001911 PARAMETER Experiment Name: At_Drought_Reproduction_P Parameter: Treatment Value: Drought vs. No Drought
aaacgatcagattacagattcttcaattcctctttcccttctcctccatttcctgattaaggcttcacatctctgagagagaaatgggtcagatccaatactccgagaaatacttcgatgacactttcgaatacaggcacgtcgttcttcctcctgaagtcgctaaacttcttccaaagaatcgtcttctctccgaaaacgaatggcgagcgataggagtgcagcaaagccgcggatgggtacattacgcggttcatcgacctgagccgcacataatgctattcaggaggcctcttaactatcagcagcagcaggagaatcaagctcagaacatgcttgttaagtgaatcattatcatcacctgagtaagaatgttatatgcaacaattctatgagtattggtttatgtttcttgtaaacatggtttgaatctttgtggttatggatgaatatgtgagagttggtttgttgaacaacttctatgtaatgttagtcttggttctaatgtcatcttctgcttctta

SEQ ID NO: 27206 - protein, 87 aa, Arabidopsis thaliana
  peptide (1)..(87): Ceres Seq. ID no. 12336486
  misc_feature (1)..(72): Pfam Name: Cyclin-dependent kinase regulatory subunit Pfam Description: Cyclin-dependent kinase regulatory subunit
  misc_feature (3)..(71): Homolog of NCBI NO: 4502857 NR Description: CDC28 protein kinase 1B
  misc_feature (3)..(77): Homolog of NCBI NO: 4502859 NR Description: CDC28 protein kinase 2
  misc_feature (3)..(69): Homolog of NCBI NO: 21355377 NR Description: CG9790-PA [Drosophila melanogaster]
  misc_feature (3)..(77): Homolog of NCBI NO: 13384804 NR Description: RIKEN cDNA 1110038L14 [Mus musculus]
  misc_feature (4)..(69): Homolog of NCBI NO: 2493727 NR Description: PROBABLE CYCLIN-DEPENDENT KINASES REGULATORY
  misc_feature (1)..(78): Homolog of NCBI NO: 27435806 NR Description: CKS1 protein [Populus tremula x Populus
  misc_feature (1)..(82): Homolog of NCBI NO: 15226297 NR Description: CDK-subunit 2; protein id: At2g27970.1
  misc_feature (1)..(81): Homolog of NCBI NO: 40641585 NR Description: putative cyclin-dependent kinase regulatory
  misc_feature (1)..(81): Homolog of NCBI NO: 15451612 NR Description: Putative cyclin-dependent kinase regulatory
  misc_feature (1)..(87): Homolog of NCBI NO: 15226294 NR Description: CDK-subunit 1; protein id: At2g27960.1, supported
MGQIQYSEKYFDDTFEYRHVVLPPEVAKLLPKNRLLSENEWRAIGVQQSRGWVHYAVHRPEPHIMLFRRPLNYQQQQENQAQNMLVK

SEQ ID NO: 27207 - DNA, 803 bp, Arabidopsis thaliana
  misc_feature (1)..(803): Ceres Seq. ID no. 13489702
  misc_feature: MA Experiment ID: 108434 Result: Up-regulated in Transcription
  misc_feature: MA Experiment 108434 PARAMETER Experiment Name: At_Root_Tips_cDNA_P Parameter: Tissue Value: Root Tips
  misc_feature: MA Experiment ID: 108461 Result: Up-regulated in Transcription
  misc_feature: MA Experiment 108461 PARAMETER Experiment Name: At_Germinating_Seeds_cDNA_P Parameter: Age (day) Value: 1 vs. 0
  misc_feature: MA Experiment 108461 PARAMETER Experiment Name: At_Germinating_Seeds_cDNA_P Parameter: Tissue Value: Germinating Seeds
  misc_feature: MA Experiment ID: 108462 Result: Up-regulated in Transcription
  misc_feature: MA Experiment 108462 PARAMETER Experiment Name: At_Germinating_Seeds_cDNA_P Parameter: Age (day) Value: 2 vs. 0
  misc_feature: MA Experiment 108462 PARAMETER Experiment Name: At_Germinating_Seeds_cDNA_P Parameter: Tissue Value: Germinating Seeds
  misc_feature: MA Experiment ID: 108488 Result: Down-regulated in Transcription
  misc_feature: MA Experiment ID: 108577 Result: Down-regulated in Transcription
  misc_feature: MA Experiment 108577 PARAMETER Experiment Name: At_42deg_Heat_cDNA_P Parameter: Temperature (deg C) Value: 42 vs. 22
  misc_feature: MA Experiment 108577 PARAMETER Experiment Name: At_42deg_Heat_cDNA_P Parameter: Timepoint (hr) Value: 6
  misc_feature: MA Experiment 108577 PARAMETER Experiment Name: At_42deg_Heat_cDNA_P Parameter: Tissue Value: Aerial
  misc_feature: MA Experiment ID: 20000224 Result: Up-regulated in Transcription
  misc_feature: MA Experiment ID: 20001904 Result: Up-regulated in Transcription
  misc_feature: MA Experiment 20001904 PARAMETER Experiment Name: At_Drought_Reproduction_P Parameter: Age (day) Value: 37
  misc_feature: MA Experiment 20001904 PARAMETER Experiment Name: At_Drought_Reproduction_P Parameter: Organism Value: A. thaliana
  misc_feature: MA Experiment 20001904 PARAMETER Experiment Name: At_Drought_Reproduction_P Parameter: Plant Line Value: WS
  misc_feature: MA Experiment 20001904 PARAMETER Experiment Name: At_Drought_Reproduction_P Parameter: Timepoint (day) Value: 7
  misc_feature: MA Experiment 20001904 PARAMETER Experiment Name: At_Drought_Reproduction_P Parameter: Tissue Value: Rosettes
  misc_feature: MA Experiment 20001904 PARAMETER Experiment Name: At_Drought_Reproduction_P Parameter: Treatment Value: Drought vs. No Drought
  misc_feature: MA Experiment ID: 20001905 Result: Up-regulated in Transcription
  misc_feature: MA Experiment 20001905 PARAMETER Experiment Name: At_Drought_Reproduction_P Parameter: Age (day) Value: 40
  misc_feature: MA Experiment 20001905 PARAMETER Experiment Name: At_Drought_Reproduction_P Parameter: Organism Value: A. thaliana
  misc_feature: MA Experiment 20001905 PARAMETER Experiment Name: At_Drought_Reproduction_P Parameter: Plant Line Value: WS
  misc_feature: MA Experiment 20001905 PARAMETER Experiment Name: At_Drought_Reproduction_P Parameter: Timepoint (day) Value: 10
  misc_feature: MA Experiment 20001905 PARAMETER Experiment Name: At_Drought_Reproduction_P Parameter: Tissue Value: Rosettes
  misc_feature: MA Experiment 20001905 PARAMETER Experiment Name: At_Drought_Reproduction_P Parameter: Treatment Value: Drought vs. No Drought
gcaaatcgtaaaccgccacaaaaccgaaaaaaacactaattgtgctttccctttagatccatttgtattttcttttggagcttttgaacaatggagtcatcacaagcaacgacgaagccaacgagaggagcaggaggaaggaaaggtggagataggaagaagagtgttagtaaatctgttaaagctggtcttcaatttcccgttggtcgtatcgctcgttacttgaagaaaggtcgttacgctctccgatacggttccggtgctccggtttacctcgccgccgttctcgaatacctagccgccgaggtacttgagctagctgggaacgcagcgagagataataagaagaacaggataaaccctaggcatctatgtttagcgataaggaacgatgaagaattggggagattgcttcatggagttactattgcaagtggtggtgttcttccaaacattaatccagttcttcttcctaagaaatcaacagcttcttcttctcaagctgagaaagcttctgctaccaaatctcctaagaaggcttgataaagaatagtatcgatgttgctttttggttatattcggatcttagatgaagaagaagaagaagaagaaacaacttttttttttttttttttagtttttagaggatttgtgtaggtatctgaaatcttcttctctttgttttggtttgtcttatgtaaaaaccatgggaagatgattatgtttcttacgcaatttgtaatggaaaataagtaatttctgggattagtaacatcatcatctgtctaattaatttctgggtc

SEQ ID NO: 27208 - protein, 150 aa, Arabidopsis thaliana
  peptide (1)..(150): Ceres Seq. ID no. 13489703
  misc_feature (6)..(130): Pfam Name: Core histone H2A/H2B/H3/H4 Pfam Description: Core histone H2A/H2B/H3/H4
  misc_feature (9)..(150): Homolog of NCBI NO: 729671 NR Description: Histone H2A
  misc_feature (9)..(150): Homolog of NCBI NO: 7649159 NR Description: histone H2A [Euphorbia esula]
  misc_feature (9)..(150): Homolog of NCBI NO: 34914498 NR Description: putative histone H2A [Oryza sativa (japonica
  misc_feature (9)..(150): Homolog of NCBI NO: 122007 NR Description: Histone H2A
  misc_feature (6)..(150): Homolog of NCBI NO: 729669 NR Description: Histone H2A
  misc_feature (6)..(150): Homolog of NCBI NO: 122006 NR Description: HISTONE H2A
  misc_feature (8)..(150): Homolog of NCBI NO: 122003 NR Description: HISTONE H2A
  misc_feature (5)..(150): Homolog of NCBI NO: 27529852 NR Description: H2A histone [Nicotiana tabacum]
  misc_feature (1)..(150): Homolog of NCBI NO: 5777792 NR Description: histone H2A [Brassica napus]
  misc_feature (1)..(150): Homolog of NCBI NO: 15241016 NR Description: histone H2A, putative [Arabidopsis thaliana]
MESSQATTKPTRGAGGRKGGDRKKSVSKSVKAGLQFPVGRIARYLKKGRYALRYGSGAPVYLAAVLEYLAAEVLELAGNAARDNKKNRINPRHLCLAIRNDEELGRLLHGVTIASGGVLPNINPVLLPKKSTASSSQAEKASATKSPKKA

SEQ ID NO: 27209 - DNA, 613 bp, Arabidopsis thaliana
  misc_feature (1)..(613): Ceres Seq. ID no. 13593322
  misc_feature: MA Experiment ID: 108434 Result: Up-regulated in Transcription
  misc_feature: MA Experiment 108434 PARAMETER Experiment Name: At_Root_Tips_cDNA_P Parameter: Tissue Value: Root Tips
  misc_feature: MA Experiment ID: 108573 Result: Down-regulated in Transcription
  misc_feature: MA Experiment 108573 PARAMETER Experiment Name: At_Drought_cDNA_P Parameter: Timepoint (hr) Value: 6
  misc_feature: MA Experiment 108573 PARAMETER Experiment Name: At_Drought_cDNA_P Parameter: Tissue Value: Aerial
  misc_feature: MA Experiment 108573 PARAMETER Experiment Name: At_Drought_cDNA_P Parameter: Treatment Value: Drought vs. No Drought
  misc_feature: MA Experiment ID: 108577 Result: Down-regulated in Transcription
  misc_feature: MA Experiment 108577 PARAMETER Experiment Name: At_42deg_Heat_cDNA_P Parameter: Temperature (deg C) Value: 42 vs. 22
  misc_feature: MA Experiment 108577 PARAMETER Experiment Name: At_42deg_Heat_cDNA_P Parameter: Timepoint (hr) Value: 6
  misc_feature: MA Experiment 108577 PARAMETER Experiment Name: At_42deg_Heat_cDNA_P Parameter: Tissue Value: Aerial
  misc_feature: MA Experiment ID: 20000111 Result: Down-regulated in Transcription
  misc_feature: MA Experiment 20000111 PARAMETER Experiment Name: At_42deg_Heat_cDNA_P Parameter: Temperature (deg C) Value: 42 vs. 22
  misc_feature: MA Experiment 20000111 PARAMETER Experiment Name: At_42deg_Heat_cDNA_P Parameter: Timepoint (hr) Value: 6
  misc_feature: MA Experiment 20000111 PARAMETER Experiment Name: At_42deg_Heat_cDNA_P Parameter: Tissue Value: Aerial
  misc_feature: MA Experiment ID: 20000112 Result: Down-regulated in Transcription
  misc_feature: MA Experiment 20000112 PARAMETER Experiment Name: At_42deg_Heat_cDNA_P Parameter: Temperature (deg C) Value: 42 vs. 22
  misc_feature: MA Experiment 20000112 PARAMETER Experiment Name: At_42deg_Heat_cDNA_P Parameter: Timepoint (hr) Value: 2
  misc_feature: MA Experiment 20000112 PARAMETER Experiment Name: At_42deg_Heat_cDNA_P Parameter: Tissue Value: Aerial
  misc_feature: MA Experiment ID: 20000113 Result: Down-regulated in Transcription
  misc_feature: MA Experiment 20000113 PARAMETER Experiment Name: At_42deg_Heat_cDNA_P Parameter: Temperature (deg C) Value: 42 vs. 22
  misc_feature: MA Experiment 20000113 PARAMETER Experiment Name: At_42deg_Heat_cDNA_P Parameter: Timepoint (hr) Value: 8
  misc_feature: MA Experiment 20000113 PARAMETER Experiment Name: At_42deg_Heat_cDNA_P Parameter: Tissue Value: Aerial
  misc_feature: MA Experiment ID: 20000173 Result: Down-regulated in Transcription
  misc_feature: MA Experiment 20000173 PARAMETER Experiment Name: At_42deg_Heat_P Parameter: Age (day) Value: 14
  misc_feature: MA Experiment 20000173 PARAMETER Experiment Name: At_42deg_Heat_P Parameter: Organism Value: A. thaliana
  misc_feature: MA Experiment 20000173 PARAMETER Experiment Name: At_42deg_Heat_P Parameter: Plant Line Value: WS
  misc_feature: MA Experiment 20000173 PARAMETER Experiment Name: At_42deg_Heat_P Parameter: Temperature (deg C) Value: 42 vs. 22
  misc_feature: MA Experiment 20000173 PARAMETER Experiment Name: At_42deg_Heat_P Parameter: Timepoint (hr) Value: 6
  misc_feature: MA Experiment 20000173 PARAMETER Experiment Name: At_42deg_Heat_P Parameter: Tissue Value: Aerial
  misc_feature: MA Experiment ID: 20000234 Result: Up-regulated in Transcription
  misc_feature: MA Experiment 20000234 PARAMETER Experiment Name: At_Siliques_P Parameter: Age (day) Value: 21
  misc_feature: MA Experiment 20000234 PARAMETER Experiment Name: At_Siliques_P Parameter: Organism Value: A. thaliana
  misc_feature: MA Experiment 20000234 PARAMETER Experiment Name: At_Siliques_P Parameter: Plant Line Value: WS
  misc_feature: MA Experiment 20000234 PARAMETER Experiment Name: At_Siliques_P Parameter: Tissue Value: Less Than 5mm Siliques vs. Whole Plant
  misc_feature: MA Experiment ID: 20000265 Result: Up-regulated in Transcription
  misc_feature: MA Experiment 20000265 PARAMETER Experiment Name: At_Open_Flower_P Parameter: Age (day) Value: 21
  misc_feature: MA Experiment 20000265 PARAMETER Experiment Name: At_Open_Flower_P Parameter: Plant Line Value: WS
  misc_feature: MA Experiment 20000265 PARAMETER Experiment Name: At_Open_Flower_P Parameter: Tissue Value: Closed Flower vs. Whole Plant
  misc_feature: MA Experiment ID: 20000495 Result: Up-regulated in Transcription
  misc_feature: MA Experiment 20000495 PARAMETER Experiment Name: At_Guard_Cells_P Parameter: Harvest Date Value: 8/2/2002
  misc_feature: MA Experiment 20000495 PARAMETER Experiment Name: At_Guard_Cells_P Parameter: Organism Value: A. thaliana
  misc_feature: MA Experiment 20000495 PARAMETER Experiment Name: At_Guard_Cells_P Parameter: Tissue Value: Guard Cells vs. Leaves
  misc_feature: MA Experiment ID: 20001911 Result: Down-regulated in Transcription
  misc_feature: MA Experiment 20001911 PARAMETER Experiment Name: At_Drought_Reproduction_P Parameter: Age (day) Value: 40
  misc_feature: MA Experiment 20001911 PARAMETER Experiment Name: At_Drought_Reproduction_P Parameter: Organism Value: A. thaliana
  misc_feature: MA Experiment 20001911 PARAMETER Experiment Name: At_Drought_Reproduction_P Parameter: Plant Line Value: WS
  misc_feature: MA Experiment 20001911 PARAMETER Experiment Name: At_Drought_Reproduction_P Parameter: Timepoint (day) Value: 10
  misc_feature: MA Experiment 20001911 PARAMETER Experiment Name: At_Drought_Reproduction_P Parameter: Tissue Value: Flowers
  misc_feature: MA Experiment 20001911 PARAMETER Experiment Name: At_Drought_Reproduction_P Parameter: Treatment Value: Drought vs. No Drought
ataatcagtgacttagagatcgaagacgatgatgagctctgcatccgccatgaaagctgttggatttttgcttctgcttaccattctaacattagcttatgcgaagaagtcaggtgatgtgacagagttgcagattggtgttaagtacaagcctcagaaatgtgatctccaggctcacaaaggggataagatcaaggttcactatcggggaaagttaactgatggaactgtctttgattcaagttttgagagaggtgaccctattgagtttgagcttggaactggtcaagtcatcccagaatgggaccagggtttattgggagcttgtgtaggtgagaagagaaagttgaaaatcccatccaagcttggttatggtgataacggctcaccaccaaaaatcccgggtggggcgacactgatattcgacaccgagcttgttgctgtgaacggagaaccatccagcgaagcgaaatcaaagaatgagctttgattacaccataattgtttttcatttaaaaggaaaccttgagtagtcatcgatgttggcatttgaatcttaaacagcctagaatcatttactttgctagttgaagacaataattatattttggtc

SEQ ID NO: 27210 - protein, 153 aa, Arabidopsis thaliana
  peptide (1)..(153): Ceres Seq. ID no. 13593323
  misc_feature (43)..(137): Pfam Name: FKBP-type peptidyl-prolyl cis-trans isomerase Pfam Description: FKBP-type peptidyl-prolyl cis-trans isomerase
  misc_feature (8)..(139): Homolog of NCBI NO: 6679805 NR Description: FK506 binding protein 2; FK506 binding protein 2
  misc_feature (17)..(139): Homolog of NCBI NO: 27694894 NR Description: Similar to FK506 binding protein 2 (13 kDa)
  misc_feature (8)..(153): Homolog of NCBI NO: 23396588 NR Description: FK506-binding protein 2 precursor
  misc_feature (12)..(153): Homolog of NCBI NO: 34906954 NR Description: rapamycin-binding protein-like
  misc_feature (2)..(144): Homolog of NCBI NO: 2129623 NR Description: probable peptidylprolyl isomerase (EC 5.2.1.8)
  misc_feature (2)..(144): Homolog of NCBI NO: 15239019 NR Description: immunophilin / FKBP-type peptidyl-prolyl
  misc_feature (8)..(147): Homolog of NCBI NO: 38174807 NR Description: putative immunophilin [Hordeum vulgare subsp.
  misc_feature (8)..(153): Homolog of NCBI NO: 21593622 NR Description: immunophilin (FKBP15-1) [Arabidopsis thaliana]
  misc_feature (8)..(153): Homolog of NCBI NO: 2129622 NR Description: probable peptidylprolyl isomerase (EC 5.2.1.8)
  misc_feature (1)..(153): Homolog of NCBI NO: 18404471 NR Description: immunophilin / FKBP-type peptidyl-prolyl
MMSSASAMKAVGFLLLLTILTLAYAKKSGDVTELQIGVKYKPQKCDLQAHKGDKIKVHYRGKLTDGTVFDSSFERGDPIEFELGTGQVIPEWDQGLLGACVGEKRKLKIPSKLGYGDNGSPPKIPGGATLIFDTELVAVNGEPSSEAKSKNEL

SEQ ID NO: 27211 - protein, 152 aa, Arabidopsis thaliana
  peptide (1)..(152): Ceres Seq. ID no. 13593324
  misc_feature (42)..(136): Pfam Name: FKBP-type peptidyl-prolyl cis-trans isomerase Pfam Description: FKBP-type peptidyl-prolyl cis-trans isomerase
  misc_feature (7)..(138): Homolog of NCBI NO: 6679805 NR Description: FK506 binding protein 2; FK506 binding protein 2
  misc_feature (16)..(138): Homolog of NCBI NO: 27694894 NR Description: Similar to FK506 binding protein 2 (13 kDa)
  misc_feature (7)..(152): Homolog of NCBI NO: 23396588 NR Description: FK506-binding protein 2 precursor
  misc_feature (11)..(152): Homolog of NCBI NO: 34906954 NR Description: rapamycin-binding protein-like
  misc_feature (1)..(143): Homolog of NCBI NO: 2129623 NR Description: probable peptidylprolyl isomerase (EC 5.2.1.8)
  misc_feature (1)..(143): Homolog of NCBI NO: 15239019 NR Description: immunophilin / FKBP-type peptidyl-prolyl
  misc_feature (7)..(146): Homolog of NCBI NO: 38174807 NR Description: putative immunophilin [Hordeum vulgare subsp.
  misc_feature (7)..(152): Homolog of NCBI NO: 21593622 NR Description: immunophilin (FKBP15-1) [Arabidopsis thaliana]
  misc_feature (7)..(152): Homolog of NCBI NO: 2129622 NR Description: probable peptidylprolyl isomerase (EC 5.2.1.8)
  misc_feature (1)..(152): Homolog of NCBI NO: 18404471 NR Description: immunophilin / FKBP-type peptidyl-prolyl
MSSASAMKAVGFLLLLTILTLAYAKKSGDVTELQIGVKYKPQKCDLQAHKGDKIKVHYRGKLTDGTVFDSSFERGDPIEFELGTGQVIPEWDQGLLGACVGEKRKLKIPSKLGYGDNGSPPKIPGGATLIFDTELVAVNGEPSSEAKSKNEL

SEQ ID NO: 27212 - protein, 146 aa, Arabidopsis thaliana
  peptide (1)..(146): Ceres Seq. ID no. 13593325
  misc_feature (36)..(130): Pfam Name: FKBP-type peptidyl-prolyl cis-trans isomerase Pfam Description: FKBP-type peptidyl-prolyl cis-trans isomerase
  misc_feature (1)..(132): Homolog of NCBI NO: 6679805 NR Description: FK506 binding protein 2; FK506 binding protein 2
  misc_feature (10)..(132): Homolog of NCBI NO: 27694894 NR Description: Similar to FK506 binding protein 2 (13 kDa)
  misc_feature (1)..(146): Homolog of NCBI NO: 23396588 NR Description: FK506-binding protein 2 precursor
  misc_feature (5)..(146): Homolog of NCBI NO: 34906954 NR Description: rapamycin-binding protein-like
  misc_feature (1)..(137): Homolog of NCBI NO: 2129623 NR Description: probable peptidylprolyl isomerase (EC 5.2.1.8)
  misc_feature (1)..(137): Homolog of NCBI NO: 15239019 NR Description: immunophilin / FKBP-type peptidyl-prolyl
  misc_feature (1)..(140): Homolog of NCBI NO: 38174807 NR Description: putative immunophilin [Hordeum vulgare subsp.
  misc_feature (1)..(146): Homolog of NCBI NO: 21593622 NR Description: immunophilin (FKBP15-1) [Arabidopsis thaliana]
  misc_feature (1)..(146): Homolog of NCBI NO: 2129622 NR Description: probable peptidylprolyl isomerase (EC 5.2.1.8)
  misc_feature (1)..(146): Homolog of NCBI NO: 18404471 NR Description: immunophilin / FKBP-type peptidyl-prolyl
MKAVGFLLLLTILTLAYAKKSGDVTELQIGVKYKPQKCDLQAHKGDKIKVHYRGKLTDGTVFDSSFERGDPIEFELGTGQVIPEWDQGLLGACVGEKRKLKIPSKLGYGDNGSPPKIPGGATLIFDTELVAVNGEPSSEAKSKNEL

SEQ ID NO: 27213 - DNA, 619 bp, Arabidopsis thaliana
  misc_feature (1)..(619): Ceres Seq. ID no. 12331610
  misc_feature: MA Experiment ID: 108462 Result: Down-regulated in Transcription
  misc_feature: MA Experiment 108462 PARAMETER Experiment Name: At_Germinating_Seeds_cDNA_P Parameter: Age (day) Value: 2 vs. 0
  misc_feature: MA Experiment 108462 PARAMETER Experiment Name: At_Germinating_Seeds_cDNA_P Parameter: Tissue Value: Germinating Seeds
  misc_feature: MA Experiment ID: 108463 Result: Down-regulated in Transcription
  misc_feature: MA Experiment 108463 PARAMETER Experiment Name: At_Germinating_Seeds_cDNA_P Parameter: Age (day) Value: 3 vs. 0
  misc_feature: MA Experiment 108463 PARAMETER Experiment Name: At_Germinating_Seeds_cDNA_P Parameter: Tissue Value: Germinating Seeds
  misc_feature: MA Experiment ID: 108573 Result: Up-regulated in Transcription
  misc_feature: MA Experiment 108573 PARAMETER Experiment Name: At_Drought_cDNA_P Parameter: Timepoint (hr) Value: 6
  misc_feature: MA Experiment 108573 PARAMETER Experiment Name: At_Drought_cDNA_P Parameter: Tissue Value: Aerial
  misc_feature: MA Experiment 108573 PARAMETER Experiment Name: At_Drought_cDNA_P Parameter: Treatment Value: Drought vs. No Drought
  misc_feature: MA Experiment ID: 108585 Result: Up-regulated in Transcription
  misc_feature: MA Experiment 108585 PARAMETER Experiment Name: At_5mM_NaNP_cDNA_P Parameter: Timepoint (hr) Value: 6
  misc_feature: MA Experiment 108585 PARAMETER Experiment Name: At_5mM_NaNP_cDNA_P Parameter: Tissue Value: Aerial
  misc_feature: MA Experiment 108585 PARAMETER Experiment Name: At_5mM_NaNP_cDNA_P Parameter: Treatment Value: null
  misc_feature: MA Experiment ID: 108595 Result: Down-regulated in Transcription
  misc_feature: MA Experiment 108595 PARAMETER Experiment Name: At_Ler-pi_Ovule_cDNA_P Parameter: Plant Line Value: null
  misc_feature: MA Experiment ID: 20001451 Result: Up-regulated in Transcription
  misc_feature: MA Experiment 20001451 PARAMETER Experiment Name: At_Far-red-induction_P Parameter: Age (day) Value: 7
  misc_feature: MA Experiment 20001451 PARAMETER Experiment Name: At_Far-red-induction_P Parameter: Light Value: Far-red vs. White
  misc_feature: MA Experiment 20001451 PARAMETER Experiment Name: At_Far-red-induction_P Parameter: Organism Value: A. thaliana
  misc_feature: MA Experiment 20001451 PARAMETER Experiment Name: At_Far-red-induction_P Parameter: Plant Line Value: Columbia
  misc_feature: MA Experiment 20001451 PARAMETER Experiment Name: At_Far-red-induction_P Parameter: Timepoint (hr) Value: 24
  misc_feature: MA Experiment 20001451 PARAMETER Experiment Name: At_Far-red-induction_P Parameter: Tissue Value: Whole Plant
aatcctctcaatcctctgctgctcaatctctcatcatcggcatcgctctctctaaaaatgtctcagatggatcccgacgctgtatctaaggccttcgtcgaacattactattccaccttcgacaccaaccgtgtcggtctcgctggtctctatcaggaagcttctatgctcaccttcgaaggtcaaaagatccaaggagtccagagcatcgtcgctaagctcacctctcttcctttccagcagtgcaagcatcacatctccaccgttgattgtcagccttctggtcctgcttccggtatgctcgttttcgtttccggtaatctccagctcgccggagaaaaacacgctctcaagttcagccagatgtttcatttgatgccgacgccacaaggaagcttttacgtgttcaacgatatattcagttggagattgcttcaagttttcaataatttatttacttgataagcattgcaagtgtcaagcacaaaagttgcagattcccacaaaccaaataagaaagatcaattttgatgtagaattttgcttctttttcagaagaaaagtctcagcttcactgattcgaccgttgattcaatttctatggcagttcataattttc

SEQ ID NO: 27214 - protein, 153 aa, Arabidopsis thaliana
  peptide (1)..(153): Ceres Seq. ID no. 12331611
  misc_feature (28)..(140): Pfam Name: Nuclear transport factor 2 (NTF2) domain Pfam Description: Nuclear transport factor 2 (NTF2) domain
  misc_feature (23)..(140): Homolog of NCBI NO: 15214179 NR Description: Nuclear transport factor 2 (NTF-2)
  misc_feature (23)..(140): Homolog of NCBI NO: 15223491 NR Description: putative nuclear transport factor
  misc_feature (23)..(140): Homolog of NCBI NO: 15214172 NR Description: Nuclear transport factor 2 (NTF-2)
  misc_feature (24)..(140): Homolog of NCBI NO: 19114665 NR Description: nuclear transport factor, NTF2 homolog
  misc_feature (26)..(140): Homolog of NCBI NO: 25402667 NR Description: protein T23J18.22 [imported] - Arabidopsis
  misc_feature (26)..(140): Homolog of NCBI NO: 34908774 NR Description: putative Nuclear transport factor 2
  misc_feature (24)..(140): Homolog of NCBI NO: 14700035 NR Description: nuclear transport factor 2 [Aspergillus nidulans]
  misc_feature (24)..(140): Homolog of NCBI NO: 21748151 NR Description: putative nuclear transport factor 2 [Cladosporium
  misc_feature (23)..(140): Homolog of NCBI NO: 21555203 NR Description: nuclear transport factor 2, putative [Arabidopsis
  misc_feature (20)..(140): Homolog of NCBI NO: 15217779 NR Description: nuclear transport factor 2, putative
NPLNPLLLNLSSSASLSLKMSQMDPDAVSKAFVEHYYSTFDTNRVGLAGLYQEASMLTFEGQKIQGVQSIVAKLTSLPFQQCKHHISTVDCQPSGPASGMLVFVSGNLQLAGEKHALKFSQMFHLMPTPQGSFYVFNDIFSWRLLQVFNNLFT

SEQ ID NO: 27215 - protein, 134 aa, Arabidopsis thaliana
  peptide (1)..(134): Ceres Seq. ID no. 12331612
  misc_feature (9)..(121): Pfam Name: Nuclear transport factor 2 (NTF2) domain Pfam Description: Nuclear transport factor 2 (NTF2) domain
  misc_feature (4)..(121): Homolog of NCBI NO: 15214172 NR Description: Nuclear transport factor 2 (NTF-2)
  misc_feature (5)..(121): Homolog of NCBI NO: 21748151 NR Description: putative nuclear transport factor 2 [Cladosporium
  misc_feature (5)..(121): Homolog of NCBI NO: 19114665 NR Description: nuclear transport factor, NTF2 homolog
  misc_feature (5)..(121): Homolog of NCBI NO: 14700035 NR Description: nuclear transport factor 2 [Aspergillus nidulans]
  misc_feature (7)..(121): Homolog of NCBI NO: 25402667 NR Description: protein T23J18.22 [imported] - Arabidopsis
  misc_feature (7)..(121): Homolog of NCBI NO: 34908774 NR Description: putative Nuclear transport factor 2
  misc_feature (4)..(121): Homolog of NCBI NO: 15214179 NR Description: Nuclear transport factor 2 (NTF-2)
  misc_feature (4)..(121): Homolog of NCBI NO: 15223491 NR Description: putative nuclear transport factor
  misc_feature (4)..(121): Homolog of NCBI NO: 21555203 NR Description: nuclear transport factor 2, putative [Arabidopsis
  misc_feature (1)..(121): Homolog of NCBI NO: 15217779 NR Description: nuclear transport factor 2, putative
MSQMDPDAVSKAFVEHYYSTFDTNRVGLAGLYQEASMLTFEGQKIQGVQSIVAKLTSLPFQQCKHHISTVDCQPSGPASGMLVFVSGNLQLAGEKHALKFSQMFHLMPTPQGSFYVFNDIFSWRLLQVFNNLFT

SEQ ID NO: 27216 - protein, 131 aa, Arabidopsis thaliana
  peptide (1)..(131): Ceres Seq. ID no. 12331613
  misc_feature (6)..(118): Pfam Name: Nuclear transport factor 2 (NTF2) domain Pfam Description: Nuclear transport factor 2 (NTF2) domain
  misc_feature (1)..(118): Homolog of NCBI NO: 15214172 NR Description: Nuclear transport factor 2 (NTF-2)
  misc_feature (2)..(118): Homolog of NCBI NO: 21748151 NR Description: putative nuclear transport factor 2 [Cladosporium
  misc_feature (2)..(118): Homolog of NCBI NO: 19114665 NR Description: nuclear transport factor, NTF2 homolog
  misc_feature (2)..(118): Homolog of NCBI NO: 14700035 NR Description: nuclear transport factor 2 [Aspergillus nidulans]
  misc_feature (4)..(118): Homolog of NCBI NO: 25402667 NR Description: protein T23J18.22 [imported] - Arabidopsis
  misc_feature (4)..(118): Homolog of NCBI NO: 34908774 NR Description: putative Nuclear transport factor 2
  misc_feature (1)..(118): Homolog of NCBI NO: 15214179 NR Description: Nuclear transport factor 2 (NTF-2)
  misc_feature (1)..(118): Homolog of NCBI NO: 15223491 NR Description: putative nuclear transport factor
  misc_feature (1)..(118): Homolog of NCBI NO: 21555203 NR Description: nuclear transport factor 2, putative [Arabidopsis
  misc_feature (1)..(118): Homolog of NCBI NO: 15217779 NR Description: nuclear transport factor 2, putative
MDPDAVSKAFVEHYYSTFDTNRVGLAGLYQEASMLTFEGQKIQGVQSIVAKLTSLPFQQCKHHISTVDCQPSGPASGMLVFVSGNLQLAGEKHALKFSQMFHLMPTPQGSFYVFNDIFSWRLLQVFNNLFT

SEQ ID NO: 27217 - DNA, 658 bp, Arabidopsis thaliana
  misc_feature (1)..(658): Ceres Seq. ID no. 13487329
  misc_feature: MA Experiment ID: 108434 Result: Up-regulated in Transcription
  misc_feature: MA Experiment 108434 PARAMETER Experiment Name: At_Root_Tips_cDNA_P Parameter: Tissue Value: Root Tips
  misc_feature: MA Experiment ID: 108462 Result: Down-regulated in Transcription
  misc_feature: MA Experiment 108462 PARAMETER Experiment Name: At_Germinating_Seeds_cDNA_P Parameter: Age (day) Value: 2 vs. 0
  misc_feature: MA Experiment 108462 PARAMETER Experiment Name: At_Germinating_Seeds_cDNA_P Parameter: Tissue Value: Germinating Seeds
  misc_feature: MA Experiment ID: 108463 Result: Down-regulated in Transcription
  misc_feature: MA Experiment 108463 PARAMETER Experiment Name: At_Germinating_Seeds_cDNA_P Parameter: Age (day) Value: 3 vs. 0
  misc_feature: MA Experiment 108463 PARAMETER Experiment Name: At_Germinating_Seeds_cDNA_P Parameter: Tissue Value: Germinating Seeds
  misc_feature: MA Experiment ID: 108464 Result: Down-regulated in Transcription
  misc_feature: MA Experiment 108464 PARAMETER Experiment Name: At_Germinating_Seeds_cDNA_P Parameter: Age (day) Value: 4 vs. 0
  misc_feature: MA Experiment 108464 PARAMETER Experiment Name: At_Germinating_Seeds_cDNA_P Parameter: Tissue Value: Germinating Seeds
aggaatcggacaaaaaccaagtgaaaccagaaaccctcagactgaaattggtattggccggtggaggatgggagcagagacaaacggagttgcagagaaagtcgacgacttgctggaggctgctagatacaatgatattgatgatctcagaaccttggcctctgatggtctctctcttcactctcgtgattcacaaggccgaacagccctgcatatggccgcagcgaatggacatatgactatagtggagtatcttatcagtgaaggagtggatatcaacgctcttaacgatgagaacaatgctcctctacattgggcatgcttgaatggccatgtcgaggtggtaaagagattgatcttggctggagcaagtctaagtcttttgaatcggtacgagagaactccaatggatgaagctattggtgcggagaagatggagattatagatgctattaacacaactgttgcccaaatggaacttgaaaataccagtatgacatgacttttcagacaacttcatcctcagcatcctaaatgttttctctctgtctctctgaattaaagatgagtttttgtattgtgggattgttgatttgatacctagtctagttgttagaactggaatcatatgaattcaaaatctttggttgcaatatcc

SEQ ID NO: 27218 - protein, 166 aa, Arabidopsis thaliana
  peptide (1)..(166): Ceres Seq. ID no. 13487330
  misc_feature (98)..(130): Pfam Name: Ankyrin repeat Pfam Description: Ankyrin repeat
  misc_feature (34)..(163): Homolog of NCBI NO: 19112571 NR Description: ankyrin repeat-containing yeast yar1 related
  misc_feature (37)..(151): Homolog of NCBI NO: 28373666 NR Description: Chain A, Sank E3_5: An Artificial Ankyrin Repeat
  misc_feature (37)..(151): Homolog of NCBI NO: 28274850 NR Description: ankyrin repeat protein E3_19 [synthetic construct]
  misc_feature (40)..(148): Homolog of NCBI NO: 28373837 NR Description: Chain A, 4ank: A Designed Ankyrin Repeat Protein
  misc_feature (37)..(163): Homolog of NCBI NO: 28274852 NR Description: ankyrin repeat protein E4_2 [synthetic construct]
  misc_feature (37)..(148): Homolog of NCBI NO: 28274846 NR Description: ankyrin repeat protein E2_17 [synthetic construct]
  misc_feature (37)..(166): Homolog of NCBI NO: 28274854 NR Description: ankyrin repeat protein E4_8 [synthetic construct]
  misc_feature (23)..(166): Homolog of NCBI NO: 34899080 NR Description: contains ESTs
  misc_feature (23)..(166): Homolog of NCBI NO: 14586362 NR Description: putative protein [Arabidopsis thaliana]
  misc_feature (23)..(166): Homolog of NCBI NO: 30684047 NR Description: expressed protein [Arabidopsis thaliana]
GIGQKPSETRNPQTEIGIGRWRMGAETNGVAEKVDDLLEAARYNDIDDLRTLASDGLSLHSRDSQGRTALHMAAANGHMTIVEYLISEGVDINALNDENNAPLHWACLNGHVEVVKRLILAGASLSLLNRYERTPMDEAIGAEKMEIIDAINTTVAQMELENTSMT

SEQ ID NO: 27219 - protein, 144 aa, Arabidopsis thaliana
  peptide (1)..(144): Ceres Seq. ID no. 13487331
  misc_feature (76)..(108): Pfam Name: Ankyrin repeat Pfam Description: Ankyrin repeat
  misc_feature (12)..(141): Homolog of NCBI NO: 19112571 NR Description: ankyrin repeat-containing yeast yar1 related
  misc_feature (15)..(129): Homolog of NCBI NO: 28373666 NR Description: Chain A, Sank E3_5: An Artificial Ankyrin Repeat
  misc_feature (15)..(129): Homolog of NCBI NO: 28274850 NR Description: ankyrin repeat protein E3_19 [synthetic construct]
  misc_feature (18)..(126): Homolog of NCBI NO: 28373837 NR Description: Chain A, 4ank: A Designed Ankyrin Repeat Protein
  misc_feature (15)..(141): Homolog of NCBI NO: 28274852 NR Description: ankyrin repeat protein E4_2 [synthetic construct]
  misc_feature (15)..(126): Homolog of NCBI NO: 28274846 NR Description: ankyrin repeat protein E2_17 [synthetic construct]
  misc_feature (15)..(144): Homolog of NCBI NO: 28274854 NR Description: ankyrin repeat protein E4_8 [synthetic construct]
  misc_feature (1)..(144): Homolog of NCBI NO: 34899080 NR Description: contains ESTs
  misc_feature (1)..(144): Homolog of NCBI NO: 14586362 NR Description: putative protein [Arabidopsis thaliana]
  misc_feature (1)..(144): Homolog of NCBI NO: 30684047 NR Description: expressed protein [Arabidopsis thaliana]
MGAETNGVAEKVDDLLEAARYNDIDDLRTLASDGLSLHSRDSQGRTALHMAAANGHMTIVEYLISEGVDINALNDENNAPLHWACLNGHVEVVKRLILAGASLSLLNRYERTPMDEAIGAEKMEIIDAINTTVAQMELENTSMT

SEQ ID NO: 27220 - protein, 95 aa, Arabidopsis thaliana
  peptide (1)..(95): Ceres Seq. ID no. 13487332
  misc_feature (27)..(59): Pfam Name: Ankyrin repeat Pfam Description: Ankyrin repeat
  misc_feature (1)..(92): Homolog of NCBI NO: 19112571 NR Description: ankyrin repeat-containing yeast yar1 related
  misc_feature (1)..(80): Homolog of NCBI NO: 28373666 NR Description: Chain A, Sank E3_5: An Artificial Ankyrin Repeat
  misc_feature (1)..(80): Homolog of NCBI NO: 28274850 NR Description: ankyrin repeat protein E3_19 [synthetic construct]
  misc_feature (1)..(77): Homolog of NCBI NO: 28373837 NR Description: Chain A, 4ank: A Designed Ankyrin Repeat Protein
  misc_feature (1)..(92): Homolog of NCBI NO: 28274852 NR Description: ankyrin repeat protein E4_2 [synthetic construct]
  misc_feature (1)..(77): Homolog of NCBI NO: 28274846 NR Description: ankyrin repeat protein E2_17 [synthetic construct]
  misc_feature (1)..(95): Homolog of NCBI NO: 28274854 NR Description: ankyrin repeat protein E4_8 [synthetic construct]
  misc_feature (1)..(95): Homolog of NCBI NO: 34899080 NR Description: contains ESTs
  misc_feature (1)..(95): Homolog of NCBI NO: 14586362 NR Description: putative protein [Arabidopsis thaliana]
  misc_feature (1)..(95): Homolog of NCBI NO: 30684047 NR Description: expressed protein [Arabidopsis thaliana]
MAAANGHMTIVEYLISEGVDINALNDENNAPLHWACLNGHVEVVKRLILAGASLSLLNRYERTPMDEAIGAEKMEIIDAINTTVAQMELENTSMT

SEQ ID NO: 27221 - DNA, 1083 bp, Arabidopsis thaliana
  misc_feature (1)..(1083): Ceres Seq. ID no. 12394055
  misc_feature: MA Experiment ID: 20000180 Result: Down-regulated in Transcription
  misc_feature: MA Experiment 20000180 PARAMETER Experiment Name: At_Germinating_Seeds_P Parameter: Age (hr) Value: 24 vs. 0
  misc_feature: MA Experiment 20000180 PARAMETER Experiment Name: At_Germinating_Seeds_P Parameter: Tissue Value: Germinating Seeds
  misc_feature: MA Experiment ID: 20001558 Result: Up-regulated in Transcription
  misc_feature: MA Experiment 20001558 PARAMETER Experiment Name: At_Drought_Soil_Dry_P Parameter: Age (day) Value: 27
  misc_feature: MA Experiment 20001558 PARAMETER Experiment Name: At_Drought_Soil_Dry_P Parameter: Organism Value: A. thaliana
  misc_feature: MA Experiment 20001558 PARAMETER Experiment Name: At_Drought_Soil_Dry_P Parameter: Plant Line Value: WS
  misc_feature: MA Experiment 20001558 PARAMETER Experiment Name: At_Drought_Soil_Dry_P Parameter: Post Timepoint (hr) Value: 6
  misc_feature: MA Experiment 20001558 PARAMETER Experiment Name: At_Drought_Soil_Dry_P Parameter: Post-Treatment Value: Re-Water vs. No Drought
  misc_feature: MA Experiment 20001558 PARAMETER Experiment Name: At_Drought_Soil_Dry_P Parameter: Timepoint (day) Value: 13
  misc_feature: MA Experiment 20001558 PARAMETER Experiment Name: At_Drought_Soil_Dry_P Parameter: Treatment Value: Drought vs. No Drought
caacattaaaattcacaaagacttgctgaagaatgaatgtcctcacattgttgttggtacccctggtcgggtgcttgcacttgccagggagaaagatctctctttgaagaatgtgaggcattttattcttgatgaatgtgataaaatgctcgagtcacttgacatgcgaagggatgtgcaggagattttcaagatgactcctcatgacaaacaagtaatgatgttctcagcaacgctcagcaaagagatacgcccagtctgcaaaaaatttatgcaagatccaatggaaatatatgtcgatgatgaagccaagttgactcttcatgggcttgtccagcactacatcaaactgagcgagatggagaaaaaccggaagttgaatgaccttcttgatgcgttggacttcaatcaagttgtcatttttgtgaagagcgtgagcagggctgctgagctgaacaagttactggtggaatacaatttcccctcaatatgcatccactctggaatgtctcaagaagagaggttgactcgatacaaaagtttcaaggaagggcacaaaaggatccttgtggcgactgacttggtaggaagagggattgacattgagcgtgtcaacattgtcatcaactatgacatgccagattctgctgatacctatcttcacagggttggcagagctggtagatttggaaccaagggtctttcaatcacatttgttgcatctgcttcagattcagaggttcttaaccaggtacaagagaggtttgaggttgatataaaggaacttccggagcagattgatacttcaacctacatgccttcttaaacaagtagcacgtccctcaggaaagaagctcttcagatttcaaccttgtaggtgttcgaagggtgatgggggttcacaactatctctcgctccgtttgttttagtgttttctatgacgacatttttttccatatgtttagaacgtctgttgtactctttaaaggagattcgagtcactctccaaatcgcacagttaaaagctgtccagttttttgtacaagagattattatgtttgaaatatcaggatttagtctcc

SEQ ID NO: 27222 - protein, 274 aa, Arabidopsis thaliana
  peptide (1)..(274): Ceres Seq. ID no. 12394056
  misc_feature (1)..(113): Pfam Name: DEAD/DEAH box helicase Pfam Description: DEAD/DEAH box helicase
  misc_feature (1)..(272): Homolog of NCBI NO: 28278325 NR Description: Unknown (protein for MGC:55433) [Danio rerio]
  misc_feature (1)..(272): Homolog of NCBI NO: 27503947 NR Description: Similar to Eukaryotic initiation factor 4a [Danio
  misc_feature (1)..(250): Homolog of NCBI NO: 34913868 NR Description: putative DEAD BOX RNA helicase
  misc_feature (1)..(274): Homolog of NCBI NO: 34913862 NR Description: putative DEAD BOX RNA helicase
  misc_feature (1)..(271): Homolog of NCBI NO: 8953379 NR Description: DEAD BOX RNA helicase RH15-like protein
  misc_feature (1)..(274): Homolog of NCBI NO: 11358797 NR Description: RNA helicase RH15 [imported] - Arabidopsis
  misc_feature (1)..(271): Homolog of NCBI NO: 8953382 NR Description: DEAD BOX RNA helicase RH15 [Arabidopsis thaliana]
  misc_feature (1)..(274): Homolog of NCBI NO: 30683509 NR Description: DEAD/DEAH box helicase, putative [Arabidopsis
  misc_feature (1)..(274): Homolog of NCBI NO: 18416486 NR Description: DEAD/DEAH box RNA helicase, putative
  misc_feature (1)..(274): Homolog of NCBI NO: 18416493 NR Description: DEAD/DEAH box RNA helicase, putative
NIKIHKDLLKNECPHIVVGTPGRVLALAREKDLSLKNVRHFILDECDKMLESLDMRRDVQEIFKMTPHDKQVMMFSATLSKEIRPVCKKFMQDPMEIYVDDEAKLTLHGLVQHYIKLSEMEKNRKLNDLLDALDFNQVVIFVKSVSRAAELNKLLVEYNFPSICIHSGMSQEERLTRYKSFKEGHKRILVATDLVGRGIDIERVNIVINYDMPDSADTYLHRVGRAGRFGTKGLSITFVASASDSEVLNQVQERFEVDIKELPEQIDTSTYMPS

SEQ ID NO: 27223 - protein, 226 aa, Arabidopsis thaliana
  peptide (1)..(226): Ceres Seq. ID no. 12394057
  misc_feature (1)..(65): Pfam Name: DEAD/DEAH box helicase Pfam Description: DEAD/DEAH box helicase
  misc_feature (1)..(224): Homolog of NCBI NO: 28278325 NR Description: Unknown (protein for MGC:55433) [Danio rerio]
  misc_feature (1)..(224): Homolog of NCBI NO: 27503947 NR Description: Similar to Eukaryotic initiation factor 4a [Danio
  misc_feature (1)..(202): Homolog of NCBI NO: 34913868 NR Description: putative DEAD BOX RNA helicase
  misc_feature (1)..(226): Homolog of NCBI NO: 34913862 NR Description: putative DEAD BOX RNA helicase
  misc_feature (1)..(223): Homolog of NCBI NO: 8953379 NR Description: DEAD BOX RNA helicase RH15-like protein
  misc_feature (1)..(226): Homolog of NCBI NO: 11358797 NR Description: RNA helicase RH15 [imported] - Arabidopsis
  misc_feature (1)..(223): Homolog of NCBI NO: 8953382 NR Description: DEAD BOX RNA helicase RH15 [Arabidopsis thaliana]
  misc_feature (1)..(226): Homolog of NCBI NO: 30683509 NR Description: DEAD/DEAH box helicase, putative [Arabidopsis
  misc_feature (1)..(226): Homolog of NCBI NO: 18416486 NR Description: DEAD/DEAH box RNA helicase, putative
  misc_feature (1)..(226): Homolog of NCBI NO: 18416493 NR Description: DEAD/DEAH box RNA helicase, putative
MLESLDMRRDVQEIFKMTPHDKQVMMFSATLSKEIRPVCKKFMQDPMEIYVDDEAKLTLHGLVQHYIKLSEMEKNRKLNDLLDALDFNQVVIFVKSVSRAAELNKLLVEYNFPSICIHSGMSQEERLTRYKSFKEGHKRILVATDLVGRGIDIERVNIVINYDMPDSADTYLHRVGRAGRFGTKGLSITFVASASDSEVLNQVQERFEVDIKELPEQIDTSTYMPS

SEQ ID NO: 27224 - protein, 220 aa, Arabidopsis thaliana
  peptide (1)..(220): Ceres Seq. ID no. 12394058
  misc_feature (1)..(59): Pfam Name: DEAD/DEAH box helicase Pfam Description: DEAD/DEAH box helicase
  misc_feature (1)..(218): Homolog of NCBI NO: 28278325 NR Description: Unknown (protein for MGC:55433) [Danio rerio]
  misc_feature (1)..(218): Homolog of NCBI NO: 27503947 NR Description: Similar to Eukaryotic initiation factor 4a [Danio
  misc_feature (1)..(196): Homolog of NCBI NO: 34913868 NR Description: putative DEAD BOX RNA helicase
  misc_feature (1)..(220): Homolog of NCBI NO: 34913862 NR Description: putative DEAD BOX RNA helicase
  misc_feature (1)..(217): Homolog of NCBI NO: 8953379 NR Description: DEAD BOX RNA helicase RH15-like protein
  misc_feature (1)..(220): Homolog of NCBI NO: 11358797 NR Description: RNA helicase RH15 [imported] - Arabidopsis
  misc_feature (1)..(217): Homolog of NCBI NO: 8953382 NR Description: DEAD BOX RNA helicase RH15 [Arabidopsis thaliana]
  misc_feature (1)..(220): Homolog of NCBI NO: 30683509 NR Description: DEAD/DEAH box helicase, putative [Arabidopsis
  misc_feature (1)..(220): Homolog of NCBI NO: 18416486 NR Description: DEAD/DEAH box RNA helicase, putative
  misc_feature (1)..(220): Homolog of NCBI NO: 18416493 NR Description: DEAD/DEAH box RNA helicase, putative
MRRDVQEIFKMTPHDKQVMMFSATLSKEIRPVCKKFMQDPMEIYVDDEAKLTLHGLVQHYIKLSEMEKNRKLNDLLDALDFNQVVIFVKSVSRAAELNKLLVEYNFPSICIHSGMSQEERLTRYKSFKEGHKRILVATDLVGRGIDIERVNIVINYDMPDSADTYLHRVGRAGRFGTKGLSITFVASASDSEVLNQVQERFEVDIKELPEQIDTSTYMPS

SEQ ID NO: 27225 - DNA, 968 bp, Arabidopsis thaliana
  misc_feature (1)..(968): Ceres Seq. ID no. 13493775
  misc_feature: MA Experiment ID: 108434 Result: Down-regulated in Transcription
  misc_feature: MA Experiment 108434 PARAMETER Experiment Name: At_Root_Tips_cDNA_P Parameter: Tissue Value: Root Tips
aaactgatataggaaaatccaacaatggattcatcggcggacatagcaatattagtggcagatgaatgtaaccaaaaggtgaatacaacggcagagaaagcatcgaatacagcggaggttgggtggttgatgatgtttgggattgaggagaagaagattgaaagtctgatgaggaaatttgaagctaaatctcagtttgctgtggcggtttctagtggcttttttctgcttaactatgtttcatccttgtactataagtcacgtttgaacctcatgctggaaatctagtttaggcatgatgttactttcatttgcttctctaatcaccagagggcatgttgctttaagtttcgagttctacaagctttggttttatactcttttgggttagtttttaagtacagtttcttgtaagttaatggaaacggtgtcgtagtaagaaaaaacaaatcatcgtagtaattaagcctaatccgatgcattaattaatctctgaaatttgttggtttgcacaaaaaaaaaaatttccattgttgttgttccacggaactctaaaatggagagtggcgatgagagtccggtggttctaattacgggatgttctcagggaggaattggtcacgcgctggcccgtgagttcactgagaagggatgtcgagtggtggcgacgagtcgatcacggagtacgatgacggatctggagcaagattcgaggttattcgtgaaggagcttgatgtgcaatcggaccagaatgtgagtaaggttttgtcggaggttattgataagttcggtaagatcgacgttcttgttaataacgccggagttcagtgcgttggacctctggcggagactccaatttccgccatggaaaacacattcaacaccaatgtttttggtaataaagatttgatttttagtttcaattattacattgattggagcttcaacagttctggtttttttgctt

SEQ ID NO: 27226 - protein, 137 aa, Arabidopsis thaliana
  peptide (1)..(137): Ceres Seq. ID no. 13493776
  misc_feature (1)..(115): Homolog of NCBI NO: 30682984 NR Description: short-chain dehydrogenase/reductase family
  misc_feature (1)..(115): Homolog of NCBI NO: 26453106 NR Description: unknown protein [Arabidopsis thaliana]
  misc_feature (1)..(134): Homolog of NCBI NO: 11358313 NR Description: hypothetical protein T31P16.40 - Arabidopsis
  misc_feature (9)..(115): Homolog of NCBI NO: 23038313 NR Description: hypothetical protein [Oenococcus oeni MCW]
  misc_feature (9)..(114): Homolog of NCBI NO: 15896578 NR Description: Short-chain alcohol dehydrogenase family enzyme
  misc_feature (8)..(114): Homolog of NCBI NO: 29826690 NR Description: putative oxidoreductase [Streptomyces avermitilis
  misc_feature (8)..(114): Homolog of NCBI NO: 21234042 NR Description: putative short-chain oxidoreductase
  misc_feature (45)..(115): Homolog of NCBI NO: 26450169 NR Description: unknown protein [Arabidopsis thaliana]
  misc_feature (3)..(115): Homolog of NCBI NO: 18424923 NR Description: short-chain dehydrogenase/reductase family
  misc_feature (3)..(115): Homolog of NCBI NO: 10178182 NR Description: contains similarity to
MESGDESPVVLITGCSQGGIGHALAREFTEKGCRVVATSRSRSTMTDLEQDSRLFVKELDVQSDQNVSKVLSEVIDKFGKIDVLVNNAGVQCVGPLAETPISAMENTFNTNVFGNKDLIFSFNYYIDWSFNSSGFFA

SEQ ID NO: 27227 - protein, 93 aa, Arabidopsis thaliana
  peptide (1)..(93): Ceres Seq. ID no. 13493777
  misc_feature (1)..(71): Homolog of NCBI NO: 23038313 NR Description: hypothetical protein [Oenococcus oeni MCW]
  misc_feature (1)..(70): Homolog of NCBI NO: 15896578 NR Description: Short-chain alcohol dehydrogenase family enzyme
  misc_feature (1)..(70): Homolog of NCBI NO: 29826690 NR Description: putative oxidoreductase [Streptomyces avermitilis
  misc_feature (1)..(70): Homolog of NCBI NO: 21234042 NR Description: putative short-chain oxidoreductase
  misc_feature (1)..(71): Homolog of NCBI NO: 26450169 NR Description: unknown protein [Arabidopsis thaliana]
  misc_feature (1)..(71): Homolog of NCBI NO: 18424923 NR Description: short-chain dehydrogenase/reductase family
  misc_feature (1)..(71): Homolog of NCBI NO: 10178182 NR Description: contains similarity to
  misc_feature (1)..(71): Homolog of NCBI NO: 30682984 NR Description: short-chain dehydrogenase/reductase family
  misc_feature (1)..(71): Homolog of NCBI NO: 26453106 NR Description: unknown protein [Arabidopsis thaliana]
  misc_feature (1)..(90): Homolog of NCBI NO: 11358313 NR Description: hypothetical protein T31P16.40 - Arabidopsis
MTDLEQDSRLFVKELDVQSDQNVSKVLSEVIDKFGKIDVLVNNAGVQCVGPLAETPISAMENTFNTNVFGNKDLIFSFNYYIDWSFNSSGFFA

SEQ ID NO: 27228 - protein, 87 aa, Arabidopsis thaliana
  peptide (1)..(87): Ceres Seq. ID no. 13493778
  misc_feature (1)..(87): Homolog of NCBI NO: 15238047 NR Description: expressed protein [Arabidopsis thaliana]
MDSSADIAILVADECNQKVNTTAEKASNTAEVGWLMMFGIEEKKIESLMRKFEAKSQFAVAVSSGFFLLNYVSSLYYKSRLNLMLEI

SEQ ID NO: 27229 - DNA, 781 bp, Arabidopsis thaliana
  misc_feature (1)..(781): Ceres Seq. ID no. 13489663
  misc_feature: MA Experiment ID: 108434 Result: Up-regulated in Transcription
  misc_feature: MA Experiment 108434 PARAMETER Experiment Name: At_Root_Tips_cDNA_P Parameter: Tissue Value: Root Tips
  misc_feature: MA Experiment ID: 108462 Result: Down-regulated in Transcription
  misc_feature: MA Experiment 108462 PARAMETER Experiment Name: At_Germinating_Seeds_cDNA_P Parameter: Age (day) Value: 2 vs. 0
  misc_feature: MA Experiment 108462 PARAMETER Experiment Name: At_Germinating_Seeds_cDNA_P Parameter: Tissue Value: Germinating Seeds
  misc_feature: MA Experiment ID: 108463 Result: Down-regulated in Transcription
  misc_feature: MA Experiment 108463 PARAMETER Experiment Name: At_Germinating_Seeds_cDNA_P Parameter: Age (day) Value: 3 vs. 0
  misc_feature: MA Experiment 108463 PARAMETER Experiment Name: At_Germinating_Seeds_cDNA_P Parameter: Tissue Value: Germinating Seeds
  misc_feature: MA Experiment ID: 108464 Result: Down-regulated in Transcription
  misc_feature: MA Experiment 108464 PARAMETER Experiment Name: At_Germinating_Seeds_cDNA_P Parameter: Age (day) Value: 4 vs. 0
  misc_feature: MA Experiment 108464 PARAMETER Experiment Name: At_Germinating_Seeds_cDNA_P Parameter: Tissue Value: Germinating Seeds
  misc_feature: MA Experiment ID: 20000224 Result: Down-regulated in Transcription
gagcttcttctctgcatcgaaatcggcgacgacgatgatgatctctcgtcgattggtttcaaaattccttaaacccttgtcttctccatctttccacgtctctcgccgtcatctccaatcttcctcatctctcataagaaaccatctgatccacggatcagtaactaaggagcttggtctcttaagatccttttctgttttcaatatcgacaaacttagatctgaaacatggtcaccgaggtatttctcgacaccaagcggagagaccgagccgaagaagccagaggaatcgaaggaagaggagctgcagaagatgaagcaccaggagatcgaaggaccaactgtggaacgcgatttgtcagcgttaggaaatgagacgagacaagtgttggaagggatgatgaagaatatgtatagtctaagtggagctatgggtgctttgggtttaactcaattgattcttggagcggcgattttatacgccactcgagcagatccgatgaaggaaatgacaattcagagctgtatagctttcggattcccgtttgcgatggcgttgatggtgagaagatcgttgaagccaatgtacttcttcaagaagatggaagagttaggtaggctgcagattcttactttgacacttcaagttgctaagaatctcaatctgttgttcgttagagctcgtgttgtttccatcttgtgcgttgttgccttgtgtttcggtaacttgttcctcttgttatcaccatgagagcttgaaatacaatattttttgtctttc

SEQ ID NO: 27230 - protein, 249 aa, Arabidopsis thaliana
  peptide (1)..(249): Ceres Seq. ID no. 13489664
  misc_feature (12)..(249): Homolog of NCBI NO: 18399699 NR Description: expressed protein [Arabidopsis thaliana]
SFFSASKSATTMMISRRLVSKFLKPLSSPSFHVSRRHLQSSSSLIRNHLIHGSVTKELGLLRSFSVFNIDKLRSETWSPRYFSTPSGETEPKKPEESKEEELQKMKHQEIEGPTVERDLSALGNETRQVLEGMMKNMYSLSGAMGALGLTQLILGAAILYATRADPMKEMTIQSCIAFGFPFAMALMVRRSLKPMYFFKKMEELGRLQILTLTLQVAKNLNLLFVRARVVSILCVVALCFGNLFLLLSP

SEQ ID NO: 27231 - protein, 238 aa, Arabidopsis thaliana
  peptide (1)..(238): Ceres Seq. ID no. 13489665
  misc_feature (1)..(238): Homolog of NCBI NO: 18399699 NR Description: expressed protein [Arabidopsis thaliana]
MMISRRLVSKFLKPLSSPSFHVSRRHLQSSSSLIRNHLIHGSVTKELGLLRSFSVFNIDKLRSETWSPRYFSTPSGETEPKKPEESKEEELQKMKHQEIEGPTVERDLSALGNETRQVLEGMMKNMYSLSGAMGALGLTQLILGAAILYATRADPMKEMTIQSCIAFGFPFAMALMVRRSLKPMYFFKKMEELGRLQILTLTLQVAKNLNLLFVRARVVSILCVVALCFGNLFLLLSP

SEQ ID NO: 27232 - protein, 237 aa, Arabidopsis thaliana
  peptide (1)..(237): Ceres Seq. ID no. 13489666
  misc_feature (1)..(237): Homolog of NCBI NO: 18399699 NR Description: expressed protein [Arabidopsis thaliana]
MISRRLVSKFLKPLSSPSFHVSRRHLQSSSSLIRNHLIHGSVTKELGLLRSFSVFNIDKLRSETWSPRYFSTPSGETEPKKPEESKEEELQKMKHQEIEGPTVERDLSALGNETRQVLEGMMKNMYSLSGAMGALGLTQLILGAAILYATRADPMKEMTIQSCIAFGFPFAMALMVRRSLKPMYFFKKMEELGRLQILTLTLQVAKNLNLLFVRARVVSILCVVALCFGNLFLLLSP

SEQ ID NO: 27233 - DNA, 823 bp, Arabidopsis thaliana
  misc_feature (1)..(823): Ceres Seq. ID no. 13487333
  misc_feature: MA Experiment ID: 20000069 Result: Down-regulated in Transcription
  misc_feature: MA Experiment 20000069 PARAMETER Experiment Name: At_100uM_ABA_Mutants_cDNA_P Parameter: Plant Line Value: CS23
  misc_feature: MA Experiment 20000069 PARAMETER Experiment Name: At_100uM_ABA_Mutants_cDNA_P Parameter: Timepoint (hr) Value: 6
  misc_feature: MA Experiment 20000069 PARAMETER Experiment Name: At_100uM_ABA_Mutants_cDNA_P Parameter: Tissue Value: Aerial
  misc_feature: MA Experiment 20000069 PARAMETER Experiment Name: At_100uM_ABA_Mutants_cDNA_P Parameter: Treatment Value: 100uM ABA vs. No Treatment
  misc_feature: MA Experiment ID: 20000070 Result: Down-regulated in Transcription
  misc_feature: MA Experiment 20000070 PARAMETER Experiment Name: At_100uM_ABA_Mutants_cDNA_P Parameter: Plant Line Value: CS24
  misc_feature: MA Experiment 20000070 PARAMETER Experiment Name: At_100uM_ABA_Mutants_cDNA_P Parameter: Timepoint (hr) Value: 6
  misc_feature: MA Experiment 20000070 PARAMETER Experiment Name: At_100uM_ABA_Mutants_cDNA_P Parameter: Tissue Value: Aerial
  misc_feature: MA Experiment 20000070 PARAMETER Experiment Name: At_100uM_ABA_Mutants_cDNA_P Parameter: Treatment Value: 100uM ABA vs. No Treatment
  misc_feature: MA Experiment ID: 20000071 Result: Down-regulated in Transcription
  misc_feature: MA Experiment 20000071 PARAMETER Experiment Name: At_100uM_ABA_Mutants_cDNA_P Parameter: Plant Line Value: CS8104
  misc_feature: MA Experiment 20000071 PARAMETER Experiment Name: At_100uM_ABA_Mutants_cDNA_P Parameter: Timepoint (hr) Value: 6
  misc_feature: MA Experiment 20000071 PARAMETER Experiment Name: At_100uM_ABA_Mutants_cDNA_P Parameter: Tissue Value: Aerial
  misc_feature: MA Experiment 20000071 PARAMETER Experiment Name: At_100uM_ABA_Mutants_cDNA_P Parameter: Treatment Value: 100uM ABA vs. No Treatment
  misc_feature: MA Experiment ID: 20000072 Result: Down-regulated in Transcription
  misc_feature: MA Experiment 20000072 PARAMETER Experiment Name: At_100uM_ABA_Mutants_cDNA_P Parameter: Plant Line Value: CS8105
  misc_feature: MA Experiment 20000072 PARAMETER Experiment Name: At_100uM_ABA_Mutants_cDNA_P Parameter: Timepoint (hr) Value: 6
  misc_feature: MA Experiment 20000072 PARAMETER Experiment Name: At_100uM_ABA_Mutants_cDNA_P Parameter: Tissue Value: Aerial
  misc_feature: MA Experiment 20000072 PARAMETER Experiment Name: At_100uM_ABA_Mutants_cDNA_P Parameter: Treatment Value: 100uM ABA vs. No Treatment
  misc_feature: MA Experiment ID: 20000087 Result: Down-regulated in Transcription
  misc_feature: MA Experiment 20000087 PARAMETER Experiment Name: At_100uM_ABA_Mutants_cDNA_P Parameter: Plant Line Value: WS
  misc_feature: MA Experiment 20000087 PARAMETER Experiment Name: At_100uM_ABA_Mutants_cDNA_P Parameter: Timepoint (hr) Value: 6
  misc_feature: MA Experiment 20000087 PARAMETER Experiment Name: At_100uM_ABA_Mutants_cDNA_P Parameter: Tissue Value: Aerial
  misc_feature: MA Experiment 20000087 PARAMETER Experiment Name: At_100uM_ABA_Mutants_cDNA_P Parameter: Treatment Value: 100uM ABA vs. No Treatment
  misc_feature: MA Experiment ID: 20000113 Result: Up-regulated in Transcription
  misc_feature: MA Experiment 20000113 PARAMETER Experiment Name: At_42deg_Heat_cDNA_P Parameter: Temperature (deg C) Value: 42 vs. 22
  misc_feature: MA Experiment 20000113 PARAMETER Experiment Name: At_42deg_Heat_cDNA_P Parameter: Timepoint (hr) Value: 8
  misc_feature: MA Experiment 20000113 PARAMETER Experiment Name: At_42deg_Heat_cDNA_P Parameter: Tissue Value: Aerial
  misc_feature: MA Experiment ID: 20000437 Result: Down-regulated in Transcription
  misc_feature: MA Experiment 20000437 PARAMETER Experiment Name: At_Drought_P Parameter: Age (day) Value: 8
  misc_feature: MA Experiment 20000437 PARAMETER Experiment Name: At_Drought_P Parameter: Organism Value: A. thaliana
  misc_feature: MA Experiment 20000437 PARAMETER Experiment Name: At_Drought_P Parameter: Plant Line Value: WS
  misc_feature: MA Experiment 20000437 PARAMETER Experiment Name: At_Drought_P Parameter: Timepoint (hr) Value: 24
  misc_feature: MA Experiment 20000437 PARAMETER Experiment Name: At_Drought_P Parameter: Tissue Value: Whole Plant
  misc_feature: MA Experiment 20000437 PARAMETER Experiment Name: At_Drought_P Parameter: Treatment Value: Drought vs. No Drought
  misc_feature: MA Experiment ID: 20001451 Result: Up-regulated in Transcription
  misc_feature: MA Experiment 20001451 PARAMETER Experiment Name: At_Far-red-induction_P Parameter: Age (day) Value: 7
  misc_feature: MA Experiment 20001451 PARAMETER Experiment Name: At_Far-red-induction_P Parameter: Light Value: Far-red vs. White
  misc_feature: MA Experiment 20001451 PARAMETER Experiment Name: At_Far-red-induction_P Parameter: Organism Value: A. thaliana
  misc_feature: MA Experiment 20001451 PARAMETER Experiment Name: At_Far-red-induction_P Parameter: Plant Line Value: Columbia
  misc_feature: MA Experiment 20001451 PARAMETER Experiment Name: At_Far-red-induction_P Parameter: Timepoint (hr) Value: 24
  misc_feature: MA Experiment 20001451 PARAMETER Experiment Name: At_Far-red-induction_P Parameter: Tissue Value: Whole Plant
  misc_feature: MA Experiment ID: 20001905 Result: Down-regulated in Transcription
  misc_feature: MA Experiment 20001905 PARAMETER Experiment Name: At_Drought_Reproduction_P Parameter: Age (day) Value: 40
  misc_feature: MA Experiment 20001905 PARAMETER Experiment Name: At_Drought_Reproduction_P Parameter: Organism Value: A. thaliana
  misc_feature: MA Experiment 20001905 PARAMETER Experiment Name: At_Drought_Reproduction_P Parameter: Plant Line Value: WS
  misc_feature: MA Experiment 20001905 PARAMETER Experiment Name: At_Drought_Reproduction_P Parameter: Timepoint (day) Value: 10
  misc_feature: MA Experiment 20001905 PARAMETER Experiment Name: At_Drought_Reproduction_P Parameter: Tissue Value: Rosettes
  misc_feature: MA Experiment 20001905 PARAMETER Experiment Name: At_Drought_Reproduction_P Parameter: Treatment Value: Drought vs. No Drought
attttttcacaattcatatcctgtctgatgaacagtagctgttagactctctctctttctctcttctctgttcttcttcatcttctctagccgaatccatccttcagatactactctgtaatttcactacaatcatctcagccaaatgggttcggaagaagagaaggtcgttgttcccagaaactttagattattggaagagctagaaagaggtgagaaaggaattggagatgggacagtgagttatggaatggatgatgctgatgatattttgatgcaatcttggactggtaccattcttggtcctcataatactgcgtatgaagggaaaatctttcagctgaagctattctgtggaaaggattatccggaaagtccacctactgtgaggtttcagagtcgtataaacatggcttgtgtcaatcctgagaatggagtggttgatccgagtcacttccctatgctttccaactggagaagagaattcacaatggaggatctactgattcagcttaaaaaagaaatgatgtcatcgcagaaccgcaagttagctcaacccttggaaggtaatgaggaaggcaggacagacccaaagggactagtggtgaaatgttgcgtgatgtgaaaagaggtaatgaggaatttataagaatttaagagacaaaacaatgtatataaacagcatttgaagggctttgagattggcctaagaaccctttcttctataggccttcttaatcctaccatttgattatgtattatgtaatatttgagaatatattcaccaaaaacaggtgcccttaataaacctccactcttcttc

SEQ ID NO: 27234 - protein, 159 aa, Arabidopsis thaliana
  peptide (1)..(159): Ceres Seq. ID no. 13487334
  misc_feature (8)..(141): Homolog of NCBI NO: 2982253 NR Description: CROC-1-like protein [Picea mariana]
  misc_feature (1)..(141): Homolog of NCBI NO: 30686662 NR Description: ubiquitin-conjugating enzyme family [Arabidopsis
  misc_feature (1)..(141): Homolog of NCBI NO: 18404032 NR Description: ubiquitin-conjugating enzyme family [Arabidopsis
  misc_feature (1)..(141): Homolog of NCBI NO: 30693656 NR Description: ubiquitin-conjugating enzyme family [Arabidopsis
  misc_feature (1)..(141): Homolog of NCBI NO: 18409633 NR Description: ubiquitin-conjugating enzyme family [Arabidopsis
  misc_feature (10)..(159): Homolog of NCBI NO: 13324790 NR Description: putative DNA-binding protein [Oryza sativa]
  misc_feature (1)..(159): Homolog of NCBI NO: 25326240 NR Description: protein F26F24.10 [imported] - Arabidopsis
  misc_feature (1)..(159): Homolog of NCBI NO: 18395221 NR Description: ubiquitin-conjugating enzyme family [Arabidopsis
  misc_feature (1)..(159): Homolog of NCBI NO: 21593918 NR Description: E2, ubiquitin-conjugating enzyme, putative
  misc_feature (1)..(159): Homolog of NCBI NO: 18409647 NR Description: ubiquitin-conjugating enzyme family [Arabidopsis
MGSEEEKVVVPRNFRLLEELERGEKGIGDGTVSYGMDDADDILMQSWTGTILGPHNTAYEGKIFQLKLFCGKDYPESPPTVRFQSRINMACVNPENGVVDPSHFPMLSNWRREFTMEDLLIQLKKEMMSSQNRKLAQPLEGNEEGRTDPKGLVVKCCVM

SEQ ID NO: 27235 - protein, 124 aa, Arabidopsis thaliana
  peptide (1)..(124): Ceres Seq. ID no. 13487335
  misc_feature (1)..(106): Homolog of NCBI NO: 2982253 NR Description: CROC-1-like protein [Picea mariana]
  misc_feature (1)..(106): Homolog of NCBI NO: 30686662 NR Description: ubiquitin-conjugating enzyme family [Arabidopsis
  misc_feature (1)..(106): Homolog of NCBI NO: 18404032 NR Description: ubiquitin-conjugating enzyme family [Arabidopsis
  misc_feature (1)..(106): Homolog of NCBI NO: 30693656 NR Description: ubiquitin-conjugating enzyme family [Arabidopsis
  misc_feature (1)..(106): Homolog of NCBI NO: 18409633 NR Description: ubiquitin-conjugating enzyme family [Arabidopsis
  misc_feature (1)..(124): Homolog of NCBI NO: 13324790 NR Description: putative DNA-binding protein [Oryza sativa]
  misc_feature (1)..(124): Homolog of NCBI NO: 25326240 NR Description: protein F26F24.10 [imported] - Arabidopsis
  misc_feature (1)..(124): Homolog of NCBI NO: 18395221 NR Description: ubiquitin-conjugating enzyme family [Arabidopsis
  misc_feature (1)..(124): Homolog of NCBI NO: 21593918 NR Description: E2, ubiquitin-conjugating enzyme, putative
  misc_feature (1)..(124): Homolog of NCBI NO: 18409647 NR Description: ubiquitin-conjugating enzyme family [Arabidopsis
MDDADDILMQSWTGTILGPHNTAYEGKIFQLKLFCGKDYPESPPTVRFQSRINMACVNPENGVVDPSHFPMLSNWRREFTMEDLLIQLKKEMMSSQNRKLAQPLEGNEEGRTDPKGLVVKCCVM

SEQ ID NO: 27236 - protein, 116 aa, Arabidopsis thaliana
  peptide (1)..(116): Ceres Seq. ID no. 13487336
  misc_feature (1)..(98): Homolog of NCBI NO: 2982253 NR Description: CROC-1-like protein [Picea mariana]
  misc_feature (1)..(98): Homolog of NCBI NO: 30686662 NR Description: ubiquitin-conjugating enzyme family [Arabidopsis
  misc_feature (1)..(98): Homolog of NCBI NO: 18404032 NR Description: ubiquitin-conjugating enzyme family [Arabidopsis
  misc_feature (1)..(98): Homolog of NCBI NO: 30693656 NR Description: ubiquitin-conjugating enzyme family [Arabidopsis
  misc_feature (1)..(98): Homolog of NCBI NO: 18409633 NR Description: ubiquitin-conjugating enzyme family [Arabidopsis
  misc_feature (1)..(116): Homolog of NCBI NO: 13324790 NR Description: putative DNA-binding protein [Oryza sativa]
  misc_feature (1)..(116): Homolog of NCBI NO: 25326240 NR Description: protein F26F24.10 [imported] - Arabidopsis
  misc_feature (1)..(116): Homolog of NCBI NO: 18395221 NR Description: ubiquitin-conjugating enzyme family [Arabidopsis
  misc_feature (1)..(116): Homolog of NCBI NO: 21593918 NR Description: E2, ubiquitin-conjugating enzyme, putative
  misc_feature (1)..(116): Homolog of NCBI NO: 18409647 NR Description: ubiquitin-conjugating enzyme family [Arabidopsis
MQSWTGTILGPHNTAYEGKIFQLKLFCGKDYPESPPTVRFQSRINMACVNPENGVVDPSHFPMLSNWRREFTMEDLLIQLKKEMMSSQNRKLAQPLEGNEEGRTDPKGLVVKCCVM

SEQ ID NO: 27237 - DNA, 1083 bp, Arabidopsis thaliana
  misc_feature (1)..(1083): Ceres Seq. ID no. 12348423
  misc_feature: MA Experiment ID: 108573 Result: Down-regulated in Transcription
  misc_feature: MA Experiment 108573 PARAMETER Experiment Name: At_Drought_cDNA_P Parameter: Timepoint (hr) Value: 6
  misc_feature: MA Experiment 108573 PARAMETER Experiment Name: At_Drought_cDNA_P Parameter: Tissue Value: Aerial
  misc_feature: MA Experiment 108573 PARAMETER Experiment Name: At_Drought_cDNA_P Parameter: Treatment Value: Drought vs. No Drought
  misc_feature: MA Experiment ID: 108577 Result: Down-regulated in Transcription
  misc_feature: MA Experiment 108577 PARAMETER Experiment Name: At_42deg_Heat_cDNA_P Parameter: Temperature (deg C) Value: 42 vs. 22
  misc_feature: MA Experiment 108577 PARAMETER Experiment Name: At_42deg_Heat_cDNA_P Parameter: Timepoint (hr) Value: 6
  misc_feature: MA Experiment 108577 PARAMETER Experiment Name: At_42deg_Heat_cDNA_P Parameter: Tissue Value: Aerial
  misc_feature: MA Experiment ID: 108595 Result: Down-regulated in Transcription
  misc_feature: MA Experiment 108595 PARAMETER Experiment Name: At_Ler-pi_Ovule_cDNA_P Parameter: Plant Line Value: null
  misc_feature: MA Experiment ID: 20000185 Result: Down-regulated in Transcription
  misc_feature: MA Experiment 20000185 PARAMETER Experiment Name: At_Roots__P Parameter: Age (day) Value: 7 vs. 21
  misc_feature: MA Experiment 20000185 PARAMETER Experiment Name: At_Roots__P Parameter: Organism Value: A. thaliana
  misc_feature: MA Experiment 20000185 PARAMETER Experiment Name: At_Roots__P Parameter: Tissue Value: Roots vs. Whole Plant
  misc_feature: MA Experiment ID: 20000214 Result: Down-regulated in Transcription
  misc_feature: MA Experiment 20000214 PARAMETER Experiment Name: At_4deg_Cold_P Parameter: Timepoint (hr) Value: 6
  misc_feature: MA Experiment ID: 20000224 Result: Down-regulated in Transcription
  misc_feature: MA Experiment ID: 20000437 Result: Down-regulated in Transcription
  misc_feature: MA Experiment 20000437 PARAMETER Experiment Name: At_Drought_P Parameter: Age (day) Value: 8
  misc_feature: MA Experiment 20000437 PARAMETER Experiment Name: At_Drought_P Parameter: Organism Value: A. thaliana
  misc_feature: MA Experiment 20000437 PARAMETER Experiment Name: At_Drought_P Parameter: Plant Line Value: WS
  misc_feature: MA Experiment 20000437 PARAMETER Experiment Name: At_Drought_P Parameter: Timepoint (hr) Value: 24
  misc_feature: MA Experiment 20000437 PARAMETER Experiment Name: At_Drought_P Parameter: Tissue Value: Whole Plant
  misc_feature: MA Experiment 20000437 PARAMETER Experiment Name: At_Drought_P Parameter: Treatment Value: Drought vs. No Drought
  misc_feature: MA Experiment ID: 20000439 Result: Down-regulated in Transcription
  misc_feature: MA Experiment 20000439 PARAMETER Experiment Name: At_Roots__P Parameter: Age (day) Value: 14 vs. 21
  misc_feature: MA Experiment 20000439 PARAMETER Experiment Name: At_Roots__P Parameter: Organism Value: A. thaliana
  misc_feature: MA Experiment 20000439 PARAMETER Experiment Name: At_Roots__P Parameter: Tissue Value: Roots vs. Whole Plant
  misc_feature: MA Experiment ID: 20001554 Result: Down-regulated in Transcription
  misc_feature: MA Experiment 20001554 PARAMETER Experiment Name: At_Drought_Soil_Dry_P Parameter: Age (day) Value: 21
  misc_feature: MA Experiment 20001554 PARAMETER Experiment Name: At_Drought_Soil_Dry_P Parameter: Organism Value: A. thaliana
  misc_feature: MA Experiment 20001554 PARAMETER Experiment Name: At_Drought_Soil_Dry_P Parameter: Plant Line Value: WS
  misc_feature: MA Experiment 20001554 PARAMETER Experiment Name: At_Drought_Soil_Dry_P Parameter: Post Timepoint (hr) Value: None
  misc_feature: MA Experiment 20001554 PARAMETER Experiment Name: At_Drought_Soil_Dry_P Parameter: Post-Treatment Value: None
  misc_feature: MA Experiment 20001554 PARAMETER Experiment Name: At_Drought_Soil_Dry_P Parameter: Timepoint (day) Value: 7
  misc_feature: MA Experiment 20001554 PARAMETER Experiment Name: At_Drought_Soil_Dry_P Parameter: Treatment Value: Drought vs. No Drought
  misc_feature: MA Experiment ID: 20001555 Result: Down-regulated in Transcription
  misc_feature: MA Experiment 20001555 PARAMETER Experiment Name: At_Drought_Soil_Dry_P Parameter: Age (day) Value: 24
  misc_feature: MA Experiment 20001555 PARAMETER Experiment Name: At_Drought_Soil_Dry_P Parameter: Organism Value: A. thaliana
  misc_feature: MA Experiment 20001555 PARAMETER Experiment Name: At_Drought_Soil_Dry_P Parameter: Plant Line Value: WS
  misc_feature: MA Experiment 20001555 PARAMETER Experiment Name: At_Drought_Soil_Dry_P Parameter: Post Timepoint (hr) Value: None
  misc_feature: MA Experiment 20001555 PARAMETER Experiment Name: At_Drought_Soil_Dry_P Parameter: Post-Treatment Value: None
  misc_feature: MA Experiment 20001555 PARAMETER Experiment Name: At_Drought_Soil_Dry_P Parameter: Timepoint (day) Value: 10
  misc_feature: MA Experiment 20001555 PARAMETER Experiment Name: At_Drought_Soil_Dry_P Parameter: Treatment Value: Drought vs. No Drought
  misc_feature: MA Experiment ID: 20001556 Result: Down-regulated in Transcription
  misc_feature: MA Experiment 20001556 PARAMETER Experiment Name: At_Drought_Soil_Dry_P Parameter: Age (day) Value: 26
  misc_feature: MA Experiment 20001556 PARAMETER Experiment Name: At_Drought_Soil_Dry_P Parameter: Organism Value: A. thaliana
  misc_feature: MA Experiment 20001556 PARAMETER Experiment Name: At_Drought_Soil_Dry_P Parameter: Plant Line Value: WS
  misc_feature: MA Experiment 20001556 PARAMETER Experiment Name: At_Drought_Soil_Dry_P Parameter: Post Timepoint (hr) Value: None
  misc_feature: MA Experiment 20001556 PARAMETER Experiment Name: At_Drought_Soil_Dry_P Parameter: Post-Treatment Value: None
  misc_feature: MA Experiment 20001556 PARAMETER Experiment Name: At_Drought_Soil_Dry_P Parameter: Timepoint (day) Value: 12
  misc_feature: MA Experiment 20001556 PARAMETER Experiment Name: At_Drought_Soil_Dry_P Parameter: Treatment Value: Drought vs. No Drought
  misc_feature: MA Experiment ID: 20001904 Result: Down-regulated in Transcription
  misc_feature: MA Experiment 20001904 PARAMETER Experiment Name: At_Drought_Reproduction_P Parameter: Age (day) Value: 37
  misc_feature: MA Experiment 20001904 PARAMETER Experiment Name: At_Drought_Reproduction_P Parameter: Organism Value: A. thaliana
  misc_feature: MA Experiment 20001904 PARAMETER Experiment Name: At_Drought_Reproduction_P Parameter: Plant Line Value: WS
  misc_feature: MA Experiment 20001904 PARAMETER Experiment Name: At_Drought_Reproduction_P Parameter: Timepoint (day) Value: 7
  misc_feature: MA Experiment 20001904 PARAMETER Experiment Name: At_Drought_Reproduction_P Parameter: Tissue Value: Rosettes
  misc_feature: MA Experiment 20001904 PARAMETER Experiment Name: At_Drought_Reproduction_P Parameter: Treatment Value: Drought vs. No Drought
  misc_feature: MA Experiment ID: 20001911 Result: Down-regulated in Transcription
  misc_feature: MA Experiment 20001911 PARAMETER Experiment Name: At_Drought_Reproduction_P Parameter: Age (day) Value: 40
  misc_feature: MA Experiment 20001911 PARAMETER Experiment Name: At_Drought_Reproduction_P Parameter: Organism Value: A. thaliana
  misc_feature: MA Experiment 20001911 PARAMETER Experiment Name: At_Drought_Reproduction_P Parameter: Plant Line Value: WS
  misc_feature: MA Experiment 20001911 PARAMETER Experiment Name: At_Drought_Reproduction_P Parameter: Timepoint (day) Value: 10
  misc_feature: MA Experiment 20001911 PARAMETER Experiment Name: At_Drought_Reproduction_P Parameter: Tissue Value: Flowers
  misc_feature: MA Experiment 20001911 PARAMETER Experiment Name: At_Drought_Reproduction_P Parameter: Treatment Value: Drought vs. No Drought
gacgacggctgggctgttcaaaatcatttcttctctcttccgtcaaaattattattctctcgcagtcgtcaagagcttcttctacaacaatgcagacgacgagaagtgttcaagtaaataatgtctcagatctagccacagagagagagattcacgagtttttctccttctcaggcgacatagaacacattgaaatccaaaaagaatttggacagtctcgaatcgcatttgttacatttactgatcccaaagccctcgaaattgccttgttattatcgggtgcgacgattgtggaccagattgttacaataacacgagctgaaaactatgttcagaggcgtgagacacaggaagtaagaatgttggacaacgcgatgcctcttggtcttcaagagagtactacacagactaaaacgaacatggatggtaatagtagagcatacgttagcaaagcacaagatgtggtggcaacggttttggcaaaagggtctgctcttggacaagatgcagtgaataaagccaaggctttcgacgaaaagcaccaattaagagccaatgcttctgctaaagtttcatcttttgacaagcgagttggtcttactgagaagttatctgttggtatttctgctgttaatgagaaagttaaatctgttgatcaaaagcttcaagtctccgataaaactatggcagcaatatttgcagccgagaggaagttaaacgacacgggttcagctgtcaaatcaagcaggtacgtgactgctggagctgcttggtttagtggcgcttttagtaaagtggcgagagtaggtcaggttgctggctcaaaaaccaaagagaagttcaatctagccgtctcaaatatgagttccaaggatacaccgattgctgtataataaagagcttggaatcaagtaagcgttgaagtcaggatcaacgaaagttgctatactagccttgtgtaaacaacatttttgtgatatagcttatcctcattcttttagtgtttcctcatattctgtgtgtgctgcattgtcctcaaatctacttcatgtttctcattagtgcaagtgttttttgatttcc

SEQ ID NO: 27238 - protein, 296 aa, Arabidopsis thaliana
  peptide (1)..(296): Ceres Seq. ID no. 12348424
  misc_feature (36)..(103): Pfam Name: RNA recognition motif. (a.k.a. RRM, RBD, or RNP domain) Pfam Description: RNA recognition motif. (a.k.a. RRM, RBD, or RNP
  misc_feature (148)..(267): Homolog of NCBI NO: 30697598 NR Description: RNA recognition motif (RRM)-containing protein
  misc_feature (148)..(267): Homolog of NCBI NO: 30697595 NR Description: RNA recognition motif (RRM)-containing protein
  misc_feature (148)..(267): Homolog of NCBI NO: 18408904 NR Description: RRM-containing protein
  misc_feature (35)..(283): Homolog of NCBI NO: 7485085 NR Description: hypothetical protein - Arabidopsis thaliana
  misc_feature (32)..(283): Homolog of NCBI NO: 18414951 NR Description: RRM-containing protein
  misc_feature (35)..(290): Homolog of NCBI NO: 30695063 NR Description: RNA recognition motif (RRM)-containing protein
  misc_feature (35)..(290): Homolog of NCBI NO: 8809670 NR Description: gene_id:MSD23.5~pir||C71447~similar to unknown
  misc_feature (30)..(279): Homolog of NCBI NO: 34897896 NR Description: ESTs D15336(C0474),C98053(C0474) correspond to a of the predicted gene.~Similar to Arabidopsis thaliana DNA
  misc_feature (31)..(290): Homolog of NCBI NO: 18087665 NR Description: putative arginine-rich protein [Oryza sativa]
  misc_feature (30)..(296): Homolog of NCBI NO: 18421342 NR Description: RRM-containing protein
RRLGCSKSFLLSSVKIIILSQSSRASSTTMQTTRSVQVNNVSDLATEREIHEFFSFSGDIEHIEIQKEFGQSRIAFVTFTDPKALEIALLLSGATIVDQIVTITRAENYVQRRETQEVRMLDNAMPLGLQESTTQTKTNMDGNSRAYVSKAQDVVATVLAKGSALGQDAVNKAKAFDEKHQLRANASAKVSSFDKRVGLTEKLSVGISAVNEKVKSVDQKLQVSDKTMAAIFAAERKLNDTGSAVKSSRYVTAGAAWFSGAFSKVARVGQVAGSKTKEKFNLAVSNMSSKDTPIAV

SEQ ID NO: 27239 - protein, 267 aa, Arabidopsis thaliana
  peptide (1)..(267): Ceres Seq. ID no. 12348425
  misc_feature (7)..(74): Pfam Name: RNA recognition motif. (a.k.a. RRM, RBD, or RNP domain) Pfam Description: RNA recognition motif. (a.k.a. RRM, RBD, or RNP
  misc_feature (119)..(238): Homolog of NCBI NO: 30697598 NR Description: RNA recognition motif (RRM)-containing protein
  misc_feature (119)..(238): Homolog of NCBI NO: 30697595 NR Description: RNA recognition motif (RRM)-containing protein
  misc_feature (119)..(238): Homolog of NCBI NO: 18408904 NR Description: RRM-containing protein
  misc_feature (6)..(254): Homolog of NCBI NO: 7485085 NR Description: hypothetical protein - Arabidopsis thaliana
  misc_feature (3)..(254): Homolog of NCBI NO: 18414951 NR Description: RRM-containing protein
  misc_feature (6)..(261): Homolog of NCBI NO: 30695063 NR Description: RNA recognition motif (RRM)-containing protein
  misc_feature (6)..(261): Homolog of NCBI NO: 8809670 NR Description: gene_id:MSD23.5~pir||C71447~similar to unknown
  misc_feature (1)..(250): Homolog of NCBI NO: 34897896 NR Description: ESTs D15336(C0474),C98053(C0474) correspond to a of the predicted gene.~Similar to Arabidopsis thaliana DNA
  misc_feature (2)..(261): Homolog of NCBI NO: 18087665 NR Description: putative arginine-rich protein [Oryza sativa]
  misc_feature (1)..(267): Homolog of NCBI NO: 18421342 NR Description: RRM-containing protein
MQTTRSVQVNNVSDLATEREIHEFFSFSGDIEHIEIQKEFGQSRIAFVTFTDPKALEIALLLSGATIVDQIVTITRAENYVQRRETQEVRMLDNAMPLGLQESTTQTKTNMDGNSRAYVSKAQDVVATVLAKGSALGQDAVNKAKAFDEKHQLRANASAKVSSFDKRVGLTEKLSVGISAVNEKVKSVDQKLQVSDKTMAAIFAAERKLNDTGSAVKSSRYVTAGAAWFSGAFSKVARVGQVAGSKTKEKFNLAVSNMSSKDTPIAV

SEQ ID NO: 27240 - protein, 177 aa, Arabidopsis thaliana
  peptide (1)..(177): Ceres Seq. ID no. 12348426
  misc_feature (29)..(148): Homolog of NCBI NO: 30697598 NR Description: RNA recognition motif (RRM)-containing protein
  misc_feature (29)..(148): Homolog of NCBI NO: 26450623 NR Description: unknown protein [Arabidopsis thaliana]
  misc_feature (29)..(148): Homolog of NCBI NO: 18408904 NR Description: RRM-containing protein
  misc_feature (1)..(164): Homolog of NCBI NO: 7485085 NR Description: hypothetical protein - Arabidopsis thaliana
  misc_feature (1)..(164): Homolog of NCBI NO: 18414951 NR Description: RRM-containing protein
  misc_feature (1)..(171): Homolog of NCBI NO: 30695063 NR Description: RNA recognition motif (RRM)-containing protein
  misc_feature (1)..(171): Homolog of NCBI NO: 8809670 NR Description: gene_id:MSD23.5~pir||C71447~similar to unknown
  misc_feature (1)..(160): Homolog of NCBI NO: 34897896 NR Description: ESTs D15336(C0474),C98053(C0474) correspond to a of the predicted gene.~Similar to Arabidopsis thaliana DNA
  misc_feature (1)..(171): Homolog of NCBI NO: 18087665 NR Description: putative arginine-rich protein [Oryza sativa]
  misc_feature (1)..(177): Homolog of NCBI NO: 18421342 NR Description: RRM-containing protein
MLDNAMPLGLQESTTQTKTNMDGNSRAYVSKAQDVVATVLAKGSALGQDAVNKAKAFDEKHQLRANASAKVSSFDKRVGLTEKLSVGISAVNEKVKSVDQKLQVSDKTMAAIFAAERKLNDTGSAVKSSRYVTAGAAWFSGAFSKVARVGQVAGSKTKEKFNLAVSNMSSKDTPIAV

SEQ ID NO: 27241 - DNA, 1005 bp, Arabidopsis thaliana
  misc_feature (1)..(1005): Ceres Seq. ID no. 13592440
  misc_feature: MA Experiment ID: 108461 Result: Up-regulated in Transcription
  misc_feature: MA Experiment 108461 PARAMETER Experiment Name: At_Germinating_Seeds_cDNA_P Parameter: Age (day) Value: 1 vs. 0
  misc_feature: MA Experiment 108461 PARAMETER Experiment Name: At_Germinating_Seeds_cDNA_P Parameter: Tissue Value: Germinating Seeds
  misc_feature: MA Experiment ID: 108462 Result: Up-regulated in Transcription
  misc_feature: MA Experiment 108462 PARAMETER Experiment Name: At_Germinating_Seeds_cDNA_P Parameter: Age (day) Value: 2 vs. 0
  misc_feature: MA Experiment 108462 PARAMETER Experiment Name: At_Germinating_Seeds_cDNA_P Parameter: Tissue Value: Germinating Seeds
  misc_feature: MA Experiment ID: 108463 Result: Up-regulated in Transcription
  misc_feature: MA Experiment 108463 PARAMETER Experiment Name: At_Germinating_Seeds_cDNA_P Parameter: Age (day) Value: 3 vs. 0
  misc_feature: MA Experiment 108463 PARAMETER Experiment Name: At_Germinating_Seeds_cDNA_P Parameter: Tissue Value: Germinating Seeds
  misc_feature: MA Experiment ID: 108464 Result: Up-regulated in Transcription
  misc_feature: MA Experiment 108464 PARAMETER Experiment Name: At_Germinating_Seeds_cDNA_P Parameter: Age (day) Value: 4 vs. 0
  misc_feature: MA Experiment 108464 PARAMETER Experiment Name: At_Germinating_Seeds_cDNA_P Parameter: Tissue Value: Germinating Seeds
  misc_feature: MA Experiment ID: 20000070 Result: Down-regulated in Transcription
  misc_feature: MA Experiment 20000070 PARAMETER Experiment Name: At_100uM_ABA_Mutants_cDNA_P Parameter: Plant Line Value: CS24
  misc_feature: MA Experiment 20000070 PARAMETER Experiment Name: At_100uM_ABA_Mutants_cDNA_P Parameter: Timepoint (hr) Value: 6
  misc_feature: MA Experiment 20000070 PARAMETER Experiment Name: At_100uM_ABA_Mutants_cDNA_P Parameter: Tissue Value: Aerial
  misc_feature: MA Experiment 20000070 PARAMETER Experiment Name: At_100uM_ABA_Mutants_cDNA_P Parameter: Treatment Value: 100uM ABA vs. No Treatment
  misc_feature: MA Experiment ID: 20000071 Result: Down-regulated in Transcription
  misc_feature: MA Experiment 20000071 PARAMETER Experiment Name: At_100uM_ABA_Mutants_cDNA_P Parameter: Plant Line Value: CS8104
  misc_feature: MA Experiment 20000071 PARAMETER Experiment Name: At_100uM_ABA_Mutants_cDNA_P Parameter: Timepoint (hr) Value: 6
  misc_feature: MA Experiment 20000071 PARAMETER Experiment Name: At_100uM_ABA_Mutants_cDNA_P Parameter: Tissue Value: Aerial
  misc_feature: MA Experiment 20000071 PARAMETER Experiment Name: At_100uM_ABA_Mutants_cDNA_P Parameter: Treatment Value: 100uM ABA vs. No Treatment
  misc_feature: MA Experiment ID: 20000072 Result: Down-regulated in Transcription
  misc_feature: MA Experiment 20000072 PARAMETER Experiment Name: At_100uM_ABA_Mutants_cDNA_P Parameter: Plant Line Value: CS8105
  misc_feature: MA Experiment 20000072 PARAMETER Experiment Name: At_100uM_ABA_Mutants_cDNA_P Parameter: Timepoint (hr) Value: 6
  misc_feature: MA Experiment 20000072 PARAMETER Experiment Name: At_100uM_ABA_Mutants_cDNA_P Parameter: Tissue Value: Aerial
  misc_feature: MA Experiment 20000072 PARAMETER Experiment Name: At_100uM_ABA_Mutants_cDNA_P Parameter: Treatment Value: 100uM ABA vs. No Treatment
  misc_feature: MA Experiment ID: 20000086 Result: Down-regulated in Transcription
  misc_feature: MA Experiment 20000086 PARAMETER Experiment Name: At_100uM_ABA_Mutants_cDNA_P Parameter: Plant Line Value: CS22
  misc_feature: MA Experiment 20000086 PARAMETER Experiment Name: At_100uM_ABA_Mutants_cDNA_P Parameter: Timepoint (hr) Value: 6
  misc_feature: MA Experiment 20000086 PARAMETER Experiment Name: At_100uM_ABA_Mutants_cDNA_P Parameter: Tissue Value: Aerial
  misc_feature: MA Experiment 20000086 PARAMETER Experiment Name: At_100uM_ABA_Mutants_cDNA_P Parameter: Treatment Value: 100uM ABA vs. No Treatment
  misc_feature: MA Experiment ID: 20000087 Result: Down-regulated in Transcription
  misc_feature: MA Experiment 20000087 PARAMETER Experiment Name: At_100uM_ABA_Mutants_cDNA_P Parameter: Plant Line Value: WS
  misc_feature: MA Experiment 20000087 PARAMETER Experiment Name: At_100uM_ABA_Mutants_cDNA_P Parameter: Timepoint (hr) Value: 6
  misc_feature: MA Experiment 20000087 PARAMETER Experiment Name: At_100uM_ABA_Mutants_cDNA_P Parameter: Tissue Value: Aerial
  misc_feature: MA Experiment 20000087 PARAMETER Experiment Name: At_100uM_ABA_Mutants_cDNA_P Parameter: Treatment Value: 100uM ABA vs. No Treatment
  misc_feature: MA Experiment ID: 20000088 Result: Down-regulated in Transcription
  misc_feature: MA Experiment 20000088 PARAMETER Experiment Name: At_100uM_ABA_Mutants_cDNA_P Parameter: Plant Line Value: Landsberg
  misc_feature: MA Experiment 20000088 PARAMETER Experiment Name: At_100uM_ABA_Mutants_cDNA_P Parameter: Timepoint (hr) Value: 6
  misc_feature: MA Experiment 20000088 PARAMETER Experiment Name: At_100uM_ABA_Mutants_cDNA_P Parameter: Tissue Value: Aerial
  misc_feature: MA Experiment 20000088 PARAMETER Experiment Name: At_100uM_ABA_Mutants_cDNA_P Parameter: Treatment Value: 100uM ABA vs. No Treatment
  misc_feature: MA Experiment ID: 20000089 Result: Down-regulated in Transcription
  misc_feature: MA Experiment ID: 20000090 Result: Down-regulated in Transcription
  misc_feature: MA Experiment ID: 20000113 Result: Up-regulated in Transcription
  misc_feature: MA Experiment 20000113 PARAMETER Experiment Name: At_42deg_Heat_cDNA_P Parameter: Temperature (deg C) Value: 42 vs. 22
  misc_feature: MA Experiment 20000113 PARAMETER Experiment Name: At_42deg_Heat_cDNA_P Parameter: Timepoint (hr) Value: 8
  misc_feature: MA Experiment 20000113 PARAMETER Experiment Name: At_42deg_Heat_cDNA_P Parameter: Tissue Value: Aerial
  misc_feature: MA Experiment ID: 20000117 Result: Down-regulated in Transcription
  misc_feature: MA Experiment 20000117 PARAMETER Experiment Name: At_100uM_ABA_Mutants_cDNA_P Parameter: Plant Line Value: Columbia
  misc_feature: MA Experiment 20000117 PARAMETER Experiment Name: At_100uM_ABA_Mutants_cDNA_P Parameter: Timepoint (hr) Value: 6
  misc_feature: MA Experiment 20000117 PARAMETER Experiment Name: At_100uM_ABA_Mutants_cDNA_P Parameter: Tissue Value: Aerial
  misc_feature: MA Experiment 20000117 PARAMETER Experiment Name: At_100uM_ABA_Mutants_cDNA_P Parameter: Treatment Value: 100uM ABA vs. No Treatment
  misc_feature: MA Experiment ID: 20000179 Result: Up-regulated in Transcription
  misc_feature: MA Experiment 20000179 PARAMETER Experiment Name: At_Germinating_Seeds_P Parameter: Age (hr) Value: 6 vs. 0
  misc_feature: MA Experiment 20000179 PARAMETER Experiment Name: At_Germinating_Seeds_P Parameter: Tissue Value: Germinating Seeds
  misc_feature: MA Experiment ID: 20000180 Result: Up-regulated in Transcription
  misc_feature: MA Experiment 20000180 PARAMETER Experiment Name: At_Germinating_Seeds_P Parameter: Age (hr) Value: 24 vs. 0
  misc_feature: MA Experiment 20000180 PARAMETER Experiment Name: At_Germinating_Seeds_P Parameter: Tissue Value: Germinating Seeds
  misc_feature: MA Experiment ID: 20000184 Result: Up-regulated in Transcription
  misc_feature: MA Experiment 20000184 PARAMETER Experiment Name: At_Shoots__P Parameter: Age (day) Value: 7
  misc_feature: MA Experiment 20000184 PARAMETER Experiment Name: At_Shoots__P Parameter: Tissue Value: Shoots vs. Whole Plant
  misc_feature: MA Experiment ID: 20000185 Result: Down-regulated in Transcription
  misc_feature: MA Experiment 20000185 PARAMETER Experiment Name: At_Roots__P Parameter: Age (day) Value: 7 vs. 21
  misc_feature: MA Experiment 20000185 PARAMETER Experiment Name: At_Roots__P Parameter: Organism Value: A. thaliana
  misc_feature: MA Experiment 20000185 PARAMETER Experiment Name: At_Roots__P Parameter: Tissue Value: Roots vs. Whole Plant
  misc_feature: MA Experiment ID: 20000227 Result: Down-regulated in Transcription
  misc_feature: MA Experiment 20000227 PARAMETER Experiment Name: At_Root-Tips-vs-Tops_P Parameter: Tissue Value: Root Tips vs. Root Tops
  misc_feature: MA Experiment ID: 20000438 Result: Up-regulated in Transcription
  misc_feature: MA Experiment 20000438 PARAMETER Experiment Name: At_Shoots__P Parameter: Age (day) Value: 14
  misc_feature: MA Experiment 20000438 PARAMETER Experiment Name: At_Shoots__P Parameter: Tissue Value: Shoots vs. Whole Plant
  misc_feature: MA Experiment ID: 20000439 Result: Down-regulated in Transcription
  misc_feature: MA Experiment 20000439 PARAMETER Experiment Name: At_Roots__P Parameter: Age (day) Value: 14 vs. 21
  misc_feature: MA Experiment 20000439 PARAMETER Experiment Name: At_Roots__P Parameter: Organism Value: A. thaliana
  misc_feature: MA Experiment 20000439 PARAMETER Experiment Name: At_Roots__P Parameter: Tissue Value: Roots vs. Whole Plant
  misc_feature: MA Experiment ID: 20000573 Result: Down-regulated in Transcription
  misc_feature: MA Experiment 20000573 PARAMETER Experiment Name: At_100uM_ABA_Mutants__P Parameter: Organism Value: A. thaliana
  misc_feature: MA Experiment 20000573 PARAMETER Experiment Name: At_100uM_ABA_Mutants__P Parameter: Plant Line Value: CS22 vs. Ler wt
  misc_feature: MA Experiment 20000573 PARAMETER Experiment Name: At_100uM_ABA_Mutants__P Parameter: Timepoint (hr) Value: N/A
  misc_feature: MA Experiment 20000573 PARAMETER Experiment Name: At_100uM_ABA_Mutants__P Parameter: Tissue Value: Whole Plant
  misc_feature: MA Experiment 20000573 PARAMETER Experiment Name: At_100uM_ABA_Mutants__P Parameter: Treatment Value: None
  misc_feature: MA Experiment ID: 20001248 Result: Down-regulated in Transcription
  misc_feature: MA Experiment 20001248 PARAMETER Experiment Name: At_Far-red-induction_P Parameter: Age (day) Value: 7
  misc_feature: MA Experiment 20001248 PARAMETER Experiment Name: At_Far-red-induction_P Parameter: Light Value: Far-red vs. White
  misc_feature: MA Experiment 20001248 PARAMETER Experiment Name: At_Far-red-induction_P Parameter: Organism Value: A. thaliana
  misc_feature: MA Experiment 20001248 PARAMETER Experiment Name: At_Far-red-induction_P Parameter: Plant Line Value: Columbia
  misc_feature: MA Experiment 20001248 PARAMETER Experiment Name: At_Far-red-induction_P Parameter: Timepoint (hr) Value: 4
  misc_feature: MA Experiment 20001248 PARAMETER Experiment Name: At_Far-red-induction_P Parameter: Tissue Value: Whole Plant
  misc_feature: MA Experiment ID: 20001450 Result: Down-regulated in Transcription
  misc_feature: MA Experiment 20001450 PARAMETER Experiment Name: At_Far-red-induction_P Parameter: Age (day) Value: 7
  misc_feature: MA Experiment 20001450 PARAMETER Experiment Name: At_Far-red-induction_P Parameter: Light Value: Far-red vs. White
  misc_feature: MA Experiment 20001450 PARAMETER Experiment Name: At_Far-red-induction_P Parameter: Organism Value: A. thaliana
  misc_feature: MA Experiment 20001450 PARAMETER Experiment Name: At_Far-red-induction_P Parameter: Plant Line Value: Columbia
  misc_feature: MA Experiment 20001450 PARAMETER Experiment Name: At_Far-red-induction_P Parameter: Timepoint (hr) Value: 8
  misc_feature: MA Experiment 20001450 PARAMETER Experiment Name: At_Far-red-induction_P Parameter: Tissue Value: Whole Plant
  misc_feature: MA Experiment ID: 20001557 Result: Down-regulated in Transcription
  misc_feature: MA Experiment 20001557 PARAMETER Experiment Name: At_Drought_Soil_Dry_P Parameter: Age (day) Value: 27
  misc_feature: MA Experiment 20001557 PARAMETER Experiment Name: At_Drought_Soil_Dry_P Parameter: Organism Value: A. thaliana
  misc_feature: MA Experiment 20001557 PARAMETER Experiment Name: At_Drought_Soil_Dry_P Parameter: Plant Line Value: WS
  misc_feature: MA Experiment 20001557 PARAMETER Experiment Name: At_Drought_Soil_Dry_P Parameter: Post Timepoint (hr) Value: 3
  misc_feature: MA Experiment 20001557 PARAMETER Experiment Name: At_Drought_Soil_Dry_P Parameter: Post-Treatment Value: Re-Water vs. No Drought
  misc_feature: MA Experiment 20001557 PARAMETER Experiment Name: At_Drought_Soil_Dry_P Parameter: Timepoint (day) Value: 13
  misc_feature: MA Experiment 20001557 PARAMETER Experiment Name: At_Drought_Soil_Dry_P Parameter: Treatment Value: Drought vs. No Drought
  misc_feature: MA Experiment ID: 20001905 Result: Down-regulated in Transcription
  misc_feature: MA Experiment 20001905 PARAMETER Experiment Name: At_Drought_Reproduction_P Parameter: Age (day) Value: 40
  misc_feature: MA Experiment 20001905 PARAMETER Experiment Name: At_Drought_Reproduction_P Parameter: Organism Value: A. thaliana
  misc_feature: MA Experiment 20001905 PARAMETER Experiment Name: At_Drought_Reproduction_P Parameter: Plant Line Value: WS
  misc_feature: MA Experiment 20001905 PARAMETER Experiment Name: At_Drought_Reproduction_P Parameter: Timepoint (day) Value: 10
  misc_feature: MA Experiment 20001905 PARAMETER Experiment Name: At_Drought_Reproduction_P Parameter: Tissue Value: Rosettes
  misc_feature: MA Experiment 20001905 PARAMETER Experiment Name: At_Drought_Reproduction_P Parameter: Treatment Value: Drought vs. No Drought
  misc_feature: MA Experiment ID: 20001908 Result: Down-regulated in Transcription
  misc_feature: MA Experiment 20001908 PARAMETER Experiment Name: At_Drought_Reproduction_P Parameter: Age (day) Value: 40
  misc_feature: MA Experiment 20001908 PARAMETER Experiment Name: At_Drought_Reproduction_P Parameter: Organism Value: A. thaliana
  misc_feature: MA Experiment 20001908 PARAMETER Experiment Name: At_Drought_Reproduction_P Parameter: Plant Line Value: WS
  misc_feature: MA Experiment 20001908 PARAMETER Experiment Name: At_Drought_Reproduction_P Parameter: Timepoint (day) Value: 10
  misc_feature: MA Experiment 20001908 PARAMETER Experiment Name: At_Drought_Reproduction_P Parameter: Tissue Value: Siliques
  misc_feature: MA Experiment 20001908 PARAMETER Experiment Name: At_Drought_Reproduction_P Parameter: Treatment Value: Drought vs. No Drought
gaggatgtctctattgtttcttcttcactctttttgccacaatctctgttccaagaatcgcgagtatggcgaccacacttcattgtctctccacactccatcttcttcctcgcactcatcaccctaaaaccctaaactctctcaaaccaatcaccaccaaatcacaaccatgtaaaaccccagaaataccctccactcccaacgctcttcagctccttaaatcatcctctctccctctcgcagtcatcgcattgcctttcttcctcgacccacaggatgcagcagcagctggaggagaattcggaatattagaagggagatcatttgcgttgatacacccaattgtgatgggaggtttatttgcatacactctttggactggttacttaggttggcaatggagacgtgtccgtacgatacagagtgagattagtgatctcaagaaacagcttaaaccaactcctgtttcccctgatggttccacagccgttgattcttcgtcgcctccttctacgactgagcttcagatccaacggctaactgaagagaggaaagagttggtcaaagggtcttacagagacaaacactttgacgctggctctgttttgttaggtttcggtgttttggaagctgtctttggtggtgttaacacttatcttcgtactggtaaactcttccccggtcctcatctttacgccggtgcaggaataacggtgttgtgggcggcggcggcagcattggtgccggcaatgcagaaagggaacgatacggcgaggagtctacatatagcgttgaatgcagtaaatgttcttcttttcatttggcaaatcccaacaggtcttgatatcgttcttaaggtctttgagttcactaaatggccatagatattaatatttggatgtgttatttatgagtttgtgactctatatatgcaaatattcttcaactttttttgaggtttgtagatgatgaattgtaaaaatcatgcaattagagtggatattg

SEQ ID NO: 27242 - protein, 293 aa, Arabidopsis thaliana
  peptide (1)..(293): Ceres Seq. ID no. 13592441
  misc_feature (180)..(286): Homolog of NCBI NO: 23042896 NR Description: hypothetical protein [Trichodesmium erythraeum
  misc_feature (183)..(286): Homolog of NCBI NO: 17229007 NR Description: hypothetical protein [Nostoc sp. PCC 7120]
  misc_feature (181)..(287): Homolog of NCBI NO: 33864786 NR Description: conserved hypothetical protein [Synechococcus sp.
  misc_feature (181)..(286): Homolog of NCBI NO: 16330950 NR Description: hypothetical protein [Synechocystis sp. PCC 6803]
  misc_feature (174)..(286): Homolog of NCBI NO: 17230241 NR Description: hypothetical protein [Nostoc sp. PCC 7120]
  misc_feature (174)..(286): Homolog of NCBI NO: 23130190 NR Description: hypothetical protein [Nostoc punctiforme]
  misc_feature (112)..(142): Homolog of NCBI NO: 22299036 NR Description: ORF_ID:tll1493~hypothetical protein
  misc_feature (181)..(286): Homolog of NCBI NO: 22299036 NR Description: ORF_ID:tll1493~hypothetical protein
  misc_feature (22)..(293): Homolog of NCBI NO: 15228623 NR Description: expressed protein [Arabidopsis thaliana]
  misc_feature (180)..(286): Homolog of NCBI NO: 23042896 NR Description: hypothetical protein [Trichodesmium erythraeum
  misc_feature (183)..(286): Homolog of NCBI NO: 17229007 NR Description: hypothetical protein [Nostoc sp. PCC 7120]
  misc_feature (181)..(287): Homolog of NCBI NO: 33864786 NR Description: conserved hypothetical protein [Synechococcus sp.
  misc_feature (181)..(286): Homolog of NCBI NO: 16330950 NR Description: hypothetical protein [Synechocystis sp. PCC 6803]
  misc_feature (174)..(286): Homolog of NCBI NO: 17230241 NR Description: hypothetical protein [Nostoc sp. PCC 7120]
  misc_feature (174)..(286): Homolog of NCBI NO: 23130190 NR Description: hypothetical protein [Nostoc punctiforme]
  misc_feature (112)..(142): Homolog of NCBI NO: 22299036 NR Description: ORF_ID:tll1493~hypothetical protein
  misc_feature (181)..(286): Homolog of NCBI NO: 22299036 NR Description: ORF_ID:tll1493~hypothetical protein
  misc_feature (22)..(293): Homolog of NCBI NO: 15228623 NR Description: expressed protein [Arabidopsis thaliana]
GCLYCFFFTLFATISVPRIASMATTLHCLSTLHLLPRTHHPKTLNSLKPITTKSQPCKTPEIPSTPNALQLLKSSSLPLAVIALPFFLDPQDAAAAGGEFGILEGRSFALIHPIVMGGLFAYTLWTGYLGWQWRRVRTIQSEISDLKKQLKPTPVSPDGSTAVDSSSPPSTTELQIQRLTEERKELVKGSYRDKHFDAGSVLLGFGVLEAVFGGVNTYLRTGKLFPGPHLYAGAGITVLWAAAAALVPAMQKGNDTARSLHIALNAVNVLLFIWQIPTGLDIVLKVFEFTKWP

SEQ ID NO: 27243 - protein, 272 aa, Arabidopsis thaliana
  peptide (1)..(272): Ceres Seq. ID no. 13592442
  misc_feature (159)..(265): Homolog of NCBI NO: 23042896 NR Description: hypothetical protein [Trichodesmium erythraeum
  misc_feature (162)..(265): Homolog of NCBI NO: 17229007 NR Description: hypothetical protein [Nostoc sp. PCC 7120]
  misc_feature (160)..(266): Homolog of NCBI NO: 33864786 NR Description: conserved hypothetical protein [Synechococcus sp.
  misc_feature (160)..(265): Homolog of NCBI NO: 16330950 NR Description: hypothetical protein [Synechocystis sp. PCC 6803]
  misc_feature (153)..(265): Homolog of NCBI NO: 17230241 NR Description: hypothetical protein [Nostoc sp. PCC 7120]
  misc_feature (153)..(265): Homolog of NCBI NO: 23130190 NR Description: hypothetical protein [Nostoc punctiforme]
  misc_feature (91)..(121): Homolog of NCBI NO: 22299036 NR Description: ORF_ID:tll1493~hypothetical protein
  misc_feature (160)..(265): Homolog of NCBI NO: 22299036 NR Description: ORF_ID:tll1493~hypothetical protein
  misc_feature (1)..(272): Homolog of NCBI NO: 15228623 NR Description: expressed protein [Arabidopsis thaliana]
  misc_feature (159)..(265): Homolog of NCBI NO: 23042896 NR Description: hypothetical protein [Trichodesmium erythraeum
  misc_feature (162)..(265): Homolog of NCBI NO: 17229007 NR Description: hypothetical protein [Nostoc sp. PCC 7120]
  misc_feature (160)..(266): Homolog of NCBI NO: 33864786 NR Description: conserved hypothetical protein [Synechococcus sp.
  misc_feature (160)..(265): Homolog of NCBI NO: 16330950 NR Description: hypothetical protein [Synechocystis sp. PCC 6803]
  misc_feature (153)..(265): Homolog of NCBI NO: 17230241 NR Description: hypothetical protein [Nostoc sp. PCC 7120]
  misc_feature (153)..(265): Homolog of NCBI NO: 23130190 NR Description: hypothetical protein [Nostoc punctiforme]
  misc_feature (91)..(121): Homolog of NCBI NO: 22299036 NR Description: ORF_ID:tll1493~hypothetical protein
  misc_feature (160)..(265): Homolog of NCBI NO: 22299036 NR Description: ORF_ID:tll1493~hypothetical protein
  misc_feature (1)..(272): Homolog of NCBI NO: 15228623 NR Description: expressed protein [Arabidopsis thaliana]
MATTLHCLSTLHLLPRTHHPKTLNSLKPITTKSQPCKTPEIPSTPNALQLLKSSSLPLAVIALPFFLDPQDAAAAGGEFGILEGRSFALIHPIVMGGLFAYTLWTGYLGWQWRRVRTIQSEISDLKKQLKPTPVSPDGSTAVDSSSPPSTTELQIQRLTEERKELVKGSYRDKHFDAGSVLLGFGVLEAVFGGVNTYLRTGKLFPGPHLYAGAGITVLWAAAAALVPAMQKGNDTARSLHIALNAVNVLLFIWQIPTGLDIVLKVFEFTKWP

SEQ ID NO: 27244 - protein, 178 aa, Arabidopsis thaliana
  peptide (1)..(178): Ceres Seq. ID no. 13592443
  misc_feature (65)..(171): Homolog of NCBI NO: 23042896 NR Description: hypothetical protein [Trichodesmium erythraeum
  misc_feature (68)..(171): Homolog of NCBI NO: 17229007 NR Description: hypothetical protein [Nostoc sp. PCC 7120]
  misc_feature (66)..(172): Homolog of NCBI NO: 33864786 NR Description: conserved hypothetical protein [Synechococcus sp.
  misc_feature (66)..(171): Homolog of NCBI NO: 16330950 NR Description: hypothetical protein [Synechocystis sp. PCC 6803]
  misc_feature (59)..(171): Homolog of NCBI NO: 17230241 NR Description: hypothetical protein [Nostoc sp. PCC 7120]
  misc_feature (59)..(171): Homolog of NCBI NO: 23130190 NR Description: hypothetical protein [Nostoc punctiforme]
  misc_feature (1)..(27): Homolog of NCBI NO: 22299036 NR Description: ORF_ID:tll1493~hypothetical protein
  misc_feature (66)..(171): Homolog of NCBI NO: 22299036 NR Description: ORF_ID:tll1493~hypothetical protein
  misc_feature (1)..(178): Homolog of NCBI NO: 15228623 NR Description: expressed protein [Arabidopsis thaliana]
  misc_feature (65)..(171): Homolog of NCBI NO: 23042896 NR Description: hypothetical protein [Trichodesmium erythraeum
  misc_feature (68)..(171): Homolog of NCBI NO: 17229007 NR Description: hypothetical protein [Nostoc sp. PCC 7120]
  misc_feature (66)..(172): Homolog of NCBI NO: 33864786 NR Description: conserved hypothetical protein [Synechococcus sp.
  misc_feature (66)..(171): Homolog of NCBI NO: 16330950 NR Description: hypothetical protein [Synechocystis sp. PCC 6803]
  misc_feature (59)..(171): Homolog of NCBI NO: 17230241 NR Description: hypothetical protein [Nostoc sp. PCC 7120]
  misc_feature (59)..(171): Homolog of NCBI NO: 23130190 NR Description: hypothetical protein [Nostoc punctiforme]
  misc_feature (1)..(27): Homolog of NCBI NO: 22299036 NR Description: ORF_ID:tll1493~hypothetical protein
  misc_feature (66)..(171): Homolog of NCBI NO: 22299036 NR Description: ORF_ID:tll1493~hypothetical protein
  misc_feature (1)..(178): Homolog of NCBI NO: 15228623 NR Description: expressed protein [Arabidopsis thaliana]
MGGLFAYTLWTGYLGWQWRRVRTIQSEISDLKKQLKPTPVSPDGSTAVDSSSPPSTTELQIQRLTEERKELVKGSYRDKHFDAGSVLLGFGVLEAVFGGVNTYLRTGKLFPGPHLYAGAGITVLWAAAAALVPAMQKGNDTARSLHIALNAVNVLLFIWQIPTGLDIVLKVFEFTKWP

SEQ ID NO: 27245 - DNA, 678 bp, Arabidopsis thaliana
  misc_feature (1)..(678): Ceres Seq. ID no. 13496842
  misc_feature: MA Experiment ID: 108434 Result: Down-regulated in Transcription
  misc_feature: MA Experiment 108434 PARAMETER Experiment Name: At_Root_Tips_cDNA_P Parameter: Tissue Value: Root Tips
  misc_feature: MA Experiment ID: 108462 Result: Up-regulated in Transcription
  misc_feature: MA Experiment 108462 PARAMETER Experiment Name: At_Germinating_Seeds_cDNA_P Parameter: Age (day) Value: 2 vs. 0
  misc_feature: MA Experiment 108462 PARAMETER Experiment Name: At_Germinating_Seeds_cDNA_P Parameter: Tissue Value: Germinating Seeds
  misc_feature: MA Experiment ID: 108464 Result: Up-regulated in Transcription
  misc_feature: MA Experiment 108464 PARAMETER Experiment Name: At_Germinating_Seeds_cDNA_P Parameter: Age (day) Value: 4 vs. 0
  misc_feature: MA Experiment 108464 PARAMETER Experiment Name: At_Germinating_Seeds_cDNA_P Parameter: Tissue Value: Germinating Seeds
  misc_feature: MA Experiment ID: 108605 Result: Up-regulated in Transcription
  misc_feature: MA Experiment 108605 PARAMETER Experiment Name: At_100uM_ABA_cDNA_P Parameter: Timepoint (hr) Value: 6
  misc_feature: MA Experiment 108605 PARAMETER Experiment Name: At_100uM_ABA_cDNA_P Parameter: Tissue Value: Aerial
  misc_feature: MA Experiment 108605 PARAMETER Experiment Name: At_100uM_ABA_cDNA_P Parameter: Treatment Value: 100uM ABA vs. No Treatment
  misc_feature: MA Experiment ID: 108607 Result: Up-regulated in Transcription
  misc_feature: MA Experiment 108607 PARAMETER Experiment Name: At_100uM_ABA_cDNA_P Parameter: Timepoint (hr) Value: 4
  misc_feature: MA Experiment 108607 PARAMETER Experiment Name: At_100uM_ABA_cDNA_P Parameter: Tissue Value: Aerial
  misc_feature: MA Experiment 108607 PARAMETER Experiment Name: At_100uM_ABA_cDNA_P Parameter: Treatment Value: 100uM ABA vs. No Treatment
  misc_feature: MA Experiment ID: 108608 Result: Up-regulated in Transcription
  misc_feature: MA Experiment 108608 PARAMETER Experiment Name: At_100uM_ABA_cDNA_P Parameter: Timepoint (hr) Value: 1
  misc_feature: MA Experiment 108608 PARAMETER Experiment Name: At_100uM_ABA_cDNA_P Parameter: Tissue Value: Aerial
  misc_feature: MA Experiment 108608 PARAMETER Experiment Name: At_100uM_ABA_cDNA_P Parameter: Treatment Value: 100uM ABA vs. No Treatment
  misc_feature: MA Experiment ID: 108609 Result: Up-regulated in Transcription
  misc_feature: MA Experiment 108609 PARAMETER Experiment Name: At_100uM_ABA_cDNA_P Parameter: Timepoint (hr) Value: 24
  misc_feature: MA Experiment 108609 PARAMETER Experiment Name: At_100uM_ABA_cDNA_P Parameter: Tissue Value: Aerial
  misc_feature: MA Experiment 108609 PARAMETER Experiment Name: At_100uM_ABA_cDNA_P Parameter: Treatment Value: 100uM ABA vs. No Treatment
  misc_feature: MA Experiment ID: 20000069 Result: Up-regulated in Transcription
  misc_feature: MA Experiment 20000069 PARAMETER Experiment Name: At_100uM_ABA_Mutants_cDNA_P Parameter: Plant Line Value: CS23
  misc_feature: MA Experiment 20000069 PARAMETER Experiment Name: At_100uM_ABA_Mutants_cDNA_P Parameter: Timepoint (hr) Value: 6
  misc_feature: MA Experiment 20000069 PARAMETER Experiment Name: At_100uM_ABA_Mutants_cDNA_P Parameter: Tissue Value: Aerial
  misc_feature: MA Experiment 20000069 PARAMETER Experiment Name: At_100uM_ABA_Mutants_cDNA_P Parameter: Treatment Value: 100uM ABA vs. No Treatment
  misc_feature: MA Experiment ID: 20000070 Result: Up-regulated in Transcription
  misc_feature: MA Experiment 20000070 PARAMETER Experiment Name: At_100uM_ABA_Mutants_cDNA_P Parameter: Plant Line Value: CS24
  misc_feature: MA Experiment 20000070 PARAMETER Experiment Name: At_100uM_ABA_Mutants_cDNA_P Parameter: Timepoint (hr) Value: 6
  misc_feature: MA Experiment 20000070 PARAMETER Experiment Name: At_100uM_ABA_Mutants_cDNA_P Parameter: Tissue Value: Aerial
  misc_feature: MA Experiment 20000070 PARAMETER Experiment Name: At_100uM_ABA_Mutants_cDNA_P Parameter: Treatment Value: 100uM ABA vs. No Treatment
  misc_feature: MA Experiment ID: 20000071 Result: Up-regulated in Transcription
  misc_feature: MA Experiment 20000071 PARAMETER Experiment Name: At_100uM_ABA_Mutants_cDNA_P Parameter: Plant Line Value: CS8104
  misc_feature: MA Experiment 20000071 PARAMETER Experiment Name: At_100uM_ABA_Mutants_cDNA_P Parameter: Timepoint (hr) Value: 6
  misc_feature: MA Experiment 20000071 PARAMETER Experiment Name: At_100uM_ABA_Mutants_cDNA_P Parameter: Tissue Value: Aerial
  misc_feature: MA Experiment 20000071 PARAMETER Experiment Name: At_100uM_ABA_Mutants_cDNA_P Parameter: Treatment Value: 100uM ABA vs. No Treatment
  misc_feature: MA Experiment ID: 20000072 Result: Up-regulated in Transcription
  misc_feature: MA Experiment 20000072 PARAMETER Experiment Name: At_100uM_ABA_Mutants_cDNA_P Parameter: Plant Line Value: CS8105
  misc_feature: MA Experiment 20000072 PARAMETER Experiment Name: At_100uM_ABA_Mutants_cDNA_P Parameter: Timepoint (hr) Value: 6
  misc_feature: MA Experiment 20000072 PARAMETER Experiment Name: At_100uM_ABA_Mutants_cDNA_P Parameter: Tissue Value: Aerial
  misc_feature: MA Experiment 20000072 PARAMETER Experiment Name: At_100uM_ABA_Mutants_cDNA_P Parameter: Treatment Value: 100uM ABA vs. No Treatment
  misc_feature: MA Experiment ID: 20000086 Result: Up-regulated in Transcription
  misc_feature: MA Experiment 20000086 PARAMETER Experiment Name: At_100uM_ABA_Mutants_cDNA_P Parameter: Plant Line Value: CS22
  misc_feature: MA Experiment 20000086 PARAMETER Experiment Name: At_100uM_ABA_Mutants_cDNA_P Parameter: Timepoint (hr) Value: 6
  misc_feature: MA Experiment 20000086 PARAMETER Experiment Name: At_100uM_ABA_Mutants_cDNA_P Parameter: Tissue Value: Aerial
  misc_feature: MA Experiment 20000086 PARAMETER Experiment Name: At_100uM_ABA_Mutants_cDNA_P Parameter: Treatment Value: 100uM ABA vs. No Treatment
  misc_feature: MA Experiment ID: 20000087 Result: Up-regulated in Transcription
  misc_feature: MA Experiment 20000087 PARAMETER Experiment Name: At_100uM_ABA_Mutants_cDNA_P Parameter: Plant Line Value: WS
  misc_feature: MA Experiment 20000087 PARAMETER Experiment Name: At_100uM_ABA_Mutants_cDNA_P Parameter: Timepoint (hr) Value: 6
  misc_feature: MA Experiment 20000087 PARAMETER Experiment Name: At_100uM_ABA_Mutants_cDNA_P Parameter: Tissue Value: Aerial
  misc_feature: MA Experiment 20000087 PARAMETER Experiment Name: At_100uM_ABA_Mutants_cDNA_P Parameter: Treatment Value: 100uM ABA vs. No Treatment
  misc_feature: MA Experiment ID: 20000088 Result: Up-regulated in Transcription
  misc_feature: MA Experiment 20000088 PARAMETER Experiment Name: At_100uM_ABA_Mutants_cDNA_P Parameter: Plant Line Value: Landsberg
  misc_feature: MA Experiment 20000088 PARAMETER Experiment Name: At_100uM_ABA_Mutants_cDNA_P Parameter: Timepoint (hr) Value: 6
  misc_feature: MA Experiment 20000088 PARAMETER Experiment Name: At_100uM_ABA_Mutants_cDNA_P Parameter: Tissue Value: Aerial
  misc_feature: MA Experiment 20000088 PARAMETER Experiment Name: At_100uM_ABA_Mutants_cDNA_P Parameter: Treatment Value: 100uM ABA vs. No Treatment
  misc_feature: MA Experiment ID: 20000093 Result: Down-regulated in Transcription
  misc_feature: MA Experiment 20000093 PARAMETER Experiment Name: At_42deg_Heat_cDNA_P Parameter: Temperature (deg C) Value: 42 vs. 22
  misc_feature: MA Experiment 20000093 PARAMETER Experiment Name: At_42deg_Heat_cDNA_P Parameter: Timepoint (hr) Value: 0.5
  misc_feature: MA Experiment 20000093 PARAMETER Experiment Name: At_42deg_Heat_cDNA_P Parameter: Tissue Value: Aerial
  misc_feature: MA Experiment ID: 20000111 Result: Down-regulated in Transcription
  misc_feature: MA Experiment 20000111 PARAMETER Experiment Name: At_42deg_Heat_cDNA_P Parameter: Temperature (deg C) Value: 42 vs. 22
  misc_feature: MA Experiment 20000111 PARAMETER Experiment Name: At_42deg_Heat_cDNA_P Parameter: Timepoint (hr) Value: 6
  misc_feature: MA Experiment 20000111 PARAMETER Experiment Name: At_42deg_Heat_cDNA_P Parameter: Tissue Value: Aerial
  misc_feature: MA Experiment ID: 20000112 Result: Down-regulated in Transcription
  misc_feature: MA Experiment 20000112 PARAMETER Experiment Name: At_42deg_Heat_cDNA_P Parameter: Temperature (deg C) Value: 42 vs. 22
  misc_feature: MA Experiment 20000112 PARAMETER Experiment Name: At_42deg_Heat_cDNA_P Parameter: Timepoint (hr) Value: 2
  misc_feature: MA Experiment 20000112 PARAMETER Experiment Name: At_42deg_Heat_cDNA_P Parameter: Tissue Value: Aerial
  misc_feature: MA Experiment ID: 20000113 Result: Down-regulated in Transcription
  misc_feature: MA Experiment 20000113 PARAMETER Experiment Name: At_42deg_Heat_cDNA_P Parameter: Temperature (deg C) Value: 42 vs. 22
  misc_feature: MA Experiment 20000113 PARAMETER Experiment Name: At_42deg_Heat_cDNA_P Parameter: Timepoint (hr) Value: 8
  misc_feature: MA Experiment 20000113 PARAMETER Experiment Name: At_42deg_Heat_cDNA_P Parameter: Tissue Value: Aerial
  misc_feature: MA Experiment ID: 20000117 Result: Up-regulated in Transcription
  misc_feature: MA Experiment 20000117 PARAMETER Experiment Name: At_100uM_ABA_Mutants_cDNA_P Parameter: Plant Line Value: Columbia
  misc_feature: MA Experiment 20000117 PARAMETER Experiment Name: At_100uM_ABA_Mutants_cDNA_P Parameter: Timepoint (hr) Value: 6
  misc_feature: MA Experiment 20000117 PARAMETER Experiment Name: At_100uM_ABA_Mutants_cDNA_P Parameter: Tissue Value: Aerial
  misc_feature: MA Experiment 20000117 PARAMETER Experiment Name: At_100uM_ABA_Mutants_cDNA_P Parameter: Treatment Value: 100uM ABA vs. No Treatment
  misc_feature: MA Experiment ID: 20000144 Result: Down-regulated in Transcription
  misc_feature: MA Experiment 20000144 PARAMETER Experiment Name: At_42deg_Heat_cDNA_P Parameter: Temperature (deg C) Value: 42 vs. 22
  misc_feature: MA Experiment 20000144 PARAMETER Experiment Name: At_42deg_Heat_cDNA_P Parameter: Timepoint (hr) Value: 1
  misc_feature: MA Experiment 20000144 PARAMETER Experiment Name: At_42deg_Heat_cDNA_P Parameter: Tissue Value: Aerial
  misc_feature: MA Experiment ID: 20000184 Result: Up-regulated in Transcription
  misc_feature: MA Experiment 20000184 PARAMETER Experiment Name: At_Shoots__P Parameter: Age (day) Value: 7
  misc_feature: MA Experiment 20000184 PARAMETER Experiment Name: At_Shoots__P Parameter: Tissue Value: Shoots vs. Whole Plant
  misc_feature: MA Experiment ID: 20000185 Result: Up-regulated in Transcription
  misc_feature: MA Experiment 20000185 PARAMETER Experiment Name: At_Roots__P Parameter: Age (day) Value: 7 vs. 21
  misc_feature: MA Experiment 20000185 PARAMETER Experiment Name: At_Roots__P Parameter: Organism Value: A. thaliana
  misc_feature: MA Experiment 20000185 PARAMETER Experiment Name: At_Roots__P Parameter: Tissue Value: Roots vs. Whole Plant
  misc_feature: MA Experiment ID: 20000267 Result: Up-regulated in Transcription
  misc_feature: MA Experiment 20000267 PARAMETER Experiment Name: At_Drought_P Parameter: Age (day) Value: 7
  misc_feature: MA Experiment 20000267 PARAMETER Experiment Name: At_Drought_P Parameter: Organism Value: A. thaliana
  misc_feature: MA Experiment 20000267 PARAMETER Experiment Name: At_Drought_P Parameter: Plant Line Value: WS
  misc_feature: MA Experiment 20000267 PARAMETER Experiment Name: At_Drought_P Parameter: Timepoint (hr) Value: 6
  misc_feature: MA Experiment 20000267 PARAMETER Experiment Name: At_Drought_P Parameter: Tissue Value: Whole Plant
  misc_feature: MA Experiment 20000267 PARAMETER Experiment Name: At_Drought_P Parameter: Treatment Value: Drought vs. No Drought
  misc_feature: MA Experiment ID: 20000268 Result: Up-regulated in Transcription
  misc_feature: MA Experiment 20000268 PARAMETER Experiment Name: At_100mM_NaCl__P Parameter: Age (day) Value: 14
  misc_feature: MA Experiment 20000268 PARAMETER Experiment Name: At_100mM_NaCl__P Parameter: Organism Value: A. thaliana
  misc_feature: MA Experiment 20000268 PARAMETER Experiment Name: At_100mM_NaCl__P Parameter: Plant Line Value: WS
  misc_feature: MA Experiment 20000268 PARAMETER Experiment Name: At_100mM_NaCl__P Parameter: Timepoint (hr) Value: 6
  misc_feature: MA Experiment 20000268 PARAMETER Experiment Name: At_100mM_NaCl__P Parameter: Tissue Value: Whole Plant
  misc_feature: MA Experiment 20000268 PARAMETER Experiment Name: At_100mM_NaCl__P Parameter: Treatment Value: 100mM NaCl vs. No Treatment
  misc_feature: MA Experiment ID: 20000436 Result: Up-regulated in Transcription
  misc_feature: MA Experiment 20000436 PARAMETER Experiment Name: At_Drought_P Parameter: Age (day) Value: 7
  misc_feature: MA Experiment 20000436 PARAMETER Experiment Name: At_Drought_P Parameter: Organism Value: A. thaliana
  misc_feature: MA Experiment 20000436 PARAMETER Experiment Name: At_Drought_P Parameter: Plant Line Value: WS
  misc_feature: MA Experiment 20000436 PARAMETER Experiment Name: At_Drought_P Parameter: Timepoint (hr) Value: 12
  misc_feature: MA Experiment 20000436 PARAMETER Experiment Name: At_Drought_P Parameter: Tissue Value: Whole Plant
  misc_feature: MA Experiment 20000436 PARAMETER Experiment Name: At_Drought_P Parameter: Treatment Value: Drought vs. No Drought
  misc_feature: MA Experiment ID: 20000437 Result: Up-regulated in Transcription
  misc_feature: MA Experiment 20000437 PARAMETER Experiment Name: At_Drought_P Parameter: Age (day) Value: 8
  misc_feature: MA Experiment 20000437 PARAMETER Experiment Name: At_Drought_P Parameter: Organism Value: A. thaliana
  misc_feature: MA Experiment 20000437 PARAMETER Experiment Name: At_Drought_P Parameter: Plant Line Value: WS
  misc_feature: MA Experiment 20000437 PARAMETER Experiment Name: At_Drought_P Parameter: Timepoint (hr) Value: 24
  misc_feature: MA Experiment 20000437 PARAMETER Experiment Name: At_Drought_P Parameter: Tissue Value: Whole Plant
  misc_feature: MA Experiment 20000437 PARAMETER Experiment Name: At_Drought_P Parameter: Treatment Value: Drought vs. No Drought
  misc_feature: MA Experiment ID: 20000438 Result: Up-regulated in Transcription
  misc_feature: MA Experiment 20000438 PARAMETER Experiment Name: At_Shoots__P Parameter: Age (day) Value: 14
  misc_feature: MA Experiment 20000438 PARAMETER Experiment Name: At_Shoots__P Parameter: Tissue Value: Shoots vs. Whole Plant
  misc_feature: MA Experiment ID: 20000439 Result: Up-regulated in Transcription
  misc_feature: MA Experiment 20000439 PARAMETER Experiment Name: At_Roots__P Parameter: Age (day) Value: 14 vs. 21
  misc_feature: MA Experiment 20000439 PARAMETER Experiment Name: At_Roots__P Parameter: Organism Value: A. thaliana
  misc_feature: MA Experiment 20000439 PARAMETER Experiment Name: At_Roots__P Parameter: Tissue Value: Roots vs. Whole Plant
  misc_feature: MA Experiment ID: 20000453 Result: Up-regulated in Transcription
  misc_feature: MA Experiment 20000453 PARAMETER Experiment Name: At_100uM_ABA_P Parameter: Age (day) Value: 15
  misc_feature: MA Experiment 20000453 PARAMETER Experiment Name: At_100uM_ABA_P Parameter: Organism Value: A. thaliana
  misc_feature: MA Experiment 20000453 PARAMETER Experiment Name: At_100uM_ABA_P Parameter: Plant Line Value: WS
  misc_feature: MA Experiment 20000453 PARAMETER Experiment Name: At_100uM_ABA_P Parameter: Timepoint (hr) Value: 24
  misc_feature: MA Experiment 20000453 PARAMETER Experiment Name: At_100uM_ABA_P Parameter: Tissue Value: Aerial
  misc_feature: MA Experiment 20000453 PARAMETER Experiment Name: At_100uM_ABA_P Parameter: Treatment Value: 100uM ABA vs. No Treatment
  misc_feature: MA Experiment ID: 20001248 Result: Down-regulated in Transcription
  misc_feature: MA Experiment 20001248 PARAMETER Experiment Name: At_Far-red-induction_P Parameter: Age (day) Value: 7
  misc_feature: MA Experiment 20001248 PARAMETER Experiment Name: At_Far-red-induction_P Parameter: Light Value: Far-red vs. White
  misc_feature: MA Experiment 20001248 PARAMETER Experiment Name: At_Far-red-induction_P Parameter: Organism Value: A. thaliana
  misc_feature: MA Experiment 20001248 PARAMETER Experiment Name: At_Far-red-induction_P Parameter: Plant Line Value: Columbia
  misc_feature: MA Experiment 20001248 PARAMETER Experiment Name: At_Far-red-induction_P Parameter: Timepoint (hr) Value: 4
  misc_feature: MA Experiment 20001248 PARAMETER Experiment Name: At_Far-red-induction_P Parameter: Tissue Value: Whole Plant
  misc_feature: MA Experiment ID: 20001450 Result: Down-regulated in Transcription
  misc_feature: MA Experiment 20001450 PARAMETER Experiment Name: At_Far-red-induction_P Parameter: Age (day) Value: 7
  misc_feature: MA Experiment 20001450 PARAMETER Experiment Name: At_Far-red-induction_P Parameter: Light Value: Far-red vs. White
  misc_feature: MA Experiment 20001450 PARAMETER Experiment Name: At_Far-red-induction_P Parameter: Organism Value: A. thaliana
  misc_feature: MA Experiment 20001450 PARAMETER Experiment Name: At_Far-red-induction_P Parameter: Plant Line Value: Columbia
  misc_feature: MA Experiment 20001450 PARAMETER Experiment Name: At_Far-red-induction_P Parameter: Timepoint (hr) Value: 8
  misc_feature: MA Experiment 20001450 PARAMETER Experiment Name: At_Far-red-induction_P Parameter: Tissue Value: Whole Plant
  misc_feature: MA Experiment ID: 20001451 Result: Down-regulated in Transcription
  misc_feature: MA Experiment 20001451 PARAMETER Experiment Name: At_Far-red-induction_P Parameter: Age (day) Value: 7
  misc_feature: MA Experiment 20001451 PARAMETER Experiment Name: At_Far-red-induction_P Parameter: Light Value: Far-red vs. White
  misc_feature: MA Experiment 20001451 PARAMETER Experiment Name: At_Far-red-induction_P Parameter: Organism Value: A. thaliana
  misc_feature: MA Experiment 20001451 PARAMETER Experiment Name: At_Far-red-induction_P Parameter: Plant Line Value: Columbia
  misc_feature: MA Experiment 20001451 PARAMETER Experiment Name: At_Far-red-induction_P Parameter: Timepoint (hr) Value: 24
  misc_feature: MA Experiment 20001451 PARAMETER Experiment Name: At_Far-red-induction_P Parameter: Tissue Value: Whole Plant
  misc_feature: MA Experiment ID: 20001554 Result: Up-regulated in Transcription
  misc_feature: MA Experiment 20001554 PARAMETER Experiment Name: At_Drought_Soil_Dry_P Parameter: Age (day) Value: 21
  misc_feature: MA Experiment 20001554 PARAMETER Experiment Name: At_Drought_Soil_Dry_P Parameter: Organism Value: A. thaliana
  misc_feature: MA Experiment 20001554 PARAMETER Experiment Name: At_Drought_Soil_Dry_P Parameter: Plant Line Value: WS
  misc_feature: MA Experiment 20001554 PARAMETER Experiment Name: At_Drought_Soil_Dry_P Parameter: Post Timepoint (hr) Value: None
  misc_feature: MA Experiment 20001554 PARAMETER Experiment Name: At_Drought_Soil_Dry_P Parameter: Post-Treatment Value: None
  misc_feature: MA Experiment 20001554 PARAMETER Experiment Name: At_Drought_Soil_Dry_P Parameter: Timepoint (day) Value: 7
  misc_feature: MA Experiment 20001554 PARAMETER Experiment Name: At_Drought_Soil_Dry_P Parameter: Treatment Value: Drought vs. No Drought
  misc_feature: MA Experiment ID: 20001556 Result: Up-regulated in Transcription
  misc_feature: MA Experiment 20001556 PARAMETER Experiment Name: At_Drought_Soil_Dry_P Parameter: Age (day) Value: 26
  misc_feature: MA Experiment 20001556 PARAMETER Experiment Name: At_Drought_Soil_Dry_P Parameter: Organism Value: A. thaliana
  misc_feature: MA Experiment 20001556 PARAMETER Experiment Name: At_Drought_Soil_Dry_P Parameter: Plant Line Value: WS
  misc_feature: MA Experiment 20001556 PARAMETER Experiment Name: At_Drought_Soil_Dry_P Parameter: Post Timepoint (hr) Value: None
  misc_feature: MA Experiment 20001556 PARAMETER Experiment Name: At_Drought_Soil_Dry_P Parameter: Post-Treatment Value: None
  misc_feature: MA Experiment 20001556 PARAMETER Experiment Name: At_Drought_Soil_Dry_P Parameter: Timepoint (day) Value: 12
  misc_feature: MA Experiment 20001556 PARAMETER Experiment Name: At_Drought_Soil_Dry_P Parameter: Treatment Value: Drought vs. No Drought
  misc_feature: MA Experiment ID: 20001559 Result: Up-regulated in Transcription
  misc_feature: MA Experiment 20001559 PARAMETER Experiment Name: At_Drought_Soil_Dry_P Parameter: Age (day) Value: 28
  misc_feature: MA Experiment 20001559 PARAMETER Experiment Name: At_Drought_Soil_Dry_P Parameter: Organism Value: A. thaliana
  misc_feature: MA Experiment 20001559 PARAMETER Experiment Name: At_Drought_Soil_Dry_P Parameter: Plant Line Value: WS
  misc_feature: MA Experiment 20001559 PARAMETER Experiment Name: At_Drought_Soil_Dry_P Parameter: Post Timepoint (hr) Value: 29
  misc_feature: MA Experiment 20001559 PARAMETER Experiment Name: At_Drought_Soil_Dry_P Parameter: Post-Treatment Value: Re-Water vs. No Drought
  misc_feature: MA Experiment 20001559 PARAMETER Experiment Name: At_Drought_Soil_Dry_P Parameter: Timepoint (day) Value: 14
  misc_feature: MA Experiment 20001559 PARAMETER Experiment Name: At_Drought_Soil_Dry_P Parameter: Treatment Value: Drought vs. No Drought
  misc_feature: MA Experiment ID: 20001911 Result: Up-regulated in Transcription
  misc_feature: MA Experiment 20001911 PARAMETER Experiment Name: At_Drought_Reproduction_P Parameter: Age (day) Value: 40
  misc_feature: MA Experiment 20001911 PARAMETER Experiment Name: At_Drought_Reproduction_P Parameter: Organism Value: A. thaliana
  misc_feature: MA Experiment 20001911 PARAMETER Experiment Name: At_Drought_Reproduction_P Parameter: Plant Line Value: WS
  misc_feature: MA Experiment 20001911 PARAMETER Experiment Name: At_Drought_Reproduction_P Parameter: Timepoint (day) Value: 10
  misc_feature: MA Experiment 20001911 PARAMETER Experiment Name: At_Drought_Reproduction_P Parameter: Tissue Value: Flowers
  misc_feature: MA Experiment 20001911 PARAMETER Experiment Name: At_Drought_Reproduction_P Parameter: Treatment Value: Drought vs. No Drought
aagagaaaaaatacaaatcgttcaccggaaaaaaacaaaatggctcgtcgcgatgttctcctccctttcctcctccttctcgccaccgtctccgccgtagctttcgccgaagatgatccagactgtgtatacacattctacctcagaaccggatcgatctggaaagccggaaccgattcgatcatcagcgcaagaatctacgataaggacggtgactacatcggaatcaaaaaccttcaagcttgggctggattaatgggacctgattacaattacttcgagaggggtaatctcgacattttcagtggaagagcaccgtgtttacctagtccgatctgtgccttaaacctaacctccgatggctccggcgatcaccatggttggtacgttaattacgttgagatcacgacggctggtgttcacgcacagtgctcgacgcaggattttgagattgagcaatggctcgctactgatacttctccttatgagctcaccgccgtacggaacaattgtccggtcaagcttagggatagtgttagtcgggtcgggtctgagattcggaaaaagctttcttgggtcgtttaagtgatgtgttgtgattcgtgagacttgtctgtattgtttgtattctcgttgttcttgtgagtgtaatgtggcgttaatgaaatatgattcaac

SEQ ID NO: 27246 - protein, 194 aa, Arabidopsis thaliana
  peptide (1)..(194): Ceres Seq. ID no. 13496843
  misc_feature (42)..(166): Pfam Name: PLAT/LH2 domain Pfam Description: PLAT/LH2 domain
  misc_feature (37)..(171): Homolog of NCBI NO: 28628595 NR Description: TMV induced protein 1-2 [Capsicum annuum]
  misc_feature (25)..(180): Homolog of NCBI NO: 7542598 NR Description: TMV-induced protein I [Capsicum annuum]
  misc_feature (21)..(171): Homolog of NCBI NO: 10241929 NR Description: elicitor inducible protein [Nicotiana tabacum]
  misc_feature (33)..(171): Homolog of NCBI NO: 32492139 NR Description: OSJNBa0036B21.2 [Oryza sativa (japonica
  misc_feature (33)..(187): Homolog of NCBI NO: 32492140 NR Description: OSJNBa0036B21.4 [Oryza sativa (japonica
  misc_feature (14)..(183): Homolog of NCBI NO: 15982879 NR Description: AT4g39730/T19P19_120 [Arabidopsis thaliana]
  misc_feature (14)..(194): Homolog of NCBI NO: 18399899 NR Description: expressed protein [Arabidopsis thaliana]
  misc_feature (14)..(194): Homolog of NCBI NO: 21553555 NR Description: dehydration stress-induced protein [Arabidopsis
  misc_feature (14)..(194): Homolog of NCBI NO: 12667247 NR Description: dehydration stress-induced protein [Brassica
  misc_feature (14)..(194): Homolog of NCBI NO: 15236014 NR Description: expressed protein [Arabidopsis thaliana]
KRKNTNRSPEKNKMARRDVLLPFLLLLATVSAVAFAEDDPDCVYTFYLRTGSIWKAGTDSIISARIYDKDGDYIGIKNLQAWAGLMGPDYNYFERGNLDIFSGRAPCLPSPICALNLTSDGSGDHHGWYVNYVEITTAGVHAQCSTQDFEIEQWLATDTSPYELTAVRNNCPVKLRDSVSRVGSEIRKKLSWVV

SEQ ID NO: 27247 - protein, 181 aa, Arabidopsis thaliana
  peptide (1)..(181): Ceres Seq. ID no. 13496844
  misc_feature (29)..(153): Pfam Name: PLAT/LH2 domain Pfam Description: PLAT/LH2 domain
  misc_feature (24)..(158): Homolog of NCBI NO: 28628595 NR Description: TMV induced protein 1-2 [Capsicum annuum]
  misc_feature (12)..(167): Homolog of NCBI NO: 7542598 NR Description: TMV-induced protein I [Capsicum annuum]
  misc_feature (8)..(158): Homolog of NCBI NO: 10241929 NR Description: elicitor inducible protein [Nicotiana tabacum]
  misc_feature (20)..(158): Homolog of NCBI NO: 32492139 NR Description: OSJNBa0036B21.2 [Oryza sativa (japonica
  misc_feature (20)..(174): Homolog of NCBI NO: 32492140 NR Description: OSJNBa0036B21.4 [Oryza sativa (japonica
  misc_feature (1)..(170): Homolog of NCBI NO: 15982879 NR Description: AT4g39730/T19P19_120 [Arabidopsis thaliana]
  misc_feature (1)..(181): Homolog of NCBI NO: 18399899 NR Description: expressed protein [Arabidopsis thaliana]
  misc_feature (1)..(181): Homolog of NCBI NO: 21553555 NR Description: dehydration stress-induced protein [Arabidopsis
  misc_feature (1)..(181): Homolog of NCBI NO: 12667247 NR Description: dehydration stress-induced protein [Brassica
  misc_feature (1)..(181): Homolog of NCBI NO: 15236014 NR Description: expressed protein [Arabidopsis thaliana]
MARRDVLLPFLLLLATVSAVAFAEDDPDCVYTFYLRTGSIWKAGTDSIISARIYDKDGDYIGIKNLQAWAGLMGPDYNYFERGNLDIFSGRAPCLPSPICALNLTSDGSGDHHGWYVNYVEITTAGVHAQCSTQDFEIEQWLATDTSPYELTAVRNNCPVKLRDSVSRVGSEIRKKLSWVV

SEQ ID NO: 27248 - protein, 109 aa, Arabidopsis thaliana
  peptide (1)..(109): Ceres Seq. ID no. 13496845
  misc_feature (1)..(81): Pfam Name: PLAT/LH2 domain Pfam Description: PLAT/LH2 domain
  misc_feature (1)..(86): Homolog of NCBI NO: 28628595 NR Description: TMV induced protein 1-2 [Capsicum annuum]
  misc_feature (1)..(95): Homolog of NCBI NO: 7542598 NR Description: TMV-induced protein I [Capsicum annuum]
  misc_feature (1)..(86): Homolog of NCBI NO: 10241929 NR Description: elicitor inducible protein [Nicotiana tabacum]
  misc_feature (1)..(86): Homolog of NCBI NO: 32492139 NR Description: OSJNBa0036B21.2 [Oryza sativa (japonica
  misc_feature (1)..(102): Homolog of NCBI NO: 32492140 NR Description: OSJNBa0036B21.4 [Oryza sativa (japonica
  misc_feature (1)..(98): Homolog of NCBI NO: 15982879 NR Description: AT4g39730/T19P19_120 [Arabidopsis thaliana]
  misc_feature (1)..(109): Homolog of NCBI NO: 18399899 NR Description: expressed protein [Arabidopsis thaliana]
  misc_feature (1)..(109): Homolog of NCBI NO: 21553555 NR Description: dehydration stress-induced protein [Arabidopsis
  misc_feature (1)..(109): Homolog of NCBI NO: 12667247 NR Description: dehydration stress-induced protein [Brassica
  misc_feature (1)..(109): Homolog of NCBI NO: 15236014 NR Description: expressed protein [Arabidopsis thaliana]
MGPDYNYFERGNLDIFSGRAPCLPSPICALNLTSDGSGDHHGWYVNYVEITTAGVHAQCSTQDFEIEQWLATDTSPYELTAVRNNCPVKLRDSVSRVGSEIRKKLSWVV

SEQ ID NO: 27249 - DNA, 1684 bp, Arabidopsis thaliana
  misc_feature (1)..(1684): Ceres Seq. ID no. 12739003
  misc_feature: MA Experiment ID: 108461 Result: Down-regulated in Transcription
  misc_feature: MA Experiment 108461 PARAMETER Experiment Name: At_Germinating_Seeds_cDNA_P Parameter: Age (day) Value: 1 vs. 0
  misc_feature: MA Experiment 108461 PARAMETER Experiment Name: At_Germinating_Seeds_cDNA_P Parameter: Tissue Value: Germinating Seeds
  misc_feature: MA Experiment ID: 108569 Result: Up-regulated in Transcription
  misc_feature: MA Experiment 108569 PARAMETER Experiment Name: At_0.001%_MeJA__cDNA_P Parameter: Timepoint (hr) Value: 6
  misc_feature: MA Experiment 108569 PARAMETER Experiment Name: At_0.001%_MeJA__cDNA_P Parameter: Tissue Value: Aerial
  misc_feature: MA Experiment 108569 PARAMETER Experiment Name: At_0.001%_MeJA__cDNA_P Parameter: Treatment Value: 0.001% MeJA vs. No Treatment
  misc_feature: MA Experiment ID: 108573 Result: Up-regulated in Transcription
  misc_feature: MA Experiment 108573 PARAMETER Experiment Name: At_Drought_cDNA_P Parameter: Timepoint (hr) Value: 6
  misc_feature: MA Experiment 108573 PARAMETER Experiment Name: At_Drought_cDNA_P Parameter: Tissue Value: Aerial
  misc_feature: MA Experiment 108573 PARAMETER Experiment Name: At_Drought_cDNA_P Parameter: Treatment Value: Drought vs. No Drought
  misc_feature: MA Experiment ID: 108579 Result: Down-regulated in Transcription
  misc_feature: MA Experiment 108579 PARAMETER Experiment Name: At_4deg_Cold_cDNA_P Parameter: Temperature (deg C) Value: 4 vs. 22
  misc_feature: MA Experiment 108579 PARAMETER Experiment Name: At_4deg_Cold_cDNA_P Parameter: Timepoint (hr) Value: 6
  misc_feature: MA Experiment 108579 PARAMETER Experiment Name: At_4deg_Cold_cDNA_P Parameter: Tissue Value: Aerial
  misc_feature: MA Experiment ID: 108585 Result: Up-regulated in Transcription
  misc_feature: MA Experiment 108585 PARAMETER Experiment Name: At_5mM_NaNP_cDNA_P Parameter: Timepoint (hr) Value: 6
  misc_feature: MA Experiment 108585 PARAMETER Experiment Name: At_5mM_NaNP_cDNA_P Parameter: Tissue Value: Aerial
  misc_feature: MA Experiment 108585 PARAMETER Experiment Name: At_5mM_NaNP_cDNA_P Parameter: Treatment Value: null
  misc_feature: MA Experiment ID: 20000069 Result: Down-regulated in Transcription
  misc_feature: MA Experiment 20000069 PARAMETER Experiment Name: At_100uM_ABA_Mutants_cDNA_P Parameter: Plant Line Value: CS23
  misc_feature: MA Experiment 20000069 PARAMETER Experiment Name: At_100uM_ABA_Mutants_cDNA_P Parameter: Timepoint (hr) Value: 6
  misc_feature: MA Experiment 20000069 PARAMETER Experiment Name: At_100uM_ABA_Mutants_cDNA_P Parameter: Tissue Value: Aerial
  misc_feature: MA Experiment 20000069 PARAMETER Experiment Name: At_100uM_ABA_Mutants_cDNA_P Parameter: Treatment Value: 100uM ABA vs. No Treatment
  misc_feature: MA Experiment ID: 20000087 Result: Down-regulated in Transcription
  misc_feature: MA Experiment 20000087 PARAMETER Experiment Name: At_100uM_ABA_Mutants_cDNA_P Parameter: Plant Line Value: WS
  misc_feature: MA Experiment 20000087 PARAMETER Experiment Name: At_100uM_ABA_Mutants_cDNA_P Parameter: Timepoint (hr) Value: 6
  misc_feature: MA Experiment 20000087 PARAMETER Experiment Name: At_100uM_ABA_Mutants_cDNA_P Parameter: Tissue Value: Aerial
  misc_feature: MA Experiment 20000087 PARAMETER Experiment Name: At_100uM_ABA_Mutants_cDNA_P Parameter: Treatment Value: 100uM ABA vs. No Treatment
  misc_feature: MA Experiment ID: 20000089 Result: Down-regulated in Transcription
  misc_feature: MA Experiment ID: 20000090 Result: Down-regulated in Transcription
  misc_feature: MA Experiment ID: 20000117 Result: Down-regulated in Transcription
  misc_feature: MA Experiment 20000117 PARAMETER Experiment Name: At_100uM_ABA_Mutants_cDNA_P Parameter: Plant Line Value: Columbia
  misc_feature: MA Experiment 20000117 PARAMETER Experiment Name: At_100uM_ABA_Mutants_cDNA_P Parameter: Timepoint (hr) Value: 6
  misc_feature: MA Experiment 20000117 PARAMETER Experiment Name: At_100uM_ABA_Mutants_cDNA_P Parameter: Tissue Value: Aerial
  misc_feature: MA Experiment 20000117 PARAMETER Experiment Name: At_100uM_ABA_Mutants_cDNA_P Parameter: Treatment Value: 100uM ABA vs. No Treatment
  misc_feature: MA Experiment ID: 20000180 Result: Down-regulated in Transcription
  misc_feature: MA Experiment 20000180 PARAMETER Experiment Name: At_Germinating_Seeds_P Parameter: Age (hr) Value: 24 vs. 0
  misc_feature: MA Experiment 20000180 PARAMETER Experiment Name: At_Germinating_Seeds_P Parameter: Tissue Value: Germinating Seeds
  misc_feature: MA Experiment ID: 20000184 Result: Up-regulated in Transcription
  misc_feature: MA Experiment 20000184 PARAMETER Experiment Name: At_Shoots__P Parameter: Age (day) Value: 7
  misc_feature: MA Experiment 20000184 PARAMETER Experiment Name: At_Shoots__P Parameter: Tissue Value: Shoots vs. Whole Plant
  misc_feature: MA Experiment ID: 20000794 Result: Up-regulated in Transcription
  misc_feature: MA Experiment 20000794 PARAMETER Experiment Name: At_Petals_P Parameter: Age (day) Value: 23-25 days
  misc_feature: MA Experiment 20000794 PARAMETER Experiment Name: At_Petals_P Parameter: Plant Line Value: WS
  misc_feature: MA Experiment 20000794 PARAMETER Experiment Name: At_Petals_P Parameter: Tissue Value: Petals vs. Whole plant
  misc_feature: MA Experiment ID: 20001911 Result: Up-regulated in Transcription
  misc_feature: MA Experiment 20001911 PARAMETER Experiment Name: At_Drought_Reproduction_P Parameter: Age (day) Value: 40
  misc_feature: MA Experiment 20001911 PARAMETER Experiment Name: At_Drought_Reproduction_P Parameter: Organism Value: A. thaliana
  misc_feature: MA Experiment 20001911 PARAMETER Experiment Name: At_Drought_Reproduction_P Parameter: Plant Line Value: WS
  misc_feature: MA Experiment 20001911 PARAMETER Experiment Name: At_Drought_Reproduction_P Parameter: Timepoint (day) Value: 10
  misc_feature: MA Experiment 20001911 PARAMETER Experiment Name: At_Drought_Reproduction_P Parameter: Tissue Value: Flowers
  misc_feature: MA Experiment 20001911 PARAMETER Experiment Name: At_Drought_Reproduction_P Parameter: Treatment Value: Drought vs. No Drought
gcttttccattttactcttcttgtatgtttctgtcttcttactcaacttttgcttcaggcttcgtctcttttgcaatttttgagttagccaagtgctcaagggagatacataatacctgaagatgtccaaggcaagtgatgccgtcagagaaccattggtggacaagaatatggctggatcaaaaccagaccagccgtggatggtttatctcagcacattcgttgcggtctgtggttcttttgcgttcggttcttgtgcgggatactcttcacctgctcaggctgcaattaggaatgacctttcattgactatagctgagttttcactctttggttctttactaacttttggcgcaatgatcggtgctataacaagcgggcctatagctgatttagttggaagaaagggggcgatgaggagtttcctctgcattttgtgtagtcgggtggctagcaatcatctttgccaagggagtagtggctctggacctcggaagactggcaacgggatatggaatgggagcattttcctatgtcgtgccaatctttatagcagaaattgcacctaaaactttcagaggggctctaaccacactgaaccagattctgatctgcactggagtgtcggtttccttcatcataggcacactagtgacgtggagagtcttggcattaataggaatcatcccatgcgctgcctccttccttggcctcttttttatccctgagtctccaagatggctggcaaaagtggggcgtgatacggagtttgaagctgcactgaggaagctccgtgggaagaaggctgatatttcggaggaggcagcagagatccaggattatatcgaaactctggaaaggctaccgaaagccaagatgctggatttgtttcagaggagatacatacgctctgttcttatagctttcgggttgatggtgtttcagcagtttggaggaatcaacggaatatgtttctacacaagctcgatatttgagcaagcaggttttcccacaagacttgggatgataatatatgctgttcttcaggtggtaatcactgcgcttaatgcaccgatagttgacagagccggaagaaaaccattgctactggtttctgcaacagggttagtgataggctgtttgatagcagcggtttctttctatctcaaggttcacgacatggcgcacgaagcagtcccagtcctggctgttgttggtataatggtgtacataggatcgttttcagcaggaatgggagcaatgccgtgggtggtcatgtctgagatatttcccataaacataaaaggagtagcaggaggcatggcgacgctggtgaactggtttggagcgtgggctgtttcttacactttcaacttcctcatgtcctggagctcttacggaactttcctcatttacgctgccatcaacgcgctggccattgtcttcgtcattgccatcgtgcctgagacaaaagggaagacattggagcagatccaagctgtagtcaatccatagctcaaacacttcctagatgttcgtttctattagccagctgggacataaattgcaatcttggatctctttgcttttatgattctttactgagttcaattgttatcactctctctatttctaatctcttcttaatgaactttggacttcaatttgatgtttttccatagtt

SEQ ID NO: 27250 - protein, 332 aa, Arabidopsis thaliana
  peptide (1)..(332): Ceres Seq. ID no. 12739004
  misc_feature (1)..(330): Pfam Name: Sugar (and other) transporter Pfam Description: Sugar (and other) transporter
  misc_feature (1)..(330): Pfam Name: Sugar (and other) transporter Pfam Description: Sugar (and other) transporter
  misc_feature (1)..(327): Homolog of NCBI NO: 30695810 NR Description: sugar transporter, putative [Arabidopsis thaliana]
  misc_feature (1)..(29): Homolog of NCBI NO: 25409087 NR Description: probable sugar transporter [imported] -
  misc_feature (196)..(332): Homolog of NCBI NO: 25409087 NR Description: probable sugar transporter [imported] -
  misc_feature (1)..(330): Homolog of NCBI NO: 30679397 NR Description: sugar transporter family [Arabidopsis thaliana]
  misc_feature (1)..(330): Homolog of NCBI NO: 6729025 NR Description: putative sugar transporter [Arabidopsis thaliana]
  misc_feature (1)..(327): Homolog of NCBI NO: 30695810 NR Description: sugar transporter, putative [Arabidopsis thaliana]
  misc_feature (196)..(332): Homolog of NCBI NO: 25409087 NR Description: probable sugar transporter [imported] -
  misc_feature (1)..(330): Homolog of NCBI NO: 6729025 NR Description: putative sugar transporter [Arabidopsis thaliana]
  misc_feature (1)..(332): Homolog of NCBI NO: 18407508 NR Description: putative sugar transporter
  misc_feature (1)..(332): Homolog of NCBI NO: 21536914 NR Description: putative sugar transporter [Arabidopsis thaliana]
  misc_feature (1)..(331): Homolog of NCBI NO: 23504385 NR Description: putative sugar transporter [Lycopersicon
  misc_feature (1)..(330): Homolog of NCBI NO: 18419741 NR Description: sugar transporter - like protein
  misc_feature (1)..(330): Homolog of NCBI NO: 21592787 NR Description: sugar transporter-like protein [Arabidopsis
  misc_feature (1)..(330): Homolog of NCBI NO: 30679397 NR Description: sugar transporter family [Arabidopsis thaliana]
  misc_feature (1)..(29): Homolog of NCBI NO: 25409087 NR Description: probable sugar transporter [imported] -
  misc_feature (1)..(330): Homolog of NCBI NO: 21592787 NR Description: sugar transporter-like protein [Arabidopsis
  misc_feature (1)..(330): Homolog of NCBI NO: 18419741 NR Description: sugar transporter - like protein
  misc_feature (1)..(331): Homolog of NCBI NO: 23504385 NR Description: putative sugar transporter [Lycopersicon
  misc_feature (1)..(332): Homolog of NCBI NO: 21536914 NR Description: putative sugar transporter [Arabidopsis thaliana]
  misc_feature (1)..(332): Homolog of NCBI NO: 18407508 NR Description: putative sugar transporter
MGAFSYVVPIFIAEIAPKTFRGALTTLNQILICTGVSVSFIIGTLVTWRVLALIGIIPCAASFLGLFFIPESPRWLAKVGRDTEFEAALRKLRGKKADISEEAAEIQDYIETLERLPKAKMLDLFQRRYIRSVLIAFGLMVFQQFGGINGICFYTSSIFEQAGFPTRLGMIIYAVLQVVITALNAPIVDRAGRKPLLLVSATGLVIGCLIAAVSFYLKVHDMAHEAVPVLAVVGIMVYIGSFSAGMGAMPWVVMSEIFPINIKGVAGGMATLVNWFGAWAVSYTFNFLMSWSSYGTFLIYAAINALAIVFVIAIVPETKGKTLEQIQAVVNP

SEQ ID NO: 27251 - protein, 212 aa, Arabidopsis thaliana
  peptide (1)..(212): Ceres Seq. ID no. 12739005
  misc_feature (1)..(210): Pfam Name: Sugar (and other) transporter Pfam Description: Sugar (and other) transporter
  misc_feature (1)..(210): Pfam Name: Sugar (and other) transporter Pfam Description: Sugar (and other) transporter
  misc_feature (1)..(58): Homolog of NCBI NO: 25405762 NR Description: hypothetical protein T22H22.15 [imported] -
  misc_feature (1)..(207): Homolog of NCBI NO: 30695810 NR Description: sugar transporter, putative [Arabidopsis thaliana]
  misc_feature (76)..(212): Homolog of NCBI NO: 25409087 NR Description: probable sugar transporter [imported] -
  misc_feature (1)..(210): Homolog of NCBI NO: 30679397 NR Description: sugar transporter family [Arabidopsis thaliana]
  misc_feature (1)..(210): Homolog of NCBI NO: 6729025 NR Description: putative sugar transporter [Arabidopsis thaliana]
  misc_feature (1)..(58): Homolog of NCBI NO: 25405762 NR Description: hypothetical protein T22H22.15 [imported] -
  misc_feature (76)..(212): Homolog of NCBI NO: 25409087 NR Description: probable sugar transporter [imported] -
  misc_feature (1)..(210): Homolog of NCBI NO: 6729025 NR Description: putative sugar transporter [Arabidopsis thaliana]
  misc_feature (1)..(212): Homolog of NCBI NO: 18407508 NR Description: putative sugar transporter
  misc_feature (1)..(212): Homolog of NCBI NO: 21536914 NR Description: putative sugar transporter [Arabidopsis thaliana]
  misc_feature (1)..(211): Homolog of NCBI NO: 23504385 NR Description: putative sugar transporter [Lycopersicon
  misc_feature (1)..(210): Homolog of NCBI NO: 18419741 NR Description: sugar transporter - like protein
  misc_feature (1)..(210): Homolog of NCBI NO: 21592787 NR Description: sugar transporter-like protein [Arabidopsis
  misc_feature (1)..(210): Homolog of NCBI NO: 30679397 NR Description: sugar transporter family [Arabidopsis thaliana]
  misc_feature (1)..(207): Homolog of NCBI NO: 30695810 NR Description: sugar transporter, putative [Arabidopsis thaliana]
  misc_feature (1)..(210): Homolog of NCBI NO: 21592787 NR Description: sugar transporter-like protein [Arabidopsis
  misc_feature (1)..(210): Homolog of NCBI NO: 18419741 NR Description: sugar transporter - like protein
  misc_feature (1)..(211): Homolog of NCBI NO: 23504385 NR Description: putative sugar transporter [Lycopersicon
  misc_feature (1)..(212): Homolog of NCBI NO: 21536914 NR Description: putative sugar transporter [Arabidopsis thaliana]
  misc_feature (1)..(212): Homolog of NCBI NO: 18407508 NR Description: putative sugar transporter
MLDLFQRRYIRSVLIAFGLMVFQQFGGINGICFYTSSIFEQAGFPTRLGMIIYAVLQVVITALNAPIVDRAGRKPLLLVSATGLVIGCLIAAVSFYLKVHDMAHEAVPVLAVVGIMVYIGSFSAGMGAMPWVVMSEIFPINIKGVAGGMATLVNWFGAWAVSYTFNFLMSWSSYGTFLIYAAINALAIVFVIAIVPETKGKTLEQIQAVVNP

SEQ ID NO: 27252 - protein, 193 aa, Arabidopsis thaliana
  peptide (1)..(193): Ceres Seq. ID no. 12739006
  misc_feature (1)..(191): Pfam Name: Sugar (and other) transporter Pfam Description: Sugar (and other) transporter
  misc_feature (1)..(191): Pfam Name: Sugar (and other) transporter Pfam Description: Sugar (and other) transporter
  misc_feature (1)..(39): Homolog of NCBI NO: 25405762 NR Description: hypothetical protein T22H22.15 [imported] -
  misc_feature (1)..(188): Homolog of NCBI NO: 30695810 NR Description: sugar transporter, putative [Arabidopsis thaliana]
  misc_feature (57)..(193): Homolog of NCBI NO: 25409087 NR Description: probable sugar transporter [imported] -
  misc_feature (1)..(191): Homolog of NCBI NO: 30679397 NR Description: sugar transporter family [Arabidopsis thaliana]
  misc_feature (1)..(191): Homolog of NCBI NO: 6729025 NR Description: putative sugar transporter [Arabidopsis thaliana]
  misc_feature (1)..(39): Homolog of NCBI NO: 25405762 NR Description: hypothetical protein T22H22.15 [imported] -
  misc_feature (57)..(193): Homolog of NCBI NO: 25409087 NR Description: probable sugar transporter [imported] -
  misc_feature (1)..(191): Homolog of NCBI NO: 6729025 NR Description: putative sugar transporter [Arabidopsis thaliana]
  misc_feature (1)..(193): Homolog of NCBI NO: 18407508 NR Description: putative sugar transporter
  misc_feature (1)..(193): Homolog of NCBI NO: 21536914 NR Description: putative sugar transporter [Arabidopsis thaliana]
  misc_feature (1)..(192): Homolog of NCBI NO: 23504385 NR Description: putative sugar transporter [Lycopersicon
  misc_feature (1)..(191): Homolog of NCBI NO: 18419741 NR Description: sugar transporter - like protein
  misc_feature (1)..(191): Homolog of NCBI NO: 21592787 NR Description: sugar transporter-like protein [Arabidopsis
  misc_feature (1)..(191): Homolog of NCBI NO: 30679397 NR Description: sugar transporter family [Arabidopsis thaliana]
  misc_feature (1)..(188): Homolog of NCBI NO: 30695810 NR Description: sugar transporter, putative [Arabidopsis thaliana]
  misc_feature (1)..(191): Homolog of NCBI NO: 21592787 NR Description: sugar transporter-like protein [Arabidopsis
  misc_feature (1)..(191): Homolog of NCBI NO: 18419741 NR Description: sugar transporter - like protein
  misc_feature (1)..(192): Homolog of NCBI NO: 23504385 NR Description: putative sugar transporter [Lycopersicon
  misc_feature (1)..(193): Homolog of NCBI NO: 21536914 NR Description: putative sugar transporter [Arabidopsis thaliana]
  misc_feature (1)..(193): Homolog of NCBI NO: 18407508 NR Description: putative sugar transporter
MVFQQFGGINGICFYTSSIFEQAGFPTRLGMIIYAVLQVVITALNAPIVDRAGRKPLLLVSATGLVIGCLIAAVSFYLKVHDMAHEAVPVLAVVGIMVYIGSFSAGMGAMPWVVMSEIFPINIKGVAGGMATLVNWFGAWAVSYTFNFLMSWSSYGTFLIYAAINALAIVFVIAIVPETKGKTLEQIQAVVNP

SEQ ID NO: 27253 - DNA, 674 bp, Arabidopsis thaliana
  misc_feature (1)..(674): Ceres Seq. ID no. 12580263
  misc_feature: MA Experiment ID: 20000314 Result: Up-regulated in Transcription
  misc_feature: MA Experiment 20000314 PARAMETER Experiment Name: At_14day_Shoots-Roots_Sub_P Parameter: Age (day) Value: 14
  misc_feature: MA Experiment 20000314 PARAMETER Experiment Name: At_14day_Shoots-Roots_Sub_P Parameter: Organism Value: A. thaliana
  misc_feature: MA Experiment 20000314 PARAMETER Experiment Name: At_14day_Shoots-Roots_Sub_P Parameter: Plant Line Value: WS
  misc_feature: MA Experiment 20000314 PARAMETER Experiment Name: At_14day_Shoots-Roots_Sub_P Parameter: Tissue Value: Roots vs. Whole Plant
  misc_feature: MA Experiment ID: 20000346 Result: Up-regulated in Transcription
  misc_feature: MA Experiment 20000346 PARAMETER Experiment Name: At_2mM_SA_Sub_P Parameter: Age (day) Value: 14
  misc_feature: MA Experiment 20000346 PARAMETER Experiment Name: At_2mM_SA_Sub_P Parameter: Organism Value: A. thaliana
  misc_feature: MA Experiment 20000346 PARAMETER Experiment Name: At_2mM_SA_Sub_P Parameter: Plant Line Value: WS
  misc_feature: MA Experiment 20000346 PARAMETER Experiment Name: At_2mM_SA_Sub_P Parameter: Timepoint (hr) Value: 1
  misc_feature: MA Experiment 20000346 PARAMETER Experiment Name: At_2mM_SA_Sub_P Parameter: Tissue Value: Aerial
  misc_feature: MA Experiment 20000346 PARAMETER Experiment Name: At_2mM_SA_Sub_P Parameter: Treatment Value: 2mM SA vs. No Treatment
  misc_feature: MA Experiment ID: 20000347 Result: Up-regulated in Transcription
  misc_feature: MA Experiment 20000347 PARAMETER Experiment Name: At_2mM_SA_Sub_P Parameter: Age (day) Value: 14
  misc_feature: MA Experiment 20000347 PARAMETER Experiment Name: At_2mM_SA_Sub_P Parameter: Organism Value: A. thaliana
  misc_feature: MA Experiment 20000347 PARAMETER Experiment Name: At_2mM_SA_Sub_P Parameter: Plant Line Value: WS
  misc_feature: MA Experiment 20000347 PARAMETER Experiment Name: At_2mM_SA_Sub_P Parameter: Timepoint (hr) Value: 6
  misc_feature: MA Experiment 20000347 PARAMETER Experiment Name: At_2mM_SA_Sub_P Parameter: Tissue Value: Aerial
  misc_feature: MA Experiment 20000347 PARAMETER Experiment Name: At_2mM_SA_Sub_P Parameter: Treatment Value: 2mM SA vs. No Treatment
  misc_feature: MA Experiment ID: 20000355 Result: Down-regulated in Transcription
  misc_feature: MA Experiment 20000355 PARAMETER Experiment Name: At_Siliques_Sub_P Parameter: Age (day) Value: 21
  misc_feature: MA Experiment 20000355 PARAMETER Experiment Name: At_Siliques_Sub_P Parameter: Organism Value: A. thaliana
  misc_feature: MA Experiment 20000355 PARAMETER Experiment Name: At_Siliques_Sub_P Parameter: Plant Line Value: WS
  misc_feature: MA Experiment 20000355 PARAMETER Experiment Name: At_Siliques_Sub_P Parameter: Tissue Value: Less Than 5mm Siliques vs. Whole Plant
  misc_feature: MA Experiment ID: 20000440 Result: Down-regulated in Transcription
  misc_feature: MA Experiment 20000440 PARAMETER Experiment Name: At_Closed-Flower__Sub_P Parameter: Tissue Value: Closed Flower vs. Whole Plant
aaaaccttacattgctttccatttaaaactctcttcttcttttttgttctctctctctcttcatggaagctcaacaccttcatgccaagcctcatgctgaaggagaatggtccacaggcttctgtgattgcttttctgactgcaaaaattgttgtatcacattctggtgtccatgtatcacctttggccaagtcgccgagattgtagatcgaggatccacatcgtgtggtactgctggagctctatacgcgttgatagccgtagtaactggttgtgcatgtatatactcatgtttctatcgtggaaagatgagagctcaatataatattaaaggagatgattgtactgattgccttaaacatttctgctgtgagctttgttctttgacccaacaataccgtgaactcaagcaccgcggttacgatatgagtcttggatgggcggggaacgtggagagacaacagaatcaaggaggtgtggccatgggtgctccggtcttccaaggcggcatgacccgctaagaattatttctttatgtaattcatttgtcttttatatgtagtaataaaacgaggtttaatcctctgtttgtgttgttaatatgcttgttgtgatttgaaccaaaaaaaatgcttgttgtgaaagtttagatatatatgaatgttcttcaatgt

SEQ ID NO: 27254 - protein, 152 aa, Arabidopsis thaliana
  peptide (1)..(152): Ceres Seq. ID no. 12580264
  misc_feature (12)..(116): Pfam Name: Protein of unknown function, DUF614 Pfam Description: Protein of unknown function, DUF614
  misc_feature (1)..(152): Homolog of NCBI NO: 15223920 NR Description: unknown protein
  misc_feature (1)..(152): Homolog of NCBI NO: 27414005 NR Description: fw2.2 [Lycopersicon pimpinellifolium]
  misc_feature (1)..(152): Homolog of NCBI NO: 8272626 NR Description: ORFX [Lycopersicon esculentum]
  misc_feature (15)..(152): Homolog of NCBI NO: 15221456 NR Description: hypothetical protein; protein id: At1g68610.1
  misc_feature (10)..(132): Homolog of NCBI NO: 34897270 NR Description: hypothetical protein [Oryza sativa (japonica
  misc_feature (10)..(137): Homolog of NCBI NO: 34897274 NR Description: hypothetical protein [Oryza sativa (japonica
  misc_feature (8)..(147): Homolog of NCBI NO: 34897268 NR Description: unknown protein [Oryza sativa (japonica
  misc_feature (1)..(33): Homolog of NCBI NO: 22327352 NR Description: unknown protein; protein id: At5g35525.1
  misc_feature (54)..(152): Homolog of NCBI NO: 22327352 NR Description: unknown protein; protein id: At5g35525.1
  misc_feature (1)..(152): Homolog of NCBI NO: 15223921 NR Description: unknown protein; protein id: At1g14880.1
MEAQHLHAKPHAEGEWSTGFCDCFSDCKNCCITFWCPCITFGQVAEIVDRGSTSCGTAGALYALIAVVTGCACIYSCFYRGKMRAQYNIKGDDCTDCLKHFCCELCSLTQQYRELKHRGYDMSLGWAGNVERQQNQGGVAMGAPVFQGGMTR

SEQ ID NO: 27255 - DNA, 966 bp, Arabidopsis thaliana
  misc_feature (1)..(966): Ceres Seq. ID no. 12335471
  misc_feature: MA Experiment ID: 108434 Result: Down-regulated in Transcription
  misc_feature: MA Experiment 108434 PARAMETER Experiment Name: At_Root_Tips_cDNA_P Parameter: Tissue Value: Root Tips
  misc_feature: MA Experiment ID: 108463 Result: Up-regulated in Transcription
  misc_feature: MA Experiment 108463 PARAMETER Experiment Name: At_Germinating_Seeds_cDNA_P Parameter: Age (day) Value: 3 vs. 0
  misc_feature: MA Experiment 108463 PARAMETER Experiment Name: At_Germinating_Seeds_cDNA_P Parameter: Tissue Value: Germinating Seeds
  misc_feature: MA Experiment ID: 108464 Result: Up-regulated in Transcription
  misc_feature: MA Experiment 108464 PARAMETER Experiment Name: At_Germinating_Seeds_cDNA_P Parameter: Age (day) Value: 4 vs. 0
  misc_feature: MA Experiment 108464 PARAMETER Experiment Name: At_Germinating_Seeds_cDNA_P Parameter: Tissue Value: Germinating Seeds
  misc_feature: MA Experiment ID: 108469 Result: Up-regulated in Transcription
  misc_feature: MA Experiment ID: 108488 Result: Down-regulated in Transcription
  misc_feature: MA Experiment ID: 108501 Result: Down-regulated in Transcription
  misc_feature: MA Experiment 108501 PARAMETER Experiment Name: At_ap2_floral_buds_cDNA_P Parameter: Plant Line Value: ap2 (Ler.)
  misc_feature: MA Experiment 108501 PARAMETER Experiment Name: At_ap2_floral_buds_cDNA_P Parameter: Tissue Value: Closed Flower
  misc_feature: MA Experiment ID: 108577 Result: Down-regulated in Transcription
  misc_feature: MA Experiment 108577 PARAMETER Experiment Name: At_42deg_Heat_cDNA_P Parameter: Temperature (deg C) Value: 42 vs. 22
  misc_feature: MA Experiment 108577 PARAMETER Experiment Name: At_42deg_Heat_cDNA_P Parameter: Timepoint (hr) Value: 6
  misc_feature: MA Experiment 108577 PARAMETER Experiment Name: At_42deg_Heat_cDNA_P Parameter: Tissue Value: Aerial
  misc_feature: MA Experiment ID: 108585 Result: Up-regulated in Transcription
  misc_feature: MA Experiment 108585 PARAMETER Experiment Name: At_5mM_NaNP_cDNA_P Parameter: Timepoint (hr) Value: 6
  misc_feature: MA Experiment 108585 PARAMETER Experiment Name: At_5mM_NaNP_cDNA_P Parameter: Tissue Value: Aerial
  misc_feature: MA Experiment 108585 PARAMETER Experiment Name: At_5mM_NaNP_cDNA_P Parameter: Treatment Value: null
  misc_feature: MA Experiment ID: 108594 Result: Up-regulated in Transcription
  misc_feature: MA Experiment 108594 PARAMETER Experiment Name: At_Ler-rhl_Root_cDNA_P Parameter: Plant Line Value: null
  misc_feature: MA Experiment ID: 108595 Result: Up-regulated in Transcription
  misc_feature: MA Experiment 108595 PARAMETER Experiment Name: At_Ler-pi_Ovule_cDNA_P Parameter: Plant Line Value: null
  misc_feature: MA Experiment ID: 108667 Result: Up-regulated in Transcription
  misc_feature: MA Experiment 108667 PARAMETER Experiment Name: At_2mM_SA_cDNA_P Parameter: Plant Line Value: WS
  misc_feature: MA Experiment 108667 PARAMETER Experiment Name: At_2mM_SA_cDNA_P Parameter: Timepoint (hr) Value: 1
  misc_feature: MA Experiment 108667 PARAMETER Experiment Name: At_2mM_SA_cDNA_P Parameter: Treatment Value: 2mM SA vs. No Treatment
  misc_feature: MA Experiment ID: 108668 Result: Up-regulated in Transcription
  misc_feature: MA Experiment 108668 PARAMETER Experiment Name: At_2mM_SA_cDNA_P Parameter: Plant Line Value: WS
  misc_feature: MA Experiment 108668 PARAMETER Experiment Name: At_2mM_SA_cDNA_P Parameter: Timepoint (hr) Value: 6
  misc_feature: MA Experiment 108668 PARAMETER Experiment Name: At_2mM_SA_cDNA_P Parameter: Treatment Value: 2mM SA vs. No Treatment
  misc_feature: MA Experiment ID: 20000070 Result: Up-regulated in Transcription
  misc_feature: MA Experiment 20000070 PARAMETER Experiment Name: At_100uM_ABA_Mutants_cDNA_P Parameter: Plant Line Value: CS24
  misc_feature: MA Experiment 20000070 PARAMETER Experiment Name: At_100uM_ABA_Mutants_cDNA_P Parameter: Timepoint (hr) Value: 6
  misc_feature: MA Experiment 20000070 PARAMETER Experiment Name: At_100uM_ABA_Mutants_cDNA_P Parameter: Tissue Value: Aerial
  misc_feature: MA Experiment 20000070 PARAMETER Experiment Name: At_100uM_ABA_Mutants_cDNA_P Parameter: Treatment Value: 100uM ABA vs. No Treatment
  misc_feature: MA Experiment ID: 20000072 Result: Up-regulated in Transcription
  misc_feature: MA Experiment 20000072 PARAMETER Experiment Name: At_100uM_ABA_Mutants_cDNA_P Parameter: Plant Line Value: CS8105
  misc_feature: MA Experiment 20000072 PARAMETER Experiment Name: At_100uM_ABA_Mutants_cDNA_P Parameter: Timepoint (hr) Value: 6
  misc_feature: MA Experiment 20000072 PARAMETER Experiment Name: At_100uM_ABA_Mutants_cDNA_P Parameter: Tissue Value: Aerial
  misc_feature: MA Experiment 20000072 PARAMETER Experiment Name: At_100uM_ABA_Mutants_cDNA_P Parameter: Treatment Value: 100uM ABA vs. No Treatment
  misc_feature: MA Experiment ID: 20000086 Result: Up-regulated in Transcription
  misc_feature: MA Experiment 20000086 PARAMETER Experiment Name: At_100uM_ABA_Mutants_cDNA_P Parameter: Plant Line Value: CS22
  misc_feature: MA Experiment 20000086 PARAMETER Experiment Name: At_100uM_ABA_Mutants_cDNA_P Parameter: Timepoint (hr) Value: 6
  misc_feature: MA Experiment 20000086 PARAMETER Experiment Name: At_100uM_ABA_Mutants_cDNA_P Parameter: Tissue Value: Aerial
  misc_feature: MA Experiment 20000086 PARAMETER Experiment Name: At_100uM_ABA_Mutants_cDNA_P Parameter: Treatment Value: 100uM ABA vs. No Treatment
  misc_feature: MA Experiment ID: 20000088 Result: Up-regulated in Transcription
  misc_feature: MA Experiment 20000088 PARAMETER Experiment Name: At_100uM_ABA_Mutants_cDNA_P Parameter: Plant Line Value: Landsberg
  misc_feature: MA Experiment 20000088 PARAMETER Experiment Name: At_100uM_ABA_Mutants_cDNA_P Parameter: Timepoint (hr) Value: 6
  misc_feature: MA Experiment 20000088 PARAMETER Experiment Name: At_100uM_ABA_Mutants_cDNA_P Parameter: Tissue Value: Aerial
  misc_feature: MA Experiment 20000088 PARAMETER Experiment Name: At_100uM_ABA_Mutants_cDNA_P Parameter: Treatment Value: 100uM ABA vs. No Treatment
  misc_feature: MA Experiment ID: 20000111 Result: Down-regulated in Transcription
  misc_feature: MA Experiment 20000111 PARAMETER Experiment Name: At_42deg_Heat_cDNA_P Parameter: Temperature (deg C) Value: 42 vs. 22
  misc_feature: MA Experiment 20000111 PARAMETER Experiment Name: At_42deg_Heat_cDNA_P Parameter: Timepoint (hr) Value: 6
  misc_feature: MA Experiment 20000111 PARAMETER Experiment Name: At_42deg_Heat_cDNA_P Parameter: Tissue Value: Aerial
  misc_feature: MA Experiment ID: 20000117 Result: Up-regulated in Transcription
  misc_feature: MA Experiment 20000117 PARAMETER Experiment Name: At_100uM_ABA_Mutants_cDNA_P Parameter: Plant Line Value: Columbia
  misc_feature: MA Experiment 20000117 PARAMETER Experiment Name: At_100uM_ABA_Mutants_cDNA_P Parameter: Timepoint (hr) Value: 6
  misc_feature: MA Experiment 20000117 PARAMETER Experiment Name: At_100uM_ABA_Mutants_cDNA_P Parameter: Tissue Value: Aerial
  misc_feature: MA Experiment 20000117 PARAMETER Experiment Name: At_100uM_ABA_Mutants_cDNA_P Parameter: Treatment Value: 100uM ABA vs. No Treatment
  misc_feature: MA Experiment ID: 20000144 Result: Down-regulated in Transcription
  misc_feature: MA Experiment 20000144 PARAMETER Experiment Name: At_42deg_Heat_cDNA_P Parameter: Temperature (deg C) Value: 42 vs. 22
  misc_feature: MA Experiment 20000144 PARAMETER Experiment Name: At_42deg_Heat_cDNA_P Parameter: Timepoint (hr) Value: 1
  misc_feature: MA Experiment 20000144 PARAMETER Experiment Name: At_42deg_Heat_cDNA_P Parameter: Tissue Value: Aerial
  misc_feature: MA Experiment ID: 20000171 Result: Down-regulated in Transcription
  misc_feature: MA Experiment 20000171 PARAMETER Experiment Name: At_42deg_Heat_P Parameter: Age (day) Value: 14
  misc_feature: MA Experiment 20000171 PARAMETER Experiment Name: At_42deg_Heat_P Parameter: Organism Value: A. thaliana
  misc_feature: MA Experiment 20000171 PARAMETER Experiment Name: At_42deg_Heat_P Parameter: Plant Line Value: WS
  misc_feature: MA Experiment 20000171 PARAMETER Experiment Name: At_42deg_Heat_P Parameter: Temperature (deg C) Value: 42 vs. 22
  misc_feature: MA Experiment 20000171 PARAMETER Experiment Name: At_42deg_Heat_P Parameter: Timepoint (hr) Value: 1
  misc_feature: MA Experiment 20000171 PARAMETER Experiment Name: At_42deg_Heat_P Parameter: Tissue Value: Aerial
  misc_feature: MA Experiment ID: 20000179 Result: Down-regulated in Transcription
  misc_feature: MA Experiment 20000179 PARAMETER Experiment Name: At_Germinating_Seeds_P Parameter: Age (hr) Value: 6 vs. 0
  misc_feature: MA Experiment 20000179 PARAMETER Experiment Name: At_Germinating_Seeds_P Parameter: Tissue Value: Germinating Seeds
  misc_feature: MA Experiment ID: 20000182 Result: Up-regulated in Transcription
  misc_feature: MA Experiment 20000182 PARAMETER Experiment Name: At_2mM_SA_P Parameter: Age (day) Value: 14
  misc_feature: MA Experiment 20000182 PARAMETER Experiment Name: At_2mM_SA_P Parameter: Organism Value: A. thaliana
  misc_feature: MA Experiment 20000182 PARAMETER Experiment Name: At_2mM_SA_P Parameter: Plant Line Value: WS
  misc_feature: MA Experiment 20000182 PARAMETER Experiment Name: At_2mM_SA_P Parameter: Timepoint (hr) Value: 6
  misc_feature: MA Experiment 20000182 PARAMETER Experiment Name: At_2mM_SA_P Parameter: Tissue Value: Aerial
  misc_feature: MA Experiment 20000182 PARAMETER Experiment Name: At_2mM_SA_P Parameter: Treatment Value: 2mM SA vs. No Treatment
  misc_feature: MA Experiment ID: 20000185 Result: Down-regulated in Transcription
  misc_feature: MA Experiment 20000185 PARAMETER Experiment Name: At_Roots__P Parameter: Age (day) Value: 7 vs. 21
  misc_feature: MA Experiment 20000185 PARAMETER Experiment Name: At_Roots__P Parameter: Organism Value: A. thaliana
  misc_feature: MA Experiment 20000185 PARAMETER Experiment Name: At_Roots__P Parameter: Tissue Value: Roots vs. Whole Plant
  misc_feature: MA Experiment ID: 20000227 Result: Down-regulated in Transcription
  misc_feature: MA Experiment 20000227 PARAMETER Experiment Name: At_Root-Tips-vs-Tops_P Parameter: Tissue Value: Root Tips vs. Root Tops
  misc_feature: MA Experiment ID: 20000234 Result: Down-regulated in Transcription
  misc_feature: MA Experiment 20000234 PARAMETER Experiment Name: At_Siliques_P Parameter: Age (day) Value: 21
  misc_feature: MA Experiment 20000234 PARAMETER Experiment Name: At_Siliques_P Parameter: Organism Value: A. thaliana
  misc_feature: MA Experiment 20000234 PARAMETER Experiment Name: At_Siliques_P Parameter: Plant Line Value: WS
  misc_feature: MA Experiment 20000234 PARAMETER Experiment Name: At_Siliques_P Parameter: Tissue Value: Less Than 5mm Siliques vs. Whole Plant
  misc_feature: MA Experiment ID: 20000235 Result: Down-regulated in Transcription
  misc_feature: MA Experiment 20000235 PARAMETER Experiment Name: At_Siliques_P Parameter: Age (day) Value: 21
  misc_feature: MA Experiment 20000235 PARAMETER Experiment Name: At_Siliques_P Parameter: Organism Value: A. thaliana
  misc_feature: MA Experiment 20000235 PARAMETER Experiment Name: At_Siliques_P Parameter: Plant Line Value: WS
  misc_feature: MA Experiment 20000235 PARAMETER Experiment Name: At_Siliques_P Parameter: Tissue Value: 5-10mm Siliques vs. Whole Plant
  misc_feature: MA Experiment ID: 20000264 Result: Down-regulated in Transcription
  misc_feature: MA Experiment 20000264 PARAMETER Experiment Name: At_Open_Flower_P Parameter: Age (day) Value: 21
  misc_feature: MA Experiment 20000264 PARAMETER Experiment Name: At_Open_Flower_P Parameter: Plant Line Value: WS
  misc_feature: MA Experiment 20000264 PARAMETER Experiment Name: At_Open_Flower_P Parameter: Tissue Value: Open Flower vs. Whole Plant
  misc_feature: MA Experiment ID: 20000265 Result: Down-regulated in Transcription
  misc_feature: MA Experiment 20000265 PARAMETER Experiment Name: At_Open_Flower_P Parameter: Age (day) Value: 21
  misc_feature: MA Experiment 20000265 PARAMETER Experiment Name: At_Open_Flower_P Parameter: Plant Line Value: WS
  misc_feature: MA Experiment 20000265 PARAMETER Experiment Name: At_Open_Flower_P Parameter: Tissue Value: Closed Flower vs. Whole Plant
  misc_feature: MA Experiment ID: 20000286 Result: Down-regulated in Transcription
  misc_feature: MA Experiment 20000286 PARAMETER Experiment Name: At_Open_Flower_P Parameter: Age (day) Value: 21
  misc_feature: MA Experiment 20000286 PARAMETER Experiment Name: At_Open_Flower_P Parameter: Plant Line Value: WS
  misc_feature: MA Experiment 20000286 PARAMETER Experiment Name: At_Open_Flower_P Parameter: Tissue Value: Half Open vs. Whole Plant
  misc_feature: MA Experiment ID: 20000436 Result: Down-regulated in Transcription
  misc_feature: MA Experiment 20000436 PARAMETER Experiment Name: At_Drought_P Parameter: Age (day) Value: 7
  misc_feature: MA Experiment 20000436 PARAMETER Experiment Name: At_Drought_P Parameter: Organism Value: A. thaliana
  misc_feature: MA Experiment 20000436 PARAMETER Experiment Name: At_Drought_P Parameter: Plant Line Value: WS
  misc_feature: MA Experiment 20000436 PARAMETER Experiment Name: At_Drought_P Parameter: Timepoint (hr) Value: 12
  misc_feature: MA Experiment 20000436 PARAMETER Experiment Name: At_Drought_P Parameter: Tissue Value: Whole Plant
  misc_feature: MA Experiment 20000436 PARAMETER Experiment Name: At_Drought_P Parameter: Treatment Value: Drought vs. No Drought
  misc_feature: MA Experiment ID: 20000437 Result: Down-regulated in Transcription
  misc_feature: MA Experiment 20000437 PARAMETER Experiment Name: At_Drought_P Parameter: Age (day) Value: 8
  misc_feature: MA Experiment 20000437 PARAMETER Experiment Name: At_Drought_P Parameter: Organism Value: A. thaliana
  misc_feature: MA Experiment 20000437 PARAMETER Experiment Name: At_Drought_P Parameter: Plant Line Value: WS
  misc_feature: MA Experiment 20000437 PARAMETER Experiment Name: At_Drought_P Parameter: Timepoint (hr) Value: 24
  misc_feature: MA Experiment 20000437 PARAMETER Experiment Name: At_Drought_P Parameter: Tissue Value: Whole Plant
  misc_feature: MA Experiment 20000437 PARAMETER Experiment Name: At_Drought_P Parameter: Treatment Value: Drought vs. No Drought
  misc_feature: MA Experiment ID: 20000438 Result: Down-regulated in Transcription
  misc_feature: MA Experiment 20000438 PARAMETER Experiment Name: At_Shoots__P Parameter: Age (day) Value: 14
  misc_feature: MA Experiment 20000438 PARAMETER Experiment Name: At_Shoots__P Parameter: Tissue Value: Shoots vs. Whole Plant
  misc_feature: MA Experiment ID: 20000439 Result: Down-regulated in Transcription
  misc_feature: MA Experiment 20000439 PARAMETER Experiment Name: At_Roots__P Parameter: Age (day) Value: 14 vs. 21
  misc_feature: MA Experiment 20000439 PARAMETER Experiment Name: At_Roots__P Parameter: Organism Value: A. thaliana
  misc_feature: MA Experiment 20000439 PARAMETER Experiment Name: At_Roots__P Parameter: Tissue Value: Roots vs. Whole Plant
  misc_feature: MA Experiment ID: 20000441 Result: Up-regulated in Transcription
  misc_feature: MA Experiment 20000441 PARAMETER Experiment Name: At_1uM_BR-BRZ__P Parameter: Tissue Value: Shoot Apices
  misc_feature: MA Experiment 20000441 PARAMETER Experiment Name: At_1uM_BR-BRZ__P Parameter: Treatment Value: 1uM BR vs. No Treatment
  misc_feature: MA Experiment ID: 20000443 Result: Up-regulated in Transcription
  misc_feature: MA Experiment 20000443 PARAMETER Experiment Name: At_1uM_BR-BRZ__P Parameter: Tissue Value: Shoot Apices
  misc_feature: MA Experiment 20000443 PARAMETER Experiment Name: At_1uM_BR-BRZ__P Parameter: Treatment Value: 1uM BRZ vs. No Treatment
  misc_feature: MA Experiment ID: 20000460 Result: Up-regulated in Transcription
  misc_feature: MA Experiment 20000460 PARAMETER Experiment Name: At_10percent_PEG_P Parameter: Age (day) Value: 12
  misc_feature: MA Experiment 20000460 PARAMETER Experiment Name: At_10percent_PEG_P Parameter: Organism Value: A. thaliana
  misc_feature: MA Experiment 20000460 PARAMETER Experiment Name: At_10percent_PEG_P Parameter: Plant Line Value: WS
  misc_feature: MA Experiment 20000460 PARAMETER Experiment Name: At_10percent_PEG_P Parameter: Timepoint (day) Value: 12
  misc_feature: MA Experiment 20000460 PARAMETER Experiment Name: At_10percent_PEG_P Parameter: Tissue Value: Whole Plant
  misc_feature: MA Experiment 20000460 PARAMETER Experiment Name: At_10percent_PEG_P Parameter: Treatment Value: 10percent PEG vs. No Treatment
  misc_feature: MA Experiment ID: 20000573 Result: Down-regulated in Transcription
  misc_feature: MA Experiment 20000573 PARAMETER Experiment Name: At_100uM_ABA_Mutants__P Parameter: Organism Value: A. thaliana
  misc_feature: MA Experiment 20000573 PARAMETER Experiment Name: At_100uM_ABA_Mutants__P Parameter: Plant Line Value: CS22 vs. Ler wt
  misc_feature: MA Experiment 20000573 PARAMETER Experiment Name: At_100uM_ABA_Mutants__P Parameter: Timepoint (hr) Value: N/A
  misc_feature: MA Experiment 20000573 PARAMETER Experiment Name: At_100uM_ABA_Mutants__P Parameter: Tissue Value: Whole Plant
  misc_feature: MA Experiment 20000573 PARAMETER Experiment Name: At_100uM_ABA_Mutants__P Parameter: Treatment Value: None
  misc_feature: MA Experiment ID: 20000574 Result: Down-regulated in Transcription
  misc_feature: MA Experiment 20000574 PARAMETER Experiment Name: At_100uM_ABA_Mutants__P Parameter: Organism Value: A. thaliana
  misc_feature: MA Experiment 20000574 PARAMETER Experiment Name: At_100uM_ABA_Mutants__P Parameter: Plant Line Value: CS23 vs. Ler wt
  misc_feature: MA Experiment 20000574 PARAMETER Experiment Name: At_100uM_ABA_Mutants__P Parameter: Timepoint (hr) Value: N/A
  misc_feature: MA Experiment 20000574 PARAMETER Experiment Name: At_100uM_ABA_Mutants__P Parameter: Tissue Value: Whole Plant
  misc_feature: MA Experiment 20000574 PARAMETER Experiment Name: At_100uM_ABA_Mutants__P Parameter: Treatment Value: None
  misc_feature: MA Experiment ID: 20000576 Result: Down-regulated in Transcription
  misc_feature: MA Experiment 20000576 PARAMETER Experiment Name: At_100uM_ABA_Mutants__P Parameter: Organism Value: A. thaliana
  misc_feature: MA Experiment 20000576 PARAMETER Experiment Name: At_100uM_ABA_Mutants__P Parameter: Plant Line Value: CS23
  misc_feature: MA Experiment 20000576 PARAMETER Experiment Name: At_100uM_ABA_Mutants__P Parameter: Timepoint (hr) Value: 6
  misc_feature: MA Experiment 20000576 PARAMETER Experiment Name: At_100uM_ABA_Mutants__P Parameter: Tissue Value: Whole Plant
  misc_feature: MA Experiment 20000576 PARAMETER Experiment Name: At_100uM_ABA_Mutants__P Parameter: Treatment Value: 1uM ABA vs. No Treatment
  misc_feature: MA Experiment ID: 20000709 Result: Up-regulated in Transcription
  misc_feature: MA Experiment 20000709 PARAMETER Experiment Name: At_15mM_NH4NO3_L-to-H_P Parameter: Age (hr) Value: 14
  misc_feature: MA Experiment 20000709 PARAMETER Experiment Name: At_15mM_NH4NO3_L-to-H_P Parameter: Organism Value: A. thaliana
  misc_feature: MA Experiment 20000709 PARAMETER Experiment Name: At_15mM_NH4NO3_L-to-H_P Parameter: Plant Line Value: WS
  misc_feature: MA Experiment 20000709 PARAMETER Experiment Name: At_15mM_NH4NO3_L-to-H_P Parameter: Timepoint (hr) Value: 4
  misc_feature: MA Experiment 20000709 PARAMETER Experiment Name: At_15mM_NH4NO3_L-to-H_P Parameter: Tissue Value: Aerial
  misc_feature: MA Experiment 20000709 PARAMETER Experiment Name: At_15mM_NH4NO3_L-to-H_P Parameter: Treatment Value: 15mM NH4NO3 vs. 30mM Mannitol
  misc_feature: MA Experiment ID: 20000794 Result: Down-regulated in Transcription
  misc_feature: MA Experiment 20000794 PARAMETER Experiment Name: At_Petals_P Parameter: Age (day) Value: 23-25 days
  misc_feature: MA Experiment 20000794 PARAMETER Experiment Name: At_Petals_P Parameter: Plant Line Value: WS
  misc_feature: MA Experiment 20000794 PARAMETER Experiment Name: At_Petals_P Parameter: Tissue Value: Petals vs. Whole plant
  misc_feature: MA Experiment ID: 20001556 Result: Down-regulated in Transcription
  misc_feature: MA Experiment 20001556 PARAMETER Experiment Name: At_Drought_Soil_Dry_P Parameter: Age (day) Value: 26
  misc_feature: MA Experiment 20001556 PARAMETER Experiment Name: At_Drought_Soil_Dry_P Parameter: Organism Value: A. thaliana
  misc_feature: MA Experiment 20001556 PARAMETER Experiment Name: At_Drought_Soil_Dry_P Parameter: Plant Line Value: WS
  misc_feature: MA Experiment 20001556 PARAMETER Experiment Name: At_Drought_Soil_Dry_P Parameter: Post Timepoint (hr) Value: None
  misc_feature: MA Experiment 20001556 PARAMETER Experiment Name: At_Drought_Soil_Dry_P Parameter: Post-Treatment Value: None
  misc_feature: MA Experiment 20001556 PARAMETER Experiment Name: At_Drought_Soil_Dry_P Parameter: Timepoint (day) Value: 12
  misc_feature: MA Experiment 20001556 PARAMETER Experiment Name: At_Drought_Soil_Dry_P Parameter: Treatment Value: Drought vs. No Drought
  misc_feature: MA Experiment ID: 20001904 Result: Down-regulated in Transcription
  misc_feature: MA Experiment 20001904 PARAMETER Experiment Name: At_Drought_Reproduction_P Parameter: Age (day) Value: 37
  misc_feature: MA Experiment 20001904 PARAMETER Experiment Name: At_Drought_Reproduction_P Parameter: Organism Value: A. thaliana
  misc_feature: MA Experiment 20001904 PARAMETER Experiment Name: At_Drought_Reproduction_P Parameter: Plant Line Value: WS
  misc_feature: MA Experiment 20001904 PARAMETER Experiment Name: At_Drought_Reproduction_P Parameter: Timepoint (day) Value: 7
  misc_feature: MA Experiment 20001904 PARAMETER Experiment Name: At_Drought_Reproduction_P Parameter: Tissue Value: Rosettes
  misc_feature: MA Experiment 20001904 PARAMETER Experiment Name: At_Drought_Reproduction_P Parameter: Treatment Value: Drought vs. No Drought
attcacaccggacattttgaaatctcaacaagaaccaaaccaaacaacaaaaaaacattcttaataattatctttctgttatgtcgatgacggcggattctcaatctgattatgcttttcttgagtccatacgacgacacttactaggagaatcggagccgatactcagtgagtcgacagcgagttcggttactcaatcttgtgtaaccggtcagagcattaaaccggtgtacggacgaaaccctagctttagcaaactgtatccttgcttcaccgagagctggggagatttgccgttgaaagaaaacgattctgaggatatgttagtttacggtatcctcaacgacgcctttcacggcggttgggagccgtcttcttcgtcttccgacgaagatcgtagctctttcccgagtgttaagatcgagactccggagagtttcgcggcggtggattctgttccggtcaagaaggagaagacgagtcctgtttcggcggcggtgacggcggcgaagggaaagcattatagaggagtgagacaaaggccgtgggggaaatttgcggcggagattagagacccggcgaagaacggagctagggtttggttaggaacgtttgagacggcggaggacgcggcgttggcttacgacagagctgctttcaggatgcgtggttcccgcgctttgttgaattttccgttgagagttaattcaggagaacccgacccggttcgaatcaagtccaagagatcttctttttcttcttctaacgagaacggagctccgaagaagaggagaacggtggccgccggtggtggaatggataagggattgacggtgaagtgcgaggttgttgaagtggcacgtggcgatcgtttattggttttataattttgatttttctttgttggatgattatatgattcttcaaaaaagaagaacgttaataaaaaaattcgtttattattat

SEQ ID NO: 27256 - protein, 268 aa, Arabidopsis thaliana
  peptide (1)..(268): Ceres Seq. ID no. 12335472
  misc_feature (145)..(210): Pfam Name: AP2 domain Pfam Description: AP2 domain
  misc_feature (49)..(268): Homolog of NCBI NO: 7489077 NR Description: transcription factor Pti4 - tomato (fragment)
  misc_feature (49)..(267): Homolog of NCBI NO: 8809571 NR Description: ethylene-responsive element binding factor
  misc_feature (49)..(242): Homolog of NCBI NO: 28274828 NR Description: ethylene response factor 1 [Lycopersicon
  misc_feature (63)..(267): Homolog of NCBI NO: 21592595 NR Description: ethylene responsive element binding factor 2
  misc_feature (63)..(267): Homolog of NCBI NO: 15238041 NR Description: ethylene responsive element binding factor 2
  misc_feature (1)..(238): Homolog of NCBI NO: 7528276 NR Description: AP2-related transcription factor
  misc_feature (81)..(268): Homolog of NCBI NO: 18414897 NR Description: ethylene responsive element binding factor 1
  misc_feature (44)..(268): Homolog of NCBI NO: 25350257 NR Description: EREBP-2 protein [imported] - Arabidopsis thaliana
  misc_feature (3)..(268): Homolog of NCBI NO: 25350258 NR Description: ethylene responsive element binding factor 1
  misc_feature (1)..(268): Homolog of NCBI NO: 21264420 NR Description: Ethylene responsive element binding factor 1
MSMTADSQSDYAFLESIRRHLLGESEPILSESTASSVTQSCVTGQSIKPVYGRNPSFSKLYPCFTESWGDLPLKENDSEDMLVYGILNDAFHGGWEPSSSSSDEDRSSFPSVKIETPESFAAVDSVPVKKEKTSPVSAAVTAAKGKHYRGVRQRPWGKFAAEIRDPAKNGARVWLGTFETAEDAALAYDRAAFRMRGSRALLNFPLRVNSGEPDPVRIKSKRSSFSSSNENGAPKKRRTVAAGGGMDKGLTVKCEVVEVARGDRLLVL

SEQ ID NO: 27257 - protein, 266 aa, Arabidopsis thaliana
  peptide (1)..(266): Ceres Seq. ID no. 12335473
  misc_feature (143)..(208): Pfam Name: AP2 domain Pfam Description: AP2 domain
  misc_feature (47)..(266): Homolog of NCBI NO: 7489077 NR Description: transcription factor Pti4 - tomato (fragment)
  misc_feature (47)..(265): Homolog of NCBI NO: 8809571 NR Description: ethylene-responsive element binding factor
  misc_feature (47)..(240): Homolog of NCBI NO: 28274828 NR Description: ethylene response factor 1 [Lycopersicon
  misc_feature (61)..(265): Homolog of NCBI NO: 21592595 NR Description: ethylene responsive element binding factor 2
  misc_feature (61)..(265): Homolog of NCBI NO: 15238041 NR Description: ethylene responsive element binding factor 2
  misc_feature (1)..(236): Homolog of NCBI NO: 7528276 NR Description: AP2-related transcription factor
  misc_feature (79)..(266): Homolog of NCBI NO: 18414897 NR Description: ethylene responsive element binding factor 1
  misc_feature (42)..(266): Homolog of NCBI NO: 25350257 NR Description: EREBP-2 protein [imported] - Arabidopsis thaliana
  misc_feature (1)..(266): Homolog of NCBI NO: 25350258 NR Description: ethylene responsive element binding factor 1
  misc_feature (1)..(266): Homolog of NCBI NO: 21264420 NR Description: Ethylene responsive element binding factor 1
MTADSQSDYAFLESIRRHLLGESEPILSESTASSVTQSCVTGQSIKPVYGRNPSFSKLYPCFTESWGDLPLKENDSEDMLVYGILNDAFHGGWEPSSSSSDEDRSSFPSVKIETPESFAAVDSVPVKKEKTSPVSAAVTAAKGKHYRGVRQRPWGKFAAEIRDPAKNGARVWLGTFETAEDAALAYDRAAFRMRGSRALLNFPLRVNSGEPDPVRIKSKRSSFSSSNENGAPKKRRTVAAGGGMDKGLTVKCEVVEVARGDRLLVL

SEQ ID NO: 27258 - protein, 188 aa, Arabidopsis thaliana
  peptide (1)..(188): Ceres Seq. ID no. 12335474
  misc_feature (65)..(130): Pfam Name: AP2 domain Pfam Description: AP2 domain
  misc_feature (1)..(188): Homolog of NCBI NO: 7489077 NR Description: transcription factor Pti4 - tomato (fragment)
  misc_feature (1)..(187): Homolog of NCBI NO: 8809571 NR Description: ethylene-responsive element binding factor
  misc_feature (1)..(162): Homolog of NCBI NO: 28274828 NR Description: ethylene response factor 1 [Lycopersicon
  misc_feature (1)..(187): Homolog of NCBI NO: 21592595 NR Description: ethylene responsive element binding factor 2
  misc_feature (1)..(187): Homolog of NCBI NO: 15238041 NR Description: ethylene responsive element binding factor 2
  misc_feature (1)..(158): Homolog of NCBI NO: 7528276 NR Description: AP2-related transcription factor
  misc_feature (1)..(188): Homolog of NCBI NO: 18414897 NR Description: ethylene responsive element binding factor 1
  misc_feature (1)..(188): Homolog of NCBI NO: 25350257 NR Description: EREBP-2 protein [imported] - Arabidopsis thaliana
  misc_feature (1)..(188): Homolog of NCBI NO: 25350258 NR Description: ethylene responsive element binding factor 1
  misc_feature (1)..(188): Homolog of NCBI NO: 21264420 NR Description: Ethylene responsive element binding factor 1
MLVYGILNDAFHGGWEPSSSSSDEDRSSFPSVKIETPESFAAVDSVPVKKEKTSPVSAAVTAAKGKHYRGVRQRPWGKFAAEIRDPAKNGARVWLGTFETAEDAALAYDRAAFRMRGSRALLNFPLRVNSGEPDPVRIKSKRSSFSSSNENGAPKKRRTVAAGGGMDKGLTVKCEVVEVARGDRLLVL

SEQ ID NO: 27259 - DNA, 958 bp, Arabidopsis thaliana
  misc_feature (1)..(958): Ceres Seq. ID no. 13575744
  misc_feature: MA Experiment ID: 108434 Result: Down-regulated in Transcription
  misc_feature: MA Experiment 108434 PARAMETER Experiment Name: At_Root_Tips_cDNA_P Parameter: Tissue Value: Root Tips
  misc_feature: MA Experiment ID: 108435 Result: Down-regulated in Transcription
  misc_feature: MA Experiment 108435 PARAMETER Experiment Name: At_stm_Mutants_cDNA_P Parameter: Plant Line Value: wt Landsburg vs stm
  misc_feature: MA Experiment 108435 PARAMETER Experiment Name: At_stm_Mutants_cDNA_P Parameter: Tissue Value: Shoot Apical Meristem Region
  misc_feature: MA Experiment ID: 108501 Result: Down-regulated in Transcription
  misc_feature: MA Experiment 108501 PARAMETER Experiment Name: At_ap2_floral_buds_cDNA_P Parameter: Plant Line Value: ap2 (Ler.)
  misc_feature: MA Experiment 108501 PARAMETER Experiment Name: At_ap2_floral_buds_cDNA_P Parameter: Tissue Value: Closed Flower
  misc_feature: MA Experiment ID: 108572 Result: Up-regulated in Transcription
  misc_feature: MA Experiment 108572 PARAMETER Experiment Name: At_Drought_cDNA_P Parameter: Timepoint (hr) Value: 1
  misc_feature: MA Experiment 108572 PARAMETER Experiment Name: At_Drought_cDNA_P Parameter: Tissue Value: Aerial
  misc_feature: MA Experiment 108572 PARAMETER Experiment Name: At_Drought_cDNA_P Parameter: Treatment Value: Drought vs. No Drought
  misc_feature: MA Experiment ID: 108573 Result: Up-regulated in Transcription
  misc_feature: MA Experiment 108573 PARAMETER Experiment Name: At_Drought_cDNA_P Parameter: Timepoint (hr) Value: 6
  misc_feature: MA Experiment 108573 PARAMETER Experiment Name: At_Drought_cDNA_P Parameter: Tissue Value: Aerial
  misc_feature: MA Experiment 108573 PARAMETER Experiment Name: At_Drought_cDNA_P Parameter: Treatment Value: Drought vs. No Drought
  misc_feature: MA Experiment ID: 108574 Result: Down-regulated in Transcription
  misc_feature: MA Experiment 108574 PARAMETER Experiment Name: At_Wounding__cDNA_P Parameter: Timepoint (hr) Value: 1
  misc_feature: MA Experiment 108574 PARAMETER Experiment Name: At_Wounding__cDNA_P Parameter: Tissue Value: Aerial
  misc_feature: MA Experiment 108574 PARAMETER Experiment Name: At_Wounding__cDNA_P Parameter: Treatment Value: Wounding vs. No Wounding
  misc_feature: MA Experiment ID: 108577 Result: Down-regulated in Transcription
  misc_feature: MA Experiment 108577 PARAMETER Experiment Name: At_42deg_Heat_cDNA_P Parameter: Temperature (deg C) Value: 42 vs. 22
  misc_feature: MA Experiment 108577 PARAMETER Experiment Name: At_42deg_Heat_cDNA_P Parameter: Timepoint (hr) Value: 6
  misc_feature: MA Experiment 108577 PARAMETER Experiment Name: At_42deg_Heat_cDNA_P Parameter: Tissue Value: Aerial
  misc_feature: MA Experiment ID: 108595 Result: Up-regulated in Transcription
  misc_feature: MA Experiment 108595 PARAMETER Experiment Name: At_Ler-pi_Ovule_cDNA_P Parameter: Plant Line Value: null
  misc_feature: MA Experiment ID: 20000069 Result: Up-regulated in Transcription
  misc_feature: MA Experiment 20000069 PARAMETER Experiment Name: At_100uM_ABA_Mutants_cDNA_P Parameter: Plant Line Value: CS23
  misc_feature: MA Experiment 20000069 PARAMETER Experiment Name: At_100uM_ABA_Mutants_cDNA_P Parameter: Timepoint (hr) Value: 6
  misc_feature: MA Experiment 20000069 PARAMETER Experiment Name: At_100uM_ABA_Mutants_cDNA_P Parameter: Tissue Value: Aerial
  misc_feature: MA Experiment 20000069 PARAMETER Experiment Name: At_100uM_ABA_Mutants_cDNA_P Parameter: Treatment Value: 100uM ABA vs. No Treatment
  misc_feature: MA Experiment ID: 20000070 Result: Up-regulated in Transcription
  misc_feature: MA Experiment 20000070 PARAMETER Experiment Name: At_100uM_ABA_Mutants_cDNA_P Parameter: Plant Line Value: CS24
  misc_feature: MA Experiment 20000070 PARAMETER Experiment Name: At_100uM_ABA_Mutants_cDNA_P Parameter: Timepoint (hr) Value: 6
  misc_feature: MA Experiment 20000070 PARAMETER Experiment Name: At_100uM_ABA_Mutants_cDNA_P Parameter: Tissue Value: Aerial
  misc_feature: MA Experiment 20000070 PARAMETER Experiment Name: At_100uM_ABA_Mutants_cDNA_P Parameter: Treatment Value: 100uM ABA vs. No Treatment
  misc_feature: MA Experiment ID: 20000071 Result: Up-regulated in Transcription
  misc_feature: MA Experiment 20000071 PARAMETER Experiment Name: At_100uM_ABA_Mutants_cDNA_P Parameter: Plant Line Value: CS8104
  misc_feature: MA Experiment 20000071 PARAMETER Experiment Name: At_100uM_ABA_Mutants_cDNA_P Parameter: Timepoint (hr) Value: 6
  misc_feature: MA Experiment 20000071 PARAMETER Experiment Name: At_100uM_ABA_Mutants_cDNA_P Parameter: Tissue Value: Aerial
  misc_feature: MA Experiment 20000071 PARAMETER Experiment Name: At_100uM_ABA_Mutants_cDNA_P Parameter: Treatment Value: 100uM ABA vs. No Treatment
  misc_feature: MA Experiment ID: 20000072 Result: Up-regulated in Transcription
  misc_feature: MA Experiment 20000072 PARAMETER Experiment Name: At_100uM_ABA_Mutants_cDNA_P Parameter: Plant Line Value: CS8105
  misc_feature: MA Experiment 20000072 PARAMETER Experiment Name: At_100uM_ABA_Mutants_cDNA_P Parameter: Timepoint (hr) Value: 6
  misc_feature: MA Experiment 20000072 PARAMETER Experiment Name: At_100uM_ABA_Mutants_cDNA_P Parameter: Tissue Value: Aerial
  misc_feature: MA Experiment 20000072 PARAMETER Experiment Name: At_100uM_ABA_Mutants_cDNA_P Parameter: Treatment Value: 100uM ABA vs. No Treatment
  misc_feature: MA Experiment ID: 20000086 Result: Up-regulated in Transcription
  misc_feature: MA Experiment 20000086 PARAMETER Experiment Name: At_100uM_ABA_Mutants_cDNA_P Parameter: Plant Line Value: CS22
  misc_feature: MA Experiment 20000086 PARAMETER Experiment Name: At_100uM_ABA_Mutants_cDNA_P Parameter: Timepoint (hr) Value: 6
  misc_feature: MA Experiment 20000086 PARAMETER Experiment Name: At_100uM_ABA_Mutants_cDNA_P Parameter: Tissue Value: Aerial
  misc_feature: MA Experiment 20000086 PARAMETER Experiment Name: At_100uM_ABA_Mutants_cDNA_P Parameter: Treatment Value: 100uM ABA vs. No Treatment
  misc_feature: MA Experiment ID: 20000087 Result: Up-regulated in Transcription
  misc_feature: MA Experiment 20000087 PARAMETER Experiment Name: At_100uM_ABA_Mutants_cDNA_P Parameter: Plant Line Value: WS
  misc_feature: MA Experiment 20000087 PARAMETER Experiment Name: At_100uM_ABA_Mutants_cDNA_P Parameter: Timepoint (hr) Value: 6
  misc_feature: MA Experiment 20000087 PARAMETER Experiment Name: At_100uM_ABA_Mutants_cDNA_P Parameter: Tissue Value: Aerial
  misc_feature: MA Experiment 20000087 PARAMETER Experiment Name: At_100uM_ABA_Mutants_cDNA_P Parameter: Treatment Value: 100uM ABA vs. No Treatment
  misc_feature: MA Experiment ID: 20000088 Result: Up-regulated in Transcription
  misc_feature: MA Experiment 20000088 PARAMETER Experiment Name: At_100uM_ABA_Mutants_cDNA_P Parameter: Plant Line Value: Landsberg
  misc_feature: MA Experiment 20000088 PARAMETER Experiment Name: At_100uM_ABA_Mutants_cDNA_P Parameter: Timepoint (hr) Value: 6
  misc_feature: MA Experiment 20000088 PARAMETER Experiment Name: At_100uM_ABA_Mutants_cDNA_P Parameter: Tissue Value: Aerial
  misc_feature: MA Experiment 20000088 PARAMETER Experiment Name: At_100uM_ABA_Mutants_cDNA_P Parameter: Treatment Value: 100uM ABA vs. No Treatment
  misc_feature: MA Experiment ID: 20000089 Result: Up-regulated in Transcription
  misc_feature: MA Experiment ID: 20000090 Result: Up-regulated in Transcription
  misc_feature: MA Experiment ID: 20000117 Result: Up-regulated in Transcription
  misc_feature: MA Experiment 20000117 PARAMETER Experiment Name: At_100uM_ABA_Mutants_cDNA_P Parameter: Plant Line Value: Columbia
  misc_feature: MA Experiment 20000117 PARAMETER Experiment Name: At_100uM_ABA_Mutants_cDNA_P Parameter: Timepoint (hr) Value: 6
  misc_feature: MA Experiment 20000117 PARAMETER Experiment Name: At_100uM_ABA_Mutants_cDNA_P Parameter: Tissue Value: Aerial
  misc_feature: MA Experiment 20000117 PARAMETER Experiment Name: At_100uM_ABA_Mutants_cDNA_P Parameter: Treatment Value: 100uM ABA vs. No Treatment
  misc_feature: MA Experiment ID: 20000224 Result: Down-regulated in Transcription
  misc_feature: MA Experiment ID: 20000234 Result: Down-regulated in Transcription
  misc_feature: MA Experiment 20000234 PARAMETER Experiment Name: At_Siliques_P Parameter: Age (day) Value: 21
  misc_feature: MA Experiment 20000234 PARAMETER Experiment Name: At_Siliques_P Parameter: Organism Value: A. thaliana
  misc_feature: MA Experiment 20000234 PARAMETER Experiment Name: At_Siliques_P Parameter: Plant Line Value: WS
  misc_feature: MA Experiment 20000234 PARAMETER Experiment Name: At_Siliques_P Parameter: Tissue Value: Less Than 5mm Siliques vs. Whole Plant
  misc_feature: MA Experiment ID: 20000265 Result: Down-regulated in Transcription
  misc_feature: MA Experiment 20000265 PARAMETER Experiment Name: At_Open_Flower_P Parameter: Age (day) Value: 21
  misc_feature: MA Experiment 20000265 PARAMETER Experiment Name: At_Open_Flower_P Parameter: Plant Line Value: WS
  misc_feature: MA Experiment 20000265 PARAMETER Experiment Name: At_Open_Flower_P Parameter: Tissue Value: Closed Flower vs. Whole Plant
  misc_feature: MA Experiment ID: 20000438 Result: Down-regulated in Transcription
  misc_feature: MA Experiment 20000438 PARAMETER Experiment Name: At_Shoots__P Parameter: Age (day) Value: 14
  misc_feature: MA Experiment 20000438 PARAMETER Experiment Name: At_Shoots__P Parameter: Tissue Value: Shoots vs. Whole Plant
  misc_feature: MA Experiment ID: 20000794 Result: Up-regulated in Transcription
  misc_feature: MA Experiment 20000794 PARAMETER Experiment Name: At_Petals_P Parameter: Age (day) Value: 23-25 days
  misc_feature: MA Experiment 20000794 PARAMETER Experiment Name: At_Petals_P Parameter: Plant Line Value: WS
  misc_feature: MA Experiment 20000794 PARAMETER Experiment Name: At_Petals_P Parameter: Tissue Value: Petals vs. Whole plant
  misc_feature: MA Experiment ID: 20001248 Result: Up-regulated in Transcription
  misc_feature: MA Experiment 20001248 PARAMETER Experiment Name: At_Far-red-induction_P Parameter: Age (day) Value: 7
  misc_feature: MA Experiment 20001248 PARAMETER Experiment Name: At_Far-red-induction_P Parameter: Light Value: Far-red vs. White
  misc_feature: MA Experiment 20001248 PARAMETER Experiment Name: At_Far-red-induction_P Parameter: Organism Value: A. thaliana
  misc_feature: MA Experiment 20001248 PARAMETER Experiment Name: At_Far-red-induction_P Parameter: Plant Line Value: Columbia
  misc_feature: MA Experiment 20001248 PARAMETER Experiment Name: At_Far-red-induction_P Parameter: Timepoint (hr) Value: 4
  misc_feature: MA Experiment 20001248 PARAMETER Experiment Name: At_Far-red-induction_P Parameter: Tissue Value: Whole Plant
  misc_feature: MA Experiment ID: 20001558 Result: Down-regulated in Transcription
  misc_feature: MA Experiment 20001558 PARAMETER Experiment Name: At_Drought_Soil_Dry_P Parameter: Age (day) Value: 27
  misc_feature: MA Experiment 20001558 PARAMETER Experiment Name: At_Drought_Soil_Dry_P Parameter: Organism Value: A. thaliana
  misc_feature: MA Experiment 20001558 PARAMETER Experiment Name: At_Drought_Soil_Dry_P Parameter: Plant Line Value: WS
  misc_feature: MA Experiment 20001558 PARAMETER Experiment Name: At_Drought_Soil_Dry_P Parameter: Post Timepoint (hr) Value: 6
  misc_feature: MA Experiment 20001558 PARAMETER Experiment Name: At_Drought_Soil_Dry_P Parameter: Post-Treatment Value: Re-Water vs. No Drought
  misc_feature: MA Experiment 20001558 PARAMETER Experiment Name: At_Drought_Soil_Dry_P Parameter: Timepoint (day) Value: 13
  misc_feature: MA Experiment 20001558 PARAMETER Experiment Name: At_Drought_Soil_Dry_P Parameter: Treatment Value: Drought vs. No Drought
  misc_feature: MA Experiment ID: 20001560 Result: Down-regulated in Transcription
  misc_feature: MA Experiment 20001560 PARAMETER Experiment Name: At_Drought_Soil_Dry_P Parameter: Age (day) Value: 28
  misc_feature: MA Experiment 20001560 PARAMETER Experiment Name: At_Drought_Soil_Dry_P Parameter: Organism Value: A. thaliana
  misc_feature: MA Experiment 20001560 PARAMETER Experiment Name: At_Drought_Soil_Dry_P Parameter: Plant Line Value: WS
  misc_feature: MA Experiment 20001560 PARAMETER Experiment Name: At_Drought_Soil_Dry_P Parameter: Post Timepoint (hr) Value: None
  misc_feature: MA Experiment 20001560 PARAMETER Experiment Name: At_Drought_Soil_Dry_P Parameter: Post-Treatment Value: None
  misc_feature: MA Experiment 20001560 PARAMETER Experiment Name: At_Drought_Soil_Dry_P Parameter: Timepoint (day) Value: 14
  misc_feature: MA Experiment 20001560 PARAMETER Experiment Name: At_Drought_Soil_Dry_P Parameter: Treatment Value: Drought vs. No Drought
aattgcaaatcaaatggatcgtcttaagctttatttctccgttttcgttttgtctttctttatcgtctcggtttcgtcgtctgatgtcaacgacggcgatgatctcgtgatccgtcaggtggttggtggagccgagcctcaggttttgacctcagaggatcacttttctctctttggaaggtgctaacttcctcgctaccggcaaactcgtcagcctcagcgaacaacagctcgtcgactgtgatcacgagtgtgatcccgaggaggcagattcctgcgactctggttgcaatggtgggctaatgaacagcgcttttgaatacaccctcaaaaccggagggctcatgaaagaagaagactatccttacaccggaaaggacggcaagacctgcaagctagacaagtccaagatcgttgcctctgtctccaacttcagtgttatctccattgatgaagaacagattgctgcaaaccttgtcaagaacggacctcttgctgtagccatcaacgctggctatatgcagacttacattggaggagtctcatgcccttacatatgcaccaggaggctcaaccacggtgtcttattggttggctatggagcggcaggttacgctccggctaggttcaaggagaagccttactggatcatcaagaactcgtggggagagacttggggtgaaaatggtttctacaaaatctgcaaaggccgtaacatttgtggtgttgacagtatggtctccactgttgcagccaccgtctcaaccaccgcccattaagcatctcgtcaataagttttaattactttggtgatttgtatgagcgagctctctttgcgctgctgactctctctatttatctctgcttcttgcttgtaaataaaatgcgttctattgagcaaaaccgtacaatgctcattagcaatgagcccactttaacaagtatcagtttatggctc

SEQ ID NO: 27260 - protein, 158 aa, Arabidopsis thaliana
  peptide (1)..(158): Ceres Seq. ID no. 13575745
  misc_feature (1)..(150): Pfam Name: Papain family cysteine protease Pfam Description: Papain family cysteine protease
  misc_feature (1)..(150): Pfam Name: Papain family cysteine protease Pfam Description: Papain family cysteine protease
  misc_feature (1)..(157): Homolog of NCBI NO: 7381221 NR Description: papain-like cysteine proteinase isoform II
  misc_feature (1)..(154): Homolog of NCBI NO: 516865 NR Description: putative thiol protease [Arabidopsis thaliana]
  misc_feature (1)..(157): Homolog of NCBI NO: 7211743 NR Description: papain-like cysteine proteinase isoform II
  misc_feature (1)..(157): Homolog of NCBI NO: 7211745 NR Description: papain-like cysteine proteinase isoform III
  misc_feature (1)..(157): Homolog of NCBI NO: 7381219 NR Description: papain-like cysteine proteinase isoform I
  misc_feature (1)..(157): Homolog of NCBI NO: 7381221 NR Description: papain-like cysteine proteinase isoform II
  misc_feature (1)..(157): Homolog of NCBI NO: 7211743 NR Description: papain-like cysteine proteinase isoform II
  misc_feature (1)..(157): Homolog of NCBI NO: 7381219 NR Description: papain-like cysteine proteinase isoform I
  misc_feature (1)..(158): Homolog of NCBI NO: 18420375 NR Description: cysteine proteinase RD19A [Arabidopsis thaliana]
  misc_feature (1)..(158): Homolog of NCBI NO: 21593213 NR Description: cysteine proteinase RD19A [Arabidopsis thaliana]
  misc_feature (1)..(158): Homolog of NCBI NO: 18141287 NR Description: senescence-associated cysteine protease [Brassica
  misc_feature (1)..(154): Homolog of NCBI NO: 18399697 NR Description: cysteine proteinase A494 precursor, putative
  misc_feature (1)..(157): Homolog of NCBI NO: 7211741 NR Description: papain-like cysteine proteinase isoform I
  misc_feature (1)..(157): Homolog of NCBI NO: 7211745 NR Description: papain-like cysteine proteinase isoform III
  misc_feature (1)..(154): Homolog of NCBI NO: 516865 NR Description: putative thiol protease [Arabidopsis thaliana]
  misc_feature (1)..(157): Homolog of NCBI NO: 7211741 NR Description: papain-like cysteine proteinase isoform I
  misc_feature (1)..(154): Homolog of NCBI NO: 18399697 NR Description: cysteine proteinase A494 precursor, putative
  misc_feature (1)..(158): Homolog of NCBI NO: 18141287 NR Description: senescence-associated cysteine protease [Brassica
  misc_feature (1)..(158): Homolog of NCBI NO: 21593213 NR Description: cysteine proteinase RD19A [Arabidopsis thaliana]
  misc_feature (1)..(158): Homolog of NCBI NO: 18420375 NR Description: cysteine proteinase RD19A [Arabidopsis thaliana]
MNSAFEYTLKTGGLMKEEDYPYTGKDGKTCKLDKSKIVASVSNFSVISIDEEQIAANLVKNGPLAVAINAGYMQTYIGGVSCPYICTRRLNHGVLLVGYGAAGYAPARFKEKPYWIIKNSWGETWGENGFYKICKGRNICGVDSMVSTVAATVSTTAH

SEQ ID NO: 27261 - protein, 144 aa, Arabidopsis thaliana
  peptide (1)..(144): Ceres Seq. ID no. 13575746
  misc_feature (1)..(136): Pfam Name: Papain family cysteine protease Pfam Description: Papain family cysteine protease
  misc_feature (1)..(136): Pfam Name: Papain family cysteine protease Pfam Description: Papain family cysteine protease
  misc_feature (1)..(143): Homolog of NCBI NO: 7381221 NR Description: papain-like cysteine proteinase isoform II
  misc_feature (1)..(140): Homolog of NCBI NO: 516865 NR Description: putative thiol protease [Arabidopsis thaliana]
  misc_feature (1)..(143): Homolog of NCBI NO: 7211743 NR Description: papain-like cysteine proteinase isoform II
  misc_feature (1)..(143): Homolog of NCBI NO: 7211745 NR Description: papain-like cysteine proteinase isoform III
  misc_feature (1)..(143): Homolog of NCBI NO: 7381219 NR Description: papain-like cysteine proteinase isoform I
  misc_feature (1)..(143): Homolog of NCBI NO: 7381221 NR Description: papain-like cysteine proteinase isoform II
  misc_feature (1)..(143): Homolog of NCBI NO: 7211743 NR Description: papain-like cysteine proteinase isoform II
  misc_feature (1)..(143): Homolog of NCBI NO: 7381219 NR Description: papain-like cysteine proteinase isoform I
  misc_feature (1)..(144): Homolog of NCBI NO: 18420375 NR Description: cysteine proteinase RD19A [Arabidopsis thaliana]
  misc_feature (1)..(144): Homolog of NCBI NO: 21593213 NR Description: cysteine proteinase RD19A [Arabidopsis thaliana]
  misc_feature (1)..(144): Homolog of NCBI NO: 18141287 NR Description: senescence-associated cysteine protease [Brassica
  misc_feature (1)..(140): Homolog of NCBI NO: 18399697 NR Description: cysteine proteinase A494 precursor, putative
  misc_feature (1)..(143): Homolog of NCBI NO: 7211741 NR Description: papain-like cysteine proteinase isoform I
  misc_feature (1)..(143): Homolog of NCBI NO: 7211745 NR Description: papain-like cysteine proteinase isoform III
  misc_feature (1)..(140): Homolog of NCBI NO: 516865 NR Description: putative thiol protease [Arabidopsis thaliana]
  misc_feature (1)..(143): Homolog of NCBI NO: 7211741 NR Description: papain-like cysteine proteinase isoform I
  misc_feature (1)..(140): Homolog of NCBI NO: 18399697 NR Description: cysteine proteinase A494 precursor, putative
  misc_feature (1)..(144): Homolog of NCBI NO: 18141287 NR Description: senescence-associated cysteine protease [Brassica
  misc_feature (1)..(144): Homolog of NCBI NO: 21593213 NR Description: cysteine proteinase RD19A [Arabidopsis thaliana]
  misc_feature (1)..(144): Homolog of NCBI NO: 18420375 NR Description: cysteine proteinase RD19A [Arabidopsis thaliana]
MKEEDYPYTGKDGKTCKLDKSKIVASVSNFSVISIDEEQIAANLVKNGPLAVAINAGYMQTYIGGVSCPYICTRRLNHGVLLVGYGAAGYAPARFKEKPYWIIKNSWGETWGENGFYKICKGRNICGVDSMVSTVAATVSTTAH

SEQ ID NO: 27262 - protein, 86 aa, Arabidopsis thaliana
  peptide (1)..(86): Ceres Seq. ID no. 13575747
  misc_feature (1)..(78): Pfam Name: Papain family cysteine protease Pfam Description: Papain family cysteine protease
  misc_feature (1)..(78): Pfam Name: Papain family cysteine protease Pfam Description: Papain family cysteine protease
  misc_feature (1)..(85): Homolog of NCBI NO: 7381221 NR Description: papain-like cysteine proteinase isoform II
  misc_feature (1)..(82): Homolog of NCBI NO: 516865 NR Description: putative thiol protease [Arabidopsis thaliana]
  misc_feature (1)..(85): Homolog of NCBI NO: 7211743 NR Description: papain-like cysteine proteinase isoform II
  misc_feature (1)..(85): Homolog of NCBI NO: 7211745 NR Description: papain-like cysteine proteinase isoform III
  misc_feature (1)..(85): Homolog of NCBI NO: 7381219 NR Description: papain-like cysteine proteinase isoform I
  misc_feature (1)..(85): Homolog of NCBI NO: 7381221 NR Description: papain-like cysteine proteinase isoform II
  misc_feature (1)..(85): Homolog of NCBI NO: 7211743 NR Description: papain-like cysteine proteinase isoform II
  misc_feature (1)..(85): Homolog of NCBI NO: 7381219 NR Description: papain-like cysteine proteinase isoform I
  misc_feature (1)..(86): Homolog of NCBI NO: 18420375 NR Description: cysteine proteinase RD19A [Arabidopsis thaliana]
  misc_feature (1)..(86): Homolog of NCBI NO: 21593213 NR Description: cysteine proteinase RD19A [Arabidopsis thaliana]
  misc_feature (1)..(86): Homolog of NCBI NO: 18141287 NR Description: senescence-associated cysteine protease [Brassica
  misc_feature (1)..(82): Homolog of NCBI NO: 18399697 NR Description: cysteine proteinase A494 precursor, putative
  misc_feature (1)..(85): Homolog of NCBI NO: 7211741 NR Description: papain-like cysteine proteinase isoform I
  misc_feature (1)..(85): Homolog of NCBI NO: 7211745 NR Description: papain-like cysteine proteinase isoform III
  misc_feature (1)..(82): Homolog of NCBI NO: 516865 NR Description: putative thiol protease [Arabidopsis thaliana]
  misc_feature (1)..(85): Homolog of NCBI NO: 7211741 NR Description: papain-like cysteine proteinase isoform I
  misc_feature (1)..(82): Homolog of NCBI NO: 18399697 NR Description: cysteine proteinase A494 precursor, putative
  misc_feature (1)..(86): Homolog of NCBI NO: 18141287 NR Description: senescence-associated cysteine protease [Brassica
  misc_feature (1)..(86): Homolog of NCBI NO: 21593213 NR Description: cysteine proteinase RD19A [Arabidopsis thaliana]
  misc_feature (1)..(86): Homolog of NCBI NO: 18420375 NR Description: cysteine proteinase RD19A [Arabidopsis thaliana]
MQTYIGGVSCPYICTRRLNHGVLLVGYGAAGYAPARFKEKPYWIIKNSWGETWGENGFYKICKGRNICGVDSMVSTVAATVSTTAH

SEQ ID NO: 27263 - DNA, 1071 bp, Arabidopsis thaliana
  misc_feature (1)..(1071): Ceres Seq. ID no. 12331353
  misc_feature: MA Experiment ID: 108434 Result: Down-regulated in Transcription
  misc_feature: MA Experiment 108434 PARAMETER Experiment Name: At_Root_Tips_cDNA_P Parameter: Tissue Value: Root Tips
  misc_feature: MA Experiment ID: 108461 Result: Up-regulated in Transcription
  misc_feature: MA Experiment 108461 PARAMETER Experiment Name: At_Germinating_Seeds_cDNA_P Parameter: Age (day) Value: 1 vs. 0
  misc_feature: MA Experiment 108461 PARAMETER Experiment Name: At_Germinating_Seeds_cDNA_P Parameter: Tissue Value: Germinating Seeds
  misc_feature: MA Experiment ID: 108462 Result: Up-regulated in Transcription
  misc_feature: MA Experiment 108462 PARAMETER Experiment Name: At_Germinating_Seeds_cDNA_P Parameter: Age (day) Value: 2 vs. 0
  misc_feature: MA Experiment 108462 PARAMETER Experiment Name: At_Germinating_Seeds_cDNA_P Parameter: Tissue Value: Germinating Seeds
  misc_feature: MA Experiment ID: 108463 Result: Up-regulated in Transcription
  misc_feature: MA Experiment 108463 PARAMETER Experiment Name: At_Germinating_Seeds_cDNA_P Parameter: Age (day) Value: 3 vs. 0
  misc_feature: MA Experiment 108463 PARAMETER Experiment Name: At_Germinating_Seeds_cDNA_P Parameter: Tissue Value: Germinating Seeds
  misc_feature: MA Experiment ID: 108464 Result: Up-regulated in Transcription
  misc_feature: MA Experiment 108464 PARAMETER Experiment Name: At_Germinating_Seeds_cDNA_P Parameter: Age (day) Value: 4 vs. 0
  misc_feature: MA Experiment 108464 PARAMETER Experiment Name: At_Germinating_Seeds_cDNA_P Parameter: Tissue Value: Germinating Seeds
  misc_feature: MA Experiment ID: 108573 Result: Up-regulated in Transcription
  misc_feature: MA Experiment 108573 PARAMETER Experiment Name: At_Drought_cDNA_P Parameter: Timepoint (hr) Value: 6
  misc_feature: MA Experiment 108573 PARAMETER Experiment Name: At_Drought_cDNA_P Parameter: Tissue Value: Aerial
  misc_feature: MA Experiment 108573 PARAMETER Experiment Name: At_Drought_cDNA_P Parameter: Treatment Value: Drought vs. No Drought
  misc_feature: MA Experiment ID: 108574 Result: Up-regulated in Transcription
  misc_feature: MA Experiment 108574 PARAMETER Experiment Name: At_Wounding__cDNA_P Parameter: Timepoint (hr) Value: 1
  misc_feature: MA Experiment 108574 PARAMETER Experiment Name: At_Wounding__cDNA_P Parameter: Tissue Value: Aerial
  misc_feature: MA Experiment 108574 PARAMETER Experiment Name: At_Wounding__cDNA_P Parameter: Treatment Value: Wounding vs. No Wounding
  misc_feature: MA Experiment ID: 20000069 Result: Down-regulated in Transcription
  misc_feature: MA Experiment 20000069 PARAMETER Experiment Name: At_100uM_ABA_Mutants_cDNA_P Parameter: Plant Line Value: CS23
  misc_feature: MA Experiment 20000069 PARAMETER Experiment Name: At_100uM_ABA_Mutants_cDNA_P Parameter: Timepoint (hr) Value: 6
  misc_feature: MA Experiment 20000069 PARAMETER Experiment Name: At_100uM_ABA_Mutants_cDNA_P Parameter: Tissue Value: Aerial
  misc_feature: MA Experiment 20000069 PARAMETER Experiment Name: At_100uM_ABA_Mutants_cDNA_P Parameter: Treatment Value: 100uM ABA vs. No Treatment
  misc_feature: MA Experiment ID: 20000180 Result: Up-regulated in Transcription
  misc_feature: MA Experiment 20000180 PARAMETER Experiment Name: At_Germinating_Seeds_P Parameter: Age (hr) Value: 24 vs. 0
  misc_feature: MA Experiment 20000180 PARAMETER Experiment Name: At_Germinating_Seeds_P Parameter: Tissue Value: Germinating Seeds
  misc_feature: MA Experiment ID: 20000211 Result: Up-regulated in Transcription
  misc_feature: MA Experiment 20000211 PARAMETER Experiment Name: At_0.001percent_MeJA__P Parameter: Age (day) Value: 14
  misc_feature: MA Experiment 20000211 PARAMETER Experiment Name: At_0.001percent_MeJA__P Parameter: Organism Value: A. thaliana
  misc_feature: MA Experiment 20000211 PARAMETER Experiment Name: At_0.001percent_MeJA__P Parameter: Plant Line Value: WS
  misc_feature: MA Experiment 20000211 PARAMETER Experiment Name: At_0.001percent_MeJA__P Parameter: Timepoint (hr) Value: 1
  misc_feature: MA Experiment 20000211 PARAMETER Experiment Name: At_0.001percent_MeJA__P Parameter: Tissue Value: Aerial
  misc_feature: MA Experiment 20000211 PARAMETER Experiment Name: At_0.001percent_MeJA__P Parameter: Treatment Value: 0.001percent MeJA vs. No Treatment
  misc_feature: MA Experiment ID: 20000227 Result: Down-regulated in Transcription
  misc_feature: MA Experiment 20000227 PARAMETER Experiment Name: At_Root-Tips-vs-Tops_P Parameter: Tissue Value: Root Tips vs. Root Tops
  misc_feature: MA Experiment ID: 20000269 Result: Down-regulated in Transcription
  misc_feature: MA Experiment 20000269 PARAMETER Experiment Name: At_1mM_KNO3_L-vs-H_Roots_P Parameter: Age (day) Value: 7,10,12
  misc_feature: MA Experiment 20000269 PARAMETER Experiment Name: At_1mM_KNO3_L-vs-H_Roots_P Parameter: Organism Value: A. thaliana
  misc_feature: MA Experiment 20000269 PARAMETER Experiment Name: At_1mM_KNO3_L-vs-H_Roots_P Parameter: Plant Line Value: WS
  misc_feature: MA Experiment 20000269 PARAMETER Experiment Name: At_1mM_KNO3_L-vs-H_Roots_P Parameter: Timepoint (day) Value: 7,10,12
  misc_feature: MA Experiment 20000269 PARAMETER Experiment Name: At_1mM_KNO3_L-vs-H_Roots_P Parameter: Tissue Value: Roots
  misc_feature: MA Experiment 20000269 PARAMETER Experiment Name: At_1mM_KNO3_L-vs-H_Roots_P Parameter: Treatment Value: 1mM KNO3 vs. 50mM KNO3
  misc_feature: MA Experiment ID: 20001555 Result: Down-regulated in Transcription
  misc_feature: MA Experiment 20001555 PARAMETER Experiment Name: At_Drought_Soil_Dry_P Parameter: Age (day) Value: 24
  misc_feature: MA Experiment 20001555 PARAMETER Experiment Name: At_Drought_Soil_Dry_P Parameter: Organism Value: A. thaliana
  misc_feature: MA Experiment 20001555 PARAMETER Experiment Name: At_Drought_Soil_Dry_P Parameter: Plant Line Value: WS
  misc_feature: MA Experiment 20001555 PARAMETER Experiment Name: At_Drought_Soil_Dry_P Parameter: Post Timepoint (hr) Value: None
  misc_feature: MA Experiment 20001555 PARAMETER Experiment Name: At_Drought_Soil_Dry_P Parameter: Post-Treatment Value: None
  misc_feature: MA Experiment 20001555 PARAMETER Experiment Name: At_Drought_Soil_Dry_P Parameter: Timepoint (day) Value: 10
  misc_feature: MA Experiment 20001555 PARAMETER Experiment Name: At_Drought_Soil_Dry_P Parameter: Treatment Value: Drought vs. No Drought
  misc_feature: MA Experiment ID: 20001556 Result: Down-regulated in Transcription
  misc_feature: MA Experiment 20001556 PARAMETER Experiment Name: At_Drought_Soil_Dry_P Parameter: Age (day) Value: 26
  misc_feature: MA Experiment 20001556 PARAMETER Experiment Name: At_Drought_Soil_Dry_P Parameter: Organism Value: A. thaliana
  misc_feature: MA Experiment 20001556 PARAMETER Experiment Name: At_Drought_Soil_Dry_P Parameter: Plant Line Value: WS
  misc_feature: MA Experiment 20001556 PARAMETER Experiment Name: At_Drought_Soil_Dry_P Parameter: Post Timepoint (hr) Value: None
  misc_feature: MA Experiment 20001556 PARAMETER Experiment Name: At_Drought_Soil_Dry_P Parameter: Post-Treatment Value: None
  misc_feature: MA Experiment 20001556 PARAMETER Experiment Name: At_Drought_Soil_Dry_P Parameter: Timepoint (day) Value: 12
  misc_feature: MA Experiment 20001556 PARAMETER Experiment Name: At_Drought_Soil_Dry_P Parameter: Treatment Value: Drought vs. No Drought
  misc_feature: MA Experiment ID: 20001559 Result: Down-regulated in Transcription
  misc_feature: MA Experiment 20001559 PARAMETER Experiment Name: At_Drought_Soil_Dry_P Parameter: Age (day) Value: 28
  misc_feature: MA Experiment 20001559 PARAMETER Experiment Name: At_Drought_Soil_Dry_P Parameter: Organism Value: A. thaliana
  misc_feature: MA Experiment 20001559 PARAMETER Experiment Name: At_Drought_Soil_Dry_P Parameter: Plant Line Value: WS
  misc_feature: MA Experiment 20001559 PARAMETER Experiment Name: At_Drought_Soil_Dry_P Parameter: Post Timepoint (hr) Value: 29
  misc_feature: MA Experiment 20001559 PARAMETER Experiment Name: At_Drought_Soil_Dry_P Parameter: Post-Treatment Value: Re-Water vs. No Drought
  misc_feature: MA Experiment 20001559 PARAMETER Experiment Name: At_Drought_Soil_Dry_P Parameter: Timepoint (day) Value: 14
  misc_feature: MA Experiment 20001559 PARAMETER Experiment Name: At_Drought_Soil_Dry_P Parameter: Treatment Value: Drought vs. No Drought
  misc_feature: MA Experiment ID: 20001757 Result: Up-regulated in Transcription
  misc_feature: MA Experiment 20001757 PARAMETER Experiment Name: At_50mM_NH4NO3_L-to-H_P Parameter: Timepoint (hr) Value: 6
  misc_feature: MA Experiment 20001757 PARAMETER Experiment Name: At_50mM_NH4NO3_L-to-H_P Parameter: Tissue Value: Leaf
  misc_feature: MA Experiment 20001757 PARAMETER Experiment Name: At_50mM_NH4NO3_L-to-H_P Parameter: Treatment Value: 50mM NH4NO3 vs 100mM Mannitol
  misc_feature: MA Experiment ID: 20001904 Result: Down-regulated in Transcription
  misc_feature: MA Experiment 20001904 PARAMETER Experiment Name: At_Drought_Reproduction_P Parameter: Age (day) Value: 37
  misc_feature: MA Experiment 20001904 PARAMETER Experiment Name: At_Drought_Reproduction_P Parameter: Organism Value: A. thaliana
  misc_feature: MA Experiment 20001904 PARAMETER Experiment Name: At_Drought_Reproduction_P Parameter: Plant Line Value: WS
  misc_feature: MA Experiment 20001904 PARAMETER Experiment Name: At_Drought_Reproduction_P Parameter: Timepoint (day) Value: 7
  misc_feature: MA Experiment 20001904 PARAMETER Experiment Name: At_Drought_Reproduction_P Parameter: Tissue Value: Rosettes
  misc_feature: MA Experiment 20001904 PARAMETER Experiment Name: At_Drought_Reproduction_P Parameter: Treatment Value: Drought vs. No Drought
  misc_feature: MA Experiment ID: 20001905 Result: Down-regulated in Transcription
  misc_feature: MA Experiment 20001905 PARAMETER Experiment Name: At_Drought_Reproduction_P Parameter: Age (day) Value: 40
  misc_feature: MA Experiment 20001905 PARAMETER Experiment Name: At_Drought_Reproduction_P Parameter: Organism Value: A. thaliana
  misc_feature: MA Experiment 20001905 PARAMETER Experiment Name: At_Drought_Reproduction_P Parameter: Plant Line Value: WS
  misc_feature: MA Experiment 20001905 PARAMETER Experiment Name: At_Drought_Reproduction_P Parameter: Timepoint (day) Value: 10
  misc_feature: MA Experiment 20001905 PARAMETER Experiment Name: At_Drought_Reproduction_P Parameter: Tissue Value: Rosettes
  misc_feature: MA Experiment 20001905 PARAMETER Experiment Name: At_Drought_Reproduction_P Parameter: Treatment Value: Drought vs. No Drought
aaaacccaaacacataaaaaaatgagtcaacacaacatcttagaagctctaaatgtccgggtcgtgggtacgggtgatcggatcctgtttttggcccatggattcggtactgaccaatcagcttggcacttgatccttccttacttcactcaaaactacagagtcgtcctctatgacctagtttgcgccggcagtgtcaaccccgattacttcgatttcaatcgttacacaactctcgatccttacgtcgatgatcttctcaacatcgttgattcactcggaatccaaaactgtgcttacgttggtcactctgtttccgctatgatcggaatcatcgcttcgattcgtcggccggagcttttctccaagcttatcttgatcggattttcgcctaggtttctcaacgacgaggattatcatggaggattcgaagaaggtgagattgagaaagttttctcagctatggaagctaattacgaagcttgggttcatggatttgctccgcttgctgttggagctgatgttccggcggcggttagagaatttagccggactttgtttaatatgcgtccggatatatctctgtttgtttcgaggacggttttcaacagcgatctgagaggtgtgcttgggttagttagagttccgacgtgtgtgattcagacggcgaaggatgtttctgtgccggcttcggtggcggagtatcttaggtctcatctcggtggagatactactgtggagactcttaaaactgaaggacatttgccgcagcttagtgctccggcgcagcttgctcagtttctccggcgagctcttcctcggtgacttttttttatagatataaaaagagaacaataaaatataattggtggaatatgggtttagtggggtccacgtatcgaagaaaagaagggcctctatttgtggaggacagtttggcattgtcacaaatctagtaagataagattgttcacttgacacgtgactttcgcttttttatcactttttttcttgctctcttcattagtttataatcacaagtttatttcataaaataattggagaataacc

SEQ ID NO: 27264 - protein, 274 aa, Arabidopsis thaliana
  peptide (1)..(274): Ceres Seq. ID no. 12331354
  misc_feature (53)..(270): Pfam Name: alpha/beta hydrolase fold Pfam Description: alpha/beta hydrolase fold
  misc_feature (17)..(272): Homolog of NCBI NO: 34912326 NR Description: P0451D05.26 [Oryza sativa (japonica
  misc_feature (19)..(270): Homolog of NCBI NO: 22298700 NR Description: ORF_ID:tlr1157~hypothetical protein
  misc_feature (12)..(270): Homolog of NCBI NO: 23136603 NR Description: hypothetical protein [Cytophaga hutchinsonii]
  misc_feature (5)..(272): Homolog of NCBI NO: 15230110 NR Description: unknown protein; protein id: At3g24420.1
  misc_feature (18)..(269): Homolog of NCBI NO: 24216360 NR Description: Predicted hydrolases or acyltransferases,
  misc_feature (15)..(270): Homolog of NCBI NO: 15235567 NR Description: putative protein
  misc_feature (15)..(134): Homolog of NCBI NO: 40736991 NR Description: putative hydrolases [Oryza sativa (japonica
  misc_feature (133)..(261): Homolog of NCBI NO: 40736991 NR Description: putative hydrolases [Oryza sativa (japonica
  misc_feature (8)..(274): Homolog of NCBI NO: 21593927 NR Description: unknown [Arabidopsis thaliana]
  misc_feature (8)..(274): Homolog of NCBI NO: 18396732 NR Description: expressed protein
KTQTHKKMSQHNILEALNVRVVGTGDRILFLAHGFGTDQSAWHLILPYFTQNYRVVLYDLVCAGSVNPDYFDFNRYTTLDPYVDDLLNIVDSLGIQNCAYVGHSVSAMIGIIASIRRPELFSKLILIGFSPRFLNDEDYHGGFEEGEIEKVFSAMEANYEAWVHGFAPLAVGADVPAAVREFSRTLFNMRPDISLFVSRTVFNSDLRGVLGLVRVPTCVIQTAKDVSVPASVAEYLRSHLGGDTTVETLKTEGHLPQLSAPAQLAQFLRRALPR

SEQ ID NO: 27265 - protein, 267 aa, Arabidopsis thaliana
  peptide (1)..(267): Ceres Seq. ID no. 12331355
  misc_feature (46)..(263): Pfam Name: alpha/beta hydrolase fold Pfam Description: alpha/beta hydrolase fold
  misc_feature (8)..(263): Homolog of NCBI NO: 15235567 NR Description: putative protein
  misc_feature (8)..(127): Homolog of NCBI NO: 40736991 NR Description: putative hydrolases [Oryza sativa (japonica
  misc_feature (126)..(254): Homolog of NCBI NO: 40736991 NR Description: putative hydrolases [Oryza sativa (japonica
  misc_feature (12)..(263): Homolog of NCBI NO: 22298700 NR Description: ORF_ID:tlr1157~hypothetical protein
  misc_feature (1)..(265): Homolog of NCBI NO: 15230110 NR Description: unknown protein; protein id: At3g24420.1
  misc_feature (11)..(262): Homolog of NCBI NO: 24216360 NR Description: Predicted hydrolases or acyltransferases,
  misc_feature (5)..(263): Homolog of NCBI NO: 23136603 NR Description: hypothetical protein [Cytophaga hutchinsonii]
  misc_feature (10)..(265): Homolog of NCBI NO: 34912326 NR Description: P0451D05.26 [Oryza sativa (japonica
  misc_feature (1)..(267): Homolog of NCBI NO: 21593927 NR Description: unknown [Arabidopsis thaliana]
  misc_feature (1)..(267): Homolog of NCBI NO: 18396732 NR Description: expressed protein
MSQHNILEALNVRVVGTGDRILFLAHGFGTDQSAWHLILPYFTQNYRVVLYDLVCAGSVNPDYFDFNRYTTLDPYVDDLLNIVDSLGIQNCAYVGHSVSAMIGIIASIRRPELFSKLILIGFSPRFLNDEDYHGGFEEGEIEKVFSAMEANYEAWVHGFAPLAVGADVPAAVREFSRTLFNMRPDISLFVSRTVFNSDLRGVLGLVRVPTCVIQTAKDVSVPASVAEYLRSHLGGDTTVETLKTEGHLPQLSAPAQLAQFLRRALPR

SEQ ID NO: 27266 - protein, 167 aa, Arabidopsis thaliana
  peptide (1)..(167): Ceres Seq. ID no. 12331356
  misc_feature (1)..(163): Pfam Name: alpha/beta hydrolase fold Pfam Description: alpha/beta hydrolase fold
  misc_feature (1)..(165): Homolog of NCBI NO: 34912326 NR Description: P0451D05.26 [Oryza sativa (japonica
  misc_feature (1)..(163): Homolog of NCBI NO: 22298700 NR Description: ORF_ID:tlr1157~hypothetical protein
  misc_feature (1)..(163): Homolog of NCBI NO: 23136603 NR Description: hypothetical protein [Cytophaga hutchinsonii]
  misc_feature (1)..(165): Homolog of NCBI NO: 15230110 NR Description: unknown protein; protein id: At3g24420.1
  misc_feature (1)..(162): Homolog of NCBI NO: 24216360 NR Description: Predicted hydrolases or acyltransferases,
  misc_feature (1)..(163): Homolog of NCBI NO: 15235567 NR Description: putative protein
  misc_feature (1)..(27): Homolog of NCBI NO: 40736991 NR Description: putative hydrolases [Oryza sativa (japonica
  misc_feature (26)..(154): Homolog of NCBI NO: 40736991 NR Description: putative hydrolases [Oryza sativa (japonica
  misc_feature (1)..(167): Homolog of NCBI NO: 21593927 NR Description: unknown [Arabidopsis thaliana]
  misc_feature (1)..(167): Homolog of NCBI NO: 18396732 NR Description: expressed protein
MIGIIASIRRPELFSKLILIGFSPRFLNDEDYHGGFEEGEIEKVFSAMEANYEAWVHGFAPLAVGADVPAAVREFSRTLFNMRPDISLFVSRTVFNSDLRGVLGLVRVPTCVIQTAKDVSVPASVAEYLRSHLGGDTTVETLKTEGHLPQLSAPAQLAQFLRRALPR

SEQ ID NO: 27267 - DNA, 1635 bp, Arabidopsis thaliana; identical to SEQ ID NO: 24867
  misc_feature (1)..(1635): Ceres Seq. ID no. 12336117
  misc_feature: MA Experiment ID: 108435 Result: Up-regulated in Transcription
  misc_feature: MA Experiment 108435 PARAMETER Experiment Name: At_stm_Mutants_cDNA_P Parameter: Plant Line Value: wt Landsburg vs stm
  misc_feature: MA Experiment 108435 PARAMETER Experiment Name: At_stm_Mutants_cDNA_P Parameter: Tissue Value: Shoot Apical Meristem Region
  misc_feature: MA Experiment ID: 108462 Result: Down-regulated in Transcription
  misc_feature: MA Experiment 108462 PARAMETER Experiment Name: At_Germinating_Seeds_cDNA_P Parameter: Age (day) Value: 2 vs. 0
  misc_feature: MA Experiment 108462 PARAMETER Experiment Name: At_Germinating_Seeds_cDNA_P Parameter: Tissue Value: Germinating Seeds
  misc_feature: MA Experiment ID: 108463 Result: Down-regulated in Transcription
  misc_feature: MA Experiment 108463 PARAMETER Experiment Name: At_Germinating_Seeds_cDNA_P Parameter: Age (day) Value: 3 vs. 0
  misc_feature: MA Experiment 108463 PARAMETER Experiment Name: At_Germinating_Seeds_cDNA_P Parameter: Tissue Value: Germinating Seeds
  misc_feature: MA Experiment ID: 108464 Result: Down-regulated in Transcription
  misc_feature: MA Experiment 108464 PARAMETER Experiment Name: At_Germinating_Seeds_cDNA_P Parameter: Age (day) Value: 4 vs. 0
  misc_feature: MA Experiment 108464 PARAMETER Experiment Name: At_Germinating_Seeds_cDNA_P Parameter: Tissue Value: Germinating Seeds
  misc_feature: MA Experiment ID: 108501 Result: Up-regulated in Transcription
  misc_feature: MA Experiment 108501 PARAMETER Experiment Name: At_ap2_floral_buds_cDNA_P Parameter: Plant Line Value: ap2 (Ler.)
  misc_feature: MA Experiment 108501 PARAMETER Experiment Name: At_ap2_floral_buds_cDNA_P Parameter: Tissue Value: Closed Flower
  misc_feature: MA Experiment ID: 108577 Result: Down-regulated in Transcription
  misc_feature: MA Experiment 108577 PARAMETER Experiment Name: At_42deg_Heat_cDNA_P Parameter: Temperature (deg C) Value: 42 vs. 22
  misc_feature: MA Experiment 108577 PARAMETER Experiment Name: At_42deg_Heat_cDNA_P Parameter: Timepoint (hr) Value: 6
  misc_feature: MA Experiment 108577 PARAMETER Experiment Name: At_42deg_Heat_cDNA_P Parameter: Tissue Value: Aerial
  misc_feature: MA Experiment ID: 108595 Result: Up-regulated in Transcription
  misc_feature: MA Experiment 108595 PARAMETER Experiment Name: At_Ler-pi_Ovule_cDNA_P Parameter: Plant Line Value: null
  misc_feature: MA Experiment ID: 20000113 Result: Down-regulated in Transcription
  misc_feature: MA Experiment 20000113 PARAMETER Experiment Name: At_42deg_Heat_cDNA_P Parameter: Temperature (deg C) Value: 42 vs. 22
  misc_feature: MA Experiment 20000113 PARAMETER Experiment Name: At_42deg_Heat_cDNA_P Parameter: Timepoint (hr) Value: 8
  misc_feature: MA Experiment 20000113 PARAMETER Experiment Name: At_42deg_Heat_cDNA_P Parameter: Tissue Value: Aerial
  misc_feature: MA Experiment ID: 20000264 Result: Up-regulated in Transcription
  misc_feature: MA Experiment 20000264 PARAMETER Experiment Name: At_Open_Flower_P Parameter: Age (day) Value: 21
  misc_feature: MA Experiment 20000264 PARAMETER Experiment Name: At_Open_Flower_P Parameter: Plant Line Value: WS
  misc_feature: MA Experiment 20000264 PARAMETER Experiment Name: At_Open_Flower_P Parameter: Tissue Value: Open Flower vs. Whole Plant
  misc_feature: MA Experiment ID: 20000286 Result: Up-regulated in Transcription
  misc_feature: MA Experiment 20000286 PARAMETER Experiment Name: At_Open_Flower_P Parameter: Age (day) Value: 21
  misc_feature: MA Experiment 20000286 PARAMETER Experiment Name: At_Open_Flower_P Parameter: Plant Line Value: WS
  misc_feature: MA Experiment 20000286 PARAMETER Experiment Name: At_Open_Flower_P Parameter: Tissue Value: Half Open vs. Whole Plant
  misc_feature: MA Experiment ID: 20000443 Result: Down-regulated in Transcription
  misc_feature: MA Experiment 20000443 PARAMETER Experiment Name: At_1uM_BR-BRZ__P Parameter: Tissue Value: Shoot Apices
  misc_feature: MA Experiment 20000443 PARAMETER Experiment Name: At_1uM_BR-BRZ__P Parameter: Treatment Value: 1uM BRZ vs. No Treatment
  misc_feature: MA Experiment ID: 20001911 Result: Down-regulated in Transcription
  misc_feature: MA Experiment 20001911 PARAMETER Experiment Name: At_Drought_Reproduction_P Parameter: Age (day) Value: 40
  misc_feature: MA Experiment 20001911 PARAMETER Experiment Name: At_Drought_Reproduction_P Parameter: Organism Value: A. thaliana
  misc_feature: MA Experiment 20001911 PARAMETER Experiment Name: At_Drought_Reproduction_P Parameter: Plant Line Value: WS
  misc_feature: MA Experiment 20001911 PARAMETER Experiment Name: At_Drought_Reproduction_P Parameter: Timepoint (day) Value: 10
  misc_feature: MA Experiment 20001911 PARAMETER Experiment Name: At_Drought_Reproduction_P Parameter: Tissue Value: Flowers
  misc_feature: MA Experiment 20001911 PARAMETER Experiment Name: At_Drought_Reproduction_P Parameter: Treatment Value: Drought vs. No Drought

SEQ ID NO: 27268 - protein, 480 aa, Arabidopsis thaliana; identical to SEQ ID NO: 24868
  peptide (1)..(480): Ceres Seq. ID no. 12336118
  misc_feature (9)..(480): Homolog of NCBI NO: 37536528 NR Description: putative serine carboxypeptidase
  misc_feature (30)..(476): Homolog of NCBI NO: 15234795 NR Description: SERINE CARBOXYPEPTIDASE II-like protein
  misc_feature (30)..(476): Homolog of NCBI NO: 13877871 NR Description: putative serine carboxypeptidase II [Arabidopsis
  misc_feature (329)..(479): Homolog of NCBI NO: 11967861 NR Description: putative serine carboxypeptidase [Pisum sativum]
  misc_feature (30)..(312): Homolog of NCBI NO: 11967861 NR Description: putative serine carboxypeptidase [Pisum sativum]
  misc_feature (327)..(479): Homolog of NCBI NO: 15220282 NR Description: Serine carboxypeptidase isolog; protein id:
  misc_feature (4)..(291): Homolog of NCBI NO: 15220282 NR Description: Serine carboxypeptidase isolog; protein id:
  misc_feature (31)..(417): Homolog of NCBI NO: 38344436 NR Description: OSJNBa0038O10.8 [Oryza sativa (japonica
  misc_feature (38)..(480): Homolog of NCBI NO: 10177810 NR Description: serine carboxypeptidase II-like protein
  misc_feature (1)..(480): Homolog of NCBI NO: 15241571 NR Description: serine-type carboxypeptidase II-like protein
  misc_feature (9)..(480): Homolog of NCBI NO: 37536528 NR Description: putative serine carboxypeptidase
  misc_feature (30)..(476): Homolog of NCBI NO: 15234795 NR Description: SERINE CARBOXYPEPTIDASE II-like protein
  misc_feature (30)..(476): Homolog of NCBI NO: 13877871 NR Description: putative serine carboxypeptidase II [Arabidopsis
  misc_feature (329)..(479): Homolog of NCBI NO: 11967861 NR Description: putative serine carboxypeptidase [Pisum sativum]
  misc_feature (30)..(312): Homolog of NCBI NO: 11967861 NR Description: putative serine carboxypeptidase [Pisum sativum]
  misc_feature (327)..(479): Homolog of NCBI NO: 15220282 NR Description: Serine carboxypeptidase isolog; protein id:
  misc_feature (4)..(291): Homolog of NCBI NO: 15220282 NR Description: Serine carboxypeptidase isolog; protein id:
  misc_feature (31)..(417): Homolog of NCBI NO: 38344436 NR Description: OSJNBa0038O10.8 [Oryza sativa (japonica
  misc_feature (38)..(480): Homolog of NCBI NO: 10177810 NR Description: serine carboxypeptidase II-like protein
  misc_feature (1)..(480): Homolog of NCBI NO: 15241571 NR Description: serine-type carboxypeptidase II-like protein

SEQ ID NO: 27269 - protein, 350 aa, Arabidopsis thaliana; identical to SEQ ID NO: 24869
  peptide (1)..(350): Ceres Seq. ID no. 12336119
  misc_feature (199)..(349): Homolog of NCBI NO: 11967861 NR Description: putative serine carboxypeptidase [Pisum sativum]
  misc_feature (1)..(182): Homolog of NCBI NO: 11967861 NR Description: putative serine carboxypeptidase [Pisum sativum]
  misc_feature (197)..(349): Homolog of NCBI NO: 15220282 NR Description: Serine carboxypeptidase isolog; protein id:
  misc_feature (1)..(161): Homolog of NCBI NO: 15220282 NR Description: Serine carboxypeptidase isolog; protein id:
  misc_feature (1)..(287): Homolog of NCBI NO: 38344436 NR Description: OSJNBa0038O10.8 [Oryza sativa (japonica
  misc_feature (1)..(350): Homolog of NCBI NO: 10177810 NR Description: serine carboxypeptidase II-like protein
  misc_feature (1)..(350): Homolog of NCBI NO: 15241571 NR Description: serine-type carboxypeptidase II-like protein
  misc_feature (1)..(350): Homolog of NCBI NO: 37536528 NR Description: putative serine carboxypeptidase
  misc_feature (1)..(346): Homolog of NCBI NO: 15234795 NR Description: SERINE CARBOXYPEPTIDASE II-like protein
  misc_feature (1)..(346): Homolog of NCBI NO: 13877871 NR Description: putative serine carboxypeptidase II [Arabidopsis
  misc_feature (1)..(350): Homolog of NCBI NO: 37536528 NR Description: putative serine carboxypeptidase
  misc_feature (1)..(346): Homolog of NCBI NO: 15234795 NR Description: SERINE CARBOXYPEPTIDASE II-like protein
  misc_feature (1)..(346): Homolog of NCBI NO: 13877871 NR Description: putative serine carboxypeptidase II [Arabidopsis
  misc_feature (199)..(349): Homolog of NCBI NO: 11967861 NR Description: putative serine carboxypeptidase [Pisum sativum]
  misc_feature (1)..(182): Homolog of NCBI NO: 11967861 NR Description: putative serine carboxypeptidase [Pisum sativum]
  misc_feature (197)..(349): Homolog of NCBI NO: 15220282 NR Description: Serine carboxypeptidase isolog; protein id:
  misc_feature (1)..(161): Homolog of NCBI NO: 15220282 NR Description: Serine carboxypeptidase isolog; protein id:
  misc_feature (1)..(287): Homolog of NCBI NO: 38344436 NR Description: OSJNBa0038O10.8 [Oryza sativa (japonica
  misc_feature (1)..(350): Homolog of NCBI NO: 10177810 NR Description: serine carboxypeptidase II-like protein
  misc_feature (1)..(350): Homolog of NCBI NO: 15241571 NR Description: serine-type carboxypeptidase II-like protein

SEQ ID NO: 27270 - protein, 332 aa, Arabidopsis thaliana; identical to SEQ ID NO: 24870
  peptide (1)..(332): Ceres Seq. ID no. 12336120
  misc_feature (1)..(332): Homolog of NCBI NO: 37536528 NR Description: putative serine carboxypeptidase
  misc_feature (1)..(328): Homolog of NCBI NO: 15234795 NR Description: SERINE CARBOXYPEPTIDASE II-like protein
  misc_feature (1)..(328): Homolog of NCBI NO: 13877871 NR Description: putative serine carboxypeptidase II [Arabidopsis
  misc_feature (181)..(331): Homolog of NCBI NO: 11967861 NR Description: putative serine carboxypeptidase [Pisum sativum]
  misc_feature (1)..(164): Homolog of NCBI NO: 11967861 NR Description: putative serine carboxypeptidase [Pisum sativum]
  misc_feature (179)..(331): Homolog of NCBI NO: 15220282 NR Description: Serine carboxypeptidase isolog; protein id:
  misc_feature (1)..(143): Homolog of NCBI NO: 15220282 NR Description: Serine carboxypeptidase isolog; protein id:
  misc_feature (1)..(269): Homolog of NCBI NO: 38344436 NR Description: OSJNBa0038O10.8 [Oryza sativa (japonica
  misc_feature (1)..(332): Homolog of NCBI NO: 10177810 NR Description: serine carboxypeptidase II-like protein
  misc_feature (1)..(332): Homolog of NCBI NO: 15241571 NR Description: serine-type carboxypeptidase II-like protein
  misc_feature (1)..(332): Homolog of NCBI NO: 37536528 NR Description: putative serine carboxypeptidase
  misc_feature (1)..(328): Homolog of NCBI NO: 15234795 NR Description: SERINE CARBOXYPEPTIDASE II-like protein
  misc_feature (1)..(328): Homolog of NCBI NO: 13877871 NR Description: putative serine carboxypeptidase II [Arabidopsis
  misc_feature (181)..(331): Homolog of NCBI NO: 11967861 NR Description: putative serine carboxypeptidase [Pisum sativum]
  misc_feature (1)..(164): Homolog of NCBI NO: 11967861 NR Description: putative serine carboxypeptidase [Pisum sativum]
  misc_feature (179)..(331): Homolog of NCBI NO: 15220282 NR Description: Serine carboxypeptidase isolog; protein id:
  misc_feature (1)..(143): Homolog of NCBI NO: 15220282 NR Description: Serine carboxypeptidase isolog; protein id:
  misc_feature (1)..(269): Homolog of NCBI NO: 38344436 NR Description: OSJNBa0038O10.8 [Oryza sativa (japonica
  misc_feature (1)..(332): Homolog of NCBI NO: 10177810 NR Description: serine carboxypeptidase II-like protein
  misc_feature (1)..(332): Homolog of NCBI NO: 15241571 NR Description: serine-type carboxypeptidase II-like protein

SEQ ID NO: 27271 - DNA, 1885 bp, Arabidopsis thaliana
  misc_feature (1)..(1885): Ceres Seq. ID no. 12324092
  misc_feature: MA Experiment ID: 108434 Result: Up-regulated in Transcription
  misc_feature: MA Experiment 108434 PARAMETER Experiment Name: At_Root_Tips_cDNA_P Parameter: Tissue Value: Root Tips
  misc_feature: MA Experiment ID: 108463 Result: Down-regulated in Transcription
  misc_feature: MA Experiment 108463 PARAMETER Experiment Name: At_Germinating_Seeds_cDNA_P Parameter: Age (day) Value: 3 vs. 0
  misc_feature: MA Experiment 108463 PARAMETER Experiment Name: At_Germinating_Seeds_cDNA_P Parameter: Tissue Value: Germinating Seeds
  misc_feature: MA Experiment ID: 108464 Result: Down-regulated in Transcription
  misc_feature: MA Experiment 108464 PARAMETER Experiment Name: At_Germinating_Seeds_cDNA_P Parameter: Age (day) Value: 4 vs. 0
  misc_feature: MA Experiment 108464 PARAMETER Experiment Name: At_Germinating_Seeds_cDNA_P Parameter: Tissue Value: Germinating Seeds
  misc_feature: MA Experiment ID: 108668 Result: Down-regulated in Transcription
  misc_feature: MA Experiment 108668 PARAMETER Experiment Name: At_2mM_SA_cDNA_P Parameter: Plant Line Value: WS
  misc_feature: MA Experiment 108668 PARAMETER Experiment Name: At_2mM_SA_cDNA_P Parameter: Timepoint (hr) Value: 6
  misc_feature: MA Experiment 108668 PARAMETER Experiment Name: At_2mM_SA_cDNA_P Parameter: Treatment Value: 2mM SA vs. No Treatment
  misc_feature: MA Experiment ID: 20000069 Result: Down-regulated in Transcription
  misc_feature: MA Experiment 20000069 PARAMETER Experiment Name: At_100uM_ABA_Mutants_cDNA_P Parameter: Plant Line Value: CS23
  misc_feature: MA Experiment 20000069 PARAMETER Experiment Name: At_100uM_ABA_Mutants_cDNA_P Parameter: Timepoint (hr) Value: 6
  misc_feature: MA Experiment 20000069 PARAMETER Experiment Name: At_100uM_ABA_Mutants_cDNA_P Parameter: Tissue Value: Aerial
  misc_feature: MA Experiment 20000069 PARAMETER Experiment Name: At_100uM_ABA_Mutants_cDNA_P Parameter: Treatment Value: 100uM ABA vs. No Treatment
  misc_feature: MA Experiment ID: 20000111 Result: Up-regulated in Transcription
  misc_feature: MA Experiment 20000111 PARAMETER Experiment Name: At_42deg_Heat_cDNA_P Parameter: Temperature (deg C) Value: 42 vs. 22
  misc_feature: MA Experiment 20000111 PARAMETER Experiment Name: At_42deg_Heat_cDNA_P Parameter: Timepoint (hr) Value: 6
  misc_feature: MA Experiment 20000111 PARAMETER Experiment Name: At_42deg_Heat_cDNA_P Parameter: Tissue Value: Aerial
  misc_feature: MA Experiment ID: 20000112 Result: Up-regulated in Transcription
  misc_feature: MA Experiment 20000112 PARAMETER Experiment Name: At_42deg_Heat_cDNA_P Parameter: Temperature (deg C) Value: 42 vs. 22
  misc_feature: MA Experiment 20000112 PARAMETER Experiment Name: At_42deg_Heat_cDNA_P Parameter: Timepoint (hr) Value: 2
  misc_feature: MA Experiment 20000112 PARAMETER Experiment Name: At_42deg_Heat_cDNA_P Parameter: Tissue Value: Aerial
  misc_feature: MA Experiment ID: 20000113 Result: Up-regulated in Transcription
  misc_feature: MA Experiment 20000113 PARAMETER Experiment Name: At_42deg_Heat_cDNA_P Parameter: Temperature (deg C) Value: 42 vs. 22
  misc_feature: MA Experiment 20000113 PARAMETER Experiment Name: At_42deg_Heat_cDNA_P Parameter: Timepoint (hr) Value: 8
  misc_feature: MA Experiment 20000113 PARAMETER Experiment Name: At_42deg_Heat_cDNA_P Parameter: Tissue Value: Aerial
  misc_feature: MA Experiment ID: 20000144 Result: Up-regulated in Transcription
  misc_feature: MA Experiment 20000144 PARAMETER Experiment Name: At_42deg_Heat_cDNA_P Parameter: Temperature (deg C) Value: 42 vs. 22
  misc_feature: MA Experiment 20000144 PARAMETER Experiment Name: At_42deg_Heat_cDNA_P Parameter: Timepoint (hr) Value: 1
  misc_feature: MA Experiment 20000144 PARAMETER Experiment Name: At_42deg_Heat_cDNA_P Parameter: Tissue Value: Aerial
  misc_feature: MA Experiment ID: 20000171 Result: Up-regulated in Transcription
  misc_feature: MA Experiment 20000171 PARAMETER Experiment Name: At_42deg_Heat_P Parameter: Age (day) Value: 14
  misc_feature: MA Experiment 20000171 PARAMETER Experiment Name: At_42deg_Heat_P Parameter: Organism Value: A. thaliana
  misc_feature: MA Experiment 20000171 PARAMETER Experiment Name: At_42deg_Heat_P Parameter: Plant Line Value: WS
  misc_feature: MA Experiment 20000171 PARAMETER Experiment Name: At_42deg_Heat_P Parameter: Temperature (deg C) Value: 42 vs. 22
  misc_feature: MA Experiment 20000171 PARAMETER Experiment Name: At_42deg_Heat_P Parameter: Timepoint (hr) Value: 1
  misc_feature: MA Experiment 20000171 PARAMETER Experiment Name: At_42deg_Heat_P Parameter: Tissue Value: Aerial
  misc_feature: MA Experiment ID: 20000173 Result: Up-regulated in Transcription
  misc_feature: MA Experiment 20000173 PARAMETER Experiment Name: At_42deg_Heat_P Parameter: Age (day) Value: 14
  misc_feature: MA Experiment 20000173 PARAMETER Experiment Name: At_42deg_Heat_P Parameter: Organism Value: A. thaliana
  misc_feature: MA Experiment 20000173 PARAMETER Experiment Name: At_42deg_Heat_P Parameter: Plant Line Value: WS
  misc_feature: MA Experiment 20000173 PARAMETER Experiment Name: At_42deg_Heat_P Parameter: Temperature (deg C) Value: 42 vs. 22
  misc_feature: MA Experiment 20000173 PARAMETER Experiment Name: At_42deg_Heat_P Parameter: Timepoint (hr) Value: 6
  misc_feature: MA Experiment 20000173 PARAMETER Experiment Name: At_42deg_Heat_P Parameter: Tissue Value: Aerial
  misc_feature: MA Experiment ID: 20000182 Result: Down-regulated in Transcription
  misc_feature: MA Experiment 20000182 PARAMETER Experiment Name: At_2mM_SA_P Parameter: Age (day) Value: 14
  misc_feature: MA Experiment 20000182 PARAMETER Experiment Name: At_2mM_SA_P Parameter: Organism Value: A. thaliana
  misc_feature: MA Experiment 20000182 PARAMETER Experiment Name: At_2mM_SA_P Parameter: Plant Line Value: WS
  misc_feature: MA Experiment 20000182 PARAMETER Experiment Name: At_2mM_SA_P Parameter: Timepoint (hr) Value: 6
  misc_feature: MA Experiment 20000182 PARAMETER Experiment Name: At_2mM_SA_P Parameter: Tissue Value: Aerial
  misc_feature: MA Experiment 20000182 PARAMETER Experiment Name: At_2mM_SA_P Parameter: Treatment Value: 2mM SA vs. No Treatment
  misc_feature: MA Experiment ID: 20000234 Result: Up-regulated in Transcription
  misc_feature: MA Experiment 20000234 PARAMETER Experiment Name: At_Siliques_P Parameter: Age (day) Value: 21
  misc_feature: MA Experiment 20000234 PARAMETER Experiment Name: At_Siliques_P Parameter: Organism Value: A. thaliana
  misc_feature: MA Experiment 20000234 PARAMETER Experiment Name: At_Siliques_P Parameter: Plant Line Value: WS
  misc_feature: MA Experiment 20000234 PARAMETER Experiment Name: At_Siliques_P Parameter: Tissue Value: Less Than 5mm Siliques vs. Whole Plant
  misc_feature: MA Experiment ID: 20000235 Result: Up-regulated in Transcription
  misc_feature: MA Experiment 20000235 PARAMETER Experiment Name: At_Siliques_P Parameter: Age (day) Value: 21
  misc_feature: MA Experiment 20000235 PARAMETER Experiment Name: At_Siliques_P Parameter: Organism Value: A. thaliana
  misc_feature: MA Experiment 20000235 PARAMETER Experiment Name: At_Siliques_P Parameter: Plant Line Value: WS
  misc_feature: MA Experiment 20000235 PARAMETER Experiment Name: At_Siliques_P Parameter: Tissue Value: 5-10mm Siliques vs. Whole Plant
  misc_feature: MA Experiment ID: 20000264 Result: Up-regulated in Transcription
  misc_feature: MA Experiment 20000264 PARAMETER Experiment Name: At_Open_Flower_P Parameter: Age (day) Value: 21
  misc_feature: MA Experiment 20000264 PARAMETER Experiment Name: At_Open_Flower_P Parameter: Plant Line Value: WS
  misc_feature: MA Experiment 20000264 PARAMETER Experiment Name: At_Open_Flower_P Parameter: Tissue Value: Open Flower vs. Whole Plant
  misc_feature: MA Experiment ID: 20000265 Result: Up-regulated in Transcription
  misc_feature: MA Experiment 20000265 PARAMETER Experiment Name: At_Open_Flower_P Parameter: Age (day) Value: 21
  misc_feature: MA Experiment 20000265 PARAMETER Experiment Name: At_Open_Flower_P Parameter: Plant Line Value: WS
  misc_feature: MA Experiment 20000265 PARAMETER Experiment Name: At_Open_Flower_P Parameter: Tissue Value: Closed Flower vs. Whole Plant
  misc_feature: MA Experiment ID: 20000286 Result: Up-regulated in Transcription
  misc_feature: MA Experiment 20000286 PARAMETER Experiment Name: At_Open_Flower_P Parameter: Age (day) Value: 21
  misc_feature: MA Experiment 20000286 PARAMETER Experiment Name: At_Open_Flower_P Parameter: Plant Line Value: WS
  misc_feature: MA Experiment 20000286 PARAMETER Experiment Name: At_Open_Flower_P Parameter: Tissue Value: Half Open vs. Whole Plant
  misc_feature: MA Experiment ID: 20000437 Result: Down-regulated in Transcription
  misc_feature: MA Experiment 20000437 PARAMETER Experiment Name: At_Drought_P Parameter: Age (day) Value: 8
  misc_feature: MA Experiment 20000437 PARAMETER Experiment Name: At_Drought_P Parameter: Organism Value: A. thaliana
  misc_feature: MA Experiment 20000437 PARAMETER Experiment Name: At_Drought_P Parameter: Plant Line Value: WS
  misc_feature: MA Experiment 20000437 PARAMETER Experiment Name: At_Drought_P Parameter: Timepoint (hr) Value: 24
  misc_feature: MA Experiment 20000437 PARAMETER Experiment Name: At_Drought_P Parameter: Tissue Value: Whole Plant
  misc_feature: MA Experiment 20000437 PARAMETER Experiment Name: At_Drought_P Parameter: Treatment Value: Drought vs. No Drought
  misc_feature: MA Experiment ID: 20000495 Result: Up-regulated in Transcription
  misc_feature: MA Experiment 20000495 PARAMETER Experiment Name: At_Guard_Cells_P Parameter: Harvest Date Value: 8/2/2002
  misc_feature: MA Experiment 20000495 PARAMETER Experiment Name: At_Guard_Cells_P Parameter: Organism Value: A. thaliana
  misc_feature: MA Experiment 20000495 PARAMETER Experiment Name: At_Guard_Cells_P Parameter: Tissue Value: Guard Cells vs. Leaves
  misc_feature: MA Experiment ID: 20001558 Result: Up-regulated in Transcription
  misc_feature: MA Experiment 20001558 PARAMETER Experiment Name: At_Drought_Soil_Dry_P Parameter: Age (day) Value: 27
  misc_feature: MA Experiment 20001558 PARAMETER Experiment Name: At_Drought_Soil_Dry_P Parameter: Organism Value: A. thaliana
  misc_feature: MA Experiment 20001558 PARAMETER Experiment Name: At_Drought_Soil_Dry_P Parameter: Plant Line Value: WS
  misc_feature: MA Experiment 20001558 PARAMETER Experiment Name: At_Drought_Soil_Dry_P Parameter: Post Timepoint (hr) Value: 6
  misc_feature: MA Experiment 20001558 PARAMETER Experiment Name: At_Drought_Soil_Dry_P Parameter: Post-Treatment Value: Re-Water vs. No Drought
  misc_feature: MA Experiment 20001558 PARAMETER Experiment Name: At_Drought_Soil_Dry_P Parameter: Timepoint (day) Value: 13
  misc_feature: MA Experiment 20001558 PARAMETER Experiment Name: At_Drought_Soil_Dry_P Parameter: Treatment Value: Drought vs. No Drought
  misc_feature: MA Experiment ID: 20001560 Result: Up-regulated in Transcription
  misc_feature: MA Experiment 20001560 PARAMETER Experiment Name: At_Drought_Soil_Dry_P Parameter: Age (day) Value: 28
  misc_feature: MA Experiment 20001560 PARAMETER Experiment Name: At_Drought_Soil_Dry_P Parameter: Organism Value: A. thaliana
  misc_feature: MA Experiment 20001560 PARAMETER Experiment Name: At_Drought_Soil_Dry_P Parameter: Plant Line Value: WS
  misc_feature: MA Experiment 20001560 PARAMETER Experiment Name: At_Drought_Soil_Dry_P Parameter: Post Timepoint (hr) Value: None
  misc_feature: MA Experiment 20001560 PARAMETER Experiment Name: At_Drought_Soil_Dry_P Parameter: Post-Treatment Value: None
  misc_feature: MA Experiment 20001560 PARAMETER Experiment Name: At_Drought_Soil_Dry_P Parameter: Timepoint (day) Value: 14
  misc_feature: MA Experiment 20001560 PARAMETER Experiment Name: At_Drought_Soil_Dry_P Parameter: Treatment Value: Drought vs. No Drought
gagtgaagtttaaagcttgagaaagacagaggaaagaaaaatgggtcaaagactgaatctagtcttctggatttttgtctccattcttgcctttttgaattttggtatggctagcaagattgggatatgttatggaagaaatgctgataatcttccaagtcctaacagagtctctgagctaatccaacatctcaacatcaaatttgttcgaatctatgacgccaacattgatgttcttaaagcttttgcaaacactggaatcgagcttatgattggtgtccctaacgctgatctacttgcatttgctcagtttcaatccaatgtagatacttggcttagcaacaacatccttccttattatccatctaccaaaatcacttcgatttcagttggtcttgaagtaactgaagcaccagacaatgccactggtctagtcttacctgcgatgcgaaacattcacacagctcttaagaagtctggtttggataaaaagatcaagatctcgagctcacattcccttgctatcttgtcacgctccttcccgccttcgtcagcttctttcagcaagaagcattcagcgttcttgaaaccaatgcttgagttcttggttgagaatgagtctccctttatgatagacctgtatccgtattatgcttacagagattccactgaaaaagttccgttggagtatgctctattcgagtcatcttcgcaggttgttgatcctgccacgggtttgctttactccaacatgtttgatgctcagcttgacgctatctatttcgctttgactgctatgagctttaagaccgttaaggttatggtcactgagtccgggtggccgagtaaaggctcgcctaaagagacagctgcaactcctgagaacgctctggcttacaataccaacctcatccgccatgtcattggtgatccaggtactcctgcaaagcctggagaagagatagatgtgtacttattctcgttgttcaatgagaaccggaagcctgggatagaatccgagagaaactggggaatgttctacgcgaacggaactaatgtttacgctttagacttcactggggaaaacactacgcctgtttctccaacaaattcaaccacaggtaccagtccaagtccaagttcaagtccaattatcaacggtaactcgacagtaaccatcggaggaggaggaggaggaggaaccaagaaatggtgtattgcttcttcacaagcttcggtaacggaactgcagactgcattggactgggcttgtggtcctggaaatgttgattgttcagctgttcaaccagaccaaccttgctttgaaccagatactgttctctcacacgcatcttatgcattcaacacttattaccaacagagcggagcaagcagcatagattgcagctttaatggagccagcgttgaagttgacaaggatccaagtaagtatttgtatacatacactttccaaaacacatccattaagagtaatgtgaagccatagtagtctcatttgagctctcgaaattgcaggttatggtaactgtttgtacatgattgctccggctaccgacggattcaacagaacaatggcgggtaatatcactggaaacataactgccattgattcccccttggcttcgccttcgtcaaccaatgaagcattcagacaaatggtggttgcagtctctgttttgttgccgtgttttgtagtttgttcgagtatttggtgacaagtgtgtacatgaatgcactgtcgccttcttttgtatgaagttttgagtagtgagcgaacttaaactagaatttagcccaactgttgaacttggtaatttctttcaccacgtaaccgaaatgtcaagcttggtgatgtatttgtgac

SEQ ID NO: 27272 - protein, 488 aa, Arabidopsis thaliana
  peptide (1)..(488): Ceres Seq. ID no. 12324093
  misc_feature (27)..(345): Pfam Name: Glycosyl hydrolases family 17 Pfam Description: Glycosyl hydrolases family 17
  misc_feature (7)..(475): Homolog of NCBI NO: 25316444 NR Description: probable beta-1,3-glucanase [imported] -
  misc_feature (338)..(476): Homolog of NCBI NO: 15231273 NR Description: glycosyl hydrolase family 17
  misc_feature (11)..(351): Homolog of NCBI NO: 15231273 NR Description: glycosyl hydrolase family 17
  misc_feature (11)..(471): Homolog of NCBI NO: 11071974 NR Description: elicitor inducible beta-1,3-glucanase Nt-SubE76
  misc_feature (12)..(363): Homolog of NCBI NO: 34909360 NR Description: P0638D12.12 [Oryza sativa (japonica
  misc_feature (373)..(485): Homolog of NCBI NO: 15241268 NR Description: glycosyl hydrolase family 17
  misc_feature (1)..(369): Homolog of NCBI NO: 15241268 NR Description: glycosyl hydrolase family 17
  misc_feature (1)..(488): Homolog of NCBI NO: 30688300 NR Description: glycosyl hydrolase family 17 [Arabidopsis
  misc_feature (23)..(469): Homolog of NCBI NO: 25407609 NR Description: beta-1, 3-glucanase-like protein
  misc_feature (1)..(469): Homolog of NCBI NO: 30688297 NR Description: glycosyl hydrolase family 17 [Arabidopsis
MGQRLNLVFWIFVSILAFLNFGMASKIGICYGRNADNLPSPNRVSELIQHLNIKFVRIYDANIDVLKAFANTGIELMIGVPNADLLAFAQFQSNVDTWLSNNILPYYPSTKITSISVGLEVTEAPDNATGLVLPAMRNIHTALKKSGLDKKIKISSSHSLAILSRSFPPSSASFSKKHSAFLKPMLEFLVENESPFMIDLYPYYAYRDSTEKVPLEYALFESSSQVVDPATGLLYSNMFDAQLDAIYFALTAMSFKTVKVMVTESGWPSKGSPKETAATPENALAYNTNLIRHVIGDPGTPAKPGEEIDVYLFSLFNENRKPGIESERNWGMFYANGTNVYALDFTGENTTPVSPTNSTTGTSPSPSSSPIINGNSTVTIGGGGGGGTKKWCIASSQASVTELQTALDWACGPGNVDCSAVQPDQPCFEPDTVLSHASYAFNTYYQQSGASSIDCSFNGASVEVDKDPSKYLYTYTFQNTSIKSNVKP

SEQ ID NO: 27273 - protein, 466 aa, Arabidopsis thaliana
  peptide (1)..(466): Ceres Seq. ID no. 12324094
  misc_feature (5)..(323): Pfam Name: Glycosyl hydrolases family 17 Pfam Description: Glycosyl hydrolases family 17
  misc_feature (1)..(453): Homolog of NCBI NO: 25316444 NR Description: probable beta-1,3-glucanase [imported] -
  misc_feature (316)..(454): Homolog of NCBI NO: 15231273 NR Description: glycosyl hydrolase family 17
  misc_feature (1)..(329): Homolog of NCBI NO: 15231273 NR Description: glycosyl hydrolase family 17
  misc_feature (1)..(449): Homolog of NCBI NO: 11071974 NR Description: elicitor inducible beta-1,3-glucanase Nt-SubE76
  misc_feature (1)..(341): Homolog of NCBI NO: 34909360 NR Description: P0638D12.12 [Oryza sativa (japonica
  misc_feature (351)..(463): Homolog of NCBI NO: 15241268 NR Description: glycosyl hydrolase family 17
  misc_feature (1)..(347): Homolog of NCBI NO: 15241268 NR Description: glycosyl hydrolase family 17
  misc_feature (1)..(466): Homolog of NCBI NO: 30688300 NR Description: glycosyl hydrolase family 17 [Arabidopsis
  misc_feature (1)..(447): Homolog of NCBI NO: 25407609 NR Description: beta-1, 3-glucanase-like protein
  misc_feature (1)..(447): Homolog of NCBI NO: 30688297 NR Description: glycosyl hydrolase family 17 [Arabidopsis
MASKIGICYGRNADNLPSPNRVSELIQHLNIKFVRIYDANIDVLKAFANTGIELMIGVPNADLLAFAQFQSNVDTWLSNNILPYYPSTKITSISVGLEVTEAPDNATGLVLPAMRNIHTALKKSGLDKKIKISSSHSLAILSRSFPPSSASFSKKHSAFLKPMLEFLVENESPFMIDLYPYYAYRDSTEKVPLEYALFESSSQVVDPATGLLYSNMFDAQLDAIYFALTAMSFKTVKVMVTESGWPSKGSPKETAATPENALAYNTNLIRHVIGDPGTPAKPGEEIDVYLFSLFNENRKPGIESERNWGMFYANGTNVYALDFTGENTTPVSPTNSTTGTSPSPSSSPIINGNSTVTIGGGGGGGTKKWCIASSQASVTELQTALDWACGPGNVDCSAVQPDQPCFEPDTVLSHASYAFNTYYQQSGASSIDCSFNGASVEVDKDPSKYLYTYTFQNTSIKSNVKP

SEQ ID NO: 27274 - protein, 412 aa, Arabidopsis thaliana
  peptide (1)..(412): Ceres Seq. ID no. 12324095
  misc_feature (1)..(269): Pfam Name: Glycosyl hydrolases family 17 Pfam Description: Glycosyl hydrolases family 17
  misc_feature (1)..(395): Homolog of NCBI NO: 11071974 NR Description: elicitor inducible beta-1,3-glucanase Nt-SubE76
  misc_feature (1)..(287): Homolog of NCBI NO: 34909360 NR Description: P0638D12.12 [Oryza sativa (japonica
  misc_feature (297)..(409): Homolog of NCBI NO: 15241268 NR Description: glycosyl hydrolase family 17
  misc_feature (1)..(293): Homolog of NCBI NO: 15241268 NR Description: glycosyl hydrolase family 17
  misc_feature (262)..(400): Homolog of NCBI NO: 15231273 NR Description: glycosyl hydrolase family 17
  misc_feature (1)..(275): Homolog of NCBI NO: 15231273 NR Description: glycosyl hydrolase family 17
  misc_feature (1)..(399): Homolog of NCBI NO: 25316444 NR Description: probable beta-1,3-glucanase [imported] -
  misc_feature (1)..(412): Homolog of NCBI NO: 30688300 NR Description: glycosyl hydrolase family 17 [Arabidopsis
  misc_feature (1)..(393): Homolog of NCBI NO: 25407609 NR Description: beta-1, 3-glucanase-like protein
  misc_feature (1)..(393): Homolog of NCBI NO: 30688297 NR Description: glycosyl hydrolase family 17 [Arabidopsis
MIGVPNADLLAFAQFQSNVDTWLSNNILPYYPSTKITSISVGLEVTEAPDNATGLVLPAMRNIHTALKKSGLDKKIKISSSHSLAILSRSFPPSSASFSKKHSAFLKPMLEFLVENESPFMIDLYPYYAYRDSTEKVPLEYALFESSSQVVDPATGLLYSNMFDAQLDAIYFALTAMSFKTVKVMVTESGWPSKGSPKETAATPENALAYNTNLIRHVIGDPGTPAKPGEEIDVYLFSLFNENRKPGIESERNWGMFYANGTNVYALDFTGENTTPVSPTNSTTGTSPSPSSSPIINGNSTVTIGGGGGGGTKKWCIASSQASVTELQTALDWACGPGNVDCSAVQPDQPCFEPDTVLSHASYAFNTYYQQSGASSIDCSFNGASVEVDKDPSKYLYTYTFQNTSIKSNVKP

SEQ ID NO: 27275 - DNA, 1171 bp, Arabidopsis thaliana
  misc_feature (1)..(1171): Ceres Seq. ID no. 13490191
  misc_feature: MA Experiment ID: 108434 Result: Down-regulated in Transcription
  misc_feature: MA Experiment 108434 PARAMETER Experiment Name: At_Root_Tips_cDNA_P Parameter: Tissue Value: Root Tips
  misc_feature: MA Experiment ID: 108461 Result: Down-regulated in Transcription
  misc_feature: MA Experiment 108461 PARAMETER Experiment Name: At_Germinating_Seeds_cDNA_P Parameter: Age (day) Value: 1 vs. 0
  misc_feature: MA Experiment 108461 PARAMETER Experiment Name: At_Germinating_Seeds_cDNA_P Parameter: Tissue Value: Germinating Seeds
  misc_feature: MA Experiment ID: 108462 Result: Down-regulated in Transcription
  misc_feature: MA Experiment 108462 PARAMETER Experiment Name: At_Germinating_Seeds_cDNA_P Parameter: Age (day) Value: 2 vs. 0
  misc_feature: MA Experiment 108462 PARAMETER Experiment Name: At_Germinating_Seeds_cDNA_P Parameter: Tissue Value: Germinating Seeds
  misc_feature: MA Experiment ID: 108463 Result: Down-regulated in Transcription
  misc_feature: MA Experiment 108463 PARAMETER Experiment Name: At_Germinating_Seeds_cDNA_P Parameter: Age (day) Value: 3 vs. 0
  misc_feature: MA Experiment 108463 PARAMETER Experiment Name: At_Germinating_Seeds_cDNA_P Parameter: Tissue Value: Germinating Seeds
  misc_feature: MA Experiment ID: 108464 Result: Down-regulated in Transcription
  misc_feature: MA Experiment 108464 PARAMETER Experiment Name: At_Germinating_Seeds_cDNA_P Parameter: Age (day) Value: 4 vs. 0
  misc_feature: MA Experiment 108464 PARAMETER Experiment Name: At_Germinating_Seeds_cDNA_P Parameter: Tissue Value: Germinating Seeds
  misc_feature: MA Experiment ID: 108579 Result: Up-regulated in Transcription
  misc_feature: MA Experiment 108579 PARAMETER Experiment Name: At_4deg_Cold_cDNA_P Parameter: Temperature (deg C) Value: 4 vs. 22
  misc_feature: MA Experiment 108579 PARAMETER Experiment Name: At_4deg_Cold_cDNA_P Parameter: Timepoint (hr) Value: 6
  misc_feature: MA Experiment 108579 PARAMETER Experiment Name: At_4deg_Cold_cDNA_P Parameter: Tissue Value: Aerial
  misc_feature: MA Experiment ID: 108585 Result: Up-regulated in Transcription
  misc_feature: MA Experiment 108585 PARAMETER Experiment Name: At_5mM_NaNP_cDNA_P Parameter: Timepoint (hr) Value: 6
  misc_feature: MA Experiment 108585 PARAMETER Experiment Name: At_5mM_NaNP_cDNA_P Parameter: Tissue Value: Aerial
  misc_feature: MA Experiment 108585 PARAMETER Experiment Name: At_5mM_NaNP_cDNA_P Parameter: Treatment Value: null
  misc_feature: MA Experiment ID: 20000111 Result: Up-regulated in Transcription
  misc_feature: MA Experiment 20000111 PARAMETER Experiment Name: At_42deg_Heat_cDNA_P Parameter: Temperature (deg C) Value: 42 vs. 22
  misc_feature: MA Experiment 20000111 PARAMETER Experiment Name: At_42deg_Heat_cDNA_P Parameter: Timepoint (hr) Value: 6
  misc_feature: MA Experiment 20000111 PARAMETER Experiment Name: At_42deg_Heat_cDNA_P Parameter: Tissue Value: Aerial
  misc_feature: MA Experiment ID: 20000112 Result: Up-regulated in Transcription
  misc_feature: MA Experiment 20000112 PARAMETER Experiment Name: At_42deg_Heat_cDNA_P Parameter: Temperature (deg C) Value: 42 vs. 22
  misc_feature: MA Experiment 20000112 PARAMETER Experiment Name: At_42deg_Heat_cDNA_P Parameter: Timepoint (hr) Value: 2
  misc_feature: MA Experiment 20000112 PARAMETER Experiment Name: At_42deg_Heat_cDNA_P Parameter: Tissue Value: Aerial
  misc_feature: MA Experiment ID: 20000113 Result: Up-regulated in Transcription
  misc_feature: MA Experiment 20000113 PARAMETER Experiment Name: At_42deg_Heat_cDNA_P Parameter: Temperature (deg C) Value: 42 vs. 22
  misc_feature: MA Experiment 20000113 PARAMETER Experiment Name: At_42deg_Heat_cDNA_P Parameter: Timepoint (hr) Value: 8
  misc_feature: MA Experiment 20000113 PARAMETER Experiment Name: At_42deg_Heat_cDNA_P Parameter: Tissue Value: Aerial
  misc_feature: MA Experiment ID: 20000173 Result: Up-regulated in Transcription
  misc_feature: MA Experiment 20000173 PARAMETER Experiment Name: At_42deg_Heat_P Parameter: Age (day) Value: 14
  misc_feature: MA Experiment 20000173 PARAMETER Experiment Name: At_42deg_Heat_P Parameter: Organism Value: A. thaliana
  misc_feature: MA Experiment 20000173 PARAMETER Experiment Name: At_42deg_Heat_P Parameter: Plant Line Value: WS
  misc_feature: MA Experiment 20000173 PARAMETER Experiment Name: At_42deg_Heat_P Parameter: Temperature (deg C) Value: 42 vs. 22
  misc_feature: MA Experiment 20000173 PARAMETER Experiment Name: At_42deg_Heat_P Parameter: Timepoint (hr) Value: 6
  misc_feature: MA Experiment 20000173 PARAMETER Experiment Name: At_42deg_Heat_P Parameter: Tissue Value: Aerial
  misc_feature: MA Experiment ID: 20000179 Result: Down-regulated in Transcription
  misc_feature: MA Experiment 20000179 PARAMETER Experiment Name: At_Germinating_Seeds_P Parameter: Age (hr) Value: 6 vs. 0
  misc_feature: MA Experiment 20000179 PARAMETER Experiment Name: At_Germinating_Seeds_P Parameter: Tissue Value: Germinating Seeds
  misc_feature: MA Experiment ID: 20000182 Result: Up-regulated in Transcription
  misc_feature: MA Experiment 20000182 PARAMETER Experiment Name: At_2mM_SA_P Parameter: Age (day) Value: 14
  misc_feature: MA Experiment 20000182 PARAMETER Experiment Name: At_2mM_SA_P Parameter: Organism Value: A. thaliana
  misc_feature: MA Experiment 20000182 PARAMETER Experiment Name: At_2mM_SA_P Parameter: Plant Line Value: WS
  misc_feature: MA Experiment 20000182 PARAMETER Experiment Name: At_2mM_SA_P Parameter: Timepoint (hr) Value: 6
  misc_feature: MA Experiment 20000182 PARAMETER Experiment Name: At_2mM_SA_P Parameter: Tissue Value: Aerial
  misc_feature: MA Experiment 20000182 PARAMETER Experiment Name: At_2mM_SA_P Parameter: Treatment Value: 2mM SA vs. No Treatment
  misc_feature: MA Experiment ID: 20000213 Result: Up-regulated in Transcription
  misc_feature: MA Experiment 20000213 PARAMETER Experiment Name: At_4deg_Cold_P Parameter: Timepoint (hr) Value: 2
  misc_feature: MA Experiment ID: 20000224 Result: Down-regulated in Transcription
  misc_feature: MA Experiment ID: 20000437 Result: Up-regulated in Transcription
  misc_feature: MA Experiment 20000437 PARAMETER Experiment Name: At_Drought_P Parameter: Age (day) Value: 8
  misc_feature: MA Experiment 20000437 PARAMETER Experiment Name: At_Drought_P Parameter: Organism Value: A. thaliana
  misc_feature: MA Experiment 20000437 PARAMETER Experiment Name: At_Drought_P Parameter: Plant Line Value: WS
  misc_feature: MA Experiment 20000437 PARAMETER Experiment Name: At_Drought_P Parameter: Timepoint (hr) Value: 24
  misc_feature: MA Experiment 20000437 PARAMETER Experiment Name: At_Drought_P Parameter: Tissue Value: Whole Plant
  misc_feature: MA Experiment 20000437 PARAMETER Experiment Name: At_Drought_P Parameter: Treatment Value: Drought vs. No Drought
  misc_feature: MA Experiment ID: 20000438 Result: Down-regulated in Transcription
  misc_feature: MA Experiment 20000438 PARAMETER Experiment Name: At_Shoots__P Parameter: Age (day) Value: 14
  misc_feature: MA Experiment 20000438 PARAMETER Experiment Name: At_Shoots__P Parameter: Tissue Value: Shoots vs. Whole Plant
  misc_feature: MA Experiment ID: 20000439 Result: Down-regulated in Transcription
  misc_feature: MA Experiment 20000439 PARAMETER Experiment Name: At_Roots__P Parameter: Age (day) Value: 14 vs. 21
  misc_feature: MA Experiment 20000439 PARAMETER Experiment Name: At_Roots__P Parameter: Organism Value: A. thaliana
  misc_feature: MA Experiment 20000439 PARAMETER Experiment Name: At_Roots__P Parameter: Tissue Value: Roots vs. Whole Plant
  misc_feature: MA Experiment ID: 20001557 Result: Up-regulated in Transcription
  misc_feature: MA Experiment 20001557 PARAMETER Experiment Name: At_Drought_Soil_Dry_P Parameter: Age (day) Value: 27
  misc_feature: MA Experiment 20001557 PARAMETER Experiment Name: At_Drought_Soil_Dry_P Parameter: Organism Value: A. thaliana
  misc_feature: MA Experiment 20001557 PARAMETER Experiment Name: At_Drought_Soil_Dry_P Parameter: Plant Line Value: WS
  misc_feature: MA Experiment 20001557 PARAMETER Experiment Name: At_Drought_Soil_Dry_P Parameter: Post Timepoint (hr) Value: 3
  misc_feature: MA Experiment 20001557 PARAMETER Experiment Name: At_Drought_Soil_Dry_P Parameter: Post-Treatment Value: Re-Water vs. No Drought
  misc_feature: MA Experiment 20001557 PARAMETER Experiment Name: At_Drought_Soil_Dry_P Parameter: Timepoint (day) Value: 13
  misc_feature: MA Experiment 20001557 PARAMETER Experiment Name: At_Drought_Soil_Dry_P Parameter: Treatment Value: Drought vs. No Drought
  misc_feature: MA Experiment ID: 20001905 Result: Up-regulated in Transcription
  misc_feature: MA Experiment 20001905 PARAMETER Experiment Name: At_Drought_Reproduction_P Parameter: Age (day) Value: 40
  misc_feature: MA Experiment 20001905 PARAMETER Experiment Name: At_Drought_Reproduction_P Parameter: Organism Value: A. thaliana
  misc_feature: MA Experiment 20001905 PARAMETER Experiment Name: At_Drought_Reproduction_P Parameter: Plant Line Value: WS
  misc_feature: MA Experiment 20001905 PARAMETER Experiment Name: At_Drought_Reproduction_P Parameter: Timepoint (day) Value: 10
  misc_feature: MA Experiment 20001905 PARAMETER Experiment Name: At_Drought_Reproduction_P Parameter: Tissue Value: Rosettes
  misc_feature: MA Experiment 20001905 PARAMETER Experiment Name: At_Drought_Reproduction_P Parameter: Treatment Value: Drought vs. No Drought
aaaggtcagaagatttgatttttcttattcctcttcaaaggcaaacaatttacacagctatatatatatttttagggtttttgagtatctcgcgaggttttacatagatttctccattatggattcgatgatgaatcagaagactgttttggctgtgacggatgatgtggtgttacctgttagctctgttttagctataatgaaagagcttggaaaggaagtgattgagagttttgatcctctgattattactcaagcatccacaataaatcagtttcctttggatgcttcctctgtggaggcggtattagccatttccaaaacatctgatttcccaagtgataaaatatgtggtgagttctcaagaatcttgaagcctggcggcacggtttctgtgtgcaaagttttggagggtgaaacgggagaaattcaacagaccattcaaaggagagtgacattggctggttttcttgagccacagtgtcttgatttgaaatcaattaaattgtctacgttcagtttatcctttgggattaaggcaaagaaaccttcttggaagattggttcatcatttgctctcaaaaagcctgtaacaaatctctttaagattgatctagatgacgacgtggatcttattgatgaagattctcttttaacagaggaggacttgatgaagccacagcttcctgttgccagcggttgtgagaccactaaaaaagcttgcaagaactgcgtctgtggtagagctgaaattgaggagaaagctgtgaagctgggcctcacagaggatcaaatcgagaatccacaatcatcatgcggcagctgtgggctcggtgatgccttccgctgcggtacatgcccttacaagggtctgccacccttcaaattaggcgagaaggtaaccctatctcaaaacttccttgaagctgacatataagcatgtgaaaggcatcttcatacatgggtgtttctcgccgaggccaaaaccttttgctaatcgcagagtagtttcatcatttactttgtgccctttcgtataatttgtttgttggtacttcttttattttgtggctctaaaagcttgtagaatattgtttgggttgcccacaaagcacacaccttagtatcaatgaagaacggttttgcattggttaaataattatttctctgt

SEQ ID NO: 27276 - protein, 311 aa, Arabidopsis thaliana
  peptide (1)..(311): Ceres Seq. ID no. 13490192
  misc_feature (153)..(304): Pfam Name: Protein of unknown function (DUF689) Pfam Description: Protein of unknown function (DUF689)
  misc_feature (170)..(307): Homolog of NCBI NO: 3252825 NR Description: Unknown gene product [Homo sapiens]
  misc_feature (52)..(311): Homolog of NCBI NO: 29841358 NR Description: hypothetical protein in Schizosaccharomyces pombe
  misc_feature (122)..(311): Homolog of NCBI NO: 31237546 NR Description: ENSANGP00000013898 [Anopheles gambiae]
  misc_feature (150)..(311): Homolog of NCBI NO: 17933742 NR Description: lethal (2) 35Bg CG4180-PA [Drosophila
  misc_feature (44)..(311): Homolog of NCBI NO: 2293332 NR Description: unknown [Dictyostelium discoideum]
  misc_feature (50)..(311): Homolog of NCBI NO: 32488638 NR Description: OSJNBa0032F06.14 [Oryza sativa (japonica
  misc_feature (50)..(311): Homolog of NCBI NO: 38344920 NR Description: OSJNBa0018M05.11 [Oryza sativa (japonica
  misc_feature (43)..(311): Homolog of NCBI NO: 19424097 NR Description: unknown protein [Arabidopsis thaliana]
  misc_feature (43)..(311): Homolog of NCBI NO: 30686798 NR Description: expressed protein [Arabidopsis thaliana]
  misc_feature (40)..(311): Homolog of NCBI NO: 18418605 NR Description: expressed protein [Arabidopsis thaliana]
KVRRFDFSYSSSKANNLHSYIYIFRVFEYLARFYIDFSIMDSMMNQKTVLAVTDDVVLPVSSVLAIMKELGKEVIESFDPLIITQASTINQFPLDASSVEAVLAISKTSDFPSDKICGEFSRILKPGGTVSVCKVLEGETGEIQQTIQRRVTLAGFLEPQCLDLKSIKLSTFSLSFGIKAKKPSWKIGSSFALKKPVTNLFKIDLDDDVDLIDEDSLLTEEDLMKPQLPVASGCETTKKACKNCVCGRAEIEEKAVKLGLTEDQIENPQSSCGSCGLGDAFRCGTCPYKGLPPFKLGEKVTLSQNFLEADI

SEQ ID NO: 27277 - protein, 272 aa, Arabidopsis thaliana
  peptide (1)..(272): Ceres Seq. ID no. 13490193
  misc_feature (114)..(265): Pfam Name: Protein of unknown function (DUF689) Pfam Description: Protein of unknown function (DUF689)
  misc_feature (131)..(268): Homolog of NCBI NO: 3252825 NR Description: Unknown gene product [Homo sapiens]
  misc_feature (13)..(272): Homolog of NCBI NO: 29841358 NR Description: hypothetical protein in Schizosaccharomyces pombe
  misc_feature (83)..(272): Homolog of NCBI NO: 31237546 NR Description: ENSANGP00000013898 [Anopheles gambiae]
  misc_feature (111)..(272): Homolog of NCBI NO: 17933742 NR Description: lethal (2) 35Bg CG4180-PA [Drosophila
  misc_feature (5)..(272): Homolog of NCBI NO: 2293332 NR Description: unknown [Dictyostelium discoideum]
  misc_feature (11)..(272): Homolog of NCBI NO: 32488638 NR Description: OSJNBa0032F06.14 [Oryza sativa (japonica
  misc_feature (11)..(272): Homolog of NCBI NO: 38344920 NR Description: OSJNBa0018M05.11 [Oryza sativa (japonica
  misc_feature (4)..(272): Homolog of NCBI NO: 19424097 NR Description: unknown protein [Arabidopsis thaliana]
  misc_feature (4)..(272): Homolog of NCBI NO: 30686798 NR Description: expressed protein [Arabidopsis thaliana]
  misc_feature (1)..(272): Homolog of NCBI NO: 18418605 NR Description: expressed protein [Arabidopsis thaliana]
MDSMMNQKTVLAVTDDVVLPVSSVLAIMKELGKEVIESFDPLIITQASTINQFPLDASSVEAVLAISKTSDFPSDKICGEFSRILKPGGTVSVCKVLEGETGEIQQTIQRRVTLAGFLEPQCLDLKSIKLSTFSLSFGIKAKKPSWKIGSSFALKKPVTNLFKIDLDDDVDLIDEDSLLTEEDLMKPQLPVASGCETTKKACKNCVCGRAEIEEKAVKLGLTEDQIENPQSSCGSCGLGDAFRCGTCPYKGLPPFKLGEKVTLSQNFLEADI

SEQ ID NO: 27278 - protein, 269 aa, Arabidopsis thaliana
  peptide (1)..(269): Ceres Seq. ID no. 13490194
  misc_feature (111)..(262): Pfam Name: Protein of unknown function (DUF689) Pfam Description: Protein of unknown function (DUF689)
  misc_feature (128)..(265): Homolog of NCBI NO: 3252825 NR Description: Unknown gene product [Homo sapiens]
  misc_feature (10)..(269): Homolog of NCBI NO: 29841358 NR Description: hypothetical protein in Schizosaccharomyces pombe
  misc_feature (80)..(269): Homolog of NCBI NO: 31237546 NR Description: ENSANGP00000013898 [Anopheles gambiae]
  misc_feature (108)..(269): Homolog of NCBI NO: 17933742 NR Description: lethal (2) 35Bg CG4180-PA [Drosophila
  misc_feature (2)..(269): Homolog of NCBI NO: 2293332 NR Description: unknown [Dictyostelium discoideum]
  misc_feature (8)..(269): Homolog of NCBI NO: 32488638 NR Description: OSJNBa0032F06.14 [Oryza sativa (japonica
  misc_feature (8)..(269): Homolog of NCBI NO: 38344920 NR Description: OSJNBa0018M05.11 [Oryza sativa (japonica
  misc_feature (1)..(269): Homolog of NCBI NO: 19424097 NR Description: unknown protein [Arabidopsis thaliana]
  misc_feature (1)..(269): Homolog of NCBI NO: 30686798 NR Description: expressed protein [Arabidopsis thaliana]
  misc_feature (1)..(269): Homolog of NCBI NO: 18418605 NR Description: expressed protein [Arabidopsis thaliana]
MMNQKTVLAVTDDVVLPVSSVLAIMKELGKEVIESFDPLIITQASTINQFPLDASSVEAVLAISKTSDFPSDKICGEFSRILKPGGTVSVCKVLEGETGEIQQTIQRRVTLAGFLEPQCLDLKSIKLSTFSLSFGIKAKKPSWKIGSSFALKKPVTNLFKIDLDDDVDLIDEDSLLTEEDLMKPQLPVASGCETTKKACKNCVCGRAEIEEKAVKLGLTEDQIENPQSSCGSCGLGDAFRCGTCPYKGLPPFKLGEKVTLSQNFLEADI

SEQ ID NO: 27279 - DNA, 2276 bp, Arabidopsis thaliana
  misc_feature (1)..(2276): Ceres Seq. ID no. 13491218
  misc_feature: MA Experiment ID: 108573 Result: Up-regulated in Transcription
  misc_feature: MA Experiment 108573 PARAMETER Experiment Name: At_Drought_cDNA_P Parameter: Timepoint (hr) Value: 6
  misc_feature: MA Experiment 108573 PARAMETER Experiment Name: At_Drought_cDNA_P Parameter: Tissue Value: Aerial
  misc_feature: MA Experiment 108573 PARAMETER Experiment Name: At_Drought_cDNA_P Parameter: Treatment Value: Drought vs. No Drought
  misc_feature: MA Experiment ID: 20000184 Result: Down-regulated in Transcription
  misc_feature: MA Experiment 20000184 PARAMETER Experiment Name: At_Shoots__P Parameter: Age (day) Value: 7
  misc_feature: MA Experiment 20000184 PARAMETER Experiment Name: At_Shoots__P Parameter: Tissue Value: Shoots vs. Whole Plant
  misc_feature: MA Experiment ID: 20000227 Result: Down-regulated in Transcription
  misc_feature: MA Experiment 20000227 PARAMETER Experiment Name: At_Root-Tips-vs-Tops_P Parameter: Tissue Value: Root Tips vs. Root Tops
  misc_feature: MA Experiment ID: 20000234 Result: Down-regulated in Transcription
  misc_feature: MA Experiment 20000234 PARAMETER Experiment Name: At_Siliques_P Parameter: Age (day) Value: 21
  misc_feature: MA Experiment 20000234 PARAMETER Experiment Name: At_Siliques_P Parameter: Organism Value: A. thaliana
  misc_feature: MA Experiment 20000234 PARAMETER Experiment Name: At_Siliques_P Parameter: Plant Line Value: WS
  misc_feature: MA Experiment 20000234 PARAMETER Experiment Name: At_Siliques_P Parameter: Tissue Value: Less Than 5mm Siliques vs. Whole Plant
  misc_feature: MA Experiment ID: 20000495 Result: Down-regulated in Transcription
  misc_feature: MA Experiment 20000495 PARAMETER Experiment Name: At_Guard_Cells_P Parameter: Harvest Date Value: 8/2/2002
  misc_feature: MA Experiment 20000495 PARAMETER Experiment Name: At_Guard_Cells_P Parameter: Organism Value: A. thaliana
  misc_feature: MA Experiment 20000495 PARAMETER Experiment Name: At_Guard_Cells_P Parameter: Tissue Value: Guard Cells vs. Leaves
  misc_feature: MA Experiment ID: 20001451 Result: Down-regulated in Transcription
  misc_feature: MA Experiment 20001451 PARAMETER Experiment Name: At_Far-red-induction_P Parameter: Age (day) Value: 7
  misc_feature: MA Experiment 20001451 PARAMETER Experiment Name: At_Far-red-induction_P Parameter: Light Value: Far-red vs. White
  misc_feature: MA Experiment 20001451 PARAMETER Experiment Name: At_Far-red-induction_P Parameter: Organism Value: A. thaliana
  misc_feature: MA Experiment 20001451 PARAMETER Experiment Name: At_Far-red-induction_P Parameter: Plant Line Value: Columbia
  misc_feature: MA Experiment 20001451 PARAMETER Experiment Name: At_Far-red-induction_P Parameter: Timepoint (hr) Value: 24
  misc_feature: MA Experiment 20001451 PARAMETER Experiment Name: At_Far-red-induction_P Parameter: Tissue Value: Whole Plant
gtgagagagagagagagacagataggaatctttgagcgattcgtcttcctcctctatcgccctctactcttcaccggaactgtgatctcaccggaatatccctcctttatttatcctctactcatccgttttactctctccctccgtcgatcttctctttctcttgatcgcctccgtccattctttatcatttcttaattcagaattgtgatcgatggatgattattttagcgcggaggaagaggcttgctattactcctccgatcaagattctttggatggaattgataatgaagagtctgaattgcagcctctgtcctctaaaagatcaaacactcaggtcatcactcaggaatcgcttctagcagcacagagagaagatttgctaagggtgatggaattgttatcaataaaggagcaccatgcacggactcttcttattcattaccagtgggatgtggagaagttgtttgctgtgtttgttgagaaaggaaaagatagcttgttttctggagctggtgtcactgtcttcgattatcaatatggcaactcttcctttcctcagtcttcacagatgagttgtgatgtttgcatggaggatttaccaggtgatcacatgacaagaatggactgtggccattgcttttgcaataattgttggacggagcattttactgtgcagataaatgaaggtcagagcaaaaggattagatgcatggctcatcaatgtaatgctatttgtgatgaagatattgtcaggagtctagtcagtaaaaagcgtccagatctagctgcgaagtttgatcgttaccttcttgagtcgtacatcgaagataacagaatggtcaagtggtgtcctagcactccgcattgtgggaatgctatacgagctgaggatgacaagttgtgcgaagttgaatgttcttgtggtcttcagttctgtttcagttgtctgtgtcaagcccactccccttgctcttgtttgatgtgggagttatggagaaagaagtgtcgagatgagtctgagacaatcaactggataaccgttcacacaaagctgtgtcccaaatgttacaaacctgtggaaaagaatggtggatgcaatctcgtgaggtgtatttgtgggcagtgtttttgttggctatgtggtggagctactggaagtgatcacacttataggagtatcgctggtcacagttgtggtcggtaccaagatgacaaagagaagcagatggaaagagcgaagagagatttaaacaggtatacgcattatcatcaccgatacaaagctcatacagattcatcaaagctagaagataaacttagggatactatccatgagaaagtgtcgaaatcagaaaagagggagttgaagcttaaagacttcagctgggtcaccaatggactcgaccggttattcagatcaaggcgagttctttcatattcgtatgcttttgcatattatatgtttggtgaagagatgtttaaagatgagatgacccctgaggagagagagataaagaagaatttgtttgaggatcagcagcaacaacttgaaagtaatgtggagaaactttcgcagttccttgaggagccctttgatgaatttagtaatgataaagttatggcgataaggattcaaatcatcaatttgtctgtcgccgtcgatacactctgcaagaaaatgtacgagtgcattgagaatgacttactcggatctctccaacttggcatccacaacatctcaccttacagatcgaagggaatcgaacaagcagctcagttttatgcttcctggaattccaaagatgctgacaaattccaacctttggatagtggtacaagcggagtgacatcgaggcctgagcaagcttcaggatcaaggagctcggaagacaccatttgctcatcttcacagaaacgtcccaaaaaagaaggaagtttcttaaacaacaaagtcactttattggatttgaacttgccagctgatttcgtcgaccagaactgaactcaaatcctctcttgcttagtccaaatgagatatgatgacatagcaaaaggtgtttgactatatatctatcaccttcaagactcgtgactctggactgattaatttgtctttcttatagtttttctggttttcgtacaactataattatgactaccccttacttttgcttctttagttatagatctttaattcagcctctttaaactctgctgcttctcaatgtctatgatgtcaaaagagttattttattagtaactaatttaat

SEQ ID NO: 27280 - protein, 597 aa, Arabidopsis thaliana
  peptide (1)..(597): Ceres Seq. ID no. 13491219
  misc_feature (227)..(329): Pfam Name: IBR domain Pfam Description: IBR domain
  misc_feature (227)..(544): Homolog of NCBI NO: 25411698 NR Description: hypothetical protein At2g16090 [imported] -
  misc_feature (19)..(101): Homolog of NCBI NO: 15232252 NR Description: hypothetical protein [Arabidopsis thaliana]
  misc_feature (177)..(527): Homolog of NCBI NO: 15232252 NR Description: hypothetical protein [Arabidopsis thaliana]
  misc_feature (70)..(107): Homolog of NCBI NO: 9294477 NR Description: RING finger protein-like [Arabidopsis thaliana]
  misc_feature (121)..(175): Homolog of NCBI NO: 9294477 NR Description: RING finger protein-like [Arabidopsis thaliana]
  misc_feature (206)..(527): Homolog of NCBI NO: 9294477 NR Description: RING finger protein-like [Arabidopsis thaliana]
  misc_feature (42)..(532): Homolog of NCBI NO: 20330766 NR Description: Putative RING zinc finger protein
  misc_feature (2)..(526): Homolog of NCBI NO: 15232251 NR Description: expressed protein [Arabidopsis thaliana]
  misc_feature (1)..(596): Homolog of NCBI NO: 18086414 NR Description: At2g16090/F7H1.11 [Arabidopsis thaliana]
  misc_feature (1)..(596): Homolog of NCBI NO: 22325707 NR Description: expressed protein [Arabidopsis thaliana]
MDDYFSAEEEACYYSSDQDSLDGIDNEESELQPLSSKRSNTQVITQESLLAAQREDLLRVMELLSIKEHHARTLLIHYQWDVEKLFAVFVEKGKDSLFSGAGVTVFDYQYGNSSFPQSSQMSCDVCMEDLPGDHMTRMDCGHCFCNNCWTEHFTVQINEGQSKRIRCMAHQCNAICDEDIVRSLVSKKRPDLAAKFDRYLLESYIEDNRMVKWCPSTPHCGNAIRAEDDKLCEVECSCGLQFCFSCLCQAHSPCSCLMWELWRKKCRDESETINWITVHTKLCPKCYKPVEKNGGCNLVRCICGQCFCWLCGGATGSDHTYRSIAGHSCGRYQDDKEKQMERAKRDLNRYTHYHHRYKAHTDSSKLEDKLRDTIHEKVSKSEKRELKLKDFSWVTNGLDRLFRSRRVLSYSYAFAYYMFGEEMFKDEMTPEEREIKKNLFEDQQQQLESNVEKLSQFLEEPFDEFSNDKVMAIRIQIINLSVAVDTLCKKMYECIENDLLGSLQLGIHNISPYRSKGIEQAAQFYASWNSKDADKFQPLDSGTSGVTSRPEQASGSRSSEDTICSSSQKRPKKEGSFLNNKVTLLDLNLPADFVDQN

SEQ ID NO: 27281 - protein, 537 aa, Arabidopsis thaliana
  peptide (1)..(537): Ceres Seq. ID no. 13491220
  misc_feature (167)..(269): Pfam Name: IBR domain Pfam Description: IBR domain
  misc_feature (167)..(484): Homolog of NCBI NO: 25411698 NR Description: hypothetical protein At2g16090 [imported] -
  misc_feature (1)..(41): Homolog of NCBI NO: 15232252 NR Description: hypothetical protein [Arabidopsis thaliana]
  misc_feature (117)..(467): Homolog of NCBI NO: 15232252 NR Description: hypothetical protein [Arabidopsis thaliana]
  misc_feature (10)..(47): Homolog of NCBI NO: 9294477 NR Description: RING finger protein-like [Arabidopsis thaliana]
  misc_feature (61)..(115): Homolog of NCBI NO: 9294477 NR Description: RING finger protein-like [Arabidopsis thaliana]
  misc_feature (146)..(467): Homolog of NCBI NO: 9294477 NR Description: RING finger protein-like [Arabidopsis thaliana]
  misc_feature (1)..(472): Homolog of NCBI NO: 20330766 NR Description: Putative RING zinc finger protein
  misc_feature (1)..(466): Homolog of NCBI NO: 15232251 NR Description: expressed protein [Arabidopsis thaliana]
  misc_feature (1)..(536): Homolog of NCBI NO: 18086414 NR Description: At2g16090/F7H1.11 [Arabidopsis thaliana]
  misc_feature (1)..(536): Homolog of NCBI NO: 22325707 NR Description: expressed protein [Arabidopsis thaliana]
MELLSIKEHHARTLLIHYQWDVEKLFAVFVEKGKDSLFSGAGVTVFDYQYGNSSFPQSSQMSCDVCMEDLPGDHMTRMDCGHCFCNNCWTEHFTVQINEGQSKRIRCMAHQCNAICDEDIVRSLVSKKRPDLAAKFDRYLLESYIEDNRMVKWCPSTPHCGNAIRAEDDKLCEVECSCGLQFCFSCLCQAHSPCSCLMWELWRKKCRDESETINWITVHTKLCPKCYKPVEKNGGCNLVRCICGQCFCWLCGGATGSDHTYRSIAGHSCGRYQDDKEKQMERAKRDLNRYTHYHHRYKAHTDSSKLEDKLRDTIHEKVSKSEKRELKLKDFSWVTNGLDRLFRSRRVLSYSYAFAYYMFGEEMFKDEMTPEEREIKKNLFEDQQQQLESNVEKLSQFLEEPFDEFSNDKVMAIRIQIINLSVAVDTLCKKMYECIENDLLGSLQLGIHNISPYRSKGIEQAAQFYASWNSKDADKFQPLDSGTSGVTSRPEQASGSRSSEDTICSSSQKRPKKEGSFLNNKVTLLDLNLPADFVDQN

SEQ ID NO: 27282 - protein, 477 aa, Arabidopsis thaliana
  peptide (1)..(477): Ceres Seq. ID no. 13491221
  misc_feature (107)..(209): Pfam Name: IBR domain Pfam Description: IBR domain
  misc_feature (1)..(339): Homolog of NCBI NO: 17737365 NR Description: ariadne CG5659-PA [Drosophila melanogaster]
  misc_feature (1)..(357): Homolog of NCBI NO: 25411698 NR Description: hypothetical protein At2g16090 [imported] -
  misc_feature (107)..(424): Homolog of NCBI NO: 25411698 NR Description: hypothetical protein At2g16090 [imported] -
  misc_feature (57)..(407): Homolog of NCBI NO: 15232252 NR Description: hypothetical protein [Arabidopsis thaliana]
  misc_feature (1)..(55): Homolog of NCBI NO: 9294477 NR Description: RING finger protein-like [Arabidopsis thaliana]
  misc_feature (86)..(407): Homolog of NCBI NO: 9294477 NR Description: RING finger protein-like [Arabidopsis thaliana]
  misc_feature (1)..(412): Homolog of NCBI NO: 20330766 NR Description: Putative RING zinc finger protein
  misc_feature (1)..(406): Homolog of NCBI NO: 15232251 NR Description: expressed protein [Arabidopsis thaliana]
  misc_feature (1)..(476): Homolog of NCBI NO: 18086414 NR Description: At2g16090/F7H1.11 [Arabidopsis thaliana]
  misc_feature (1)..(476): Homolog of NCBI NO: 22325707 NR Description: expressed protein [Arabidopsis thaliana]
MSCDVCMEDLPGDHMTRMDCGHCFCNNCWTEHFTVQINEGQSKRIRCMAHQCNAICDEDIVRSLVSKKRPDLAAKFDRYLLESYIEDNRMVKWCPSTPHCGNAIRAEDDKLCEVECSCGLQFCFSCLCQAHSPCSCLMWELWRKKCRDESETINWITVHTKLCPKCYKPVEKNGGCNLVRCICGQCFCWLCGGATGSDHTYRSIAGHSCGRYQDDKEKQMERAKRDLNRYTHYHHRYKAHTDSSKLEDKLRDTIHEKVSKSEKRELKLKDFSWVTNGLDRLFRSRRVLSYSYAFAYYMFGEEMFKDEMTPEEREIKKNLFEDQQQQLESNVEKLSQFLEEPFDEFSNDKVMAIRIQIINLSVAVDTLCKKMYECIENDLLGSLQLGIHNISPYRSKGIEQAAQFYASWNSKDADKFQPLDSGTSGVTSRPEQASGSRSSEDTICSSSQKRPKKEGSFLNNKVTLLDLNLPADFVDQN

SEQ ID NO: 27283 - DNA, 1704 bp, Arabidopsis thaliana
  misc_feature (1)..(1704): Ceres Seq. ID no. 13499852
  misc_feature: MA Experiment ID: 108573 Result: Up-regulated in Transcription
  misc_feature: MA Experiment 108573 PARAMETER Experiment Name: At_Drought_cDNA_P Parameter: Timepoint (hr) Value: 6
  misc_feature: MA Experiment 108573 PARAMETER Experiment Name: At_Drought_cDNA_P Parameter: Tissue Value: Aerial
  misc_feature: MA Experiment 108573 PARAMETER Experiment Name: At_Drought_cDNA_P Parameter: Treatment Value: Drought vs. No Drought
  misc_feature: MA Experiment ID: 108607 Result: Down-regulated in Transcription
  misc_feature: MA Experiment 108607 PARAMETER Experiment Name: At_100uM_ABA_cDNA_P Parameter: Timepoint (hr) Value: 4
  misc_feature: MA Experiment 108607 PARAMETER Experiment Name: At_100uM_ABA_cDNA_P Parameter: Tissue Value: Aerial
  misc_feature: MA Experiment 108607 PARAMETER Experiment Name: At_100uM_ABA_cDNA_P Parameter: Treatment Value: 100uM ABA vs. No Treatment
  misc_feature: MA Experiment ID: 20000087 Result: Down-regulated in Transcription
  misc_feature: MA Experiment 20000087 PARAMETER Experiment Name: At_100uM_ABA_Mutants_cDNA_P Parameter: Plant Line Value: WS
  misc_feature: MA Experiment 20000087 PARAMETER Experiment Name: At_100uM_ABA_Mutants_cDNA_P Parameter: Timepoint (hr) Value: 6
  misc_feature: MA Experiment 20000087 PARAMETER Experiment Name: At_100uM_ABA_Mutants_cDNA_P Parameter: Tissue Value: Aerial
  misc_feature: MA Experiment 20000087 PARAMETER Experiment Name: At_100uM_ABA_Mutants_cDNA_P Parameter: Treatment Value: 100uM ABA vs. No Treatment
  misc_feature: MA Experiment ID: 20000111 Result: Up-regulated in Transcription
  misc_feature: MA Experiment 20000111 PARAMETER Experiment Name: At_42deg_Heat_cDNA_P Parameter: Temperature (deg C) Value: 42 vs. 22
  misc_feature: MA Experiment 20000111 PARAMETER Experiment Name: At_42deg_Heat_cDNA_P Parameter: Timepoint (hr) Value: 6
  misc_feature: MA Experiment 20000111 PARAMETER Experiment Name: At_42deg_Heat_cDNA_P Parameter: Tissue Value: Aerial
  misc_feature: MA Experiment ID: 20001557 Result: Up-regulated in Transcription
  misc_feature: MA Experiment 20001557 PARAMETER Experiment Name: At_Drought_Soil_Dry_P Parameter: Age (day) Value: 27
  misc_feature: MA Experiment 20001557 PARAMETER Experiment Name: At_Drought_Soil_Dry_P Parameter: Organism Value: A. thaliana
  misc_feature: MA Experiment 20001557 PARAMETER Experiment Name: At_Drought_Soil_Dry_P Parameter: Plant Line Value: WS
  misc_feature: MA Experiment 20001557 PARAMETER Experiment Name: At_Drought_Soil_Dry_P Parameter: Post Timepoint (hr) Value: 3
  misc_feature: MA Experiment 20001557 PARAMETER Experiment Name: At_Drought_Soil_Dry_P Parameter: Post-Treatment Value: Re-Water vs. No Drought
  misc_feature: MA Experiment 20001557 PARAMETER Experiment Name: At_Drought_Soil_Dry_P Parameter: Timepoint (day) Value: 13
  misc_feature: MA Experiment 20001557 PARAMETER Experiment Name: At_Drought_Soil_Dry_P Parameter: Treatment Value: Drought vs. No Drought
attccttgcttcatttttcgtcaccctagccgctttactctcttgcgatatctctgagatttgtttgacagtctctaaccatgggtaaagagaagtttcacatcaacattgtggtcattggccacgtcgattctggaaagtcgaccaccactggacacttgatctacaagttgggtggtattgacaagcgtgtcattgagaggttcgagaaggaggctgctgagatgaacaagaggtccttcaagtacgcatgggttttggacaaacttaaggctgagcgtgagcgtggtatcaccattgacattgctctctggaagttcgagaccaccaagtactactgcactgtcattgatgctcctggccatcgtgatttcatcaagaacatgatcactggtacctcccaggctgattgtgctgtccttatcattgactccaccactggtggttttgaggctggtatctccaaggatggtcagacccgtgagcacgctctacttgctttcacccttggtgtcaagcagatgatctgctgttgtaacaagatggatgccactacccccaagtactccaaggccaggtacgatgaaatcatcaaggaggtgtcttcctacttgaagaaggttggttacaaccccgacaaaatcccatttgtgcccatctctggatttgagggtgacaacatgattgagaggtccaccaaccttgactggtacaagggaccaactctccttgaggctcttgaccagatcaacgagcccaagaggccgtcagacaagccccttcgtctcccacttcaggatgtctacaagattggtggtattggaacggtgccagtgggacgtgttgagactggtatgatcaagcctggtatggttgtgacctttgctcccacaggattgaccactgaggtcaagtctgttgagatgcaccacgagtctcttcttgaggcacttccaggtgacaacgttgggttcaatgttaagaatgttgctgtcaaggatcttaagagagggtacgtcgcatccaactccaaggatgaccctgccaagggtgctgctaacttcacctcccaggtcatcatcatgaaccaccctggtcagattggtaacggttacgccccagtcctggattgccacacctctcacattgcagtcaagttctctgagatcttgaccaagattgacaggcgttctggtaaggagattgagaaggagcccaagttcttgaagaatggtgatgctggtatggtgaagatgactccaaccaagcccatggttgtggagaccttctctgagtacccaccacttggacgtttcgctgtgagggacatgaggcagactgttgcagtcggtgttatcaagagtgttgacaagaaggacccaaccggagccaaggttaccaaggctgccgtcaagaagggtgcgaagtgaaccatcctcaaaactctatctgccgcaggtgaatcaaaggacagtgttagttttattacaatagtttggtatttggtcgcgtgtctgtgttcttgtttcgttttctccccgtcagagcgttgttctcgtaattgggttcttgatcggaggtggcggatctacacacacattcttcctgttttttgctttttatttgttttctcattttgaactgttttaaaatttctgttatatgaatgaatgttttccctgcggttattatcttctttactct

SEQ ID NO: 27284 - protein, 449 aa, Arabidopsis thaliana
  peptide (1)..(449): Ceres Seq. ID no. 13499853
  misc_feature (5)..(227): Pfam Name: Elongation factor Tu GTP binding domain Pfam Description: Elongation factor Tu GTP binding domain
  misc_feature (1)..(449): Homolog of NCBI NO: 15081765 NR Description: At1g07930/T6D22_3 [Arabidopsis thaliana]
  misc_feature (1)..(449): Homolog of NCBI NO: 17064954 NR Description: putative elongation factor 1-a [Arabidopsis
  misc_feature (1)..(449): Homolog of NCBI NO: 18086389 NR Description: At1g07930/T6D22_3 [Arabidopsis thaliana]
  misc_feature (1)..(449): Homolog of NCBI NO: 23397097 NR Description: putative translation elongation factor eEF-1
  misc_feature (1)..(449): Homolog of NCBI NO: 13430510 NR Description: putative translation elongation factor eEF-1
  misc_feature (1)..(449): Homolog of NCBI NO: 13605682 NR Description: At1g07930/T6D22_3 [Arabidopsis thaliana]
  misc_feature (1)..(449): Homolog of NCBI NO: 99688 NR Description: translation elongation factor eEF-1 alpha chain
  misc_feature (1)..(449): Homolog of NCBI NO: 15239308 NR Description: elongation factor 1-alpha (EF-1-alpha)
  misc_feature (1)..(449): Homolog of NCBI NO: 25407012 NR Description: protein T6D22.2 [imported] - Arabidopsis thaliana
  misc_feature (1)..(449): Homolog of NCBI NO: 25407012 NR Description: protein T6D22.2 [imported] - Arabidopsis thaliana
MGKEKFHINIVVIGHVDSGKSTTTGHLIYKLGGIDKRVIERFEKEAAEMNKRSFKYAWVLDKLKAERERGITIDIALWKFETTKYYCTVIDAPGHRDFIKNMITGTSQADCAVLIIDSTTGGFEAGISKDGQTREHALLAFTLGVKQMICCCNKMDATTPKYSKARYDEIIKEVSSYLKKVGYNPDKIPFVPISGFEGDNMIERSTNLDWYKGPTLLEALDQINEPKRPSDKPLRLPLQDVYKIGGIGTVPVGRVETGMIKPGMVVTFAPTGLTTEVKSVEMHHESLLEALPGDNVGFNVKNVAVKDLKRGYVASNSKDDPAKGAANFTSQVIIMNHPGQIGNGYAPVLDCHTSHIAVKFSEILTKIDRRSGKEIEKEPKFLKNGDAGMVKMTPTKPMVVETFSEYPPLGRFAVRDMRQTVAVGVIKSVDKKDPTGAKVTKAAVKKGAK

SEQ ID NO: 27285 - protein, 401 aa, Arabidopsis thaliana; identical to SEQ ID NO: 21437
  peptide (1)..(401): Ceres Seq. ID no. 13499854
  misc_feature (1)..(179): Pfam Name: Elongation factor Tu GTP binding domain Pfam Description: Elongation factor Tu GTP binding domain
  misc_feature (1)..(401): Homolog of NCBI NO: 15081765 NR Description: At1g07930/T6D22_3 [Arabidopsis thaliana]
  misc_feature (1)..(401): Homolog of NCBI NO: 17064954 NR Description: putative elongation factor 1-a [Arabidopsis
  misc_feature (1)..(401): Homolog of NCBI NO: 18086389 NR Description: At1g07930/T6D22_3 [Arabidopsis thaliana]
  misc_feature (1)..(401): Homolog of NCBI NO: 23397097 NR Description: putative translation elongation factor eEF-1
  misc_feature (1)..(401): Homolog of NCBI NO: 13430510 NR Description: putative translation elongation factor eEF-1
  misc_feature (1)..(401): Homolog of NCBI NO: 13605682 NR Description: At1g07930/T6D22_3 [Arabidopsis thaliana]
  misc_feature (1)..(401): Homolog of NCBI NO: 99688 NR Description: translation elongation factor eEF-1 alpha chain
  misc_feature (1)..(401): Homolog of NCBI NO: 15239308 NR Description: elongation factor 1-alpha (EF-1-alpha)
  misc_feature (1)..(401): Homolog of NCBI NO: 25407012 NR Description: protein T6D22.2 [imported] - Arabidopsis thaliana
  misc_feature (1)..(401): Homolog of NCBI NO: 25407012 NR Description: protein T6D22.2 [imported] - Arabidopsis thaliana

SEQ ID NO: 27286 - protein, 348 aa, Arabidopsis thaliana; identical to SEQ ID NO: 21438
  peptide (1)..(348): Ceres Seq. ID no. 13499855
  misc_feature (1)..(126): Pfam Name: Elongation factor Tu GTP binding domain Pfam Description: Elongation factor Tu GTP binding domain
  misc_feature (1)..(348): Homolog of NCBI NO: 13605682 NR Description: At1g07930/T6D22_3 [Arabidopsis thaliana]
  misc_feature (1)..(348): Homolog of NCBI NO: 99688 NR Description: translation elongation factor eEF-1 alpha chain
  misc_feature (1)..(348): Homolog of NCBI NO: 15239308 NR Description: elongation factor 1-alpha (EF-1-alpha)
  misc_feature (1)..(348): Homolog of NCBI NO: 17064954 NR Description: putative elongation factor 1-a [Arabidopsis
  misc_feature (1)..(348): Homolog of NCBI NO: 23397097 NR Description: putative translation elongation factor eEF-1
  misc_feature (1)..(348): Homolog of NCBI NO: 13430510 NR Description: putative translation elongation factor eEF-1
  misc_feature (1)..(348): Homolog of NCBI NO: 18086389 NR Description: At1g07930/T6D22_3 [Arabidopsis thaliana]
  misc_feature (1)..(348): Homolog of NCBI NO: 15081765 NR Description: At1g07930/T6D22_3 [Arabidopsis thaliana]
  misc_feature (1)..(348): Homolog of NCBI NO: 25407012 NR Description: protein T6D22.2 [imported] - Arabidopsis thaliana
  misc_feature (1)..(348): Homolog of NCBI NO: 25407012 NR Description: protein T6D22.2 [imported] - Arabidopsis thaliana

SEQ ID NO: 27287 - DNA, 1016 bp, Arabidopsis thaliana
  misc_feature (1)..(1016): Ceres Seq. ID no. 12389155
  misc_feature: MA Experiment ID: 20000169 Result: Up-regulated in Transcription
  misc_feature: MA Experiment 20000169 PARAMETER Experiment Name: At_100uM_ABA_P Parameter: Age (day) Value: 14
  misc_feature: MA Experiment 20000169 PARAMETER Experiment Name: At_100uM_ABA_P Parameter: Organism Value: A. thaliana
  misc_feature: MA Experiment 20000169 PARAMETER Experiment Name: At_100uM_ABA_P Parameter: Plant Line Value: WS
  misc_feature: MA Experiment 20000169 PARAMETER Experiment Name: At_100uM_ABA_P Parameter: Timepoint (hr) Value: 6
  misc_feature: MA Experiment 20000169 PARAMETER Experiment Name: At_100uM_ABA_P Parameter: Tissue Value: Aerial
  misc_feature: MA Experiment 20000169 PARAMETER Experiment Name: At_100uM_ABA_P Parameter: Treatment Value: 100uM ABA vs. No Treatment
  misc_feature: MA Experiment ID: 20000184 Result: Up-regulated in Transcription
  misc_feature: MA Experiment 20000184 PARAMETER Experiment Name: At_Shoots__P Parameter: Age (day) Value: 7
  misc_feature: MA Experiment 20000184 PARAMETER Experiment Name: At_Shoots__P Parameter: Tissue Value: Shoots vs. Whole Plant
  misc_feature: MA Experiment ID: 20000185 Result: Up-regulated in Transcription
  misc_feature: MA Experiment 20000185 PARAMETER Experiment Name: At_Roots__P Parameter: Age (day) Value: 7 vs. 21
  misc_feature: MA Experiment 20000185 PARAMETER Experiment Name: At_Roots__P Parameter: Organism Value: A. thaliana
  misc_feature: MA Experiment 20000185 PARAMETER Experiment Name: At_Roots__P Parameter: Tissue Value: Roots vs. Whole Plant
  misc_feature: MA Experiment ID: 20000234 Result: Up-regulated in Transcription
  misc_feature: MA Experiment 20000234 PARAMETER Experiment Name: At_Siliques_P Parameter: Age (day) Value: 21
  misc_feature: MA Experiment 20000234 PARAMETER Experiment Name: At_Siliques_P Parameter: Organism Value: A. thaliana
  misc_feature: MA Experiment 20000234 PARAMETER Experiment Name: At_Siliques_P Parameter: Plant Line Value: WS
  misc_feature: MA Experiment 20000234 PARAMETER Experiment Name: At_Siliques_P Parameter: Tissue Value: Less Than 5mm Siliques vs. Whole Plant
  misc_feature: MA Experiment ID: 20000264 Result: Up-regulated in Transcription
  misc_feature: MA Experiment 20000264 PARAMETER Experiment Name: At_Open_Flower_P Parameter: Age (day) Value: 21
  misc_feature: MA Experiment 20000264 PARAMETER Experiment Name: At_Open_Flower_P Parameter: Plant Line Value: WS
  misc_feature: MA Experiment 20000264 PARAMETER Experiment Name: At_Open_Flower_P Parameter: Tissue Value: Open Flower vs. Whole Plant
  misc_feature: MA Experiment ID: 20000265 Result: Up-regulated in Transcription
  misc_feature: MA Experiment 20000265 PARAMETER Experiment Name: At_Open_Flower_P Parameter: Age (day) Value: 21
  misc_feature: MA Experiment 20000265 PARAMETER Experiment Name: At_Open_Flower_P Parameter: Plant Line Value: WS
  misc_feature: MA Experiment 20000265 PARAMETER Experiment Name: At_Open_Flower_P Parameter: Tissue Value: Closed Flower vs. Whole Plant
  misc_feature: MA Experiment ID: 20000438 Result: Up-regulated in Transcription
  misc_feature: MA Experiment 20000438 PARAMETER Experiment Name: At_Shoots__P Parameter: Age (day) Value: 14
  misc_feature: MA Experiment 20000438 PARAMETER Experiment Name: At_Shoots__P Parameter: Tissue Value: Shoots vs. Whole Plant
  misc_feature: MA Experiment ID: 20000439 Result: Up-regulated in Transcription
  misc_feature: MA Experiment 20000439 PARAMETER Experiment Name: At_Roots__P Parameter: Age (day) Value: 14 vs. 21
  misc_feature: MA Experiment 20000439 PARAMETER Experiment Name: At_Roots__P Parameter: Organism Value: A. thaliana
  misc_feature: MA Experiment 20000439 PARAMETER Experiment Name: At_Roots__P Parameter: Tissue Value: Roots vs. Whole Plant
  misc_feature: MA Experiment ID: 20001248 Result: Down-regulated in Transcription
  misc_feature: MA Experiment 20001248 PARAMETER Experiment Name: At_Far-red-induction_P Parameter: Age (day) Value: 7
  misc_feature: MA Experiment 20001248 PARAMETER Experiment Name: At_Far-red-induction_P Parameter: Light Value: Far-red vs. White
  misc_feature: MA Experiment 20001248 PARAMETER Experiment Name: At_Far-red-induction_P Parameter: Organism Value: A. thaliana
  misc_feature: MA Experiment 20001248 PARAMETER Experiment Name: At_Far-red-induction_P Parameter: Plant Line Value: Columbia
  misc_feature: MA Experiment 20001248 PARAMETER Experiment Name: At_Far-red-induction_P Parameter: Timepoint (hr) Value: 4
  misc_feature: MA Experiment 20001248 PARAMETER Experiment Name: At_Far-red-induction_P Parameter: Tissue Value: Whole Plant
aaagtctcaacctttcttctctaatggagatctgcacttacttcaaatcacaacccacttggctcctcattctcttcgttctggggtcaatctcaatcttcaaattcatcttcaccctcctcagatctttctacatctacttcctccgaccatccaaaaacctccgccgatacggttcatgggcaatcatcaccggaccaacagacggaatcggtaaagctttcgcctttcagttagcccagaaaggtcttaaccttatactcgttgctcgtaacccagacaagctcaaagatgtctctgattccatcagatctaagtattttcatgaggttgatgaagagttgatcaataacttgattaagatcaatgttgaaggaactactaaagttactcaagctgtgttgcctaatatgcttaagaggaagaaaggtgctattattaatatgggttctggtgctgctgctcttattccttcttatcctttttactctgtttatgctggtgctaaaacgtacgtggatcagttcacaaagtgtctacatgttgagtataagaagagtgggattgatgttcaatgccaggttcccttgtatgttgcaacaaagatgacaaaaataagaagagcatccttcttagttgcatcaccagagggttacgcaaaggcagcactgcgttttgtaggctatgaagcgcaatgcacaccgtactggcctcacgctctcatgggtgcagttgtctctgcattgcccgaaagcgtttttgaatcatttaacatcaagagatgcctccagatccggaagaagggtctccaaaaagactccatgaagaaagaatgaatcttccaggtttaagttactaccaagaatttccttcttctgaagttgttggtttcttgaaaagcttctgttctgaatcttttgtaagacttgtactctttagttttctaagttttttatattttaagattaaaaaccctaacgtacacgaataatttacttcctctgtttctatttatt

SEQ ID NO: 27288 - protein, 277 aa, Arabidopsis thaliana
  peptide (1)..(277): Ceres Seq. ID no. 12389156
  misc_feature (77)..(106): Homolog of NCBI NO: 2586125 NR Description: b-keto acyl reductase [Arabidopsis thaliana]
  misc_feature (104)..(277): Homolog of NCBI NO: 2586125 NR Description: b-keto acyl reductase [Arabidopsis thaliana]
  misc_feature (41)..(106): Homolog of NCBI NO: 11072027 NR Description: F12A21.14 [Arabidopsis thaliana]
  misc_feature (104)..(277): Homolog of NCBI NO: 11072027 NR Description: F12A21.14 [Arabidopsis thaliana]
  misc_feature (8)..(106): Homolog of NCBI NO: 28565601 NR Description: putative 3-ketoacyl-CoA reductase 2 [Brassica
  misc_feature (104)..(277): Homolog of NCBI NO: 28565601 NR Description: putative 3-ketoacyl-CoA reductase 2 [Brassica
  misc_feature (8)..(106): Homolog of NCBI NO: 28565597 NR Description: putative 3-ketoacyl-CoA reductase 1 [Brassica
  misc_feature (104)..(277): Homolog of NCBI NO: 28565597 NR Description: putative 3-ketoacyl-CoA reductase 1 [Brassica
  misc_feature (8)..(106): Homolog of NCBI NO: 18408847 NR Description: Expressed protein
  misc_feature (104)..(277): Homolog of NCBI NO: 18408847 NR Description: Expressed protein
SLNLSSLMEICTYFKSQPTWLLILFVLGSISIFKFIFTLLRSFYIYFLRPSKNLRRYGSWAIITGPTDGIGKAFAFQLAQKGLNLILVARNPDKLKDVSDSIRSKYFHEVDEELINNLIKINVEGTTKVTQAVLPNMLKRKKGAIINMGSGAAALIPSYPFYSVYAGAKTYVDQFTKCLHVEYKKSGIDVQCQVPLYVATKMTKIRRASFLVASPEGYAKAALRFVGYEAQCTPYWPHALMGAVVSALPESVFESFNIKRCLQIRKKGLQKDSMKKE

SEQ ID NO: 27289 - protein, 270 aa, Arabidopsis thaliana
  peptide (1)..(270): Ceres Seq. ID no. 12389157
  misc_feature (70)..(99): Homolog of NCBI NO: 2586125 NR Description: b-keto acyl reductase [Arabidopsis thaliana]
  misc_feature (97)..(270): Homolog of NCBI NO: 2586125 NR Description: b-keto acyl reductase [Arabidopsis thaliana]
  misc_feature (34)..(99): Homolog of NCBI NO: 11072027 NR Description: F12A21.14 [Arabidopsis thaliana]
  misc_feature (97)..(270): Homolog of NCBI NO: 11072027 NR Description: F12A21.14 [Arabidopsis thaliana]
  misc_feature (1)..(99): Homolog of NCBI NO: 28565601 NR Description: putative 3-ketoacyl-CoA reductase 2 [Brassica
  misc_feature (97)..(270): Homolog of NCBI NO: 28565601 NR Description: putative 3-ketoacyl-CoA reductase 2 [Brassica
  misc_feature (1)..(99): Homolog of NCBI NO: 28565597 NR Description: putative 3-ketoacyl-CoA reductase 1 [Brassica
  misc_feature (97)..(270): Homolog of NCBI NO: 28565597 NR Description: putative 3-ketoacyl-CoA reductase 1 [Brassica
  misc_feature (1)..(99): Homolog of NCBI NO: 18408847 NR Description: Expressed protein
  misc_feature (97)..(270): Homolog of NCBI NO: 18408847 NR Description: Expressed protein
MEICTYFKSQPTWLLILFVLGSISIFKFIFTLLRSFYIYFLRPSKNLRRYGSWAIITGPTDGIGKAFAFQLAQKGLNLILVARNPDKLKDVSDSIRSKYFHEVDEELINNLIKINVEGTTKVTQAVLPNMLKRKKGAIINMGSGAAALIPSYPFYSVYAGAKTYVDQFTKCLHVEYKKSGIDVQCQVPLYVATKMTKIRRASFLVASPEGYAKAALRFVGYEAQCTPYWPHALMGAVVSALPESVFESFNIKRCLQIRKKGLQKDSMKKE

SEQ ID NO: 27290 - protein, 141 aa, Arabidopsis thaliana
  peptide (1)..(141): Ceres Seq. ID no. 12389158
  misc_feature (1)..(140): Homolog of NCBI NO: 7489808 NR Description: probable beta-keto acyl reductase - maize
  misc_feature (1)..(140): Homolog of NCBI NO: 7489413 NR Description: probable b-keto acyl reductase (EC 1.1.-.-) -
  misc_feature (1)..(140): Homolog of NCBI NO: 38345332 NR Description: OSJNBa0081L15.5 [Oryza sativa (japonica
  misc_feature (1)..(141): Homolog of NCBI NO: 23505781 NR Description: At1g67730/F12A21_31 [Arabidopsis thaliana]
  misc_feature (1)..(141): Homolog of NCBI NO: 13605726 NR Description: At1g67730/F12A21_31 [Arabidopsis thaliana]
  misc_feature (1)..(141): Homolog of NCBI NO: 2586125 NR Description: b-keto acyl reductase [Arabidopsis thaliana]
  misc_feature (1)..(141): Homolog of NCBI NO: 11072027 NR Description: F12A21.14 [Arabidopsis thaliana]
  misc_feature (1)..(141): Homolog of NCBI NO: 28565601 NR Description: putative 3-ketoacyl-CoA reductase 2 [Brassica
  misc_feature (1)..(141): Homolog of NCBI NO: 28565597 NR Description: putative 3-ketoacyl-CoA reductase 1 [Brassica
  misc_feature (1)..(141): Homolog of NCBI NO: 18408847 NR Description: Expressed protein
MLKRKKGAIINMGSGAAALIPSYPFYSVYAGAKTYVDQFTKCLHVEYKKSGIDVQCQVPLYVATKMTKIRRASFLVASPEGYAKAALRFVGYEAQCTPYWPHALMGAVVSALPESVFESFNIKRCLQIRKKGLQKDSMKKE

SEQ ID NO: 27291 - DNA, 1388 bp, Arabidopsis thaliana
  misc_feature (1)..(1388): Ceres Seq. ID no. 12371745
  misc_feature: MA Experiment ID: 20000315 Result: Down-regulated in Transcription
  misc_feature: MA Experiment 20000315 PARAMETER Experiment Name: At_14day_Shoots-Roots_Sub_P Parameter: Age (day) Value: 14
  misc_feature: MA Experiment 20000315 PARAMETER Experiment Name: At_14day_Shoots-Roots_Sub_P Parameter: Organism Value: A. thaliana
  misc_feature: MA Experiment 20000315 PARAMETER Experiment Name: At_14day_Shoots-Roots_Sub_P Parameter: Plant Line Value: WS
  misc_feature: MA Experiment 20000315 PARAMETER Experiment Name: At_14day_Shoots-Roots_Sub_P Parameter: Tissue Value: Shoots vs. Whole Plant
  misc_feature: MA Experiment ID: 20000328 Result: Down-regulated in Transcription
  misc_feature: MA Experiment 20000328 PARAMETER Experiment Name: At_42deg_Heat_Sub_P Parameter: Age (day) Value: 14
  misc_feature: MA Experiment 20000328 PARAMETER Experiment Name: At_42deg_Heat_Sub_P Parameter: Organism Value: A. thaliana
  misc_feature: MA Experiment 20000328 PARAMETER Experiment Name: At_42deg_Heat_Sub_P Parameter: Plant Line Value: WS
  misc_feature: MA Experiment 20000328 PARAMETER Experiment Name: At_42deg_Heat_Sub_P Parameter: Temperature (deg C) Value: 42 vs. 22
  misc_feature: MA Experiment 20000328 PARAMETER Experiment Name: At_42deg_Heat_Sub_P Parameter: Timepoint (hr) Value: 6
  misc_feature: MA Experiment 20000328 PARAMETER Experiment Name: At_42deg_Heat_Sub_P Parameter: Tissue Value: Aerial
gtttatcaatctcacatcgagacgaaattagagctactcagacttgttctattaaactgttaccttctccagacaaagcgttaccttttttttttggtccgtacgaggaaaaatctaggagacagagctatttgttcgaaagatgcaactttttaatagctgttgtggaaaaggatttgatgggaagaagaaagaaaaggaagagccatcttggagggtattttcactgaaggaacttcatgcagccaccaacagtttcaattacgataacaaactcggtgaaggtcgatttggtagtgtctattggggtcagctatgggatggctcacaaattgcagtcaagaggttgaaggaatggagtaatagagaagagatagattttgctgtggaagtcgagattcttgctcgtattcgtcacaagaatttgttgagtgttcgtggctactgtgctgaaggacaagaacgtcttcttgtgtacgagtacatgcagaatttgagcttggtttcacatcttcatggccagcattcagctgaatgtcttctagattggaccaagcgaatgaagatcgccatgagctctgctcaggccattgcctacctacacgaccacgcaaccccacatatagtccatggagatgtgagagctagcaatgtgttgttagactctgaatttgaagctcgcgttacagattttggttatggtaagctgatgccagatgatgatactggagatggagctaccaaagccaaaagtaataatggatatatctcgccagaatgtgatgcatcaggaaaagaatcagaaactagcgatgtgtacagttttggtatccttttgatggtactggttagtggcaagagaccactcgagaggctaaatccaacaacaacgcggtgtataacagagtgggttttaccacttgtttacgaaagaaattttggtgaaatcgttgataagaggctgagcgaggagcatgtggcagagaaactgaagaaagtagtcttggtggggcttatgtgtgctcagacagatccagacaagagaccaacaatgtctgaagtggtggagatgctggtgaatgaatcaaaggagaaaatatctgaacttgaagctaatcccctcttcaagaatccatatagcagcaacgaaaacaatagagagcatgttgcagaggaaagctcagatgtgatcttagaagataaagatcatcaacaacaacaagaatagcaatggttaggcacagtaattcgtttggcagattatttttagaggtcttgcttatttttttagtgtgtttcttggttcataaaattgatttgatcattactgatactggagtttgtaaggtgtggtattggcacatataagattgaaacttttattctgg

SEQ ID NO: 27292 - protein, 361 aa, Arabidopsis thaliana
  peptide (1)..(361): Ceres Seq. ID no. 12371746
  misc_feature (25)..(311): Homolog of NCBI NO: 34894174 NR Description: putative protein kinase [Oryza sativa (japonica
  misc_feature (27)..(348): Homolog of NCBI NO: 15217511 NR Description: putative ser/thr protein kinase; protein id:
  misc_feature (27)..(333): Homolog of NCBI NO: 14573459 NR Description: somatic embryogenesis receptor-like kinase 3
  misc_feature (27)..(333): Homolog of NCBI NO: 18418211 NR Description: somatic embryogenesis receptor-like kinase -like
  misc_feature (27)..(333): Homolog of NCBI NO: 7488244 NR Description: protein kinase homolog F17M5.190 - Arabidopsis
  misc_feature (7)..(350): Homolog of NCBI NO: 34898392 NR Description: ESTs C22458(C62866),C22459(C62866) correspond to region of the predicted gene.~Similar to genomic sequence of
  misc_feature (15)..(357): Homolog of NCBI NO: 25287618 NR Description: hypothetical protein F6D8.24 [imported] -
  misc_feature (1)..(357): Homolog of NCBI NO: 30695267 NR Description: protein kinase, putative [Arabidopsis thaliana]
  misc_feature (1)..(361): Homolog of NCBI NO: 18400939 NR Description: protein kinase, putative
  misc_feature (1)..(361): Homolog of NCBI NO: 21593950 NR Description: protein kinase, putative [Arabidopsis thaliana]
MQLFNSCCGKGFDGKKKEKEEPSWRVFSLKELHAATNSFNYDNKLGEGRFGSVYWGQLWDGSQIAVKRLKEWSNREEIDFAVEVEILARIRHKNLLSVRGYCAEGQERLLVYEYMQNLSLVSHLHGQHSAECLLDWTKRMKIAMSSAQAIAYLHDHATPHIVHGDVRASNVLLDSEFEARVTDFGYGKLMPDDDTGDGATKAKSNNGYISPECDASGKESETSDVYSFGILLMVLVSGKRPLERLNPTTTRCITEWVLPLVYERNFGEIVDKRLSEEHVAEKLKKVVLVGLMCAQTDPDKRPTMSEVVEMLVNESKEKISELEANPLFKNPYSSNENNREHVAEESSDVILEDKDHQQQQE

SEQ ID NO: 27293 - protein, 247 aa, Arabidopsis thaliana
  peptide (1)..(247): Ceres Seq. ID no. 12371747
  misc_feature (1)..(197): Homolog of NCBI NO: 34894174 NR Description: putative protein kinase [Oryza sativa (japonica
  misc_feature (1)..(234): Homolog of NCBI NO: 15217511 NR Description: putative ser/thr protein kinase; protein id:
  misc_feature (1)..(219): Homolog of NCBI NO: 18418211 NR Description: somatic embryogenesis receptor-like kinase -like
  misc_feature (1)..(219): Homolog of NCBI NO: 14573459 NR Description: somatic embryogenesis receptor-like kinase 3
  misc_feature (1)..(219): Homolog of NCBI NO: 7488244 NR Description: protein kinase homolog F17M5.190 - Arabidopsis
  misc_feature (1)..(236): Homolog of NCBI NO: 34898392 NR Description: ESTs C22458(C62866),C22459(C62866) correspond to region of the predicted gene.~Similar to genomic sequence of
  misc_feature (1)..(243): Homolog of NCBI NO: 25287618 NR Description: hypothetical protein F6D8.24 [imported] -
  misc_feature (1)..(243): Homolog of NCBI NO: 30695267 NR Description: protein kinase, putative [Arabidopsis thaliana]
  misc_feature (1)..(247): Homolog of NCBI NO: 18400939 NR Description: protein kinase, putative
  misc_feature (1)..(247): Homolog of NCBI NO: 21593950 NR Description: protein kinase, putative [Arabidopsis thaliana]
MQNLSLVSHLHGQHSAECLLDWTKRMKIAMSSAQAIAYLHDHATPHIVHGDVRASNVLLDSEFEARVTDFGYGKLMPDDDTGDGATKAKSNNGYISPECDASGKESETSDVYSFGILLMVLVSGKRPLERLNPTTTRCITEWVLPLVYERNFGEIVDKRLSEEHVAEKLKKVVLVGLMCAQTDPDKRPTMSEVVEMLVNESKEKISELEANPLFKNPYSSNENNREHVAEESSDVILEDKDHQQQQE

SEQ ID NO: 27294 - protein, 222 aa, Arabidopsis thaliana
  peptide (1)..(222): Ceres Seq. ID no. 12371748
  misc_feature (1)..(172): Homolog of NCBI NO: 34894174 NR Description: putative protein kinase [Oryza sativa (japonica
  misc_feature (1)..(209): Homolog of NCBI NO: 15217511 NR Description: putative ser/thr protein kinase; protein id:
  misc_feature (1)..(194): Homolog of NCBI NO: 14573459 NR Description: somatic embryogenesis receptor-like kinase 3
  misc_feature (1)..(194): Homolog of NCBI NO: 18418211 NR Description: somatic embryogenesis receptor-like kinase -like
  misc_feature (1)..(194): Homolog of NCBI NO: 7488244 NR Description: protein kinase homolog F17M5.190 - Arabidopsis
  misc_feature (1)..(211): Homolog of NCBI NO: 34898392 NR Description: ESTs C22458(C62866),C22459(C62866) correspond to region of the predicted gene.~Similar to genomic sequence of
  misc_feature (1)..(218): Homolog of NCBI NO: 25287618 NR Description: hypothetical protein F6D8.24 [imported] -
  misc_feature (1)..(218): Homolog of NCBI NO: 30695267 NR Description: protein kinase, putative [Arabidopsis thaliana]
  misc_feature (1)..(222): Homolog of NCBI NO: 18400939 NR Description: protein kinase, putative
  misc_feature (1)..(222): Homolog of NCBI NO: 21593950 NR Description: protein kinase, putative [Arabidopsis thaliana]
MKIAMSSAQAIAYLHDHATPHIVHGDVRASNVLLDSEFEARVTDFGYGKLMPDDDTGDGATKAKSNNGYISPECDASGKESETSDVYSFGILLMVLVSGKRPLERLNPTTTRCITEWVLPLVYERNFGEIVDKRLSEEHVAEKLKKVVLVGLMCAQTDPDKRPTMSEVVEMLVNESKEKISELEANPLFKNPYSSNENNREHVAEESSDVILEDKDHQQQQE

SEQ ID NO: 27295 - DNA, 973 bp, Arabidopsis thaliana
  misc_feature (1)..(973): Ceres Seq. ID no. 12395015
  misc_feature: MA Experiment ID: 108434 Result: Down-regulated in Transcription
  misc_feature: MA Experiment 108434 PARAMETER Experiment Name: At_Root_Tips_cDNA_P Parameter: Tissue Value: Root Tips
  misc_feature: MA Experiment ID: 108461 Result: Down-regulated in Transcription
  misc_feature: MA Experiment 108461 PARAMETER Experiment Name: At_Germinating_Seeds_cDNA_P Parameter: Age (day) Value: 1 vs. 0
  misc_feature: MA Experiment 108461 PARAMETER Experiment Name: At_Germinating_Seeds_cDNA_P Parameter: Tissue Value: Germinating Seeds
  misc_feature: MA Experiment ID: 108473 Result: Up-regulated in Transcription
  misc_feature: MA Experiment 108473 PARAMETER Experiment Name: At_Drought_Flowers_cDNA_P Parameter: Timepoint (hr) Value: 7 d
  misc_feature: MA Experiment 108473 PARAMETER Experiment Name: At_Drought_Flowers_cDNA_P Parameter: Tissue Value: Flower
  misc_feature: MA Experiment 108473 PARAMETER Experiment Name: At_Drought_Flowers_cDNA_P Parameter: Treatment Value: Drought vs. No Drought
  misc_feature: MA Experiment ID: 108488 Result: Down-regulated in Transcription
  misc_feature: MA Experiment ID: 108561 Result: Up-regulated in Transcription
  misc_feature: MA Experiment 108561 PARAMETER Experiment Name: At_100uM_ABA_cDNA_P Parameter: Timepoint (hr) Value: 6
  misc_feature: MA Experiment 108561 PARAMETER Experiment Name: At_100uM_ABA_cDNA_P Parameter: Tissue Value: Aerial
  misc_feature: MA Experiment 108561 PARAMETER Experiment Name: At_100uM_ABA_cDNA_P Parameter: Treatment Value: 100uM ABA vs. No Treatment
  misc_feature: MA Experiment ID: 108572 Result: Up-regulated in Transcription
  misc_feature: MA Experiment 108572 PARAMETER Experiment Name: At_Drought_cDNA_P Parameter: Timepoint (hr) Value: 1
  misc_feature: MA Experiment 108572 PARAMETER Experiment Name: At_Drought_cDNA_P Parameter: Tissue Value: Aerial
  misc_feature: MA Experiment 108572 PARAMETER Experiment Name: At_Drought_cDNA_P Parameter: Treatment Value: Drought vs. No Drought
  misc_feature: MA Experiment ID: 108573 Result: Up-regulated in Transcription
  misc_feature: MA Experiment 108573 PARAMETER Experiment Name: At_Drought_cDNA_P Parameter: Timepoint (hr) Value: 6
  misc_feature: MA Experiment 108573 PARAMETER Experiment Name: At_Drought_cDNA_P Parameter: Tissue Value: Aerial
  misc_feature: MA Experiment 108573 PARAMETER Experiment Name: At_Drought_cDNA_P Parameter: Treatment Value: Drought vs. No Drought
  misc_feature: MA Experiment ID: 108605 Result: Up-regulated in Transcription
  misc_feature: MA Experiment 108605 PARAMETER Experiment Name: At_100uM_ABA_cDNA_P Parameter: Timepoint (hr) Value: 6
  misc_feature: MA Experiment 108605 PARAMETER Experiment Name: At_100uM_ABA_cDNA_P Parameter: Tissue Value: Aerial
  misc_feature: MA Experiment 108605 PARAMETER Experiment Name: At_100uM_ABA_cDNA_P Parameter: Treatment Value: 100uM ABA vs. No Treatment
  misc_feature: MA Experiment ID: 108607 Result: Up-regulated in Transcription
  misc_feature: MA Experiment 108607 PARAMETER Experiment Name: At_100uM_ABA_cDNA_P Parameter: Timepoint (hr) Value: 4
  misc_feature: MA Experiment 108607 PARAMETER Experiment Name: At_100uM_ABA_cDNA_P Parameter: Tissue Value: Aerial
  misc_feature: MA Experiment 108607 PARAMETER Experiment Name: At_100uM_ABA_cDNA_P Parameter: Treatment Value: 100uM ABA vs. No Treatment
  misc_feature: MA Experiment ID: 20000069 Result: Up-regulated in Transcription
  misc_feature: MA Experiment 20000069 PARAMETER Experiment Name: At_100uM_ABA_Mutants_cDNA_P Parameter: Plant Line Value: CS23
  misc_feature: MA Experiment 20000069 PARAMETER Experiment Name: At_100uM_ABA_Mutants_cDNA_P Parameter: Timepoint (hr) Value: 6
  misc_feature: MA Experiment 20000069 PARAMETER Experiment Name: At_100uM_ABA_Mutants_cDNA_P Parameter: Tissue Value: Aerial
  misc_feature: MA Experiment 20000069 PARAMETER Experiment Name: At_100uM_ABA_Mutants_cDNA_P Parameter: Treatment Value: 100uM ABA vs. No Treatment
  misc_feature: MA Experiment ID: 20000071 Result: Up-regulated in Transcription
  misc_feature: MA Experiment 20000071 PARAMETER Experiment Name: At_100uM_ABA_Mutants_cDNA_P Parameter: Plant Line Value: CS8104
  misc_feature: MA Experiment 20000071 PARAMETER Experiment Name: At_100uM_ABA_Mutants_cDNA_P Parameter: Timepoint (hr) Value: 6
  misc_feature: MA Experiment 20000071 PARAMETER Experiment Name: At_100uM_ABA_Mutants_cDNA_P Parameter: Tissue Value: Aerial
  misc_feature: MA Experiment 20000071 PARAMETER Experiment Name: At_100uM_ABA_Mutants_cDNA_P Parameter: Treatment Value: 100uM ABA vs. No Treatment
  misc_feature: MA Experiment ID: 20000086 Result: Up-regulated in Transcription
  misc_feature: MA Experiment 20000086 PARAMETER Experiment Name: At_100uM_ABA_Mutants_cDNA_P Parameter: Plant Line Value: CS22
  misc_feature: MA Experiment 20000086 PARAMETER Experiment Name: At_100uM_ABA_Mutants_cDNA_P Parameter: Timepoint (hr) Value: 6
  misc_feature: MA Experiment 20000086 PARAMETER Experiment Name: At_100uM_ABA_Mutants_cDNA_P Parameter: Tissue Value: Aerial
  misc_feature: MA Experiment 20000086 PARAMETER Experiment Name: At_100uM_ABA_Mutants_cDNA_P Parameter: Treatment Value: 100uM ABA vs. No Treatment
  misc_feature: MA Experiment ID: 20000088 Result: Up-regulated in Transcription
  misc_feature: MA Experiment 20000088 PARAMETER Experiment Name: At_100uM_ABA_Mutants_cDNA_P Parameter: Plant Line Value: Landsberg
  misc_feature: MA Experiment 20000088 PARAMETER Experiment Name: At_100uM_ABA_Mutants_cDNA_P Parameter: Timepoint (hr) Value: 6
  misc_feature: MA Experiment 20000088 PARAMETER Experiment Name: At_100uM_ABA_Mutants_cDNA_P Parameter: Tissue Value: Aerial
  misc_feature: MA Experiment 20000088 PARAMETER Experiment Name: At_100uM_ABA_Mutants_cDNA_P Parameter: Treatment Value: 100uM ABA vs. No Treatment
  misc_feature: MA Experiment ID: 20000117 Result: Up-regulated in Transcription
  misc_feature: MA Experiment 20000117 PARAMETER Experiment Name: At_100uM_ABA_Mutants_cDNA_P Parameter: Plant Line Value: Columbia
  misc_feature: MA Experiment 20000117 PARAMETER Experiment Name: At_100uM_ABA_Mutants_cDNA_P Parameter: Timepoint (hr) Value: 6
  misc_feature: MA Experiment 20000117 PARAMETER Experiment Name: At_100uM_ABA_Mutants_cDNA_P Parameter: Tissue Value: Aerial
  misc_feature: MA Experiment 20000117 PARAMETER Experiment Name: At_100uM_ABA_Mutants_cDNA_P Parameter: Treatment Value: 100uM ABA vs. No Treatment
  misc_feature: MA Experiment ID: 20000169 Result: Up-regulated in Transcription
  misc_feature: MA Experiment 20000169 PARAMETER Experiment Name: At_100uM_ABA_P Parameter: Age (day) Value: 14
  misc_feature: MA Experiment 20000169 PARAMETER Experiment Name: At_100uM_ABA_P Parameter: Organism Value: A. thaliana
  misc_feature: MA Experiment 20000169 PARAMETER Experiment Name: At_100uM_ABA_P Parameter: Plant Line Value: WS
  misc_feature: MA Experiment 20000169 PARAMETER Experiment Name: At_100uM_ABA_P Parameter: Timepoint (hr) Value: 6
  misc_feature: MA Experiment 20000169 PARAMETER Experiment Name: At_100uM_ABA_P Parameter: Tissue Value: Aerial
  misc_feature: MA Experiment 20000169 PARAMETER Experiment Name: At_100uM_ABA_P Parameter: Treatment Value: 100uM ABA vs. No Treatment
  misc_feature: MA Experiment ID: 20000185 Result: Down-regulated in Transcription
  misc_feature: MA Experiment 20000185 PARAMETER Experiment Name: At_Roots__P Parameter: Age (day) Value: 7 vs. 21
  misc_feature: MA Experiment 20000185 PARAMETER Experiment Name: At_Roots__P Parameter: Organism Value: A. thaliana
  misc_feature: MA Experiment 20000185 PARAMETER Experiment Name: At_Roots__P Parameter: Tissue Value: Roots vs. Whole Plant
  misc_feature: MA Experiment ID: 20000234 Result: Down-regulated in Transcription
  misc_feature: MA Experiment 20000234 PARAMETER Experiment Name: At_Siliques_P Parameter: Age (day) Value: 21
  misc_feature: MA Experiment 20000234 PARAMETER Experiment Name: At_Siliques_P Parameter: Organism Value: A. thaliana
  misc_feature: MA Experiment 20000234 PARAMETER Experiment Name: At_Siliques_P Parameter: Plant Line Value: WS
  misc_feature: MA Experiment 20000234 PARAMETER Experiment Name: At_Siliques_P Parameter: Tissue Value: Less Than 5mm Siliques vs. Whole Plant
  misc_feature: MA Experiment ID: 20000235 Result: Down-regulated in Transcription
  misc_feature: MA Experiment 20000235 PARAMETER Experiment Name: At_Siliques_P Parameter: Age (day) Value: 21
  misc_feature: MA Experiment 20000235 PARAMETER Experiment Name: At_Siliques_P Parameter: Organism Value: A. thaliana
  misc_feature: MA Experiment 20000235 PARAMETER Experiment Name: At_Siliques_P Parameter: Plant Line Value: WS
  misc_feature: MA Experiment 20000235 PARAMETER Experiment Name: At_Siliques_P Parameter: Tissue Value: 5-10mm Siliques vs. Whole Plant
  misc_feature: MA Experiment ID: 20000265 Result: Down-regulated in Transcription
  misc_feature: MA Experiment 20000265 PARAMETER Experiment Name: At_Open_Flower_P Parameter: Age (day) Value: 21
  misc_feature: MA Experiment 20000265 PARAMETER Experiment Name: At_Open_Flower_P Parameter: Plant Line Value: WS
  misc_feature: MA Experiment 20000265 PARAMETER Experiment Name: At_Open_Flower_P Parameter: Tissue Value: Closed Flower vs. Whole Plant
  misc_feature: MA Experiment ID: 20000267 Result: Up-regulated in Transcription
  misc_feature: MA Experiment 20000267 PARAMETER Experiment Name: At_Drought_P Parameter: Age (day) Value: 7
  misc_feature: MA Experiment 20000267 PARAMETER Experiment Name: At_Drought_P Parameter: Organism Value: A. thaliana
  misc_feature: MA Experiment 20000267 PARAMETER Experiment Name: At_Drought_P Parameter: Plant Line Value: WS
  misc_feature: MA Experiment 20000267 PARAMETER Experiment Name: At_Drought_P Parameter: Timepoint (hr) Value: 6
  misc_feature: MA Experiment 20000267 PARAMETER Experiment Name: At_Drought_P Parameter: Tissue Value: Whole Plant
  misc_feature: MA Experiment 20000267 PARAMETER Experiment Name: At_Drought_P Parameter: Treatment Value: Drought vs. No Drought
  misc_feature: MA Experiment ID: 20000286 Result: Down-regulated in Transcription
  misc_feature: MA Experiment 20000286 PARAMETER Experiment Name: At_Open_Flower_P Parameter: Age (day) Value: 21
  misc_feature: MA Experiment 20000286 PARAMETER Experiment Name: At_Open_Flower_P Parameter: Plant Line Value: WS
  misc_feature: MA Experiment 20000286 PARAMETER Experiment Name: At_Open_Flower_P Parameter: Tissue Value: Half Open vs. Whole Plant
  misc_feature: MA Experiment ID: 20000436 Result: Up-regulated in Transcription
  misc_feature: MA Experiment 20000436 PARAMETER Experiment Name: At_Drought_P Parameter: Age (day) Value: 7
  misc_feature: MA Experiment 20000436 PARAMETER Experiment Name: At_Drought_P Parameter: Organism Value: A. thaliana
  misc_feature: MA Experiment 20000436 PARAMETER Experiment Name: At_Drought_P Parameter: Plant Line Value: WS
  misc_feature: MA Experiment 20000436 PARAMETER Experiment Name: At_Drought_P Parameter: Timepoint (hr) Value: 12
  misc_feature: MA Experiment 20000436 PARAMETER Experiment Name: At_Drought_P Parameter: Tissue Value: Whole Plant
  misc_feature: MA Experiment 20000436 PARAMETER Experiment Name: At_Drought_P Parameter: Treatment Value: Drought vs. No Drought
  misc_feature: MA Experiment ID: 20000437 Result: Up-regulated in Transcription
  misc_feature: MA Experiment 20000437 PARAMETER Experiment Name: At_Drought_P Parameter: Age (day) Value: 8
  misc_feature: MA Experiment 20000437 PARAMETER Experiment Name: At_Drought_P Parameter: Organism Value: A. thaliana
  misc_feature: MA Experiment 20000437 PARAMETER Experiment Name: At_Drought_P Parameter: Plant Line Value: WS
  misc_feature: MA Experiment 20000437 PARAMETER Experiment Name: At_Drought_P Parameter: Timepoint (hr) Value: 24
  misc_feature: MA Experiment 20000437 PARAMETER Experiment Name: At_Drought_P Parameter: Tissue Value: Whole Plant
  misc_feature: MA Experiment 20000437 PARAMETER Experiment Name: At_Drought_P Parameter: Treatment Value: Drought vs. No Drought
  misc_feature: MA Experiment ID: 20000438 Result: Down-regulated in Transcription
  misc_feature: MA Experiment 20000438 PARAMETER Experiment Name: At_Shoots__P Parameter: Age (day) Value: 14
  misc_feature: MA Experiment 20000438 PARAMETER Experiment Name: At_Shoots__P Parameter: Tissue Value: Shoots vs. Whole Plant
  misc_feature: MA Experiment ID: 20000439 Result: Down-regulated in Transcription
  misc_feature: MA Experiment 20000439 PARAMETER Experiment Name: At_Roots__P Parameter: Age (day) Value: 14 vs. 21
  misc_feature: MA Experiment 20000439 PARAMETER Experiment Name: At_Roots__P Parameter: Organism Value: A. thaliana
  misc_feature: MA Experiment 20000439 PARAMETER Experiment Name: At_Roots__P Parameter: Tissue Value: Roots vs. Whole Plant
  misc_feature: MA Experiment ID: 20001247 Result: Up-regulated in Transcription
  misc_feature: MA Experiment 20001247 PARAMETER Experiment Name: At_Far-red-induction_P Parameter: Age (day) Value: 7
  misc_feature: MA Experiment 20001247 PARAMETER Experiment Name: At_Far-red-induction_P Parameter: Light Value: Far-red vs. White
  misc_feature: MA Experiment 20001247 PARAMETER Experiment Name: At_Far-red-induction_P Parameter: Organism Value: A. thaliana
  misc_feature: MA Experiment 20001247 PARAMETER Experiment Name: At_Far-red-induction_P Parameter: Plant Line Value: Columbia
  misc_feature: MA Experiment 20001247 PARAMETER Experiment Name: At_Far-red-induction_P Parameter: Timepoint (hr) Value: 1
  misc_feature: MA Experiment 20001247 PARAMETER Experiment Name: At_Far-red-induction_P Parameter: Tissue Value: Whole Plant
  misc_feature: MA Experiment ID: 20001554 Result: Up-regulated in Transcription
  misc_feature: MA Experiment 20001554 PARAMETER Experiment Name: At_Drought_Soil_Dry_P Parameter: Age (day) Value: 21
  misc_feature: MA Experiment 20001554 PARAMETER Experiment Name: At_Drought_Soil_Dry_P Parameter: Organism Value: A. thaliana
  misc_feature: MA Experiment 20001554 PARAMETER Experiment Name: At_Drought_Soil_Dry_P Parameter: Plant Line Value: WS
  misc_feature: MA Experiment 20001554 PARAMETER Experiment Name: At_Drought_Soil_Dry_P Parameter: Post Timepoint (hr) Value: None
  misc_feature: MA Experiment 20001554 PARAMETER Experiment Name: At_Drought_Soil_Dry_P Parameter: Post-Treatment Value: None
  misc_feature: MA Experiment 20001554 PARAMETER Experiment Name: At_Drought_Soil_Dry_P Parameter: Timepoint (day) Value: 7
  misc_feature: MA Experiment 20001554 PARAMETER Experiment Name: At_Drought_Soil_Dry_P Parameter: Treatment Value: Drought vs. No Drought
  misc_feature: MA Experiment ID: 20001555 Result: Up-regulated in Transcription
  misc_feature: MA Experiment 20001555 PARAMETER Experiment Name: At_Drought_Soil_Dry_P Parameter: Age (day) Value: 24
  misc_feature: MA Experiment 20001555 PARAMETER Experiment Name: At_Drought_Soil_Dry_P Parameter: Organism Value: A. thaliana
  misc_feature: MA Experiment 20001555 PARAMETER Experiment Name: At_Drought_Soil_Dry_P Parameter: Plant Line Value: WS
  misc_feature: MA Experiment 20001555 PARAMETER Experiment Name: At_Drought_Soil_Dry_P Parameter: Post Timepoint (hr) Value: None
  misc_feature: MA Experiment 20001555 PARAMETER Experiment Name: At_Drought_Soil_Dry_P Parameter: Post-Treatment Value: None
  misc_feature: MA Experiment 20001555 PARAMETER Experiment Name: At_Drought_Soil_Dry_P Parameter: Timepoint (day) Value: 10
  misc_feature: MA Experiment 20001555 PARAMETER Experiment Name: At_Drought_Soil_Dry_P Parameter: Treatment Value: Drought vs. No Drought
  misc_feature: MA Experiment ID: 20001911 Result: Up-regulated in Transcription
  misc_feature: MA Experiment 20001911 PARAMETER Experiment Name: At_Drought_Reproduction_P Parameter: Age (day) Value: 40
  misc_feature: MA Experiment 20001911 PARAMETER Experiment Name: At_Drought_Reproduction_P Parameter: Organism Value: A. thaliana
  misc_feature: MA Experiment 20001911 PARAMETER Experiment Name: At_Drought_Reproduction_P Parameter: Plant Line Value: WS
  misc_feature: MA Experiment 20001911 PARAMETER Experiment Name: At_Drought_Reproduction_P Parameter: Timepoint (day) Value: 10
  misc_feature: MA Experiment 20001911 PARAMETER Experiment Name: At_Drought_Reproduction_P Parameter: Tissue Value: Flowers
  misc_feature: MA Experiment 20001911 PARAMETER Experiment Name: At_Drought_Reproduction_P Parameter: Treatment Value: Drought vs. No Drought
acaaaaaactttcccaagaataaaaaccagaagaatccgtataaattatcctaacagtttcttccaatatccaacaaatttcagatttttgtttttgttttcttcttctctacttgagtaatcatcaacgattatggcgtcaagtcagtggacgaggtcggaggataagatgtttgagcaagctttggttctttttcctgaaggatctcctaatcggtgggagagaatcgctgatcagcttcataaatctgctggtgaagttagggagcattacgaggtcttggttcatgatgttttcgagattgattctggtcgagttgatgtccctgattacatggatgactcggcggctgcggcggcgggttgggattccgctggtcagatctcttttgggtctaaacatggcgagagtgaacgcaaaagaggaactccttggacagagaacgaacacaaattgtttctgatcggattaaagagatatggtaagggagattggaggagtatctcgagaaacgttgtggtgacgaggacaccgacgcaagtcgcgagtcacgctcagaagtattttctgagacagaactcggtgaagaaggagaggaaaaggtcgagcatccatgatataactacggttgatgctactttggctatgcctgggtctaacatggactggactggccaacacgggagtcctgttcaggcgccgcagcagcaacagattatgtctgagttcggtcagcaattgaatcctggtcatttcgaggattttgggtttcggatgtgatgaagaaagggggagacaaattgggatggctttagtttaatagggttttactcattttatgtgaatagggaaagaaataggattgggtattttcttatacagatgatgatgatgatgatcaaagaataaaaataatgtatagggaagctttttgtaaacacaaatatgtttggtaaccattttggtattttg

SEQ ID NO: 27296 - protein, 215 aa, Arabidopsis thaliana
  peptide (1)..(215): Ceres Seq. ID no. 12395016
  misc_feature (98)..(145): Pfam Name: Myb-like DNA-binding domain Pfam Description: Myb-like DNA-binding domain
  misc_feature (1)..(215): Homolog of NCBI NO: 15238311 NR Description: I-box binding factor - like protein
MASSQWTRSEDKMFEQALVLFPEGSPNRWERIADQLHKSAGEVREHYEVLVHDVFEIDSGRVDVPDYMDDSAAAAAGWDSAGQISFGSKHGESERKRGTPWTENEHKLFLIGLKRYGKGDWRSISRNVVVTRTPTQVASHAQKYFLRQNSVKKERKRSSIHDITTVDATLAMPGSNMDWTGQHGSPVQAPQQQQIMSEFGQQLNPGHFEDFGFRM

SEQ ID NO: 27297 - protein, 203 aa, Arabidopsis thaliana
  peptide (1)..(203): Ceres Seq. ID no. 12395017
  misc_feature (86)..(133): Pfam Name: Myb-like DNA-binding domain Pfam Description: Myb-like DNA-binding domain
  misc_feature (1)..(203): Homolog of NCBI NO: 15238311 NR Description: I-box binding factor - like protein
MFEQALVLFPEGSPNRWERIADQLHKSAGEVREHYEVLVHDVFEIDSGRVDVPDYMDDSAAAAAGWDSAGQISFGSKHGESERKRGTPWTENEHKLFLIGLKRYGKGDWRSISRNVVVTRTPTQVASHAQKYFLRQNSVKKERKRSSIHDITTVDATLAMPGSNMDWTGQHGSPVQAPQQQQIMSEFGQQLNPGHFEDFGFRM

SEQ ID NO: 27298 - protein, 148 aa, Arabidopsis thaliana
  peptide (1)..(148): Ceres Seq. ID no. 12395018
  misc_feature (31)..(78): Pfam Name: Myb-like DNA-binding domain Pfam Description: Myb-like DNA-binding domain
  misc_feature (1)..(148): Homolog of NCBI NO: 15238311 NR Description: I-box binding factor - like protein
MDDSAAAAAGWDSAGQISFGSKHGESERKRGTPWTENEHKLFLIGLKRYGKGDWRSISRNVVVTRTPTQVASHAQKYFLRQNSVKKERKRSSIHDITTVDATLAMPGSNMDWTGQHGSPVQAPQQQQIMSEFGQQLNPGHFEDFGFRM

SEQ ID NO: 27299 - DNA, 1119 bp, Arabidopsis thaliana
  misc_feature (1)..(1119): Ceres Seq. ID no. 12482785
  misc_feature: MA Experiment ID: 108434 Result: Up-regulated in Transcription
  misc_feature: MA Experiment 108434 PARAMETER Experiment Name: At_Root_Tips_cDNA_P Parameter: Tissue Value: Root Tips
  misc_feature: MA Experiment ID: 108461 Result: Down-regulated in Transcription
  misc_feature: MA Experiment 108461 PARAMETER Experiment Name: At_Germinating_Seeds_cDNA_P Parameter: Age (day) Value: 1 vs. 0
  misc_feature: MA Experiment 108461 PARAMETER Experiment Name: At_Germinating_Seeds_cDNA_P Parameter: Tissue Value: Germinating Seeds
  misc_feature: MA Experiment ID: 108462 Result: Down-regulated in Transcription
  misc_feature: MA Experiment 108462 PARAMETER Experiment Name: At_Germinating_Seeds_cDNA_P Parameter: Age (day) Value: 2 vs. 0
  misc_feature: MA Experiment 108462 PARAMETER Experiment Name: At_Germinating_Seeds_cDNA_P Parameter: Tissue Value: Germinating Seeds
  misc_feature: MA Experiment ID: 108463 Result: Down-regulated in Transcription
  misc_feature: MA Experiment 108463 PARAMETER Experiment Name: At_Germinating_Seeds_cDNA_P Parameter: Age (day) Value: 3 vs. 0
  misc_feature: MA Experiment 108463 PARAMETER Experiment Name: At_Germinating_Seeds_cDNA_P Parameter: Tissue Value: Germinating Seeds
  misc_feature: MA Experiment ID: 20000090 Result: Up-regulated in Transcription
  misc_feature: MA Experiment ID: 20000111 Result: Up-regulated in Transcription
  misc_feature: MA Experiment 20000111 PARAMETER Experiment Name: At_42deg_Heat_cDNA_P Parameter: Temperature (deg C) Value: 42 vs. 22
  misc_feature: MA Experiment 20000111 PARAMETER Experiment Name: At_42deg_Heat_cDNA_P Parameter: Timepoint (hr) Value: 6
  misc_feature: MA Experiment 20000111 PARAMETER Experiment Name: At_42deg_Heat_cDNA_P Parameter: Tissue Value: Aerial
  misc_feature: MA Experiment ID: 20000113 Result: Up-regulated in Transcription
  misc_feature: MA Experiment 20000113 PARAMETER Experiment Name: At_42deg_Heat_cDNA_P Parameter: Temperature (deg C) Value: 42 vs. 22
  misc_feature: MA Experiment 20000113 PARAMETER Experiment Name: At_42deg_Heat_cDNA_P Parameter: Timepoint (hr) Value: 8
  misc_feature: MA Experiment 20000113 PARAMETER Experiment Name: At_42deg_Heat_cDNA_P Parameter: Tissue Value: Aerial
  misc_feature: MA Experiment ID: 20000173 Result: Up-regulated in Transcription
  misc_feature: MA Experiment 20000173 PARAMETER Experiment Name: At_42deg_Heat_P Parameter: Age (day) Value: 14
  misc_feature: MA Experiment 20000173 PARAMETER Experiment Name: At_42deg_Heat_P Parameter: Organism Value: A. thaliana
  misc_feature: MA Experiment 20000173 PARAMETER Experiment Name: At_42deg_Heat_P Parameter: Plant Line Value: WS
  misc_feature: MA Experiment 20000173 PARAMETER Experiment Name: At_42deg_Heat_P Parameter: Temperature (deg C) Value: 42 vs. 22
  misc_feature: MA Experiment 20000173 PARAMETER Experiment Name: At_42deg_Heat_P Parameter: Timepoint (hr) Value: 6
  misc_feature: MA Experiment 20000173 PARAMETER Experiment Name: At_42deg_Heat_P Parameter: Tissue Value: Aerial
  misc_feature: MA Experiment ID: 20001757 Result: Up-regulated in Transcription
  misc_feature: MA Experiment 20001757 PARAMETER Experiment Name: At_50mM_NH4NO3_L-to-H_P Parameter: Timepoint (hr) Value: 6
  misc_feature: MA Experiment 20001757 PARAMETER Experiment Name: At_50mM_NH4NO3_L-to-H_P Parameter: Tissue Value: Leaf
  misc_feature: MA Experiment 20001757 PARAMETER Experiment Name: At_50mM_NH4NO3_L-to-H_P Parameter: Treatment Value: 50mM NH4NO3 vs 100mM Mannitol
aaaatcctgatttctgagctttaaaccctaacccctctcttctctcttctccacgccatttccagaattttcaggtgttcgtgaaaagatgaattttaagaatgtcaaagttcccaaaggtcctggtggtggtgttatagctgcggtggttattggggggctcagtctttacggtgctacgcacactctctacaatgtcgatggaggtcatcgagccattgtctttaaccggcttgttggtatcaaagacaaggtctaccctgagggtactcaccttatgattccatggttcgaaaggccaatcatctatgacgttcgtgcaaagccttatctagttgagagcacatctgggagccgtgatctccagatggttaagattgggcttcgggttctcacccgtcctatggctgaccaattaccagaggtataccggtcccttggtgagaattaccgcgagagagtcttgccttctatcatccacgagaccttgaaagctgtggttgctcagtacaacgcaagccaacttattactcagagagagtcggtgagtagagaaatcaggaaaatcctaactctaagagccgcaaacttccacattgcactggatgatgtgtccatcacaggcttgacattcggaaaggagttcacggcagccatagaaggaaagcaggtcgctgctcaagaggccgaacgggctaagttcattgtcgagaaagctgaacaggacaagagaagtgctgttatccgcgccgagggagaagccaagagtgctcagctcattggtcaagcaatcgcaaacaaccaagcgttcttaacactgaggaagatcgaagcagctagagagatcgcacagaccatctctaggtcggcgaacaaggtttacttgagctctaacgatctgttgcttaacctacaggctatggaccttgatgtgaagccgaagaagtagagaatgatatgattaaaccacaccagagctcttcttccataatcgtattttcaattcacggattcttagaccaaaagctatgagttctatcttgtgaatttcagacactatcgtgcgtttgtagtctttcttttgtgagatcaagaagaaaagaaaagatttatgttttt

SEQ ID NO: 27300 - protein, 286 aa, Arabidopsis thaliana
  peptide (1)..(286): Ceres Seq. ID no. 12482786
  misc_feature (8)..(286): Homolog of NCBI NO: 7716462 NR Description: prohibitin [Zea mays]
  misc_feature (1)..(56): Homolog of NCBI NO: 34901014 NR Description: putative prohibitin [Oryza sativa (japonica
  misc_feature (55)..(286): Homolog of NCBI NO: 34901014 NR Description: putative prohibitin [Oryza sativa (japonica
  misc_feature (1)..(286): Homolog of NCBI NO: 7716456 NR Description: prohibitin [Zea mays]
  misc_feature (1)..(286): Homolog of NCBI NO: 34394832 NR Description: putative prohibitin [Oryza sativa (japonica
  misc_feature (1)..(286): Homolog of NCBI NO: 15219569 NR Description: putative prohibitin 2
  misc_feature (5)..(285): Homolog of NCBI NO: 21593626 NR Description: prohibitin-like protein [Arabidopsis thaliana]
  misc_feature (5)..(285): Homolog of NCBI NO: 15235317 NR Description: prohibitin-like protein
  misc_feature (1)..(286): Homolog of NCBI NO: 12751303 NR Description: prohibitin 1-like protein [Brassica napus]
  misc_feature (1)..(286): Homolog of NCBI NO: 15225374 NR Description: putative prohibitin
MNFKNVKVPKGPGGGVIAAVVIGGLSLYGATHTLYNVDGGHRAIVFNRLVGIKDKVYPEGTHLMIPWFERPIIYDVRAKPYLVESTSGSRDLQMVKIGLRVLTRPMADQLPEVYRSLGENYRERVLPSIIHETLKAVVAQYNASQLITQRESVSREIRKILTLRAANFHIALDDVSITGLTFGKEFTAAIEGKQVAAQEAERAKFIVEKAEQDKRSAVIRAEGEAKSAQLIGQAIANNQAFLTLRKIEAAREIAQTISRSANKVYLSSNDLLLNLQAMDLDVKPKK

SEQ ID NO: 27301 - protein, 223 aa, Arabidopsis thaliana
  peptide (1)..(223): Ceres Seq. ID no. 12482787
  misc_feature (1)..(213): Homolog of NCBI NO: 15241424 NR Description: prohibitin; protein id: At5g44140.1 [Arabidopsis
  misc_feature (1)..(223): Homolog of NCBI NO: 7716462 NR Description: prohibitin [Zea mays]
  misc_feature (1)..(223): Homolog of NCBI NO: 34901014 NR Description: putative prohibitin [Oryza sativa (japonica
  misc_feature (1)..(223): Homolog of NCBI NO: 7716456 NR Description: prohibitin [Zea mays]
  misc_feature (1)..(223): Homolog of NCBI NO: 34394832 NR Description: putative prohibitin [Oryza sativa (japonica
  misc_feature (1)..(223): Homolog of NCBI NO: 15219569 NR Description: putative prohibitin 2
  misc_feature (1)..(222): Homolog of NCBI NO: 21593626 NR Description: prohibitin-like protein [Arabidopsis thaliana]
  misc_feature (1)..(222): Homolog of NCBI NO: 15235317 NR Description: prohibitin-like protein
  misc_feature (1)..(223): Homolog of NCBI NO: 12751303 NR Description: prohibitin 1-like protein [Brassica napus]
  misc_feature (1)..(223): Homolog of NCBI NO: 15225374 NR Description: putative prohibitin
MIPWFERPIIYDVRAKPYLVESTSGSRDLQMVKIGLRVLTRPMADQLPEVYRSLGENYRERVLPSIIHETLKAVVAQYNASQLITQRESVSREIRKILTLRAANFHIALDDVSITGLTFGKEFTAAIEGKQVAAQEAERAKFIVEKAEQDKRSAVIRAEGEAKSAQLIGQAIANNQAFLTLRKIEAAREIAQTISRSANKVYLSSNDLLLNLQAMDLDVKPKK

SEQ ID NO: 27302 - protein, 193 aa, Arabidopsis thaliana
  peptide (1)..(193): Ceres Seq. ID no. 12482788
  misc_feature (1)..(193): Homolog of NCBI NO: 12751303 NR Description: prohibitin 1-like protein [Brassica napus]
  misc_feature (1)..(193): Homolog of NCBI NO: 15225374 NR Description: putative prohibitin
  misc_feature (1)..(183): Homolog of NCBI NO: 15241424 NR Description: prohibitin; protein id: At5g44140.1 [Arabidopsis
  misc_feature (1)..(193): Homolog of NCBI NO: 7716462 NR Description: prohibitin [Zea mays]
  misc_feature (1)..(193): Homolog of NCBI NO: 34901014 NR Description: putative prohibitin [Oryza sativa (japonica
  misc_feature (1)..(193): Homolog of NCBI NO: 7716456 NR Description: prohibitin [Zea mays]
  misc_feature (1)..(193): Homolog of NCBI NO: 34394832 NR Description: putative prohibitin [Oryza sativa (japonica
  misc_feature (1)..(193): Homolog of NCBI NO: 15219569 NR Description: putative prohibitin 2
  misc_feature (1)..(192): Homolog of NCBI NO: 21593626 NR Description: prohibitin-like protein [Arabidopsis thaliana]
  misc_feature (1)..(192): Homolog of NCBI NO: 15235317 NR Description: prohibitin-like protein
MVKIGLRVLTRPMADQLPEVYRSLGENYRERVLPSIIHETLKAVVAQYNASQLITQRESVSREIRKILTLRAANFHIALDDVSITGLTFGKEFTAAIEGKQVAAQEAERAKFIVEKAEQDKRSAVIRAEGEAKSAQLIGQAIANNQAFLTLRKIEAAREIAQTISRSANKVYLSSNDLLLNLQAMDLDVKPKK

SEQ ID NO: 27303 - DNA, 1206 bp, Arabidopsis thaliana
  misc_feature (1)..(1206): Ceres Seq. ID no. 12422623
  misc_feature: MA Experiment ID: 108473 Result: Down-regulated in Transcription
  misc_feature: MA Experiment 108473 PARAMETER Experiment Name: At_Drought_Flowers_cDNA_P Parameter: Timepoint (hr) Value: 7 d
  misc_feature: MA Experiment 108473 PARAMETER Experiment Name: At_Drought_Flowers_cDNA_P Parameter: Tissue Value: Flower
  misc_feature: MA Experiment 108473 PARAMETER Experiment Name: At_Drought_Flowers_cDNA_P Parameter: Treatment Value: Drought vs. No Drought
  misc_feature: MA Experiment ID: 108501 Result: Down-regulated in Transcription
  misc_feature: MA Experiment 108501 PARAMETER Experiment Name: At_ap2_floral_buds_cDNA_P Parameter: Plant Line Value: ap2 (Ler.)
  misc_feature: MA Experiment 108501 PARAMETER Experiment Name: At_ap2_floral_buds_cDNA_P Parameter: Tissue Value: Closed Flower
  misc_feature: MA Experiment ID: 20000184 Result: Down-regulated in Transcription
  misc_feature: MA Experiment 20000184 PARAMETER Experiment Name: At_Shoots__P Parameter: Age (day) Value: 7
  misc_feature: MA Experiment 20000184 PARAMETER Experiment Name: At_Shoots__P Parameter: Tissue Value: Shoots vs. Whole Plant
  misc_feature: MA Experiment ID: 20000265 Result: Up-regulated in Transcription
  misc_feature: MA Experiment 20000265 PARAMETER Experiment Name: At_Open_Flower_P Parameter: Age (day) Value: 21
  misc_feature: MA Experiment 20000265 PARAMETER Experiment Name: At_Open_Flower_P Parameter: Plant Line Value: WS
  misc_feature: MA Experiment 20000265 PARAMETER Experiment Name: At_Open_Flower_P Parameter: Tissue Value: Closed Flower vs. Whole Plant
  misc_feature: MA Experiment ID: 20000286 Result: Up-regulated in Transcription
  misc_feature: MA Experiment 20000286 PARAMETER Experiment Name: At_Open_Flower_P Parameter: Age (day) Value: 21
  misc_feature: MA Experiment 20000286 PARAMETER Experiment Name: At_Open_Flower_P Parameter: Plant Line Value: WS
  misc_feature: MA Experiment 20000286 PARAMETER Experiment Name: At_Open_Flower_P Parameter: Tissue Value: Half Open vs. Whole Plant
  misc_feature: MA Experiment ID: 20001771 Result: Up-regulated in Transcription
  misc_feature: MA Experiment 20001771 PARAMETER Experiment Name: At_Far-red-enriched-adult_P Parameter: Age (day) Value: 28
  misc_feature: MA Experiment 20001771 PARAMETER Experiment Name: At_Far-red-enriched-adult_P Parameter: Light Value: Far-red enriched vs. White
  misc_feature: MA Experiment 20001771 PARAMETER Experiment Name: At_Far-red-enriched-adult_P Parameter: Organism Value: A. thaliana
  misc_feature: MA Experiment 20001771 PARAMETER Experiment Name: At_Far-red-enriched-adult_P Parameter: Plant Line Value: Columbia
  misc_feature: MA Experiment 20001771 PARAMETER Experiment Name: At_Far-red-enriched-adult_P Parameter: Timepoint (hr) Value: 16
  misc_feature: MA Experiment 20001771 PARAMETER Experiment Name: At_Far-red-enriched-adult_P Parameter: Tissue Value: Aerial
attcagaaaaattttggacttattttcgatatgtttaggggaaaaatatttgtgttatcattattttctatttacgtcctctcatcagcggctgaaaaaaatacatcattttctgcgctttttgcttttggtgattcagtcttagatacgggaaacaataattttcttcttactcttctcaaaggaaattattggccatatggtttgagttttgactataaatttccgacgggaagattcggaaatggaagagttttcaccgatatagttgccgaaggtttacagatcaaaagacttgtaccagcttatagcaagattcgtcgcatcagttctgaagaccttaagactggcgtttgttttgcatcaggtggttcaggaattgacgatcttacatcccgaacactgagagttttatcggcaggtgaccaagtaaaagactttaaagactatttgaagaaactaagaagagtagtgaaacgtatgaaaaaagtaaaagaaatagtttcaaacgctgtgtttcttatttctgaaggaaataatgatcttggatactttgtcgctcccgctcttcttcgattacagtccacaacaacatacaccagtaaaatggttgtttggaccagaaagtttctaaaagatttatatgatcttggagcgagaaaatttgcggtgatgggagtgatgcctgtgggatgtttgcctatccatcgagcctcattcggtggggtattcggatggtgtaacttcctcttgaatagagttacggaggacttcaacatgaaattgcagaaaggtcttacaagttacgcagtagaatatgatttcaaagatgcaaagtttgtttacgtcgacatatacggtactcttatggatcttgtcaaaaatcctatggcctatgggtttacagaagcgaaaaaagcttgttgttgtatgccgaatgcaataataccatgcttccatccagataaatacgtcttctatgactttgctcacccttcccagaaagcctacgaagtaatatctaaacctattgtctatcagatagcgaaaggccttgcctagctaattccttatttcctacaatgttttattataatctttgaaaattatcaccatatcgataaatatatgtaaatgtataagattcatgacaatctattcgtttttcttattgtaaacaatgtataattcaaattacaggctttc

SEQ ID NO: 27304 - protein, 353 aa, Arabidopsis thaliana
  peptide (1)..(353): Ceres Seq. ID no. 12422624
  misc_feature (40)..(343): Pfam Name: GDSL-like Lipase/Acylhydrolase Pfam Description: GDSL-like Lipase/Acylhydrolase
  misc_feature (210)..(353): Homolog of NCBI NO: 8778580 NR Description: F28C11.13 [Arabidopsis thaliana]
  misc_feature (4)..(215): Homolog of NCBI NO: 8778580 NR Description: F28C11.13 [Arabidopsis thaliana]
  misc_feature (4)..(353): Homolog of NCBI NO: 15220775 NR Description: hypothetical protein; protein id: At1g23500.1
  misc_feature (34)..(353): Homolog of NCBI NO: 25404994 NR Description: protein T4O12.13 [imported] - Arabidopsis
  misc_feature (18)..(353): Homolog of NCBI NO: 15054388 NR Description: family II lipase EXL4 [Arabidopsis thaliana]
  misc_feature (18)..(353): Homolog of NCBI NO: 15222902 NR Description: family II extracellular lipase 4 (EXL4)
  misc_feature (16)..(353): Homolog of NCBI NO: 18410967 NR Description: family II extracellular lipase 5 (EXL5)
  misc_feature (11)..(353): Homolog of NCBI NO: 8778809 NR Description: T4O12.14 [Arabidopsis thaliana]
  misc_feature (11)..(353): Homolog of NCBI NO: 25404995 NR Description: protein T4O12.15 [imported] - Arabidopsis
  misc_feature (11)..(353): Homolog of NCBI NO: 15222904 NR Description: family II extracellular lipase 6 (EXL6)
IQKNFGLIFDMFRGKIFVLSLFSIYVLSSAAEKNTSFSALFAFGDSVLDTGNNNFLLTLLKGNYWPYGLSFDYKFPTGRFGNGRVFTDIVAEGLQIKRLVPAYSKIRRISSEDLKTGVCFASGGSGIDDLTSRTLRVLSAGDQVKDFKDYLKKLRRVVKRMKKVKEIVSNAVFLISEGNNDLGYFVAPALLRLQSTTTYTSKMVVWTRKFLKDLYDLGARKFAVMGVMPVGCLPIHRASFGGVFGWCNFLLNRVTEDFNMKLQKGLTSYAVEYDFKDAKFVYVDIYGTLMDLVKNPMAYGFTEAKKACCCMPNAIIPCFHPDKYVFYDFAHPSQKAYEVISKPIVYQIAKGLA

SEQ ID NO: 27305 - protein, 343 aa, Arabidopsis thaliana
  peptide (1)..(343): Ceres Seq. ID no. 12422625
  misc_feature (30)..(333): Pfam Name: GDSL-like Lipase/Acylhydrolase Pfam Description: GDSL-like Lipase/Acylhydrolase
  misc_feature (200)..(343): Homolog of NCBI NO: 8778580 NR Description: F28C11.13 [Arabidopsis thaliana]
  misc_feature (1)..(205): Homolog of NCBI NO: 8778580 NR Description: F28C11.13 [Arabidopsis thaliana]
  misc_feature (1)..(343): Homolog of NCBI NO: 15220775 NR Description: hypothetical protein; protein id: At1g23500.1
  misc_feature (24)..(343): Homolog of NCBI NO: 25404994 NR Description: protein T4O12.13 [imported] - Arabidopsis
  misc_feature (8)..(343): Homolog of NCBI NO: 15054388 NR Description: family II lipase EXL4 [Arabidopsis thaliana]
  misc_feature (8)..(343): Homolog of NCBI NO: 15222902 NR Description: family II extracellular lipase 4 (EXL4)
  misc_feature (6)..(343): Homolog of NCBI NO: 18410967 NR Description: family II extracellular lipase 5 (EXL5)
  misc_feature (1)..(343): Homolog of NCBI NO: 8778809 NR Description: T4O12.14 [Arabidopsis thaliana]
  misc_feature (1)..(343): Homolog of NCBI NO: 25404995 NR Description: protein T4O12.15 [imported] - Arabidopsis
  misc_feature (1)..(343): Homolog of NCBI NO: 15222904 NR Description: family II extracellular lipase 6 (EXL6)
MFRGKIFVLSLFSIYVLSSAAEKNTSFSALFAFGDSVLDTGNNNFLLTLLKGNYWPYGLSFDYKFPTGRFGNGRVFTDIVAEGLQIKRLVPAYSKIRRISSEDLKTGVCFASGGSGIDDLTSRTLRVLSAGDQVKDFKDYLKKLRRVVKRMKKVKEIVSNAVFLISEGNNDLGYFVAPALLRLQSTTTYTSKMVVWTRKFLKDLYDLGARKFAVMGVMPVGCLPIHRASFGGVFGWCNFLLNRVTEDFNMKLQKGLTSYAVEYDFKDAKFVYVDIYGTLMDLVKNPMAYGFTEAKKACCCMPNAIIPCFHPDKYVFYDFAHPSQKAYEVISKPIVYQIAKGLA

SEQ ID NO: 27306 - protein, 193 aa, Arabidopsis thaliana
  peptide (1)..(193): Ceres Seq. ID no. 12422626
  misc_feature (1)..(183): Pfam Name: GDSL-like Lipase/Acylhydrolase Pfam Description: GDSL-like Lipase/Acylhydrolase
  misc_feature (50)..(193): Homolog of NCBI NO: 8778580 NR Description: F28C11.13 [Arabidopsis thaliana]
  misc_feature (1)..(55): Homolog of NCBI NO: 8778580 NR Description: F28C11.13 [Arabidopsis thaliana]
  misc_feature (1)..(193): Homolog of NCBI NO: 15220775 NR Description: hypothetical protein; protein id: At1g23500.1
  misc_feature (1)..(193): Homolog of NCBI NO: 25404994 NR Description: protein T4O12.13 [imported] - Arabidopsis
  misc_feature (1)..(193): Homolog of NCBI NO: 15054388 NR Description: family II lipase EXL4 [Arabidopsis thaliana]
  misc_feature (1)..(193): Homolog of NCBI NO: 15222902 NR Description: family II extracellular lipase 4 (EXL4)
  misc_feature (1)..(193): Homolog of NCBI NO: 18410967 NR Description: family II extracellular lipase 5 (EXL5)
  misc_feature (1)..(193): Homolog of NCBI NO: 8778809 NR Description: T4O12.14 [Arabidopsis thaliana]
  misc_feature (1)..(193): Homolog of NCBI NO: 25404995 NR Description: protein T4O12.15 [imported] - Arabidopsis
  misc_feature (1)..(193): Homolog of NCBI NO: 15222904 NR Description: family II extracellular lipase 6 (EXL6)
MKKVKEIVSNAVFLISEGNNDLGYFVAPALLRLQSTTTYTSKMVVWTRKFLKDLYDLGARKFAVMGVMPVGCLPIHRASFGGVFGWCNFLLNRVTEDFNMKLQKGLTSYAVEYDFKDAKFVYVDIYGTLMDLVKNPMAYGFTEAKKACCCMPNAIIPCFHPDKYVFYDFAHPSQKAYEVISKPIVYQIAKGLA

SEQ ID NO: 27307 - DNA, 749 bp, Arabidopsis thaliana
  misc_feature (1)..(749): Ceres Seq. ID no. 13487384
  misc_feature: MA Experiment ID: 108434 Result: Down-regulated in Transcription
  misc_feature: MA Experiment 108434 PARAMETER Experiment Name: At_Root_Tips_cDNA_P Parameter: Tissue Value: Root Tips
  misc_feature: MA Experiment ID: 108572 Result: Up-regulated in Transcription
  misc_feature: MA Experiment 108572 PARAMETER Experiment Name: At_Drought_cDNA_P Parameter: Timepoint (hr) Value: 1
  misc_feature: MA Experiment 108572 PARAMETER Experiment Name: At_Drought_cDNA_P Parameter: Tissue Value: Aerial
  misc_feature: MA Experiment 108572 PARAMETER Experiment Name: At_Drought_cDNA_P Parameter: Treatment Value: Drought vs. No Drought
  misc_feature: MA Experiment ID: 108573 Result: Up-regulated in Transcription
  misc_feature: MA Experiment 108573 PARAMETER Experiment Name: At_Drought_cDNA_P Parameter: Timepoint (hr) Value: 6
  misc_feature: MA Experiment 108573 PARAMETER Experiment Name: At_Drought_cDNA_P Parameter: Tissue Value: Aerial
  misc_feature: MA Experiment 108573 PARAMETER Experiment Name: At_Drought_cDNA_P Parameter: Treatment Value: Drought vs. No Drought
  misc_feature: MA Experiment ID: 108605 Result: Up-regulated in Transcription
  misc_feature: MA Experiment 108605 PARAMETER Experiment Name: At_100uM_ABA_cDNA_P Parameter: Timepoint (hr) Value: 6
  misc_feature: MA Experiment 108605 PARAMETER Experiment Name: At_100uM_ABA_cDNA_P Parameter: Tissue Value: Aerial
  misc_feature: MA Experiment 108605 PARAMETER Experiment Name: At_100uM_ABA_cDNA_P Parameter: Treatment Value: 100uM ABA vs. No Treatment
  misc_feature: MA Experiment ID: 108668 Result: Up-regulated in Transcription
  misc_feature: MA Experiment 108668 PARAMETER Experiment Name: At_2mM_SA_cDNA_P Parameter: Plant Line Value: WS
  misc_feature: MA Experiment 108668 PARAMETER Experiment Name: At_2mM_SA_cDNA_P Parameter: Timepoint (hr) Value: 6
  misc_feature: MA Experiment 108668 PARAMETER Experiment Name: At_2mM_SA_cDNA_P Parameter: Treatment Value: 2mM SA vs. No Treatment
  misc_feature: MA Experiment ID: 20000069 Result: Up-regulated in Transcription
  misc_feature: MA Experiment 20000069 PARAMETER Experiment Name: At_100uM_ABA_Mutants_cDNA_P Parameter: Plant Line Value: CS23
  misc_feature: MA Experiment 20000069 PARAMETER Experiment Name: At_100uM_ABA_Mutants_cDNA_P Parameter: Timepoint (hr) Value: 6
  misc_feature: MA Experiment 20000069 PARAMETER Experiment Name: At_100uM_ABA_Mutants_cDNA_P Parameter: Tissue Value: Aerial
  misc_feature: MA Experiment 20000069 PARAMETER Experiment Name: At_100uM_ABA_Mutants_cDNA_P Parameter: Treatment Value: 100uM ABA vs. No Treatment
  misc_feature: MA Experiment ID: 20000070 Result: Up-regulated in Transcription
  misc_feature: MA Experiment 20000070 PARAMETER Experiment Name: At_100uM_ABA_Mutants_cDNA_P Parameter: Plant Line Value: CS24
  misc_feature: MA Experiment 20000070 PARAMETER Experiment Name: At_100uM_ABA_Mutants_cDNA_P Parameter: Timepoint (hr) Value: 6
  misc_feature: MA Experiment 20000070 PARAMETER Experiment Name: At_100uM_ABA_Mutants_cDNA_P Parameter: Tissue Value: Aerial
  misc_feature: MA Experiment 20000070 PARAMETER Experiment Name: At_100uM_ABA_Mutants_cDNA_P Parameter: Treatment Value: 100uM ABA vs. No Treatment
  misc_feature: MA Experiment ID: 20000072 Result: Up-regulated in Transcription
  misc_feature: MA Experiment 20000072 PARAMETER Experiment Name: At_100uM_ABA_Mutants_cDNA_P Parameter: Plant Line Value: CS8105
  misc_feature: MA Experiment 20000072 PARAMETER Experiment Name: At_100uM_ABA_Mutants_cDNA_P Parameter: Timepoint (hr) Value: 6
  misc_feature: MA Experiment 20000072 PARAMETER Experiment Name: At_100uM_ABA_Mutants_cDNA_P Parameter: Tissue Value: Aerial
  misc_feature: MA Experiment 20000072 PARAMETER Experiment Name: At_100uM_ABA_Mutants_cDNA_P Parameter: Treatment Value: 100uM ABA vs. No Treatment
  misc_feature: MA Experiment ID: 20000087 Result: Up-regulated in Transcription
  misc_feature: MA Experiment 20000087 PARAMETER Experiment Name: At_100uM_ABA_Mutants_cDNA_P Parameter: Plant Line Value: WS
  misc_feature: MA Experiment 20000087 PARAMETER Experiment Name: At_100uM_ABA_Mutants_cDNA_P Parameter: Timepoint (hr) Value: 6
  misc_feature: MA Experiment 20000087 PARAMETER Experiment Name: At_100uM_ABA_Mutants_cDNA_P Parameter: Tissue Value: Aerial
  misc_feature: MA Experiment 20000087 PARAMETER Experiment Name: At_100uM_ABA_Mutants_cDNA_P Parameter: Treatment Value: 100uM ABA vs. No Treatment
  misc_feature: MA Experiment ID: 20000111 Result: Down-regulated in Transcription
  misc_feature: MA Experiment 20000111 PARAMETER Experiment Name: At_42deg_Heat_cDNA_P Parameter: Temperature (deg C) Value: 42 vs. 22
  misc_feature: MA Experiment 20000111 PARAMETER Experiment Name: At_42deg_Heat_cDNA_P Parameter: Timepoint (hr) Value: 6
  misc_feature: MA Experiment 20000111 PARAMETER Experiment Name: At_42deg_Heat_cDNA_P Parameter: Tissue Value: Aerial
  misc_feature: MA Experiment ID: 20000113 Result: Down-regulated in Transcription
  misc_feature: MA Experiment 20000113 PARAMETER Experiment Name: At_42deg_Heat_cDNA_P Parameter: Temperature (deg C) Value: 42 vs. 22
  misc_feature: MA Experiment 20000113 PARAMETER Experiment Name: At_42deg_Heat_cDNA_P Parameter: Timepoint (hr) Value: 8
  misc_feature: MA Experiment 20000113 PARAMETER Experiment Name: At_42deg_Heat_cDNA_P Parameter: Tissue Value: Aerial
  misc_feature: MA Experiment ID: 20000173 Result: Down-regulated in Transcription
  misc_feature: MA Experiment 20000173 PARAMETER Experiment Name: At_42deg_Heat_P Parameter: Age (day) Value: 14
  misc_feature: MA Experiment 20000173 PARAMETER Experiment Name: At_42deg_Heat_P Parameter: Organism Value: A. thaliana
  misc_feature: MA Experiment 20000173 PARAMETER Experiment Name: At_42deg_Heat_P Parameter: Plant Line Value: WS
  misc_feature: MA Experiment 20000173 PARAMETER Experiment Name: At_42deg_Heat_P Parameter: Temperature (deg C) Value: 42 vs. 22
  misc_feature: MA Experiment 20000173 PARAMETER Experiment Name: At_42deg_Heat_P Parameter: Timepoint (hr) Value: 6
  misc_feature: MA Experiment 20000173 PARAMETER Experiment Name: At_42deg_Heat_P Parameter: Tissue Value: Aerial
  misc_feature: MA Experiment ID: 20000182 Result: Up-regulated in Transcription
  misc_feature: MA Experiment 20000182 PARAMETER Experiment Name: At_2mM_SA_P Parameter: Age (day) Value: 14
  misc_feature: MA Experiment 20000182 PARAMETER Experiment Name: At_2mM_SA_P Parameter: Organism Value: A. thaliana
  misc_feature: MA Experiment 20000182 PARAMETER Experiment Name: At_2mM_SA_P Parameter: Plant Line Value: WS
  misc_feature: MA Experiment 20000182 PARAMETER Experiment Name: At_2mM_SA_P Parameter: Timepoint (hr) Value: 6
  misc_feature: MA Experiment 20000182 PARAMETER Experiment Name: At_2mM_SA_P Parameter: Tissue Value: Aerial
  misc_feature: MA Experiment 20000182 PARAMETER Experiment Name: At_2mM_SA_P Parameter: Treatment Value: 2mM SA vs. No Treatment
  misc_feature: MA Experiment ID: 20000184 Result: Down-regulated in Transcription
  misc_feature: MA Experiment 20000184 PARAMETER Experiment Name: At_Shoots__P Parameter: Age (day) Value: 7
  misc_feature: MA Experiment 20000184 PARAMETER Experiment Name: At_Shoots__P Parameter: Tissue Value: Shoots vs. Whole Plant
  misc_feature: MA Experiment ID: 20000437 Result: Up-regulated in Transcription
  misc_feature: MA Experiment 20000437 PARAMETER Experiment Name: At_Drought_P Parameter: Age (day) Value: 8
  misc_feature: MA Experiment 20000437 PARAMETER Experiment Name: At_Drought_P Parameter: Organism Value: A. thaliana
  misc_feature: MA Experiment 20000437 PARAMETER Experiment Name: At_Drought_P Parameter: Plant Line Value: WS
  misc_feature: MA Experiment 20000437 PARAMETER Experiment Name: At_Drought_P Parameter: Timepoint (hr) Value: 24
  misc_feature: MA Experiment 20000437 PARAMETER Experiment Name: At_Drought_P Parameter: Tissue Value: Whole Plant
  misc_feature: MA Experiment 20000437 PARAMETER Experiment Name: At_Drought_P Parameter: Treatment Value: Drought vs. No Drought
  misc_feature: MA Experiment ID: 20001905 Result: Up-regulated in Transcription
  misc_feature: MA Experiment 20001905 PARAMETER Experiment Name: At_Drought_Reproduction_P Parameter: Age (day) Value: 40
  misc_feature: MA Experiment 20001905 PARAMETER Experiment Name: At_Drought_Reproduction_P Parameter: Organism Value: A. thaliana
  misc_feature: MA Experiment 20001905 PARAMETER Experiment Name: At_Drought_Reproduction_P Parameter: Plant Line Value: WS
  misc_feature: MA Experiment 20001905 PARAMETER Experiment Name: At_Drought_Reproduction_P Parameter: Timepoint (day) Value: 10
  misc_feature: MA Experiment 20001905 PARAMETER Experiment Name: At_Drought_Reproduction_P Parameter: Tissue Value: Rosettes
  misc_feature: MA Experiment 20001905 PARAMETER Experiment Name: At_Drought_Reproduction_P Parameter: Treatment Value: Drought vs. No Drought
aaaaagaggagacgacacgatttttgtctgaattatcagattcagatttcgtttaatcgccagattcatttcgaaaaatcttgcactagattctcttatcttcgggaaattgaagatctgggtcataagcaatagcttaaagcatggacgaaaattctaaatttgtatctggaaacggtagaaccgagctggttaaattcattgctgataggcatgccaaactcatgaaacaagcctctcgacattattccgcaattaaagatgctatggctcgtgggaaaaaaagatatacacttgtaaaagatgtagacgacatggaaacaggagcatatgacaaacctcttccatgctttggttgtggaatcggatggttttccttcctcctaggatttatgttcccatttttgtggtactatgctgcattcctttatttcgggaactattatcgtaaagatcctagagaaagagccggtcttgctgcttccgcaatcactgcgatgggcttctctcttgtcttactcgtgatttttgctttccggtggttttactatccttgagataaagaagtaactatgttaactatcattcatacctataagctccgtgttcatcaaggaatagtctcggaacttgatgtctcatgtacattcacataaaccaaatgaatttcacttcgatatttttctcaagttgtatattttttttgttgaatgaaagtttttcagtcccttactaaggtggaccaaact

SEQ ID NO: 27308 - protein, 137 aa, Arabidopsis thaliana
  peptide (1)..(137): Ceres Seq. ID no. 13487385
  misc_feature (10)..(133): Homolog of NCBI NO: 15236106 NR Description: expressed protein [Arabidopsis thaliana]
  misc_feature (10)..(133): Homolog of NCBI NO: 21553625 NR Description: unknown [Arabidopsis thaliana]
  misc_feature (1)..(137): Homolog of NCBI NO: 21593960 NR Description: unknown [Arabidopsis thaliana]
  misc_feature (4)..(137): Homolog of NCBI NO: 8777446 NR Description: gene_id:MHM17.20~pir||T04261~similar to unknown
  misc_feature (1)..(137): Homolog of NCBI NO: 18423932 NR Description: expressed protein [Arabidopsis thaliana]
MDENSKFVSGNGRTELVKFIADRHAKLMKQASRHYSAIKDAMARGKKRYTLVKDVDDMETGAYDKPLPCFGCGIGWFSFLLGFMFPFLWYYAAFLYFGNYYRKDPRERAGLAASAITAMGFSLVLLVIFAFRWFYYP

SEQ ID NO: 27309 - protein, 110 aa, Arabidopsis thaliana
  peptide (1)..(110): Ceres Seq. ID no. 13487386
  misc_feature (1)..(106): Homolog of NCBI NO: 15236106 NR Description: expressed protein [Arabidopsis thaliana]
  misc_feature (1)..(106): Homolog of NCBI NO: 21553625 NR Description: unknown [Arabidopsis thaliana]
  misc_feature (1)..(110): Homolog of NCBI NO: 21593960 NR Description: unknown [Arabidopsis thaliana]
  misc_feature (1)..(110): Homolog of NCBI NO: 8777446 NR Description: gene_id:MHM17.20~pir||T04261~similar to unknown
  misc_feature (1)..(110): Homolog of NCBI NO: 18423932 NR Description: expressed protein [Arabidopsis thaliana]
MKQASRHYSAIKDAMARGKKRYTLVKDVDDMETGAYDKPLPCFGCGIGWFSFLLGFMFPFLWYYAAFLYFGNYYRKDPRERAGLAASAITAMGFSLVLLVIFAFRWFYYP

SEQ ID NO: 27310 - protein, 96 aa, Arabidopsis thaliana
  peptide (1)..(96): Ceres Seq. ID no. 13487387
  misc_feature (1)..(92): Homolog of NCBI NO: 15236106 NR Description: expressed protein [Arabidopsis thaliana]
  misc_feature (1)..(92): Homolog of NCBI NO: 21553625 NR Description: unknown [Arabidopsis thaliana]
  misc_feature (1)..(96): Homolog of NCBI NO: 21593960 NR Description: unknown [Arabidopsis thaliana]
  misc_feature (1)..(96): Homolog of NCBI NO: 8777446 NR Description: gene_id:MHM17.20~pir||T04261~similar to unknown
  misc_feature (1)..(96): Homolog of NCBI NO: 18423932 NR Description: expressed protein [Arabidopsis thaliana]
MARGKKRYTLVKDVDDMETGAYDKPLPCFGCGIGWFSFLLGFMFPFLWYYAAFLYFGNYYRKDPRERAGLAASAITAMGFSLVLLVIFAFRWFYYP

SEQ ID NO: 27311 - DNA, 1255 bp, Arabidopsis thaliana
  misc_feature (1)..(1255): Ceres Seq. ID no. 12334051
  misc_feature: MA Experiment ID: 20000171 Result: Up-regulated in Transcription
  misc_feature: MA Experiment 20000171 PARAMETER Experiment Name: At_42deg_Heat_P Parameter: Age (day) Value: 14
  misc_feature: MA Experiment 20000171 PARAMETER Experiment Name: At_42deg_Heat_P Parameter: Organism Value: A. thaliana
  misc_feature: MA Experiment 20000171 PARAMETER Experiment Name: At_42deg_Heat_P Parameter: Plant Line Value: WS
  misc_feature: MA Experiment 20000171 PARAMETER Experiment Name: At_42deg_Heat_P Parameter: Temperature (deg C) Value: 42 vs. 22
  misc_feature: MA Experiment 20000171 PARAMETER Experiment Name: At_42deg_Heat_P Parameter: Timepoint (hr) Value: 1
  misc_feature: MA Experiment 20000171 PARAMETER Experiment Name: At_42deg_Heat_P Parameter: Tissue Value: Aerial
  misc_feature: MA Experiment ID: 20000173 Result: Up-regulated in Transcription
  misc_feature: MA Experiment 20000173 PARAMETER Experiment Name: At_42deg_Heat_P Parameter: Age (day) Value: 14
  misc_feature: MA Experiment 20000173 PARAMETER Experiment Name: At_42deg_Heat_P Parameter: Organism Value: A. thaliana
  misc_feature: MA Experiment 20000173 PARAMETER Experiment Name: At_42deg_Heat_P Parameter: Plant Line Value: WS
  misc_feature: MA Experiment 20000173 PARAMETER Experiment Name: At_42deg_Heat_P Parameter: Temperature (deg C) Value: 42 vs. 22
  misc_feature: MA Experiment 20000173 PARAMETER Experiment Name: At_42deg_Heat_P Parameter: Timepoint (hr) Value: 6
  misc_feature: MA Experiment 20000173 PARAMETER Experiment Name: At_42deg_Heat_P Parameter: Tissue Value: Aerial
gccaatgcatatctgaccgatttctcatttctaaaaccctaagcttcgccggcagctccgatcgtgatctttcataaatcctaccatcgccgtcgattaagagctgagctcaggaaatgagtttcaacaaagttcccaacattcctggagctcctgctctctctgcccttcttaaggtcagcgttattggtgggctcggtgtctatgcccttactaatagtctctacaatgtcgatggaggacaccgtgctgtcatgttcaaccgattaactggtatcaaggaaaaggtgtacccagaaggcacacattttatggtgccatggtttgaaaggccaatcatctatgacgttcgtgcacgaccttaccttgtagagagcaccactggtagtcatgatcttcagatggtgaaaattggattaagggttctcacacgtcccatgggtgaccgtttgcctcagatttaccgaacccttggcgagaactacagcgaaagggttcttccttccatcatccatgaaaccctaaaagcagtggtagctcagtacaatgcaagccagctcattacccagagagaagctgtgagcagagagatacgcaagattctgacagagcgggcttctaactttgacattgctcttgatgatgtctccatcacgactctgacattcggcaaagagttcaccgcagctatcgaggcaaaacaagttgctgctcaggaagctgaacgggctaagttcattgtggagaaagccgaacaagacaggagaagtgcggttatccgtgcgcagggagaagctaaaagtgctcagcttatcggacaagcaattgcgaacaatcaggcattcatcactctgagaaagattgaagctgcgagagagattgcacagaccattgcacaatctgctaacaaggtttacctgagctccaacgatctgttgcttaaccttcaagaaatgaacttggagcctaagaagtaaaagagaaggaacgagtaagtttcttcatttcatattcatttcatttaaaagatctctccgccttggaagtaaaggatgggttggtgtttgaccaaatgaccctttctcgtgactgattctgaaaatagtctttaagaggacatattgagagagacgcagattggctttggtcagtattattcatcattttcaatgaaactttttgttgatattttcctgtgtttccccggacaattgatgaagttgaatttaaaactcaataatattcatatgatctg

SEQ ID NO: 27312 - protein, 286 aa, Arabidopsis thaliana
  peptide (1)..(286): Ceres Seq. ID no. 12334052
  misc_feature (1)..(286): Homolog of NCBI NO: 39597046 NR Description: Hypothetical protein CBG02605 [Caenorhabditis
  misc_feature (9)..(286): Homolog of NCBI NO: 7716462 NR Description: prohibitin [Zea mays]
  misc_feature (5)..(286): Homolog of NCBI NO: 34394832 NR Description: putative prohibitin [Oryza sativa (japonica
  misc_feature (4)..(286): Homolog of NCBI NO: 7716456 NR Description: prohibitin [Zea mays]
  misc_feature (1)..(278): Homolog of NCBI NO: 15241424 NR Description: prohibitin; protein id: At5g44140.1 [Arabidopsis
  misc_feature (1)..(286): Homolog of NCBI NO: 15225374 NR Description: putative prohibitin
  misc_feature (5)..(283): Homolog of NCBI NO: 21593626 NR Description: prohibitin-like protein [Arabidopsis thaliana]
  misc_feature (5)..(283): Homolog of NCBI NO: 15235317 NR Description: prohibitin-like protein
  misc_feature (1)..(286): Homolog of NCBI NO: 12751303 NR Description: prohibitin 1-like protein [Brassica napus]
  misc_feature (1)..(286): Homolog of NCBI NO: 15219569 NR Description: putative prohibitin 2
MSFNKVPNIPGAPALSALLKVSVIGGLGVYALTNSLYNVDGGHRAVMFNRLTGIKEKVYPEGTHFMVPWFERPIIYDVRARPYLVESTTGSHDLQMVKIGLRVLTRPMGDRLPQIYRTLGENYSERVLPSIIHETLKAVVAQYNASQLITQREAVSREIRKILTERASNFDIALDDVSITTLTFGKEFTAAIEAKQVAAQEAERAKFIVEKAEQDRRSAVIRAQGEAKSAQLIGQAIANNQAFITLRKIEAAREIAQTIAQSANKVYLSSNDLLLNLQEMNLEPKK

SEQ ID NO: 27313 - protein, 240 aa, Arabidopsis thaliana
  peptide (1)..(240): Ceres Seq. ID no. 12334053
  misc_feature (1)..(240): Homolog of NCBI NO: 39597046 NR Description: Hypothetical protein CBG02605 [Caenorhabditis
  misc_feature (1)..(240): Homolog of NCBI NO: 7716462 NR Description: prohibitin [Zea mays]
  misc_feature (1)..(240): Homolog of NCBI NO: 34394832 NR Description: putative prohibitin [Oryza sativa (japonica
  misc_feature (1)..(240): Homolog of NCBI NO: 7716456 NR Description: prohibitin [Zea mays]
  misc_feature (1)..(232): Homolog of NCBI NO: 15241424 NR Description: prohibitin; protein id: At5g44140.1 [Arabidopsis
  misc_feature (1)..(240): Homolog of NCBI NO: 15225374 NR Description: putative prohibitin
  misc_feature (1)..(237): Homolog of NCBI NO: 21593626 NR Description: prohibitin-like protein [Arabidopsis thaliana]
  misc_feature (1)..(237): Homolog of NCBI NO: 15235317 NR Description: prohibitin-like protein
  misc_feature (1)..(240): Homolog of NCBI NO: 12751303 NR Description: prohibitin 1-like protein [Brassica napus]
  misc_feature (1)..(240): Homolog of NCBI NO: 15219569 NR Description: putative prohibitin 2
MFNRLTGIKEKVYPEGTHFMVPWFERPIIYDVRARPYLVESTTGSHDLQMVKIGLRVLTRPMGDRLPQIYRTLGENYSERVLPSIIHETLKAVVAQYNASQLITQREAVSREIRKILTERASNFDIALDDVSITTLTFGKEFTAAIEAKQVAAQEAERAKFIVEKAEQDRRSAVIRAQGEAKSAQLIGQAIANNQAFITLRKIEAAREIAQTIAQSANKVYLSSNDLLLNLQEMNLEPKK

SEQ ID NO: 27314 - protein, 221 aa, Arabidopsis thaliana
  peptide (1)..(221): Ceres Seq. ID no. 12334054
  misc_feature (1)..(221): Homolog of NCBI NO: 39597046 NR Description: Hypothetical protein CBG02605 [Caenorhabditis
  misc_feature (1)..(221): Homolog of NCBI NO: 7716462 NR Description: prohibitin [Zea mays]
  misc_feature (1)..(221): Homolog of NCBI NO: 34394832 NR Description: putative prohibitin [Oryza sativa (japonica
  misc_feature (1)..(221): Homolog of NCBI NO: 7716456 NR Description: prohibitin [Zea mays]
  misc_feature (1)..(213): Homolog of NCBI NO: 15241424 NR Description: prohibitin; protein id: At5g44140.1 [Arabidopsis
  misc_feature (1)..(221): Homolog of NCBI NO: 15225374 NR Description: putative prohibitin
  misc_feature (1)..(218): Homolog of NCBI NO: 21593626 NR Description: prohibitin-like protein [Arabidopsis thaliana]
  misc_feature (1)..(218): Homolog of NCBI NO: 15235317 NR Description: prohibitin-like protein
  misc_feature (1)..(221): Homolog of NCBI NO: 12751303 NR Description: prohibitin 1-like protein [Brassica napus]
  misc_feature (1)..(221): Homolog of NCBI NO: 15219569 NR Description: putative prohibitin 2
MVPWFERPIIYDVRARPYLVESTTGSHDLQMVKIGLRVLTRPMGDRLPQIYRTLGENYSERVLPSIIHETLKAVVAQYNASQLITQREAVSREIRKILTERASNFDIALDDVSITTLTFGKEFTAAIEAKQVAAQEAERAKFIVEKAEQDRRSAVIRAQGEAKSAQLIGQAIANNQAFITLRKIEAAREIAQTIAQSANKVYLSSNDLLLNLQEMNLEPKK

SEQ ID NO: 27315 - DNA, 1357 bp, Arabidopsis thaliana
  misc_feature (1)..(1357): Ceres Seq. ID no. 12581242
  misc_feature: MA Experiment ID: 108434 Result: Down-regulated in Transcription
  misc_feature: MA Experiment 108434 PARAMETER Experiment Name: At_Root_Tips_cDNA_P Parameter: Tissue Value: Root Tips
  misc_feature: MA Experiment ID: 108462 Result: Up-regulated in Transcription
  misc_feature: MA Experiment 108462 PARAMETER Experiment Name: At_Germinating_Seeds_cDNA_P Parameter: Age (day) Value: 2 vs. 0
  misc_feature: MA Experiment 108462 PARAMETER Experiment Name: At_Germinating_Seeds_cDNA_P Parameter: Tissue Value: Germinating Seeds
  misc_feature: MA Experiment ID: 108463 Result: Up-regulated in Transcription
  misc_feature: MA Experiment 108463 PARAMETER Experiment Name: At_Germinating_Seeds_cDNA_P Parameter: Age (day) Value: 3 vs. 0
  misc_feature: MA Experiment 108463 PARAMETER Experiment Name: At_Germinating_Seeds_cDNA_P Parameter: Tissue Value: Germinating Seeds
  misc_feature: MA Experiment ID: 108464 Result: Up-regulated in Transcription
  misc_feature: MA Experiment 108464 PARAMETER Experiment Name: At_Germinating_Seeds_cDNA_P Parameter: Age (day) Value: 4 vs. 0
  misc_feature: MA Experiment 108464 PARAMETER Experiment Name: At_Germinating_Seeds_cDNA_P Parameter: Tissue Value: Germinating Seeds
  misc_feature: MA Experiment ID: 108469 Result: Up-regulated in Transcription
  misc_feature: MA Experiment ID: 108585 Result: Up-regulated in Transcription
  misc_feature: MA Experiment 108585 PARAMETER Experiment Name: At_5mM_NaNP_cDNA_P Parameter: Timepoint (hr) Value: 6
  misc_feature: MA Experiment 108585 PARAMETER Experiment Name: At_5mM_NaNP_cDNA_P Parameter: Tissue Value: Aerial
  misc_feature: MA Experiment 108585 PARAMETER Experiment Name: At_5mM_NaNP_cDNA_P Parameter: Treatment Value: null
  misc_feature: MA Experiment ID: 108607 Result: Up-regulated in Transcription
  misc_feature: MA Experiment 108607 PARAMETER Experiment Name: At_100uM_ABA_cDNA_P Parameter: Timepoint (hr) Value: 4
  misc_feature: MA Experiment 108607 PARAMETER Experiment Name: At_100uM_ABA_cDNA_P Parameter: Tissue Value: Aerial
  misc_feature: MA Experiment 108607 PARAMETER Experiment Name: At_100uM_ABA_cDNA_P Parameter: Treatment Value: 100uM ABA vs. No Treatment
  misc_feature: MA Experiment ID: 108667 Result: Up-regulated in Transcription
  misc_feature: MA Experiment 108667 PARAMETER Experiment Name: At_2mM_SA_cDNA_P Parameter: Plant Line Value: WS
  misc_feature: MA Experiment 108667 PARAMETER Experiment Name: At_2mM_SA_cDNA_P Parameter: Timepoint (hr) Value: 1
  misc_feature: MA Experiment 108667 PARAMETER Experiment Name: At_2mM_SA_cDNA_P Parameter: Treatment Value: 2mM SA vs. No Treatment
  misc_feature: MA Experiment ID: 108668 Result: Up-regulated in Transcription
  misc_feature: MA Experiment 108668 PARAMETER Experiment Name: At_2mM_SA_cDNA_P Parameter: Plant Line Value: WS
  misc_feature: MA Experiment 108668 PARAMETER Experiment Name: At_2mM_SA_cDNA_P Parameter: Timepoint (hr) Value: 6
  misc_feature: MA Experiment 108668 PARAMETER Experiment Name: At_2mM_SA_cDNA_P Parameter: Treatment Value: 2mM SA vs. No Treatment
  misc_feature: MA Experiment ID: 20000087 Result: Down-regulated in Transcription
  misc_feature: MA Experiment 20000087 PARAMETER Experiment Name: At_100uM_ABA_Mutants_cDNA_P Parameter: Plant Line Value: WS
  misc_feature: MA Experiment 20000087 PARAMETER Experiment Name: At_100uM_ABA_Mutants_cDNA_P Parameter: Timepoint (hr) Value: 6
  misc_feature: MA Experiment 20000087 PARAMETER Experiment Name: At_100uM_ABA_Mutants_cDNA_P Parameter: Tissue Value: Aerial
  misc_feature: MA Experiment 20000087 PARAMETER Experiment Name: At_100uM_ABA_Mutants_cDNA_P Parameter: Treatment Value: 100uM ABA vs. No Treatment
  misc_feature: MA Experiment ID: 20000179 Result: Down-regulated in Transcription
  misc_feature: MA Experiment 20000179 PARAMETER Experiment Name: At_Germinating_Seeds_P Parameter: Age (hr) Value: 6 vs. 0
  misc_feature: MA Experiment 20000179 PARAMETER Experiment Name: At_Germinating_Seeds_P Parameter: Tissue Value: Germinating Seeds
  misc_feature: MA Experiment ID: 20000180 Result: Down-regulated in Transcription
  misc_feature: MA Experiment 20000180 PARAMETER Experiment Name: At_Germinating_Seeds_P Parameter: Age (hr) Value: 24 vs. 0
  misc_feature: MA Experiment 20000180 PARAMETER Experiment Name: At_Germinating_Seeds_P Parameter: Tissue Value: Germinating Seeds
  misc_feature: MA Experiment ID: 20000182 Result: Up-regulated in Transcription
  misc_feature: MA Experiment 20000182 PARAMETER Experiment Name: At_2mM_SA_P Parameter: Age (day) Value: 14
  misc_feature: MA Experiment 20000182 PARAMETER Experiment Name: At_2mM_SA_P Parameter: Organism Value: A. thaliana
  misc_feature: MA Experiment 20000182 PARAMETER Experiment Name: At_2mM_SA_P Parameter: Plant Line Value: WS
  misc_feature: MA Experiment 20000182 PARAMETER Experiment Name: At_2mM_SA_P Parameter: Timepoint (hr) Value: 6
  misc_feature: MA Experiment 20000182 PARAMETER Experiment Name: At_2mM_SA_P Parameter: Tissue Value: Aerial
  misc_feature: MA Experiment 20000182 PARAMETER Experiment Name: At_2mM_SA_P Parameter: Treatment Value: 2mM SA vs. No Treatment
  misc_feature: MA Experiment ID: 20000235 Result: Up-regulated in Transcription
  misc_feature: MA Experiment 20000235 PARAMETER Experiment Name: At_Siliques_P Parameter: Age (day) Value: 21
  misc_feature: MA Experiment 20000235 PARAMETER Experiment Name: At_Siliques_P Parameter: Organism Value: A. thaliana
  misc_feature: MA Experiment 20000235 PARAMETER Experiment Name: At_Siliques_P Parameter: Plant Line Value: WS
  misc_feature: MA Experiment 20000235 PARAMETER Experiment Name: At_Siliques_P Parameter: Tissue Value: 5-10mm Siliques vs. Whole Plant
  misc_feature: MA Experiment ID: 20000264 Result: Up-regulated in Transcription
  misc_feature: MA Experiment 20000264 PARAMETER Experiment Name: At_Open_Flower_P Parameter: Age (day) Value: 21
  misc_feature: MA Experiment 20000264 PARAMETER Experiment Name: At_Open_Flower_P Parameter: Plant Line Value: WS
  misc_feature: MA Experiment 20000264 PARAMETER Experiment Name: At_Open_Flower_P Parameter: Tissue Value: Open Flower vs. Whole Plant
  misc_feature: MA Experiment ID: 20000265 Result: Up-regulated in Transcription
  misc_feature: MA Experiment 20000265 PARAMETER Experiment Name: At_Open_Flower_P Parameter: Age (day) Value: 21
  misc_feature: MA Experiment 20000265 PARAMETER Experiment Name: At_Open_Flower_P Parameter: Plant Line Value: WS
  misc_feature: MA Experiment 20000265 PARAMETER Experiment Name: At_Open_Flower_P Parameter: Tissue Value: Closed Flower vs. Whole Plant
  misc_feature: MA Experiment ID: 20000439 Result: Down-regulated in Transcription
  misc_feature: MA Experiment 20000439 PARAMETER Experiment Name: At_Roots__P Parameter: Age (day) Value: 14 vs. 21
  misc_feature: MA Experiment 20000439 PARAMETER Experiment Name: At_Roots__P Parameter: Organism Value: A. thaliana
  misc_feature: MA Experiment 20000439 PARAMETER Experiment Name: At_Roots__P Parameter: Tissue Value: Roots vs. Whole Plant
  misc_feature: MA Experiment ID: 20000495 Result: Down-regulated in Transcription
  misc_feature: MA Experiment 20000495 PARAMETER Experiment Name: At_Guard_Cells_P Parameter: Harvest Date Value: 8/2/2002
  misc_feature: MA Experiment 20000495 PARAMETER Experiment Name: At_Guard_Cells_P Parameter: Organism Value: A. thaliana
  misc_feature: MA Experiment 20000495 PARAMETER Experiment Name: At_Guard_Cells_P Parameter: Tissue Value: Guard Cells vs. Leaves
  misc_feature: MA Experiment ID: 20001248 Result: Down-regulated in Transcription
  misc_feature: MA Experiment 20001248 PARAMETER Experiment Name: At_Far-red-induction_P Parameter: Age (day) Value: 7
  misc_feature: MA Experiment 20001248 PARAMETER Experiment Name: At_Far-red-induction_P Parameter: Light Value: Far-red vs. White
  misc_feature: MA Experiment 20001248 PARAMETER Experiment Name: At_Far-red-induction_P Parameter: Organism Value: A. thaliana
  misc_feature: MA Experiment 20001248 PARAMETER Experiment Name: At_Far-red-induction_P Parameter: Plant Line Value: Columbia
  misc_feature: MA Experiment 20001248 PARAMETER Experiment Name: At_Far-red-induction_P Parameter: Timepoint (hr) Value: 4
  misc_feature: MA Experiment 20001248 PARAMETER Experiment Name: At_Far-red-induction_P Parameter: Tissue Value: Whole Plant
  misc_feature: MA Experiment ID: 20001451 Result: Down-regulated in Transcription
  misc_feature: MA Experiment 20001451 PARAMETER Experiment Name: At_Far-red-induction_P Parameter: Age (day) Value: 7
  misc_feature: MA Experiment 20001451 PARAMETER Experiment Name: At_Far-red-induction_P Parameter: Light Value: Far-red vs. White
  misc_feature: MA Experiment 20001451 PARAMETER Experiment Name: At_Far-red-induction_P Parameter: Organism Value: A. thaliana
  misc_feature: MA Experiment 20001451 PARAMETER Experiment Name: At_Far-red-induction_P Parameter: Plant Line Value: Columbia
  misc_feature: MA Experiment 20001451 PARAMETER Experiment Name: At_Far-red-induction_P Parameter: Timepoint (hr) Value: 24
  misc_feature: MA Experiment 20001451 PARAMETER Experiment Name: At_Far-red-induction_P Parameter: Tissue Value: Whole Plant
  misc_feature: MA Experiment ID: 20001458 Result: Down-regulated in Transcription
  misc_feature: MA Experiment 20001458 PARAMETER Experiment Name: At_50mM_NH4NO3_L-to-H_P Parameter: Age (day) Value: Undefined
  misc_feature: MA Experiment 20001458 PARAMETER Experiment Name: At_50mM_NH4NO3_L-to-H_P Parameter: Organism Value: Undefined
  misc_feature: MA Experiment 20001458 PARAMETER Experiment Name: At_50mM_NH4NO3_L-to-H_P Parameter: Plant Line Value: Undefined
  misc_feature: MA Experiment 20001458 PARAMETER Experiment Name: At_50mM_NH4NO3_L-to-H_P Parameter: Timepoint (hr) Value: 2
  misc_feature: MA Experiment 20001458 PARAMETER Experiment Name: At_50mM_NH4NO3_L-to-H_P Parameter: Tissue Value: Siliques
  misc_feature: MA Experiment 20001458 PARAMETER Experiment Name: At_50mM_NH4NO3_L-to-H_P Parameter: Treatment Value: 50mM NH4NO3 vs. 100mM Manitol
  misc_feature: MA Experiment ID: 20001556 Result: Down-regulated in Transcription
  misc_feature: MA Experiment 20001556 PARAMETER Experiment Name: At_Drought_Soil_Dry_P Parameter: Age (day) Value: 26
  misc_feature: MA Experiment 20001556 PARAMETER Experiment Name: At_Drought_Soil_Dry_P Parameter: Organism Value: A. thaliana
  misc_feature: MA Experiment 20001556 PARAMETER Experiment Name: At_Drought_Soil_Dry_P Parameter: Plant Line Value: WS
  misc_feature: MA Experiment 20001556 PARAMETER Experiment Name: At_Drought_Soil_Dry_P Parameter: Post Timepoint (hr) Value: None
  misc_feature: MA Experiment 20001556 PARAMETER Experiment Name: At_Drought_Soil_Dry_P Parameter: Post-Treatment Value: None
  misc_feature: MA Experiment 20001556 PARAMETER Experiment Name: At_Drought_Soil_Dry_P Parameter: Timepoint (day) Value: 12
  misc_feature: MA Experiment 20001556 PARAMETER Experiment Name: At_Drought_Soil_Dry_P Parameter: Treatment Value: Drought vs. No Drought
  misc_feature: MA Experiment ID: 20001756 Result: Down-regulated in Transcription
  misc_feature: MA Experiment 20001756 PARAMETER Experiment Name: At_50mM_NH4NO3_L-to-H_P Parameter: Timepoint (hr) Value: 4
  misc_feature: MA Experiment 20001756 PARAMETER Experiment Name: At_50mM_NH4NO3_L-to-H_P Parameter: Tissue Value: Leaf
  misc_feature: MA Experiment 20001756 PARAMETER Experiment Name: At_50mM_NH4NO3_L-to-H_P Parameter: Treatment Value: 50mM NH4NO3 vs 100mM Mannitol
  misc_feature: MA Experiment ID: 20001757 Result: Down-regulated in Transcription
  misc_feature: MA Experiment 20001757 PARAMETER Experiment Name: At_50mM_NH4NO3_L-to-H_P Parameter: Timepoint (hr) Value: 6
  misc_feature: MA Experiment 20001757 PARAMETER Experiment Name: At_50mM_NH4NO3_L-to-H_P Parameter: Tissue Value: Leaf
  misc_feature: MA Experiment 20001757 PARAMETER Experiment Name: At_50mM_NH4NO3_L-to-H_P Parameter: Treatment Value: 50mM NH4NO3 vs 100mM Mannitol
gagtttataaaatacacgataatatcaaagttaaacacacaccaaccaagtaaacaagatacaacacaattggaatctttcttctttgacaaaaaaaaaaggaatctctctctttctctgattctctcatgtccatgcaacaagaaacgtctcacatgacggcggctccacagaccaacggccatcaaatcttccctgagattgacatgtccgccggcgattcctcctccatcgtacgagctacagtcgtccaagcctctacagtcttctacgatactcccgccacgctagataaggcagagagactgctttctgaggcagcggagaatggatctcagctagtggtgttcccggaggctttcatcggtggatatccacgtggctctacctttgaattggctattggttctcgtaccgctaaaggacgagatgactttcgcaagtaccatgcttctgccattgatgttcctggccctgaagtggaacgattagcgttaatggccaagaagtacaaagtatacttggttatgggtgtgatagagagggaaggctacacgctatactgcaccgttcttttcttcgattcacaaggtctgttcttaggtaagcaccgcaaactcatgcctacagctcttgaacgttgcatttggggatttggagatggatcaaccatccctgtgttcgatactcctattgggaaaatcggtgctgctatttgttgggaaaataggatgccttctttgagaaccgcaatgtatgccaaaggcattgagatttattgtgcacctactgctgattcaagagaaacttggctagcatcaatgactcatattgcacttgagggtggatgttttgttttgtcagctaaccagttttgtcgtcggaaagactatccttctccgccggaatacatgttttccggttcagaagagagcctaacaccggactctgttgtctgcgctggtggaagctctatcatttcacctttgggaattgttttagctggaccaaactatagaggagaagctcttatcacagctgatctagatcttggggacatagcacgagccaagtttgattttgatgtggtcggacattactcgaggcctgaagtgtttagcttgaacataagggagcatccgagaaaagcggtcagcttcaagacgtcaaaggtaatggaagatgaatccgtctaacaaatgatcatttgttagacccaaactttctctgtaatttgatgaagtttatctgtagtaaacttcaagacttgtgttgtaattgaaatcgataaaaaatctaaaccgttagattgagtgttgtcttctattcctcgtttatactatgcttggttctgctc

SEQ ID NO: 27316 - protein, 355 aa, Arabidopsis thaliana
  peptide (1)..(355): Ceres Seq. ID no. 12581243
  misc_feature (32)..(354): Homolog of NCBI NO: 25290267 NR Description: nitrilase (EC 3.5.5.1) 2 [imported] - Arabidopsis
  misc_feature (32)..(354): Homolog of NCBI NO: 15229932 NR Description: nitrilase 2
  misc_feature (32)..(354): Homolog of NCBI NO: 25290266 NR Description: nitrilase (EC 3.5.5.1) 2 [imported] - Arabidopsis
  misc_feature (20)..(347): Homolog of NCBI NO: 37654214 NR Description: nitrilase 2 [Zea mays]
  misc_feature (10)..(355): Homolog of NCBI NO: 37654216 NR Description: nitrilase 1 [Zea mays]
  misc_feature (10)..(347): Homolog of NCBI NO: 25290269 NR Description: nitrilase-like protein [imported] - rice
  misc_feature (10)..(354): Homolog of NCBI NO: 7435980 NR Description: nitrilase (EC 3.5.5.1) 4B - common tobacco
  misc_feature (10)..(354): Homolog of NCBI NO: 3914163 NR Description: NITRILASE 4
  misc_feature (10)..(355): Homolog of NCBI NO: 21593970 NR Description: Nitrilase 4 (sp P46011) [Arabidopsis thaliana]
  misc_feature (1)..(355): Homolog of NCBI NO: 15242205 NR Description: Nitrilase 4 (sp P46011)
MSMQQETSHMTAAPQTNGHQIFPEIDMSAGDSSSIVRATVVQASTVFYDTPATLDKAERLLSEAAENGSQLVVFPEAFIGGYPRGSTFELAIGSRTAKGRDDFRKYHASAIDVPGPEVERLALMAKKYKVYLVMGVIEREGYTLYCTVLFFDSQGLFLGKHRKLMPTALERCIWGFGDGSTIPVFDTPIGKIGAAICWENRMPSLRTAMYAKGIEIYCAPTADSRETWLASMTHIALEGGCFVLSANQFCRRKDYPSPPEYMFSGSEESLTPDSVVCAGGSSIISPLGIVLAGPNYRGEALITADLDLGDIARAKFDFDVVGHYSRPEVFSLNIREHPRKAVSFKTSKVMEDESV

SEQ ID NO: 27317 - protein, 353 aa, Arabidopsis thaliana
  peptide (1)..(353): Ceres Seq. ID no. 12581244
  misc_feature (8)..(352): Homolog of NCBI NO: 7435980 NR Description: nitrilase (EC 3.5.5.1) 4B - common tobacco
  misc_feature (8)..(352): Homolog of NCBI NO: 3914163 NR Description: NITRILASE 4
  misc_feature (8)..(353): Homolog of NCBI NO: 21593970 NR Description: Nitrilase 4 (sp P46011) [Arabidopsis thaliana]
  misc_feature (1)..(353): Homolog of NCBI NO: 15242205 NR Description: Nitrilase 4 (sp P46011)
  misc_feature (30)..(352): Homolog of NCBI NO: 25290267 NR Description: nitrilase (EC 3.5.5.1) 2 [imported] - Arabidopsis
  misc_feature (30)..(352): Homolog of NCBI NO: 15229932 NR Description: nitrilase 2
  misc_feature (30)..(352): Homolog of NCBI NO: 25290266 NR Description: nitrilase (EC 3.5.5.1) 2 [imported] - Arabidopsis
  misc_feature (18)..(345): Homolog of NCBI NO: 37654214 NR Description: nitrilase 2 [Zea mays]
  misc_feature (8)..(353): Homolog of NCBI NO: 37654216 NR Description: nitrilase 1 [Zea mays]
  misc_feature (8)..(345): Homolog of NCBI NO: 25290269 NR Description: nitrilase-like protein [imported] - rice
MQQETSHMTAAPQTNGHQIFPEIDMSAGDSSSIVRATVVQASTVFYDTPATLDKAERLLSEAAENGSQLVVFPEAFIGGYPRGSTFELAIGSRTAKGRDDFRKYHASAIDVPGPEVERLALMAKKYKVYLVMGVIEREGYTLYCTVLFFDSQGLFLGKHRKLMPTALERCIWGFGDGSTIPVFDTPIGKIGAAICWENRMPSLRTAMYAKGIEIYCAPTADSRETWLASMTHIALEGGCFVLSANQFCRRKDYPSPPEYMFSGSEESLTPDSVVCAGGSSIISPLGIVLAGPNYRGEALITADLDLGDIARAKFDFDVVGHYSRPEVFSLNIREHPRKAVSFKTSKVMEDESV

SEQ ID NO: 27318 - protein, 346 aa, Arabidopsis thaliana
  peptide (1)..(346): Ceres Seq. ID no. 12581245
  misc_feature (23)..(345): Homolog of NCBI NO: 25290267 NR Description: nitrilase (EC 3.5.5.1) 2 [imported] - Arabidopsis
  misc_feature (23)..(345): Homolog of NCBI NO: 15229932 NR Description: nitrilase 2
  misc_feature (23)..(345): Homolog of NCBI NO: 25290266 NR Description: nitrilase (EC 3.5.5.1) 2 [imported] - Arabidopsis
  misc_feature (11)..(338): Homolog of NCBI NO: 37654214 NR Description: nitrilase 2 [Zea mays]
  misc_feature (1)..(346): Homolog of NCBI NO: 37654216 NR Description: nitrilase 1 [Zea mays]
  misc_feature (1)..(338): Homolog of NCBI NO: 25290269 NR Description: nitrilase-like protein [imported] - rice
  misc_feature (1)..(345): Homolog of NCBI NO: 7435980 NR Description: nitrilase (EC 3.5.5.1) 4B - common tobacco
  misc_feature (1)..(345): Homolog of NCBI NO: 3914163 NR Description: NITRILASE 4
  misc_feature (1)..(346): Homolog of NCBI NO: 21593970 NR Description: Nitrilase 4 (sp P46011) [Arabidopsis thaliana]
  misc_feature (1)..(346): Homolog of NCBI NO: 15242205 NR Description: Nitrilase 4 (sp P46011)
MTAAPQTNGHQIFPEIDMSAGDSSSIVRATVVQASTVFYDTPATLDKAERLLSEAAENGSQLVVFPEAFIGGYPRGSTFELAIGSRTAKGRDDFRKYHASAIDVPGPEVERLALMAKKYKVYLVMGVIEREGYTLYCTVLFFDSQGLFLGKHRKLMPTALERCIWGFGDGSTIPVFDTPIGKIGAAICWENRMPSLRTAMYAKGIEIYCAPTADSRETWLASMTHIALEGGCFVLSANQFCRRKDYPSPPEYMFSGSEESLTPDSVVCAGGSSIISPLGIVLAGPNYRGEALITADLDLGDIARAKFDFDVVGHYSRPEVFSLNIREHPRKAVSFKTSKVMEDESV

SEQ ID NO: 27319 - DNA, 1089 bp, Arabidopsis thaliana
  misc_feature (1)..(1089): Ceres Seq. ID no. 12339514
  misc_feature: MA Experiment ID: 108474 Result: Down-regulated in Transcription
  misc_feature: MA Experiment 108474 PARAMETER Experiment Name: At_Drought_Flowers_cDNA_P Parameter: Timepoint (hr) Value: null
  misc_feature: MA Experiment 108474 PARAMETER Experiment Name: At_Drought_Flowers_cDNA_P Parameter: Treatment Value: Drought vs. No Drought
  misc_feature: MA Experiment ID: 108501 Result: Down-regulated in Transcription
  misc_feature: MA Experiment 108501 PARAMETER Experiment Name: At_ap2_floral_buds_cDNA_P Parameter: Plant Line Value: ap2 (Ler.)
  misc_feature: MA Experiment 108501 PARAMETER Experiment Name: At_ap2_floral_buds_cDNA_P Parameter: Tissue Value: Closed Flower
  misc_feature: MA Experiment ID: 108576 Result: Up-regulated in Transcription
  misc_feature: MA Experiment 108576 PARAMETER Experiment Name: At_42deg_Heat_cDNA_P Parameter: Temperature (deg C) Value: 42 vs. 22
  misc_feature: MA Experiment 108576 PARAMETER Experiment Name: At_42deg_Heat_cDNA_P Parameter: Timepoint (hr) Value: 1
  misc_feature: MA Experiment 108576 PARAMETER Experiment Name: At_42deg_Heat_cDNA_P Parameter: Tissue Value: Aerial
  misc_feature: MA Experiment ID: 20000185 Result: Down-regulated in Transcription
  misc_feature: MA Experiment 20000185 PARAMETER Experiment Name: At_Roots__P Parameter: Age (day) Value: 7 vs. 21
  misc_feature: MA Experiment 20000185 PARAMETER Experiment Name: At_Roots__P Parameter: Organism Value: A. thaliana
  misc_feature: MA Experiment 20000185 PARAMETER Experiment Name: At_Roots__P Parameter: Tissue Value: Roots vs. Whole Plant
  misc_feature: MA Experiment ID: 20000265 Result: Up-regulated in Transcription
  misc_feature: MA Experiment 20000265 PARAMETER Experiment Name: At_Open_Flower_P Parameter: Age (day) Value: 21
  misc_feature: MA Experiment 20000265 PARAMETER Experiment Name: At_Open_Flower_P Parameter: Plant Line Value: WS
  misc_feature: MA Experiment 20000265 PARAMETER Experiment Name: At_Open_Flower_P Parameter: Tissue Value: Closed Flower vs. Whole Plant
  misc_feature: MA Experiment ID: 20000286 Result: Up-regulated in Transcription
  misc_feature: MA Experiment 20000286 PARAMETER Experiment Name: At_Open_Flower_P Parameter: Age (day) Value: 21
  misc_feature: MA Experiment 20000286 PARAMETER Experiment Name: At_Open_Flower_P Parameter: Plant Line Value: WS
  misc_feature: MA Experiment 20000286 PARAMETER Experiment Name: At_Open_Flower_P Parameter: Tissue Value: Half Open vs. Whole Plant
  misc_feature: MA Experiment ID: 20000439 Result: Down-regulated in Transcription
  misc_feature: MA Experiment 20000439 PARAMETER Experiment Name: At_Roots__P Parameter: Age (day) Value: 14 vs. 21
  misc_feature: MA Experiment 20000439 PARAMETER Experiment Name: At_Roots__P Parameter: Organism Value: A. thaliana
  misc_feature: MA Experiment 20000439 PARAMETER Experiment Name: At_Roots__P Parameter: Tissue Value: Roots vs. Whole Plant
  misc_feature: MA Experiment ID: 20001910 Result: Down-regulated in Transcription
  misc_feature: MA Experiment 20001910 PARAMETER Experiment Name: At_Drought_Reproduction_P Parameter: Age (day) Value: 37
  misc_feature: MA Experiment 20001910 PARAMETER Experiment Name: At_Drought_Reproduction_P Parameter: Organism Value: A. thaliana
  misc_feature: MA Experiment 20001910 PARAMETER Experiment Name: At_Drought_Reproduction_P Parameter: Plant Line Value: WS
  misc_feature: MA Experiment 20001910 PARAMETER Experiment Name: At_Drought_Reproduction_P Parameter: Timepoint (day) Value: 7
  misc_feature: MA Experiment 20001910 PARAMETER Experiment Name: At_Drought_Reproduction_P Parameter: Tissue Value: Flowers
  misc_feature: MA Experiment 20001910 PARAMETER Experiment Name: At_Drought_Reproduction_P Parameter: Treatment Value: Drought vs. No Drought
ataatatatacaagaatggacagtcattagctcttgttctgattaggtaagtatcgttcatggactaaaaatttcagagagaaatgagtgtaattctggattagtggctggatttaatcaaaatatgcaacagtctcctaaggccgagttcaagaaatctgagaataatagatctaagtcagtgtcagagatgaatactaataatgtcgacgatgaggtgatggagcaaggaaaactttggagagatgcagagaagaaatatccatggtatgatgcccctcctaaagtcaaggtgacaacaaaaaagggtctttgccatatgtacatagaattgacatttggattgcctccacgatcagtcttcgagcttttcactaatccagacaacttaccactcttcagtgacaagtcttggcgccaacttctggtaaacaaaaaaaggaaggttttgaagagggatggaccaaggcagatagtggaggtagaaaaagttgtggcctgggatttcctgtggtggtctggaggtatgccaataaatctaattgcggatgaaaatgagaaagatcttagaggaaaatataagaaacagaaaatgaagttcatgaaagtgttcgagggtagctataacgtggagccaatttatgtagactccgaacgcttttgcaagcataaggagccaaagagtccagaagaatacaaaaaatgtagcggtgggcaaggaaagattgcatcaaaagtgacaatggaccaatattttcagccatatcctatttttaatttgccgccgctttcttggtacattcgtaggaccaccatcaagaccaccacgactctgctcaaaatgcttcaagatatgggtgccaagatgcgagtagacccgtacgaaagttctaattagcacaagggtgaattaggagatttgttcctaattgttacggttgtctttgtcgtcgtttctagatttagttttcgtatgtgtatataaagtttggatatacttttcttcgttttttagtttgtataaaatctataccaaaatgactataatgtttgtctctatgtaaatcaataaatttatatgaaaaatgc

SEQ ID NO: 27320 - protein, 257 aa, Arabidopsis thaliana
  peptide (1)..(257): Ceres Seq. ID no. 12339515
  misc_feature (131)..(204): Pfam Name: Domain of unknown function DUF220 Pfam Description: Domain of unknown function DUF220
  misc_feature (1)..(249): Homolog of NCBI NO: 15220799 NR Description: putative OBP32pep protein; protein id:
  misc_feature (1)..(102): Homolog of NCBI NO: 8778583 NR Description: F28C11.19 [Arabidopsis thaliana]
  misc_feature (104)..(249): Homolog of NCBI NO: 8778583 NR Description: F28C11.19 [Arabidopsis thaliana]
  misc_feature (1)..(249): Homolog of NCBI NO: 15220845 NR Description: putative OBP32pep protein; protein id:
  misc_feature (1)..(225): Homolog of NCBI NO: 8778583 NR Description: F28C11.19 [Arabidopsis thaliana]
  misc_feature (1)..(253): Homolog of NCBI NO: 15220802 NR Description: putative OBP32pep protein; protein id:
  misc_feature (1)..(217): Homolog of NCBI NO: 18395262 NR Description: putative OBP32pep protein
  misc_feature (1)..(217): Homolog of NCBI NO: 21593977 NR Description: putative OBP32pep protein [Arabidopsis thaliana]
  misc_feature (1)..(204): Homolog of NCBI NO: 25373404 NR Description: hypothetical protein F5O8.15 - Arabidopsis
  misc_feature (1)..(204): Homolog of NCBI NO: 8778583 NR Description: F28C11.19 [Arabidopsis thaliana]
MQQSPKAEFKKSENNRSKSVSEMNTNNVDDEVMEQGKLWRDAEKKYPWYDAPPKVKVTTKKGLCHMYIELTFGLPPRSVFELFTNPDNLPLFSDKSWRQLLVNKKRKVLKRDGPRQIVEVEKVVAWDFLWWSGGMPINLIADENEKDLRGKYKKQKMKFMKVFEGSYNVEPIYVDSERFCKHKEPKSPEEYKKCSGGQGKIASKVTMDQYFQPYPIFNLPPLSWYIRRTTIKTTTTLLKMLQDMGAKMRVDPYESSN

SEQ ID NO: 27321 - protein, 235 aa, Arabidopsis thaliana
  peptide (1)..(235): Ceres Seq. ID no. 12339517
  misc_feature (109)..(182): Pfam Name: Domain of unknown function DUF220 Pfam Description: Domain of unknown function DUF220
  misc_feature (1)..(227): Homolog of NCBI NO: 15220799 NR Description: putative OBP32pep protein; protein id:
  misc_feature (1)..(80): Homolog of NCBI NO: 8778583 NR Description: F28C11.19 [Arabidopsis thaliana]
  misc_feature (82)..(227): Homolog of NCBI NO: 8778583 NR Description: F28C11.19 [Arabidopsis thaliana]
  misc_feature (1)..(227): Homolog of NCBI NO: 15220845 NR Description: putative OBP32pep protein; protein id:
  misc_feature (1)..(203): Homolog of NCBI NO: 8778583 NR Description: F28C11.19 [Arabidopsis thaliana]
  misc_feature (1)..(231): Homolog of NCBI NO: 15220802 NR Description: putative OBP32pep protein; protein id:
  misc_feature (1)..(195): Homolog of NCBI NO: 18395262 NR Description: putative OBP32pep protein
  misc_feature (1)..(195): Homolog of NCBI NO: 21593977 NR Description: putative OBP32pep protein [Arabidopsis thaliana]
  misc_feature (1)..(182): Homolog of NCBI NO: 25373404 NR Description: hypothetical protein F5O8.15 - Arabidopsis
  misc_feature (1)..(182): Homolog of NCBI NO: 8778583 NR Description: F28C11.19 [Arabidopsis thaliana]
MNTNNVDDEVMEQGKLWRDAEKKYPWYDAPPKVKVTTKKGLCHMYIELTFGLPPRSVFELFTNPDNLPLFSDKSWRQLLVNKKRKVLKRDGPRQIVEVEKVVAWDFLWWSGGMPINLIADENEKDLRGKYKKQKMKFMKVFEGSYNVEPIYVDSERFCKHKEPKSPEEYKKCSGGQGKIASKVTMDQYFQPYPIFNLPPLSWYIRRTTIKTTTTLLKMLQDMGAKMRVDPYESSN

SEQ ID NO: 27322 - protein, 225 aa, Arabidopsis thaliana
  peptide (1)..(225): Ceres Seq. ID no. 12339518
  misc_feature (99)..(172): Pfam Name: Domain of unknown function DUF220 Pfam Description: Domain of unknown function DUF220
  misc_feature (1)..(217): Homolog of NCBI NO: 15220799 NR Description: putative OBP32pep protein; protein id:
  misc_feature (1)..(70): Homolog of NCBI NO: 8778583 NR Description: F28C11.19 [Arabidopsis thaliana]
  misc_feature (72)..(217): Homolog of NCBI NO: 8778583 NR Description: F28C11.19 [Arabidopsis thaliana]
  misc_feature (1)..(217): Homolog of NCBI NO: 15220845 NR Description: putative OBP32pep protein; protein id:
  misc_feature (1)..(193): Homolog of NCBI NO: 8778583 NR Description: F28C11.19 [Arabidopsis thaliana]
  misc_feature (1)..(221): Homolog of NCBI NO: 15220802 NR Description: putative OBP32pep protein; protein id:
  misc_feature (1)..(185): Homolog of NCBI NO: 18395262 NR Description: putative OBP32pep protein
  misc_feature (1)..(185): Homolog of NCBI NO: 21593977 NR Description: putative OBP32pep protein [Arabidopsis thaliana]
  misc_feature (1)..(172): Homolog of NCBI NO: 25373404 NR Description: hypothetical protein F5O8.15 - Arabidopsis
  misc_feature (1)..(172): Homolog of NCBI NO: 8778583 NR Description: F28C11.19 [Arabidopsis thaliana]
MEQGKLWRDAEKKYPWYDAPPKVKVTTKKGLCHMYIELTFGLPPRSVFELFTNPDNLPLFSDKSWRQLLVNKKRKVLKRDGPRQIVEVEKVVAWDFLWWSGGMPINLIADENEKDLRGKYKKQKMKFMKVFEGSYNVEPIYVDSERFCKHKEPKSPEEYKKCSGGQGKIASKVTMDQYFQPYPIFNLPPLSWYIRRTTIKTTTTLLKMLQDMGAKMRVDPYESSN

SEQ ID NO: 27323 - DNA, 707 bp, Arabidopsis thaliana; identical to SEQ ID NO: 22622
  misc_feature (1)..(707): Ceres Seq. ID no. 12322487
  misc_feature: MA Experiment ID: 20000437 Result: Down-regulated in Transcription
  misc_feature: MA Experiment 20000437 PARAMETER Experiment Name: At_Drought_P Parameter: Age (day) Value: 8
  misc_feature: MA Experiment 20000437 PARAMETER Experiment Name: At_Drought_P Parameter: Organism Value: A. thaliana
  misc_feature: MA Experiment 20000437 PARAMETER Experiment Name: At_Drought_P Parameter: Plant Line Value: WS
  misc_feature: MA Experiment 20000437 PARAMETER Experiment Name: At_Drought_P Parameter: Timepoint (hr) Value: 24
  misc_feature: MA Experiment 20000437 PARAMETER Experiment Name: At_Drought_P Parameter: Tissue Value: Whole Plant
  misc_feature: MA Experiment 20000437 PARAMETER Experiment Name: At_Drought_P Parameter: Treatment Value: Drought vs. No Drought
  misc_feature: MA Experiment ID: 20000794 Result: Down-regulated in Transcription
  misc_feature: MA Experiment 20000794 PARAMETER Experiment Name: At_Petals_P Parameter: Age (day) Value: 23-25 days
  misc_feature: MA Experiment 20000794 PARAMETER Experiment Name: At_Petals_P Parameter: Plant Line Value: WS
  misc_feature: MA Experiment 20000794 PARAMETER Experiment Name: At_Petals_P Parameter: Tissue Value: Petals vs. Whole plant
  misc_feature: MA Experiment ID: 20001558 Result: Up-regulated in Transcription
  misc_feature: MA Experiment 20001558 PARAMETER Experiment Name: At_Drought_Soil_Dry_P Parameter: Age (day) Value: 27
  misc_feature: MA Experiment 20001558 PARAMETER Experiment Name: At_Drought_Soil_Dry_P Parameter: Organism Value: A. thaliana
  misc_feature: MA Experiment 20001558 PARAMETER Experiment Name: At_Drought_Soil_Dry_P Parameter: Plant Line Value: WS
  misc_feature: MA Experiment 20001558 PARAMETER Experiment Name: At_Drought_Soil_Dry_P Parameter: Post Timepoint (hr) Value: 6
  misc_feature: MA Experiment 20001558 PARAMETER Experiment Name: At_Drought_Soil_Dry_P Parameter: Post-Treatment Value: Re-Water vs. No Drought
  misc_feature: MA Experiment 20001558 PARAMETER Experiment Name: At_Drought_Soil_Dry_P Parameter: Timepoint (day) Value: 13
  misc_feature: MA Experiment 20001558 PARAMETER Experiment Name: At_Drought_Soil_Dry_P Parameter: Treatment Value: Drought vs. No Drought
  misc_feature: MA Experiment ID: 20001560 Result: Up-regulated in Transcription
  misc_feature: MA Experiment 20001560 PARAMETER Experiment Name: At_Drought_Soil_Dry_P Parameter: Age (day) Value: 28
  misc_feature: MA Experiment 20001560 PARAMETER Experiment Name: At_Drought_Soil_Dry_P Parameter: Organism Value: A. thaliana
  misc_feature: MA Experiment 20001560 PARAMETER Experiment Name: At_Drought_Soil_Dry_P Parameter: Plant Line Value: WS
  misc_feature: MA Experiment 20001560 PARAMETER Experiment Name: At_Drought_Soil_Dry_P Parameter: Post Timepoint (hr) Value: None
  misc_feature: MA Experiment 20001560 PARAMETER Experiment Name: At_Drought_Soil_Dry_P Parameter: Post-Treatment Value: None
  misc_feature: MA Experiment 20001560 PARAMETER Experiment Name: At_Drought_Soil_Dry_P Parameter: Timepoint (day) Value: 14
  misc_feature: MA Experiment 20001560 PARAMETER Experiment Name: At_Drought_Soil_Dry_P Parameter: Treatment Value: Drought vs. No Drought
  misc_feature: MA Experiment ID: 20001757 Result: Up-regulated in Transcription
  misc_feature: MA Experiment 20001757 PARAMETER Experiment Name: At_50mM_NH4NO3_L-to-H_P Parameter: Timepoint (hr) Value: 6
  misc_feature: MA Experiment 20001757 PARAMETER Experiment Name: At_50mM_NH4NO3_L-to-H_P Parameter: Tissue Value: Leaf
  misc_feature: MA Experiment 20001757 PARAMETER Experiment Name: At_50mM_NH4NO3_L-to-H_P Parameter: Treatment Value: 50mM NH4NO3 vs 100mM Mannitol

SEQ ID NO: 27324 - protein, 157 aa, Arabidopsis thaliana; identical to SEQ ID NO: 22623
  peptide (1)..(157): Ceres Seq. ID no. 12322488
  misc_feature (1)..(74): Pfam Name: Ubiquitin family Pfam Description: Ubiquitin family
  misc_feature (1)..(74): Pfam Name: Ubiquitin family Pfam Description: Ubiquitin family
  misc_feature (1)..(154): Homolog of NCBI NO: 279636 NR Description: ubiquitin / ribosomal protein S27a - tomato
  misc_feature (1)..(154): Homolog of NCBI NO: 28395459 NR Description: ubiquitin/ribosomal fusion protein [Malus x
  misc_feature (1)..(155): Homolog of NCBI NO: 541953 NR Description: ubiquitin/ribosomal protein S27a fusion protein -
  misc_feature (1)..(155): Homolog of NCBI NO: 25294256 NR Description: ubiquitin extension protein [imported] - common
  misc_feature (1)..(154): Homolog of NCBI NO: 25294255 NR Description: ubiquitin extension protein [imported] - potato
  misc_feature (1)..(154): Homolog of NCBI NO: 279636 NR Description: ubiquitin / ribosomal protein S27a - tomato
  misc_feature (1)..(155): Homolog of NCBI NO: 541953 NR Description: ubiquitin/ribosomal protein S27a fusion protein -
  misc_feature (1)..(154): Homolog of NCBI NO: 25294255 NR Description: ubiquitin extension protein [imported] - potato
  misc_feature (1)..(157): Homolog of NCBI NO: 18407264 NR Description: ubiquitin extension protein (UBQ6)
  misc_feature (1)..(156): Homolog of NCBI NO: 15228715 NR Description: ubiquitin extension protein (UBQ5)
  misc_feature (1)..(154): Homolog of NCBI NO: 34581769 NR Description: ubiquitin extension protein [Cucumis sativus]
  misc_feature (1)..(154): Homolog of NCBI NO: 18252349 NR Description: ubiquitin extension protein [Pyrus communis]
  misc_feature (1)..(155): Homolog of NCBI NO: 541954 NR Description: ubiquitin/ribosomal protein S27a fusion protein -
  misc_feature (1)..(155): Homolog of NCBI NO: 25294256 NR Description: ubiquitin extension protein [imported] - common
  misc_feature (1)..(154): Homolog of NCBI NO: 28395459 NR Description: ubiquitin/ribosomal fusion protein [Malus x
  misc_feature (1)..(155): Homolog of NCBI NO: 541954 NR Description: ubiquitin/ribosomal protein S27a fusion protein -
  misc_feature (1)..(154): Homolog of NCBI NO: 18252349 NR Description: ubiquitin extension protein [Pyrus communis]
  misc_feature (1)..(154): Homolog of NCBI NO: 34581769 NR Description: ubiquitin extension protein [Cucumis sativus]
  misc_feature (1)..(156): Homolog of NCBI NO: 15228715 NR Description: ubiquitin extension protein (UBQ5)
  misc_feature (1)..(157): Homolog of NCBI NO: 18407264 NR Description: ubiquitin extension protein (UBQ6)

SEQ ID NO: 27325 - DNA, 1155 bp, Arabidopsis thaliana
  misc_feature (1)..(1155): Ceres Seq. ID no. 12561559
  misc_feature: MA Experiment ID: 108569 Result: Up-regulated in Transcription
  misc_feature: MA Experiment 108569 PARAMETER Experiment Name: At_0.001%_MeJA__cDNA_P Parameter: Timepoint (hr) Value: 6
  misc_feature: MA Experiment 108569 PARAMETER Experiment Name: At_0.001%_MeJA__cDNA_P Parameter: Tissue Value: Aerial
  misc_feature: MA Experiment 108569 PARAMETER Experiment Name: At_0.001%_MeJA__cDNA_P Parameter: Treatment Value: 0.001% MeJA vs. No Treatment
  misc_feature: MA Experiment ID: 108573 Result: Up-regulated in Transcription
  misc_feature: MA Experiment 108573 PARAMETER Experiment Name: At_Drought_cDNA_P Parameter: Timepoint (hr) Value: 6
  misc_feature: MA Experiment 108573 PARAMETER Experiment Name: At_Drought_cDNA_P Parameter: Tissue Value: Aerial
  misc_feature: MA Experiment 108573 PARAMETER Experiment Name: At_Drought_cDNA_P Parameter: Treatment Value: Drought vs. No Drought
  misc_feature: MA Experiment ID: 20000070 Result: Up-regulated in Transcription
  misc_feature: MA Experiment 20000070 PARAMETER Experiment Name: At_100uM_ABA_Mutants_cDNA_P Parameter: Plant Line Value: CS24
  misc_feature: MA Experiment 20000070 PARAMETER Experiment Name: At_100uM_ABA_Mutants_cDNA_P Parameter: Timepoint (hr) Value: 6
  misc_feature: MA Experiment 20000070 PARAMETER Experiment Name: At_100uM_ABA_Mutants_cDNA_P Parameter: Tissue Value: Aerial
  misc_feature: MA Experiment 20000070 PARAMETER Experiment Name: At_100uM_ABA_Mutants_cDNA_P Parameter: Treatment Value: 100uM ABA vs. No Treatment
  misc_feature: MA Experiment ID: 20000071 Result: Up-regulated in Transcription
  misc_feature: MA Experiment 20000071 PARAMETER Experiment Name: At_100uM_ABA_Mutants_cDNA_P Parameter: Plant Line Value: CS8104
  misc_feature: MA Experiment 20000071 PARAMETER Experiment Name: At_100uM_ABA_Mutants_cDNA_P Parameter: Timepoint (hr) Value: 6
  misc_feature: MA Experiment 20000071 PARAMETER Experiment Name: At_100uM_ABA_Mutants_cDNA_P Parameter: Tissue Value: Aerial
  misc_feature: MA Experiment 20000071 PARAMETER Experiment Name: At_100uM_ABA_Mutants_cDNA_P Parameter: Treatment Value: 100uM ABA vs. No Treatment
  misc_feature: MA Experiment ID: 20000087 Result: Up-regulated in Transcription
  misc_feature: MA Experiment 20000087 PARAMETER Experiment Name: At_100uM_ABA_Mutants_cDNA_P Parameter: Plant Line Value: WS
  misc_feature: MA Experiment 20000087 PARAMETER Experiment Name: At_100uM_ABA_Mutants_cDNA_P Parameter: Timepoint (hr) Value: 6
  misc_feature: MA Experiment 20000087 PARAMETER Experiment Name: At_100uM_ABA_Mutants_cDNA_P Parameter: Tissue Value: Aerial
  misc_feature: MA Experiment 20000087 PARAMETER Experiment Name: At_100uM_ABA_Mutants_cDNA_P Parameter: Treatment Value: 100uM ABA vs. No Treatment
  misc_feature: MA Experiment ID: 20000093 Result: Down-regulated in Transcription
  misc_feature: MA Experiment 20000093 PARAMETER Experiment Name: At_42deg_Heat_cDNA_P Parameter: Temperature (deg C) Value: 42 vs. 22
  misc_feature: MA Experiment 20000093 PARAMETER Experiment Name: At_42deg_Heat_cDNA_P Parameter: Timepoint (hr) Value: 0.5
  misc_feature: MA Experiment 20000093 PARAMETER Experiment Name: At_42deg_Heat_cDNA_P Parameter: Tissue Value: Aerial
  misc_feature: MA Experiment ID: 20000111 Result: Down-regulated in Transcription
  misc_feature: MA Experiment 20000111 PARAMETER Experiment Name: At_42deg_Heat_cDNA_P Parameter: Temperature (deg C) Value: 42 vs. 22
  misc_feature: MA Experiment 20000111 PARAMETER Experiment Name: At_42deg_Heat_cDNA_P Parameter: Timepoint (hr) Value: 6
  misc_feature: MA Experiment 20000111 PARAMETER Experiment Name: At_42deg_Heat_cDNA_P Parameter: Tissue Value: Aerial
  misc_feature: MA Experiment ID: 20000112 Result: Down-regulated in Transcription
  misc_feature: MA Experiment 20000112 PARAMETER Experiment Name: At_42deg_Heat_cDNA_P Parameter: Temperature (deg C) Value: 42 vs. 22
  misc_feature: MA Experiment 20000112 PARAMETER Experiment Name: At_42deg_Heat_cDNA_P Parameter: Timepoint (hr) Value: 2
  misc_feature: MA Experiment 20000112 PARAMETER Experiment Name: At_42deg_Heat_cDNA_P Parameter: Tissue Value: Aerial
  misc_feature: MA Experiment ID: 20000117 Result: Up-regulated in Transcription
  misc_feature: MA Experiment 20000117 PARAMETER Experiment Name: At_100uM_ABA_Mutants_cDNA_P Parameter: Plant Line Value: Columbia
  misc_feature: MA Experiment 20000117 PARAMETER Experiment Name: At_100uM_ABA_Mutants_cDNA_P Parameter: Timepoint (hr) Value: 6
  misc_feature: MA Experiment 20000117 PARAMETER Experiment Name: At_100uM_ABA_Mutants_cDNA_P Parameter: Tissue Value: Aerial
  misc_feature: MA Experiment 20000117 PARAMETER Experiment Name: At_100uM_ABA_Mutants_cDNA_P Parameter: Treatment Value: 100uM ABA vs. No Treatment
  misc_feature: MA Experiment ID: 20000144 Result: Down-regulated in Transcription
  misc_feature: MA Experiment 20000144 PARAMETER Experiment Name: At_42deg_Heat_cDNA_P Parameter: Temperature (deg C) Value: 42 vs. 22
  misc_feature: MA Experiment 20000144 PARAMETER Experiment Name: At_42deg_Heat_cDNA_P Parameter: Timepoint (hr) Value: 1
  misc_feature: MA Experiment 20000144 PARAMETER Experiment Name: At_42deg_Heat_cDNA_P Parameter: Tissue Value: Aerial
  misc_feature: MA Experiment ID: 20000171 Result: Down-regulated in Transcription
  misc_feature: MA Experiment 20000171 PARAMETER Experiment Name: At_42deg_Heat_P Parameter: Age (day) Value: 14
  misc_feature: MA Experiment 20000171 PARAMETER Experiment Name: At_42deg_Heat_P Parameter: Organism Value: A. thaliana
  misc_feature: MA Experiment 20000171 PARAMETER Experiment Name: At_42deg_Heat_P Parameter: Plant Line Value: WS
  misc_feature: MA Experiment 20000171 PARAMETER Experiment Name: At_42deg_Heat_P Parameter: Temperature (deg C) Value: 42 vs. 22
  misc_feature: MA Experiment 20000171 PARAMETER Experiment Name: At_42deg_Heat_P Parameter: Timepoint (hr) Value: 1
  misc_feature: MA Experiment 20000171 PARAMETER Experiment Name: At_42deg_Heat_P Parameter: Tissue Value: Aerial
  misc_feature: MA Experiment ID: 20000173 Result: Down-regulated in Transcription
  misc_feature: MA Experiment 20000173 PARAMETER Experiment Name: At_42deg_Heat_P Parameter: Age (day) Value: 14
  misc_feature: MA Experiment 20000173 PARAMETER Experiment Name: At_42deg_Heat_P Parameter: Organism Value: A. thaliana
  misc_feature: MA Experiment 20000173 PARAMETER Experiment Name: At_42deg_Heat_P Parameter: Plant Line Value: WS
  misc_feature: MA Experiment 20000173 PARAMETER Experiment Name: At_42deg_Heat_P Parameter: Temperature (deg C) Value: 42 vs. 22
  misc_feature: MA Experiment 20000173 PARAMETER Experiment Name: At_42deg_Heat_P Parameter: Timepoint (hr) Value: 6
  misc_feature: MA Experiment 20000173 PARAMETER Experiment Name: At_42deg_Heat_P Parameter: Tissue Value: Aerial
  misc_feature: MA Experiment ID: 20000179 Result: Up-regulated in Transcription
  misc_feature: MA Experiment 20000179 PARAMETER Experiment Name: At_Germinating_Seeds_P Parameter: Age (hr) Value: 6 vs. 0
  misc_feature: MA Experiment 20000179 PARAMETER Experiment Name: At_Germinating_Seeds_P Parameter: Tissue Value: Germinating Seeds
  misc_feature: MA Experiment ID: 20000180 Result: Up-regulated in Transcription
  misc_feature: MA Experiment 20000180 PARAMETER Experiment Name: At_Germinating_Seeds_P Parameter: Age (hr) Value: 24 vs. 0
  misc_feature: MA Experiment 20000180 PARAMETER Experiment Name: At_Germinating_Seeds_P Parameter: Tissue Value: Germinating Seeds
  misc_feature: MA Experiment ID: 20000213 Result: Up-regulated in Transcription
  misc_feature: MA Experiment 20000213 PARAMETER Experiment Name: At_4deg_Cold_P Parameter: Timepoint (hr) Value: 2
  misc_feature: MA Experiment ID: 20000224 Result: Down-regulated in Transcription
attttctattttctcctccgaggtcgtctctcgaccaaaccacaaaaaccagaacaaaaataactaaaaaacaatcagatctgagatcgaacaaaacaacatgaacacgttaatcccatcggagaaaagatggatcatcaccggcgttttactagccggtttagttggcggtgctttgcttttcacaagcttcatacgagccgctgacgaaacgctcttcctctgttccacagcaagcgccaaaagcagagcggtggctgcggcagctgattacgaagcgactccgattcagcttcaagcgatcgtccactacgcgacatctaacgttgtcccacaacagaatcttgctgagatctcgatctctttcaacatcttgaaaaagctagctccggctaactttctcgtgttcggtctcggtcgtgactcgctcatgtgggcttctttaaatccacgtggcaaaaccttgttcttggaagaagatcttgaatggtttcagaaagtgaccaaagactctcctttcttacgtgcgcatcacgtgcgttacaggacgcagcttcaacaagccgattcgcttctacggttcgtacaaaacggagcctaactggtttccggcgaaatcttatctccagggaaacgagaagtgtaagctagctctcacgggactgcccgatgagttctacgatacagagtgggatctgctgatggtcgatgctcctaaaggttacttcgcagaagctccgggaagaatggcggcgattttctcggcggctgttatggctaggaaccggaagaaaccgggagttacgcacgtgttcttgcacgatgttaatcggagggtggagaagacttttgccgaggagtttttatgccggaagtatagagtcaacgccgccgggaggttatggcattttgctattcctccggcggctgcgaacgctacgattgactctggtgattataggttttgctaagattgcgacacgatttatcttcttatttcctcttttgcccttttattttacttttttgaggaattttattacagcattgggttcacttactatctgatttagtgccgacagttttggatctgcatctcgtgtttcgttatttttagttacaggctttccaaaatttcatggggcattatatttc

SEQ ID NO: 27326 - protein, 166 aa, Arabidopsis thaliana
  peptide (1)..(166): Ceres Seq. ID no. 12561560
  misc_feature (42)..(160): Pfam Name: Protein of unknown function (DUF579) Pfam Description: Protein of unknown function (DUF579)
  misc_feature (43)..(161): Homolog of NCBI NO: 18397819 NR Description: expressed protein
  misc_feature (1)..(159): Homolog of NCBI NO: 15234881 NR Description: putative protein; protein id: At4g09990.1
  misc_feature (48)..(159): Homolog of NCBI NO: 25402555 NR Description: hypothetical protein [imported] - Arabidopsis
  misc_feature (62)..(159): Homolog of NCBI NO: 18398986 NR Description: expressed protein
  misc_feature (16)..(159): Homolog of NCBI NO: 15217566 NR Description: unknown protein; protein id: At1g09610.1
  misc_feature (29)..(159): Homolog of NCBI NO: 25354648 NR Description: hypothetical protein F14O23.3 [imported] -
  misc_feature (29)..(159): Homolog of NCBI NO: 18409879 NR Description: hypothetical protein; protein id: At1g71690.1
  misc_feature (8)..(164): Homolog of NCBI NO: 15220402 NR Description: unknown protein; protein id: At1g67330.1
  misc_feature (1)..(160): Homolog of NCBI NO: 18396558 NR Description: expressed protein
  misc_feature (1)..(160): Homolog of NCBI NO: 21537399 NR Description: unknown [Arabidopsis thaliana]
MNTLIPSEKRWIITGVLLAGLVGGALLFTSFIRAADETLFLCSTASAKSRAVAAAADYEATPIQLQAIVHYATSNVVPQQNLAEISISFNILKKLAPANFLVFGLGRDSLMWASLNPRGKTLFLEEDLEWFQKVTKDSPFLRAHHVRYRTQLQQADSLLRFVQNGA

SEQ ID NO: 27327 - protein, 119 aa, Arabidopsis thaliana
  peptide (1)..(119): Ceres Seq. ID no. 12561561
MLLKVTSQKLREEWRRFSRRLLWLGTGRNRELRTCSCTMLIGGWRRLLPRSFYAGSIESTPPGGYGILLFLRRLRTLRLTLVIIGFAKIATRFIFLFPLLPFYFTFLRNFITALGSLTI

SEQ ID NO: 27328 - protein, 89 aa, Arabidopsis thaliana
  peptide (1)..(89): Ceres Seq. ID no. 12561562
  misc_feature (1)..(89): Pfam Name: Protein of unknown function (DUF579) Pfam Description: Protein of unknown function (DUF579)
  misc_feature (1)..(89): Homolog of NCBI NO: 18397819 NR Description: expressed protein
  misc_feature (1)..(78): Homolog of NCBI NO: 15234881 NR Description: putative protein; protein id: At4g09990.1
  misc_feature (1)..(89): Homolog of NCBI NO: 25402555 NR Description: hypothetical protein [imported] - Arabidopsis
  misc_feature (1)..(79): Homolog of NCBI NO: 18398986 NR Description: expressed protein
  misc_feature (1)..(89): Homolog of NCBI NO: 15217566 NR Description: unknown protein; protein id: At1g09610.1
  misc_feature (1)..(89): Homolog of NCBI NO: 25354648 NR Description: hypothetical protein F14O23.3 [imported] -
  misc_feature (1)..(89): Homolog of NCBI NO: 18409879 NR Description: hypothetical protein; protein id: At1g71690.1
  misc_feature (1)..(89): Homolog of NCBI NO: 15220402 NR Description: unknown protein; protein id: At1g67330.1
  misc_feature (1)..(89): Homolog of NCBI NO: 18396558 NR Description: expressed protein
  misc_feature (1)..(89): Homolog of NCBI NO: 21537399 NR Description: unknown [Arabidopsis thaliana]
MVDAPKGYFAEAPGRMAAIFSAAVMARNRKKPGVTHVFLHDVNRRVEKTFAEEFLCRKYRVNAAGRLWHFAIPPAAANATIDSGDYRFC

SEQ ID NO: 27329 - DNA, 1410 bp, Arabidopsis thaliana
  misc_feature (1)..(1410): Ceres Seq. ID no. 13495787
  misc_feature: MA Experiment ID: 108461 Result: Up-regulated in Transcription
  misc_feature: MA Experiment 108461 PARAMETER Experiment Name: At_Germinating_Seeds_cDNA_P Parameter: Age (day) Value: 1 vs. 0
  misc_feature: MA Experiment 108461 PARAMETER Experiment Name: At_Germinating_Seeds_cDNA_P Parameter: Tissue Value: Germinating Seeds
  misc_feature: MA Experiment ID: 108462 Result: Up-regulated in Transcription
  misc_feature: MA Experiment 108462 PARAMETER Experiment Name: At_Germinating_Seeds_cDNA_P Parameter: Age (day) Value: 2 vs. 0
  misc_feature: MA Experiment 108462 PARAMETER Experiment Name: At_Germinating_Seeds_cDNA_P Parameter: Tissue Value: Germinating Seeds
  misc_feature: MA Experiment ID: 108463 Result: Up-regulated in Transcription
  misc_feature: MA Experiment 108463 PARAMETER Experiment Name: At_Germinating_Seeds_cDNA_P Parameter: Age (day) Value: 3 vs. 0
  misc_feature: MA Experiment 108463 PARAMETER Experiment Name: At_Germinating_Seeds_cDNA_P Parameter: Tissue Value: Germinating Seeds
  misc_feature: MA Experiment ID: 108464 Result: Up-regulated in Transcription
  misc_feature: MA Experiment 108464 PARAMETER Experiment Name: At_Germinating_Seeds_cDNA_P Parameter: Age (day) Value: 4 vs. 0
  misc_feature: MA Experiment 108464 PARAMETER Experiment Name: At_Germinating_Seeds_cDNA_P Parameter: Tissue Value: Germinating Seeds
  misc_feature: MA Experiment ID: 108473 Result: Down-regulated in Transcription
  misc_feature: MA Experiment 108473 PARAMETER Experiment Name: At_Drought_Flowers_cDNA_P Parameter: Timepoint (hr) Value: 7 d
  misc_feature: MA Experiment 108473 PARAMETER Experiment Name: At_Drought_Flowers_cDNA_P Parameter: Tissue Value: Flower
  misc_feature: MA Experiment 108473 PARAMETER Experiment Name: At_Drought_Flowers_cDNA_P Parameter: Treatment Value: Drought vs. No Drought
  misc_feature: MA Experiment ID: 108595 Result: Down-regulated in Transcription
  misc_feature: MA Experiment 108595 PARAMETER Experiment Name: At_Ler-pi_Ovule_cDNA_P Parameter: Plant Line Value: null
  misc_feature: MA Experiment ID: 108668 Result: Down-regulated in Transcription
  misc_feature: MA Experiment 108668 PARAMETER Experiment Name: At_2mM_SA_cDNA_P Parameter: Plant Line Value: WS
  misc_feature: MA Experiment 108668 PARAMETER Experiment Name: At_2mM_SA_cDNA_P Parameter: Timepoint (hr) Value: 6
  misc_feature: MA Experiment 108668 PARAMETER Experiment Name: At_2mM_SA_cDNA_P Parameter: Treatment Value: 2mM SA vs. No Treatment
  misc_feature: MA Experiment ID: 20000069 Result: Down-regulated in Transcription
  misc_feature: MA Experiment 20000069 PARAMETER Experiment Name: At_100uM_ABA_Mutants_cDNA_P Parameter: Plant Line Value: CS23
  misc_feature: MA Experiment 20000069 PARAMETER Experiment Name: At_100uM_ABA_Mutants_cDNA_P Parameter: Timepoint (hr) Value: 6
  misc_feature: MA Experiment 20000069 PARAMETER Experiment Name: At_100uM_ABA_Mutants_cDNA_P Parameter: Tissue Value: Aerial
  misc_feature: MA Experiment 20000069 PARAMETER Experiment Name: At_100uM_ABA_Mutants_cDNA_P Parameter: Treatment Value: 100uM ABA vs. No Treatment
  misc_feature: MA Experiment ID: 20000070 Result: Down-regulated in Transcription
  misc_feature: MA Experiment 20000070 PARAMETER Experiment Name: At_100uM_ABA_Mutants_cDNA_P Parameter: Plant Line Value: CS24
  misc_feature: MA Experiment 20000070 PARAMETER Experiment Name: At_100uM_ABA_Mutants_cDNA_P Parameter: Timepoint (hr) Value: 6
  misc_feature: MA Experiment 20000070 PARAMETER Experiment Name: At_100uM_ABA_Mutants_cDNA_P Parameter: Tissue Value: Aerial
  misc_feature: MA Experiment 20000070 PARAMETER Experiment Name: At_100uM_ABA_Mutants_cDNA_P Parameter: Treatment Value: 100uM ABA vs. No Treatment
  misc_feature: MA Experiment ID: 20000071 Result: Down-regulated in Transcription
  misc_feature: MA Experiment 20000071 PARAMETER Experiment Name: At_100uM_ABA_Mutants_cDNA_P Parameter: Plant Line Value: CS8104
  misc_feature: MA Experiment 20000071 PARAMETER Experiment Name: At_100uM_ABA_Mutants_cDNA_P Parameter: Timepoint (hr) Value: 6
  misc_feature: MA Experiment 20000071 PARAMETER Experiment Name: At_100uM_ABA_Mutants_cDNA_P Parameter: Tissue Value: Aerial
  misc_feature: MA Experiment 20000071 PARAMETER Experiment Name: At_100uM_ABA_Mutants_cDNA_P Parameter: Treatment Value: 100uM ABA vs. No Treatment
  misc_feature: MA Experiment ID: 20000072 Result: Down-regulated in Transcription
  misc_feature: MA Experiment 20000072 PARAMETER Experiment Name: At_100uM_ABA_Mutants_cDNA_P Parameter: Plant Line Value: CS8105
  misc_feature: MA Experiment 20000072 PARAMETER Experiment Name: At_100uM_ABA_Mutants_cDNA_P Parameter: Timepoint (hr) Value: 6
  misc_feature: MA Experiment 20000072 PARAMETER Experiment Name: At_100uM_ABA_Mutants_cDNA_P Parameter: Tissue Value: Aerial
  misc_feature: MA Experiment 20000072 PARAMETER Experiment Name: At_100uM_ABA_Mutants_cDNA_P Parameter: Treatment Value: 100uM ABA vs. No Treatment
  misc_feature: MA Experiment ID: 20000087 Result: Down-regulated in Transcription
  misc_feature: MA Experiment 20000087 PARAMETER Experiment Name: At_100uM_ABA_Mutants_cDNA_P Parameter: Plant Line Value: WS
  misc_feature: MA Experiment 20000087 PARAMETER Experiment Name: At_100uM_ABA_Mutants_cDNA_P Parameter: Timepoint (hr) Value: 6
  misc_feature: MA Experiment 20000087 PARAMETER Experiment Name: At_100uM_ABA_Mutants_cDNA_P Parameter: Tissue Value: Aerial
  misc_feature: MA Experiment 20000087 PARAMETER Experiment Name: At_100uM_ABA_Mutants_cDNA_P Parameter: Treatment Value: 100uM ABA vs. No Treatment
  misc_feature: MA Experiment ID: 20000113 Result: Down-regulated in Transcription
  misc_feature: MA Experiment 20000113 PARAMETER Experiment Name: At_42deg_Heat_cDNA_P Parameter: Temperature (deg C) Value: 42 vs. 22
  misc_feature: MA Experiment 20000113 PARAMETER Experiment Name: At_42deg_Heat_cDNA_P Parameter: Timepoint (hr) Value: 8
  misc_feature: MA Experiment 20000113 PARAMETER Experiment Name: At_42deg_Heat_cDNA_P Parameter: Tissue Value: Aerial
  misc_feature: MA Experiment ID: 20000117 Result: Down-regulated in Transcription
  misc_feature: MA Experiment 20000117 PARAMETER Experiment Name: At_100uM_ABA_Mutants_cDNA_P Parameter: Plant Line Value: Columbia
  misc_feature: MA Experiment 20000117 PARAMETER Experiment Name: At_100uM_ABA_Mutants_cDNA_P Parameter: Timepoint (hr) Value: 6
  misc_feature: MA Experiment 20000117 PARAMETER Experiment Name: At_100uM_ABA_Mutants_cDNA_P Parameter: Tissue Value: Aerial
  misc_feature: MA Experiment 20000117 PARAMETER Experiment Name: At_100uM_ABA_Mutants_cDNA_P Parameter: Treatment Value: 100uM ABA vs. No Treatment
  misc_feature: MA Experiment ID: 20000171 Result: Down-regulated in Transcription
  misc_feature: MA Experiment 20000171 PARAMETER Experiment Name: At_42deg_Heat_P Parameter: Age (day) Value: 14
  misc_feature: MA Experiment 20000171 PARAMETER Experiment Name: At_42deg_Heat_P Parameter: Organism Value: A. thaliana
  misc_feature: MA Experiment 20000171 PARAMETER Experiment Name: At_42deg_Heat_P Parameter: Plant Line Value: WS
  misc_feature: MA Experiment 20000171 PARAMETER Experiment Name: At_42deg_Heat_P Parameter: Temperature (deg C) Value: 42 vs. 22
  misc_feature: MA Experiment 20000171 PARAMETER Experiment Name: At_42deg_Heat_P Parameter: Timepoint (hr) Value: 1
  misc_feature: MA Experiment 20000171 PARAMETER Experiment Name: At_42deg_Heat_P Parameter: Tissue Value: Aerial
  misc_feature: MA Experiment ID: 20000173 Result: Down-regulated in Transcription
  misc_feature: MA Experiment 20000173 PARAMETER Experiment Name: At_42deg_Heat_P Parameter: Age (day) Value: 14
  misc_feature: MA Experiment 20000173 PARAMETER Experiment Name: At_42deg_Heat_P Parameter: Organism Value: A. thaliana
  misc_feature: MA Experiment 20000173 PARAMETER Experiment Name: At_42deg_Heat_P Parameter: Plant Line Value: WS
  misc_feature: MA Experiment 20000173 PARAMETER Experiment Name: At_42deg_Heat_P Parameter: Temperature (deg C) Value: 42 vs. 22
  misc_feature: MA Experiment 20000173 PARAMETER Experiment Name: At_42deg_Heat_P Parameter: Timepoint (hr) Value: 6
  misc_feature: MA Experiment 20000173 PARAMETER Experiment Name: At_42deg_Heat_P Parameter: Tissue Value: Aerial
  misc_feature: MA Experiment ID: 20000180 Result: Up-regulated in Transcription
  misc_feature: MA Experiment 20000180 PARAMETER Experiment Name: At_Germinating_Seeds_P Parameter: Age (hr) Value: 24 vs. 0
  misc_feature: MA Experiment 20000180 PARAMETER Experiment Name: At_Germinating_Seeds_P Parameter: Tissue Value: Germinating Seeds
  misc_feature: MA Experiment ID: 20000182 Result: Down-regulated in Transcription
  misc_feature: MA Experiment 20000182 PARAMETER Experiment Name: At_2mM_SA_P Parameter: Age (day) Value: 14
  misc_feature: MA Experiment 20000182 PARAMETER Experiment Name: At_2mM_SA_P Parameter: Organism Value: A. thaliana
  misc_feature: MA Experiment 20000182 PARAMETER Experiment Name: At_2mM_SA_P Parameter: Plant Line Value: WS
  misc_feature: MA Experiment 20000182 PARAMETER Experiment Name: At_2mM_SA_P Parameter: Timepoint (hr) Value: 6
  misc_feature: MA Experiment 20000182 PARAMETER Experiment Name: At_2mM_SA_P Parameter: Tissue Value: Aerial
  misc_feature: MA Experiment 20000182 PARAMETER Experiment Name: At_2mM_SA_P Parameter: Treatment Value: 2mM SA vs. No Treatment
  misc_feature: MA Experiment ID: 20000184 Result: Up-regulated in Transcription
  misc_feature: MA Experiment 20000184 PARAMETER Experiment Name: At_Shoots__P Parameter: Age (day) Value: 7
  misc_feature: MA Experiment 20000184 PARAMETER Experiment Name: At_Shoots__P Parameter: Tissue Value: Shoots vs. Whole Plant
  misc_feature: MA Experiment ID: 20000265 Result: Up-regulated in Transcription
  misc_feature: MA Experiment 20000265 PARAMETER Experiment Name: At_Open_Flower_P Parameter: Age (day) Value: 21
  misc_feature: MA Experiment 20000265 PARAMETER Experiment Name: At_Open_Flower_P Parameter: Plant Line Value: WS
  misc_feature: MA Experiment 20000265 PARAMETER Experiment Name: At_Open_Flower_P Parameter: Tissue Value: Closed Flower vs. Whole Plant
  misc_feature: MA Experiment ID: 20000437 Result: Down-regulated in Transcription
  misc_feature: MA Experiment 20000437 PARAMETER Experiment Name: At_Drought_P Parameter: Age (day) Value: 8
  misc_feature: MA Experiment 20000437 PARAMETER Experiment Name: At_Drought_P Parameter: Organism Value: A. thaliana
  misc_feature: MA Experiment 20000437 PARAMETER Experiment Name: At_Drought_P Parameter: Plant Line Value: WS
  misc_feature: MA Experiment 20000437 PARAMETER Experiment Name: At_Drought_P Parameter: Timepoint (hr) Value: 24
  misc_feature: MA Experiment 20000437 PARAMETER Experiment Name: At_Drought_P Parameter: Tissue Value: Whole Plant
  misc_feature: MA Experiment 20000437 PARAMETER Experiment Name: At_Drought_P Parameter: Treatment Value: Drought vs. No Drought
  misc_feature: MA Experiment ID: 20000438 Result: Up-regulated in Transcription
  misc_feature: MA Experiment 20000438 PARAMETER Experiment Name: At_Shoots__P Parameter: Age (day) Value: 14
  misc_feature: MA Experiment 20000438 PARAMETER Experiment Name: At_Shoots__P Parameter: Tissue Value: Shoots vs. Whole Plant
  misc_feature: MA Experiment ID: 20000573 Result: Down-regulated in Transcription
  misc_feature: MA Experiment 20000573 PARAMETER Experiment Name: At_100uM_ABA_Mutants__P Parameter: Organism Value: A. thaliana
  misc_feature: MA Experiment 20000573 PARAMETER Experiment Name: At_100uM_ABA_Mutants__P Parameter: Plant Line Value: CS22 vs. Ler wt
  misc_feature: MA Experiment 20000573 PARAMETER Experiment Name: At_100uM_ABA_Mutants__P Parameter: Timepoint (hr) Value: N/A
  misc_feature: MA Experiment 20000573 PARAMETER Experiment Name: At_100uM_ABA_Mutants__P Parameter: Tissue Value: Whole Plant
  misc_feature: MA Experiment 20000573 PARAMETER Experiment Name: At_100uM_ABA_Mutants__P Parameter: Treatment Value: None
  misc_feature: MA Experiment ID: 20000574 Result: Down-regulated in Transcription
  misc_feature: MA Experiment 20000574 PARAMETER Experiment Name: At_100uM_ABA_Mutants__P Parameter: Organism Value: A. thaliana
  misc_feature: MA Experiment 20000574 PARAMETER Experiment Name: At_100uM_ABA_Mutants__P Parameter: Plant Line Value: CS23 vs. Ler wt
  misc_feature: MA Experiment 20000574 PARAMETER Experiment Name: At_100uM_ABA_Mutants__P Parameter: Timepoint (hr) Value: N/A
  misc_feature: MA Experiment 20000574 PARAMETER Experiment Name: At_100uM_ABA_Mutants__P Parameter: Tissue Value: Whole Plant
  misc_feature: MA Experiment 20000574 PARAMETER Experiment Name: At_100uM_ABA_Mutants__P Parameter: Treatment Value: None
  misc_feature: MA Experiment ID: 20001248 Result: Down-regulated in Transcription
  misc_feature: MA Experiment 20001248 PARAMETER Experiment Name: At_Far-red-induction_P Parameter: Age (day) Value: 7
  misc_feature: MA Experiment 20001248 PARAMETER Experiment Name: At_Far-red-induction_P Parameter: Light Value: Far-red vs. White
  misc_feature: MA Experiment 20001248 PARAMETER Experiment Name: At_Far-red-induction_P Parameter: Organism Value: A. thaliana
  misc_feature: MA Experiment 20001248 PARAMETER Experiment Name: At_Far-red-induction_P Parameter: Plant Line Value: Columbia
  misc_feature: MA Experiment 20001248 PARAMETER Experiment Name: At_Far-red-induction_P Parameter: Timepoint (hr) Value: 4
  misc_feature: MA Experiment 20001248 PARAMETER Experiment Name: At_Far-red-induction_P Parameter: Tissue Value: Whole Plant
  misc_feature: MA Experiment ID: 20001904 Result: Down-regulated in Transcription
  misc_feature: MA Experiment 20001904 PARAMETER Experiment Name: At_Drought_Reproduction_P Parameter: Age (day) Value: 37
  misc_feature: MA Experiment 20001904 PARAMETER Experiment Name: At_Drought_Reproduction_P Parameter: Organism Value: A. thaliana
  misc_feature: MA Experiment 20001904 PARAMETER Experiment Name: At_Drought_Reproduction_P Parameter: Plant Line Value: WS
  misc_feature: MA Experiment 20001904 PARAMETER Experiment Name: At_Drought_Reproduction_P Parameter: Timepoint (day) Value: 7
  misc_feature: MA Experiment 20001904 PARAMETER Experiment Name: At_Drought_Reproduction_P Parameter: Tissue Value: Rosettes
  misc_feature: MA Experiment 20001904 PARAMETER Experiment Name: At_Drought_Reproduction_P Parameter: Treatment Value: Drought vs. No Drought
  misc_feature: MA Experiment ID: 20001910 Result: Down-regulated in Transcription
  misc_feature: MA Experiment 20001910 PARAMETER Experiment Name: At_Drought_Reproduction_P Parameter: Age (day) Value: 37
  misc_feature: MA Experiment 20001910 PARAMETER Experiment Name: At_Drought_Reproduction_P Parameter: Organism Value: A. thaliana
  misc_feature: MA Experiment 20001910 PARAMETER Experiment Name: At_Drought_Reproduction_P Parameter: Plant Line Value: WS
  misc_feature: MA Experiment 20001910 PARAMETER Experiment Name: At_Drought_Reproduction_P Parameter: Timepoint (day) Value: 7
  misc_feature: MA Experiment 20001910 PARAMETER Experiment Name: At_Drought_Reproduction_P Parameter: Tissue Value: Flowers
  misc_feature: MA Experiment 20001910 PARAMETER Experiment Name: At_Drought_Reproduction_P Parameter: Treatment Value: Drought vs. No Drought
attatagtctcgatgaagatgctgagacttagaaagaagcaacatttggtgtttctactatgcgtgtggtgtttggtggtggattggagcaaagcagaaacagaggaaagtgatggaagtcccatggagaaaacagagcaagctgctctatactctaccattcaaggctttgttggtgaatcttggaatggctcttatctttatcctgacccttgtggctggactcctatccagggtgtgacttgtgatatctatgatgagctttggtatgtaactgctctaagctttgggactatgaaagacaactctcttgcttgttctgaaagtccagtgatcagaccacaactctttgagctcaagcacctcaagtctctctctcttttcaactgcttcacaacgcctaaccgatatctagcttcaatctccgatgaaaagtggttggatctctctaaaagcttggagagacttgagatcagatcaaacccgggactgataggtgaactcccttctgtcatcactaacctcaccaaccttcaatctctggtggtgctagaaaacaagttaacaggtccattgccagtgaatttggccaagttaaccagattgagacgtttagtactgtctggaaaccggttcacagggagaatacctgaggtctacgggttaaccggattgttgatattggatgtgagcaggaatttcttatctggggcgttgcctttaagcgttggaggattgtattctctgctgaaacttgatcttagtaacaattacttggaaggaaagttacctagagagctagagtccttgaagaatctcactctattggacttgagaaacaacagattatcaggtgggttgagtaaagagatccaagagatgacttctttggtagaactggttctgtccaataatcgcctagccggggacttgacaggaataaagtggagaaatctgaagaatttagtggttcttgatctctccaacacaggcttaaaaggggagattcctggttcaatcttggagctcaagaaactgaggtttttgggtttgagcaacaacaatctcggaggcaaactcattccacaaatggaaaccgaaatgcctagtctcagcgcgctttacgtgaatggaaataacatcagcggagagttggaattctctaggtacttttatgagagaatgggaaggatacttggtgtttgggggaaccctaatctgtgttacaacggagatgagaccaagaaccttagcgatcatgttcctttcggagttaaccaatgtaagagaattaaggcagataaatattagaaccctcgttctgaatcaaagggtttgtgataacaaaaacttggaatgatacaaagctgtggtcttttcaattttgttattgcatcttatttctatagc

SEQ ID NO: 27330 - protein, 436 aa, Arabidopsis thaliana
  peptide (1)..(436): Ceres Seq. ID no. 13495788
  misc_feature (345)..(369): Pfam Name: Leucine Rich Repeat Pfam Description: Leucine Rich Repeat
  misc_feature (34)..(412): Homolog of NCBI NO: 26452151 NR Description: GPI-anchored protein [Arabidopsis thaliana]
  misc_feature (34)..(412): Homolog of NCBI NO: 15220050 NR Description: leucine rich repeat protein family [Arabidopsis
  misc_feature (4)..(429): Homolog of NCBI NO: 34894182 NR Description: P0439B06.12 [Oryza sativa (japonica
  misc_feature (42)..(428): Homolog of NCBI NO: 15222215 NR Description: leucine rich repeat protein family [Arabidopsis
  misc_feature (17)..(421): Homolog of NCBI NO: 15236148 NR Description: leucine rich repeat protein family (fragment)
  misc_feature (17)..(421): Homolog of NCBI NO: 7487680 NR Description: hypothetical protein T5F17.10 - Arabidopsis
  misc_feature (35)..(428): Homolog of NCBI NO: 15228004 NR Description: leucine rich repeat protein family [Arabidopsis
  misc_feature (42)..(434): Homolog of NCBI NO: 11994758 NR Description: contains similarity to elicitor-inducible
  misc_feature (15)..(434): Homolog of NCBI NO: 15230865 NR Description: leucine rich repeat protein family [Arabidopsis
  misc_feature (5)..(436): Homolog of NCBI NO: 18409119 NR Description: leucine rich repeat protein family [Arabidopsis
IIVSMKMLRLRKKQHLVFLLCVWCLVVDWSKAETEESDGSPMEKTEQAALYSTIQGFVGESWNGSYLYPDPCGWTPIQGVTCDIYDELWYVTALSFGTMKDNSLACSESPVIRPQLFELKHLKSLSLFNCFTTPNRYLASISDEKWLDLSKSLERLEIRSNPGLIGELPSVITNLTNLQSLVVLENKLTGPLPVNLAKLTRLRRLVLSGNRFTGRIPEVYGLTGLLILDVSRNFLSGALPLSVGGLYSLLKLDLSNNYLEGKLPRELESLKNLTLLDLRNNRLSGGLSKEIQEMTSLVELVLSNNRLAGDLTGIKWRNLKNLVVLDLSNTGLKGEIPGSILELKKLRFLGLSNNNLGGKLIPQMETEMPSLSALYVNGNNISGELEFSRYFYERMGRILGVWGNPNLCYNGDETKNLSDHVPFGVNQCKRIKADKY

SEQ ID NO: 27331 - protein, 432 aa, Arabidopsis thaliana
  peptide (1)..(432): Ceres Seq. ID no. 13495789
  misc_feature (341)..(365): Pfam Name: Leucine Rich Repeat Pfam Description: Leucine Rich Repeat
  misc_feature (31)..(424): Homolog of NCBI NO: 15228004 NR Description: leucine rich repeat protein family [Arabidopsis
  misc_feature (13)..(417): Homolog of NCBI NO: 15236148 NR Description: leucine rich repeat protein family (fragment)
  misc_feature (13)..(417): Homolog of NCBI NO: 7487680 NR Description: hypothetical protein T5F17.10 - Arabidopsis
  misc_feature (30)..(408): Homolog of NCBI NO: 26452151 NR Description: GPI-anchored protein [Arabidopsis thaliana]
  misc_feature (30)..(408): Homolog of NCBI NO: 15220050 NR Description: leucine rich repeat protein family [Arabidopsis
  misc_feature (1)..(425): Homolog of NCBI NO: 34894182 NR Description: P0439B06.12 [Oryza sativa (japonica
  misc_feature (38)..(424): Homolog of NCBI NO: 15222215 NR Description: leucine rich repeat protein family [Arabidopsis
  misc_feature (38)..(430): Homolog of NCBI NO: 11994758 NR Description: contains similarity to elicitor-inducible
  misc_feature (11)..(430): Homolog of NCBI NO: 15230865 NR Description: leucine rich repeat protein family [Arabidopsis
  misc_feature (1)..(432): Homolog of NCBI NO: 18409119 NR Description: leucine rich repeat protein family [Arabidopsis
MKMLRLRKKQHLVFLLCVWCLVVDWSKAETEESDGSPMEKTEQAALYSTIQGFVGESWNGSYLYPDPCGWTPIQGVTCDIYDELWYVTALSFGTMKDNSLACSESPVIRPQLFELKHLKSLSLFNCFTTPNRYLASISDEKWLDLSKSLERLEIRSNPGLIGELPSVITNLTNLQSLVVLENKLTGPLPVNLAKLTRLRRLVLSGNRFTGRIPEVYGLTGLLILDVSRNFLSGALPLSVGGLYSLLKLDLSNNYLEGKLPRELESLKNLTLLDLRNNRLSGGLSKEIQEMTSLVELVLSNNRLAGDLTGIKWRNLKNLVVLDLSNTGLKGEIPGSILELKKLRFLGLSNNNLGGKLIPQMETEMPSLSALYVNGNNISGELEFSRYFYERMGRILGVWGNPNLCYNGDETKNLSDHVPFGVNQCKRIKADKY

SEQ ID NO: 27332 - protein, 430 aa, Arabidopsis thaliana
  peptide (1)..(430): Ceres Seq. ID no. 13495790
  misc_feature (339)..(363): Pfam Name: Leucine Rich Repeat Pfam Description: Leucine Rich Repeat
  misc_feature (29)..(422): Homolog of NCBI NO: 15228004 NR Description: leucine rich repeat protein family [Arabidopsis
  misc_feature (11)..(415): Homolog of NCBI NO: 15236148 NR Description: leucine rich repeat protein family (fragment)
  misc_feature (11)..(415): Homolog of NCBI NO: 7487680 NR Description: hypothetical protein T5F17.10 - Arabidopsis
  misc_feature (28)..(406): Homolog of NCBI NO: 26452151 NR Description: GPI-anchored protein [Arabidopsis thaliana]
  misc_feature (28)..(406): Homolog of NCBI NO: 15220050 NR Description: leucine rich repeat protein family [Arabidopsis
  misc_feature (1)..(423): Homolog of NCBI NO: 34894182 NR Description: P0439B06.12 [Oryza sativa (japonica
  misc_feature (36)..(422): Homolog of NCBI NO: 15222215 NR Description: leucine rich repeat protein family [Arabidopsis
  misc_feature (36)..(428): Homolog of NCBI NO: 11994758 NR Description: contains similarity to elicitor-inducible
  misc_feature (9)..(428): Homolog of NCBI NO: 15230865 NR Description: leucine rich repeat protein family [Arabidopsis
  misc_feature (1)..(430): Homolog of NCBI NO: 18409119 NR Description: leucine rich repeat protein family [Arabidopsis
MLRLRKKQHLVFLLCVWCLVVDWSKAETEESDGSPMEKTEQAALYSTIQGFVGESWNGSYLYPDPCGWTPIQGVTCDIYDELWYVTALSFGTMKDNSLACSESPVIRPQLFELKHLKSLSLFNCFTTPNRYLASISDEKWLDLSKSLERLEIRSNPGLIGELPSVITNLTNLQSLVVLENKLTGPLPVNLAKLTRLRRLVLSGNRFTGRIPEVYGLTGLLILDVSRNFLSGALPLSVGGLYSLLKLDLSNNYLEGKLPRELESLKNLTLLDLRNNRLSGGLSKEIQEMTSLVELVLSNNRLAGDLTGIKWRNLKNLVVLDLSNTGLKGEIPGSILELKKLRFLGLSNNNLGGKLIPQMETEMPSLSALYVNGNNISGELEFSRYFYERMGRILGVWGNPNLCYNGDETKNLSDHVPFGVNQCKRIKADKY

SEQ ID NO: 27333 - DNA, 1283 bp, Arabidopsis thaliana
  misc_feature (1)..(1283): Ceres Seq. ID no. 13493966
  misc_feature: MA Experiment ID: 108434 Result: Down-regulated in Transcription
  misc_feature: MA Experiment 108434 PARAMETER Experiment Name: At_Root_Tips_cDNA_P Parameter: Tissue Value: Root Tips
  misc_feature: MA Experiment ID: 108462 Result: Up-regulated in Transcription
  misc_feature: MA Experiment 108462 PARAMETER Experiment Name: At_Germinating_Seeds_cDNA_P Parameter: Age (day) Value: 2 vs. 0
  misc_feature: MA Experiment 108462 PARAMETER Experiment Name: At_Germinating_Seeds_cDNA_P Parameter: Tissue Value: Germinating Seeds
  misc_feature: MA Experiment ID: 108463 Result: Up-regulated in Transcription
  misc_feature: MA Experiment 108463 PARAMETER Experiment Name: At_Germinating_Seeds_cDNA_P Parameter: Age (day) Value: 3 vs. 0
  misc_feature: MA Experiment 108463 PARAMETER Experiment Name: At_Germinating_Seeds_cDNA_P Parameter: Tissue Value: Germinating Seeds
  misc_feature: MA Experiment ID: 108501 Result: Up-regulated in Transcription
  misc_feature: MA Experiment 108501 PARAMETER Experiment Name: At_ap2_floral_buds_cDNA_P Parameter: Plant Line Value: ap2 (Ler.)
  misc_feature: MA Experiment 108501 PARAMETER Experiment Name: At_ap2_floral_buds_cDNA_P Parameter: Tissue Value: Closed Flower
  misc_feature: MA Experiment ID: 108577 Result: Up-regulated in Transcription
  misc_feature: MA Experiment 108577 PARAMETER Experiment Name: At_42deg_Heat_cDNA_P Parameter: Temperature (deg C) Value: 42 vs. 22
  misc_feature: MA Experiment 108577 PARAMETER Experiment Name: At_42deg_Heat_cDNA_P Parameter: Timepoint (hr) Value: 6
  misc_feature: MA Experiment 108577 PARAMETER Experiment Name: At_42deg_Heat_cDNA_P Parameter: Tissue Value: Aerial
  misc_feature: MA Experiment ID: 108595 Result: Down-regulated in Transcription
  misc_feature: MA Experiment 108595 PARAMETER Experiment Name: At_Ler-pi_Ovule_cDNA_P Parameter: Plant Line Value: null
  misc_feature: MA Experiment ID: 20000111 Result: Up-regulated in Transcription
  misc_feature: MA Experiment 20000111 PARAMETER Experiment Name: At_42deg_Heat_cDNA_P Parameter: Temperature (deg C) Value: 42 vs. 22
  misc_feature: MA Experiment 20000111 PARAMETER Experiment Name: At_42deg_Heat_cDNA_P Parameter: Timepoint (hr) Value: 6
  misc_feature: MA Experiment 20000111 PARAMETER Experiment Name: At_42deg_Heat_cDNA_P Parameter: Tissue Value: Aerial
  misc_feature: MA Experiment ID: 20000173 Result: Up-regulated in Transcription
  misc_feature: MA Experiment 20000173 PARAMETER Experiment Name: At_42deg_Heat_P Parameter: Age (day) Value: 14
  misc_feature: MA Experiment 20000173 PARAMETER Experiment Name: At_42deg_Heat_P Parameter: Organism Value: A. thaliana
  misc_feature: MA Experiment 20000173 PARAMETER Experiment Name: At_42deg_Heat_P Parameter: Plant Line Value: WS
  misc_feature: MA Experiment 20000173 PARAMETER Experiment Name: At_42deg_Heat_P Parameter: Temperature (deg C) Value: 42 vs. 22
  misc_feature: MA Experiment 20000173 PARAMETER Experiment Name: At_42deg_Heat_P Parameter: Timepoint (hr) Value: 6
  misc_feature: MA Experiment 20000173 PARAMETER Experiment Name: At_42deg_Heat_P Parameter: Tissue Value: Aerial
  misc_feature: MA Experiment ID: 20000180 Result: Up-regulated in Transcription
  misc_feature: MA Experiment 20000180 PARAMETER Experiment Name: At_Germinating_Seeds_P Parameter: Age (hr) Value: 24 vs. 0
  misc_feature: MA Experiment 20000180 PARAMETER Experiment Name: At_Germinating_Seeds_P Parameter: Tissue Value: Germinating Seeds
  misc_feature: MA Experiment ID: 20000184 Result: Up-regulated in Transcription
  misc_feature: MA Experiment 20000184 PARAMETER Experiment Name: At_Shoots__P Parameter: Age (day) Value: 7
  misc_feature: MA Experiment 20000184 PARAMETER Experiment Name: At_Shoots__P Parameter: Tissue Value: Shoots vs. Whole Plant
  misc_feature: MA Experiment ID: 20000224 Result: Down-regulated in Transcription
  misc_feature: MA Experiment ID: 20000438 Result: Up-regulated in Transcription
  misc_feature: MA Experiment 20000438 PARAMETER Experiment Name: At_Shoots__P Parameter: Age (day) Value: 14
  misc_feature: MA Experiment 20000438 PARAMETER Experiment Name: At_Shoots__P Parameter: Tissue Value: Shoots vs. Whole Plant
  misc_feature: MA Experiment ID: 20000441 Result: Up-regulated in Transcription
  misc_feature: MA Experiment 20000441 PARAMETER Experiment Name: At_1uM_BR-BRZ__P Parameter: Tissue Value: Shoot Apices
  misc_feature: MA Experiment 20000441 PARAMETER Experiment Name: At_1uM_BR-BRZ__P Parameter: Treatment Value: 1uM BR vs. No Treatment
  misc_feature: MA Experiment ID: 20000443 Result: Up-regulated in Transcription
  misc_feature: MA Experiment 20000443 PARAMETER Experiment Name: At_1uM_BR-BRZ__P Parameter: Tissue Value: Shoot Apices
  misc_feature: MA Experiment 20000443 PARAMETER Experiment Name: At_1uM_BR-BRZ__P Parameter: Treatment Value: 1uM BRZ vs. No Treatment
  misc_feature: MA Experiment ID: 20001248 Result: Down-regulated in Transcription
  misc_feature: MA Experiment 20001248 PARAMETER Experiment Name: At_Far-red-induction_P Parameter: Age (day) Value: 7
  misc_feature: MA Experiment 20001248 PARAMETER Experiment Name: At_Far-red-induction_P Parameter: Light Value: Far-red vs. White
  misc_feature: MA Experiment 20001248 PARAMETER Experiment Name: At_Far-red-induction_P Parameter: Organism Value: A. thaliana
  misc_feature: MA Experiment 20001248 PARAMETER Experiment Name: At_Far-red-induction_P Parameter: Plant Line Value: Columbia
  misc_feature: MA Experiment 20001248 PARAMETER Experiment Name: At_Far-red-induction_P Parameter: Timepoint (hr) Value: 4
  misc_feature: MA Experiment 20001248 PARAMETER Experiment Name: At_Far-red-induction_P Parameter: Tissue Value: Whole Plant
  misc_feature: MA Experiment ID: 20001560 Result: Down-regulated in Transcription
  misc_feature: MA Experiment 20001560 PARAMETER Experiment Name: At_Drought_Soil_Dry_P Parameter: Age (day) Value: 28
  misc_feature: MA Experiment 20001560 PARAMETER Experiment Name: At_Drought_Soil_Dry_P Parameter: Organism Value: A. thaliana
  misc_feature: MA Experiment 20001560 PARAMETER Experiment Name: At_Drought_Soil_Dry_P Parameter: Plant Line Value: WS
  misc_feature: MA Experiment 20001560 PARAMETER Experiment Name: At_Drought_Soil_Dry_P Parameter: Post Timepoint (hr) Value: None
  misc_feature: MA Experiment 20001560 PARAMETER Experiment Name: At_Drought_Soil_Dry_P Parameter: Post-Treatment Value: None
  misc_feature: MA Experiment 20001560 PARAMETER Experiment Name: At_Drought_Soil_Dry_P Parameter: Timepoint (day) Value: 14
  misc_feature: MA Experiment 20001560 PARAMETER Experiment Name: At_Drought_Soil_Dry_P Parameter: Treatment Value: Drought vs. No Drought
  misc_feature: MA Experiment ID: 20001911 Result: Up-regulated in Transcription
  misc_feature: MA Experiment 20001911 PARAMETER Experiment Name: At_Drought_Reproduction_P Parameter: Age (day) Value: 40
  misc_feature: MA Experiment 20001911 PARAMETER Experiment Name: At_Drought_Reproduction_P Parameter: Organism Value: A. thaliana
  misc_feature: MA Experiment 20001911 PARAMETER Experiment Name: At_Drought_Reproduction_P Parameter: Plant Line Value: WS
  misc_feature: MA Experiment 20001911 PARAMETER Experiment Name: At_Drought_Reproduction_P Parameter: Timepoint (day) Value: 10
  misc_feature: MA Experiment 20001911 PARAMETER Experiment Name: At_Drought_Reproduction_P Parameter: Tissue Value: Flowers
  misc_feature: MA Experiment 20001911 PARAMETER Experiment Name: At_Drought_Reproduction_P Parameter: Treatment Value: Drought vs. No Drought
tgacaaccactttttatatgatataccgcttttaccccttaagcctctccgcgtaaaaccgagaacaaaatcttaagcaccgttgttccgattcagagatcatcgtcgtcgtcgttcagaaaccttcaaaaatggctggaaaactcatgcacgctcttcagtacaactcttacggtggtggcgccgccggattagagcatgttcaagttccggttccaacaccaaagagtaatgaggtttgcctgaaattagaagctactagtctaaaccctgttgattggaaaattcagaaaggaatgatccgcccatttctgccccgcaagttcccctgcattccagctactgatgttgctggagaggtcgttgaggttggatcaggagtaaaaaattttaaggctggtgacaaagttgtagcggttcttagccatctaggtggaggtggacttgctgagttcgctgttgcaaccgagaagctgactgtcaaaagacctcaagaagtgggagcagctgaagcagcagctttacctgtggcgggtctaaccgctctccaagctcttactaatcctgcggggttgaagctggatggtacaggcaagaaggcgaacatcctggtcacagcagcatctggtggggttggtcactatgcagtccagctggcaaaacttgcaaatgctcacgtaaccgctacatgtggtgcccggaacatagagtttgtcaaatcgttgggagcggatgaggttctcgactacaagactcccgagggagccgccctcaagagtccgtcgggtaaaaaatatgacgctgtggtccattgtgcaaacgggattccattttcggtattcgaaccaaatttgtcggaaaacgggaaggtgatagacatcacaccggggcctaatgcaatgtggacttatgcggttaagaaaataaccatgtcaaagaagcagttagtgccactcttgttgatcccaaaagctgagaatttggagtttatggtgaatctagtgaaagaagggaaagtgaagacagtgattgactcaaagcatcctttgagcaaagcggaggatgcttgggccaaaagtatcgatggtcatgctactgggaagatcattgtcgagccataagagcgttgtagccatctttgactgtctgtgaatgtgataatagatgttaaaagtttgcgtaccgtttacagaatgttttatgttgttttgtttaatatacccgagtatgtcgaaagttacatgaaaagaaaatttggatgaaataaataatacttgttaggt

SEQ ID NO: 27334 - protein, 329 aa, Arabidopsis thaliana
  peptide (1)..(329): Ceres Seq. ID no. 13493967
  misc_feature (6)..(328): Homolog of NCBI NO: 29376225 NR Description: oxidoreductase, zinc-binding [Enterococcus
  misc_feature (6)..(327): Homolog of NCBI NO: 23039352 NR Description: hypothetical protein [Trichodesmium erythraeum
  misc_feature (6)..(328): Homolog of NCBI NO: 38346450 NR Description: OSJNBa0018J19.11 [Oryza sativa (japonica
  misc_feature (6)..(328): Homolog of NCBI NO: 38346442 NR Description: OSJNBa0018J19.3 [Oryza sativa (japonica
  misc_feature (6)..(328): Homolog of NCBI NO: 38346453 NR Description: OSJNBa0018J19.14 [Oryza sativa (japonica
  misc_feature (1)..(281): Homolog of NCBI NO: 5701738 NR Description: LEDI-4 protein [Lithospermum erythrorhizon]
  misc_feature (6)..(329): Homolog of NCBI NO: 38016531 NR Description: fiber quinone-oxidoreductase [Gossypium
  misc_feature (1)..(329): Homolog of NCBI NO: 12484050 NR Description: quinone-oxidoreductase QR1 [Triphysaria
  misc_feature (1)..(329): Homolog of NCBI NO: 24370984 NR Description: quinone-oxidoreductase homologue [Spinacia
  misc_feature (1)..(329): Homolog of NCBI NO: 15235549 NR Description: oxidoreductase, zinc-binding dehydrogenase family
MAGKLMHALQYNSYGGGAAGLEHVQVPVPTPKSNEVCLKLEATSLNPVDWKIQKGMIRPFLPRKFPCIPATDVAGEVVEVGSGVKNFKAGDKVVAVLSHLGGGGLAEFAVATEKLTVKRPQEVGAAEAAALPVAGLTALQALTNPAGLKLDGTGKKANILVTAASGGVGHYAVQLAKLANAHVTATCGARNIEFVKSLGADEVLDYKTPEGAALKSPSGKKYDAVVHCANGIPFSVFEPNLSENGKVIDITPGPNAMWTYAVKKITMSKKQLVPLLLIPKAENLEFMVNLVKEGKVKTVIDSKHPLSKAEDAWAKSIDGHATGKIIVEP

SEQ ID NO: 27335 - protein, 324 aa, Arabidopsis thaliana
  peptide (1)..(324): Ceres Seq. ID no. 13493968
  misc_feature (1)..(323): Homolog of NCBI NO: 29376225 NR Description: oxidoreductase, zinc-binding [Enterococcus
  misc_feature (1)..(322): Homolog of NCBI NO: 23039352 NR Description: hypothetical protein [Trichodesmium erythraeum
  misc_feature (1)..(323): Homolog of NCBI NO: 38346450 NR Description: OSJNBa0018J19.11 [Oryza sativa (japonica
  misc_feature (1)..(323): Homolog of NCBI NO: 38346442 NR Description: OSJNBa0018J19.3 [Oryza sativa (japonica
  misc_feature (1)..(323): Homolog of NCBI NO: 38346453 NR Description: OSJNBa0018J19.14 [Oryza sativa (japonica
  misc_feature (1)..(276): Homolog of NCBI NO: 5701738 NR Description: LEDI-4 protein [Lithospermum erythrorhizon]
  misc_feature (1)..(324): Homolog of NCBI NO: 38016531 NR Description: fiber quinone-oxidoreductase [Gossypium
  misc_feature (1)..(324): Homolog of NCBI NO: 12484050 NR Description: quinone-oxidoreductase QR1 [Triphysaria
  misc_feature (1)..(324): Homolog of NCBI NO: 24370984 NR Description: quinone-oxidoreductase homologue [Spinacia
  misc_feature (1)..(324): Homolog of NCBI NO: 15235549 NR Description: oxidoreductase, zinc-binding dehydrogenase family
MHALQYNSYGGGAAGLEHVQVPVPTPKSNEVCLKLEATSLNPVDWKIQKGMIRPFLPRKFPCIPATDVAGEVVEVGSGVKNFKAGDKVVAVLSHLGGGGLAEFAVATEKLTVKRPQEVGAAEAAALPVAGLTALQALTNPAGLKLDGTGKKANILVTAASGGVGHYAVQLAKLANAHVTATCGARNIEFVKSLGADEVLDYKTPEGAALKSPSGKKYDAVVHCANGIPFSVFEPNLSENGKVIDITPGPNAMWTYAVKKITMSKKQLVPLLLIPKAENLEFMVNLVKEGKVKTVIDSKHPLSKAEDAWAKSIDGHATGKIIVEP

SEQ ID NO: 27336 - protein, 274 aa, Arabidopsis thaliana
  peptide (1)..(274): Ceres Seq. ID no. 13493969
  misc_feature (1)..(273): Homolog of NCBI NO: 29376225 NR Description: oxidoreductase, zinc-binding [Enterococcus
  misc_feature (1)..(272): Homolog of NCBI NO: 23039352 NR Description: hypothetical protein [Trichodesmium erythraeum
  misc_feature (1)..(273): Homolog of NCBI NO: 38346450 NR Description: OSJNBa0018J19.11 [Oryza sativa (japonica
  misc_feature (1)..(273): Homolog of NCBI NO: 38346442 NR Description: OSJNBa0018J19.3 [Oryza sativa (japonica
  misc_feature (1)..(273): Homolog of NCBI NO: 38346453 NR Description: OSJNBa0018J19.14 [Oryza sativa (japonica
  misc_feature (1)..(226): Homolog of NCBI NO: 5701738 NR Description: LEDI-4 protein [Lithospermum erythrorhizon]
  misc_feature (1)..(274): Homolog of NCBI NO: 38016531 NR Description: fiber quinone-oxidoreductase [Gossypium
  misc_feature (1)..(274): Homolog of NCBI NO: 12484050 NR Description: quinone-oxidoreductase QR1 [Triphysaria
  misc_feature (1)..(274): Homolog of NCBI NO: 24370984 NR Description: quinone-oxidoreductase homologue [Spinacia
  misc_feature (1)..(274): Homolog of NCBI NO: 15235549 NR Description: oxidoreductase, zinc-binding dehydrogenase family
MIRPFLPRKFPCIPATDVAGEVVEVGSGVKNFKAGDKVVAVLSHLGGGGLAEFAVATEKLTVKRPQEVGAAEAAALPVAGLTALQALTNPAGLKLDGTGKKANILVTAASGGVGHYAVQLAKLANAHVTATCGARNIEFVKSLGADEVLDYKTPEGAALKSPSGKKYDAVVHCANGIPFSVFEPNLSENGKVIDITPGPNAMWTYAVKKITMSKKQLVPLLLIPKAENLEFMVNLVKEGKVKTVIDSKHPLSKAEDAWAKSIDGHATGKIIVEP

SEQ ID NO: 27337 - DNA, 1288 bp, Arabidopsis thaliana
  misc_feature (1)..(1288): Ceres Seq. ID no. 12421695
  misc_feature: MA Experiment ID: 108469 Result: Up-regulated in Transcription
  misc_feature: MA Experiment ID: 108573 Result: Up-regulated in Transcription
  misc_feature: MA Experiment 108573 PARAMETER Experiment Name: At_Drought_cDNA_P Parameter: Timepoint (hr) Value: 6
  misc_feature: MA Experiment 108573 PARAMETER Experiment Name: At_Drought_cDNA_P Parameter: Tissue Value: Aerial
  misc_feature: MA Experiment 108573 PARAMETER Experiment Name: At_Drought_cDNA_P Parameter: Treatment Value: Drought vs. No Drought
  misc_feature: MA Experiment ID: 108585 Result: Up-regulated in Transcription
  misc_feature: MA Experiment 108585 PARAMETER Experiment Name: At_5mM_NaNP_cDNA_P Parameter: Timepoint (hr) Value: 6
  misc_feature: MA Experiment 108585 PARAMETER Experiment Name: At_5mM_NaNP_cDNA_P Parameter: Tissue Value: Aerial
  misc_feature: MA Experiment 108585 PARAMETER Experiment Name: At_5mM_NaNP_cDNA_P Parameter: Treatment Value: null
  misc_feature: MA Experiment ID: 108605 Result: Up-regulated in Transcription
  misc_feature: MA Experiment 108605 PARAMETER Experiment Name: At_100uM_ABA_cDNA_P Parameter: Timepoint (hr) Value: 6
  misc_feature: MA Experiment 108605 PARAMETER Experiment Name: At_100uM_ABA_cDNA_P Parameter: Tissue Value: Aerial
  misc_feature: MA Experiment 108605 PARAMETER Experiment Name: At_100uM_ABA_cDNA_P Parameter: Treatment Value: 100uM ABA vs. No Treatment
  misc_feature: MA Experiment ID: 108607 Result: Up-regulated in Transcription
  misc_feature: MA Experiment 108607 PARAMETER Experiment Name: At_100uM_ABA_cDNA_P Parameter: Timepoint (hr) Value: 4
  misc_feature: MA Experiment 108607 PARAMETER Experiment Name: At_100uM_ABA_cDNA_P Parameter: Tissue Value: Aerial
  misc_feature: MA Experiment 108607 PARAMETER Experiment Name: At_100uM_ABA_cDNA_P Parameter: Treatment Value: 100uM ABA vs. No Treatment
  misc_feature: MA Experiment ID: 108668 Result: Up-regulated in Transcription
  misc_feature: MA Experiment 108668 PARAMETER Experiment Name: At_2mM_SA_cDNA_P Parameter: Plant Line Value: WS
  misc_feature: MA Experiment 108668 PARAMETER Experiment Name: At_2mM_SA_cDNA_P Parameter: Timepoint (hr) Value: 6
  misc_feature: MA Experiment 108668 PARAMETER Experiment Name: At_2mM_SA_cDNA_P Parameter: Treatment Value: 2mM SA vs. No Treatment
  misc_feature: MA Experiment ID: 20000069 Result: Up-regulated in Transcription
  misc_feature: MA Experiment 20000069 PARAMETER Experiment Name: At_100uM_ABA_Mutants_cDNA_P Parameter: Plant Line Value: CS23
  misc_feature: MA Experiment 20000069 PARAMETER Experiment Name: At_100uM_ABA_Mutants_cDNA_P Parameter: Timepoint (hr) Value: 6
  misc_feature: MA Experiment 20000069 PARAMETER Experiment Name: At_100uM_ABA_Mutants_cDNA_P Parameter: Tissue Value: Aerial
  misc_feature: MA Experiment 20000069 PARAMETER Experiment Name: At_100uM_ABA_Mutants_cDNA_P Parameter: Treatment Value: 100uM ABA vs. No Treatment
  misc_feature: MA Experiment ID: 20000070 Result: Up-regulated in Transcription
  misc_feature: MA Experiment 20000070 PARAMETER Experiment Name: At_100uM_ABA_Mutants_cDNA_P Parameter: Plant Line Value: CS24
  misc_feature: MA Experiment 20000070 PARAMETER Experiment Name: At_100uM_ABA_Mutants_cDNA_P Parameter: Timepoint (hr) Value: 6
  misc_feature: MA Experiment 20000070 PARAMETER Experiment Name: At_100uM_ABA_Mutants_cDNA_P Parameter: Tissue Value: Aerial
  misc_feature: MA Experiment 20000070 PARAMETER Experiment Name: At_100uM_ABA_Mutants_cDNA_P Parameter: Treatment Value: 100uM ABA vs. No Treatment
  misc_feature: MA Experiment ID: 20000072 Result: Up-regulated in Transcription
  misc_feature: MA Experiment 20000072 PARAMETER Experiment Name: At_100uM_ABA_Mutants_cDNA_P Parameter: Plant Line Value: CS8105
  misc_feature: MA Experiment 20000072 PARAMETER Experiment Name: At_100uM_ABA_Mutants_cDNA_P Parameter: Timepoint (hr) Value: 6
  misc_feature: MA Experiment 20000072 PARAMETER Experiment Name: At_100uM_ABA_Mutants_cDNA_P Parameter: Tissue Value: Aerial
  misc_feature: MA Experiment 20000072 PARAMETER Experiment Name: At_100uM_ABA_Mutants_cDNA_P Parameter: Treatment Value: 100uM ABA vs. No Treatment
  misc_feature: MA Experiment ID: 20000086 Result: Up-regulated in Transcription
  misc_feature: MA Experiment 20000086 PARAMETER Experiment Name: At_100uM_ABA_Mutants_cDNA_P Parameter: Plant Line Value: CS22
  misc_feature: MA Experiment 20000086 PARAMETER Experiment Name: At_100uM_ABA_Mutants_cDNA_P Parameter: Timepoint (hr) Value: 6
  misc_feature: MA Experiment 20000086 PARAMETER Experiment Name: At_100uM_ABA_Mutants_cDNA_P Parameter: Tissue Value: Aerial
  misc_feature: MA Experiment 20000086 PARAMETER Experiment Name: At_100uM_ABA_Mutants_cDNA_P Parameter: Treatment Value: 100uM ABA vs. No Treatment
  misc_feature: MA Experiment ID: 20000087 Result: Up-regulated in Transcription
  misc_feature: MA Experiment 20000087 PARAMETER Experiment Name: At_100uM_ABA_Mutants_cDNA_P Parameter: Plant Line Value: WS
  misc_feature: MA Experiment 20000087 PARAMETER Experiment Name: At_100uM_ABA_Mutants_cDNA_P Parameter: Timepoint (hr) Value: 6
  misc_feature: MA Experiment 20000087 PARAMETER Experiment Name: At_100uM_ABA_Mutants_cDNA_P Parameter: Tissue Value: Aerial
  misc_feature: MA Experiment 20000087 PARAMETER Experiment Name: At_100uM_ABA_Mutants_cDNA_P Parameter: Treatment Value: 100uM ABA vs. No Treatment
  misc_feature: MA Experiment ID: 20000088 Result: Up-regulated in Transcription
  misc_feature: MA Experiment 20000088 PARAMETER Experiment Name: At_100uM_ABA_Mutants_cDNA_P Parameter: Plant Line Value: Landsberg
  misc_feature: MA Experiment 20000088 PARAMETER Experiment Name: At_100uM_ABA_Mutants_cDNA_P Parameter: Timepoint (hr) Value: 6
  misc_feature: MA Experiment 20000088 PARAMETER Experiment Name: At_100uM_ABA_Mutants_cDNA_P Parameter: Tissue Value: Aerial
  misc_feature: MA Experiment 20000088 PARAMETER Experiment Name: At_100uM_ABA_Mutants_cDNA_P Parameter: Treatment Value: 100uM ABA vs. No Treatment
  misc_feature: MA Experiment ID: 20000090 Result: Up-regulated in Transcription
  misc_feature: MA Experiment ID: 20000182 Result: Up-regulated in Transcription
  misc_feature: MA Experiment 20000182 PARAMETER Experiment Name: At_2mM_SA_P Parameter: Age (day) Value: 14
  misc_feature: MA Experiment 20000182 PARAMETER Experiment Name: At_2mM_SA_P Parameter: Organism Value: A. thaliana
  misc_feature: MA Experiment 20000182 PARAMETER Experiment Name: At_2mM_SA_P Parameter: Plant Line Value: WS
  misc_feature: MA Experiment 20000182 PARAMETER Experiment Name: At_2mM_SA_P Parameter: Timepoint (hr) Value: 6
  misc_feature: MA Experiment 20000182 PARAMETER Experiment Name: At_2mM_SA_P Parameter: Tissue Value: Aerial
  misc_feature: MA Experiment 20000182 PARAMETER Experiment Name: At_2mM_SA_P Parameter: Treatment Value: 2mM SA vs. No Treatment
  misc_feature: MA Experiment ID: 20000234 Result: Down-regulated in Transcription
  misc_feature: MA Experiment 20000234 PARAMETER Experiment Name: At_Siliques_P Parameter: Age (day) Value: 21
  misc_feature: MA Experiment 20000234 PARAMETER Experiment Name: At_Siliques_P Parameter: Organism Value: A. thaliana
  misc_feature: MA Experiment 20000234 PARAMETER Experiment Name: At_Siliques_P Parameter: Plant Line Value: WS
  misc_feature: MA Experiment 20000234 PARAMETER Experiment Name: At_Siliques_P Parameter: Tissue Value: Less Than 5mm Siliques vs. Whole Plant
  misc_feature: MA Experiment ID: 20000235 Result: Down-regulated in Transcription
  misc_feature: MA Experiment 20000235 PARAMETER Experiment Name: At_Siliques_P Parameter: Age (day) Value: 21
  misc_feature: MA Experiment 20000235 PARAMETER Experiment Name: At_Siliques_P Parameter: Organism Value: A. thaliana
  misc_feature: MA Experiment 20000235 PARAMETER Experiment Name: At_Siliques_P Parameter: Plant Line Value: WS
  misc_feature: MA Experiment 20000235 PARAMETER Experiment Name: At_Siliques_P Parameter: Tissue Value: 5-10mm Siliques vs. Whole Plant
  misc_feature: MA Experiment ID: 20000264 Result: Down-regulated in Transcription
  misc_feature: MA Experiment 20000264 PARAMETER Experiment Name: At_Open_Flower_P Parameter: Age (day) Value: 21
  misc_feature: MA Experiment 20000264 PARAMETER Experiment Name: At_Open_Flower_P Parameter: Plant Line Value: WS
  misc_feature: MA Experiment 20000264 PARAMETER Experiment Name: At_Open_Flower_P Parameter: Tissue Value: Open Flower vs. Whole Plant
  misc_feature: MA Experiment ID: 20000265 Result: Down-regulated in Transcription
  misc_feature: MA Experiment 20000265 PARAMETER Experiment Name: At_Open_Flower_P Parameter: Age (day) Value: 21
  misc_feature: MA Experiment 20000265 PARAMETER Experiment Name: At_Open_Flower_P Parameter: Plant Line Value: WS
  misc_feature: MA Experiment 20000265 PARAMETER Experiment Name: At_Open_Flower_P Parameter: Tissue Value: Closed Flower vs. Whole Plant
  misc_feature: MA Experiment ID: 20000794 Result: Down-regulated in Transcription
  misc_feature: MA Experiment 20000794 PARAMETER Experiment Name: At_Petals_P Parameter: Age (day) Value: 23-25 days
  misc_feature: MA Experiment 20000794 PARAMETER Experiment Name: At_Petals_P Parameter: Plant Line Value: WS
  misc_feature: MA Experiment 20000794 PARAMETER Experiment Name: At_Petals_P Parameter: Tissue Value: Petals vs. Whole plant
tcaaaaagtcctctctcggtcaactttcttcttggtccccatcttcacaaatcacaactctttttatttccaaagaccaaaaacctgagaacacaccggcgacctgaaaatggaaacttcctgttttacccttctcggtctccttgtctccctctccttcttcctcactctctccgcccaaatgaccggaaacttcaactgcagtggctcaacctcgacgtgtcaatctctcgttggttactcaagcaagaacgcaacaacgttgcgcaatatccaaaccctttttgccgtcaagaacctccgctcgatcctcggagctaacaatctcccactcaacacctcacgtgaccaacgcgtgaacccgaatcaagtcgtacgtgtcccaatccattgctcttgctccaatggaaccggtgtctcgaaccgggacatcgaatacaccatcaagaaagacgacatactctctttcgtcgcaactgagattttcggtggtctcgttacgtacgagaagatcagtgaggttaacaaaatccctgacccgaacaaaatcgaaatcggtcaaaagttttggatccctttgccttgtagctgtgataaattgaacggtgaggatgttgttcactacgcacatgtagtcaaactagggagctctctcggtgagatcgctgctcagtttggaacggacaacacgacgttggctcagctcaatggaatcattggtgactctcagcttcttgctgataaacctctcgacgtccctctcaaagcttgtagctcttctgtgaggaaggactcgttggatgctcctctgcttctgtctaacaactcatacgtcttcactgcaaacaattgcgtcaagtgtacttgtgacgctttgaagaattggactttaagctgtcaatcatcatctgagattaagccttcgaactggcaaacctgcccaccattttcacaatgtgatggagctttgcttaacgcctcttgcagacaacctcgtgattgcgtctatgctggttactccaaccaaaccatcttcaccacagcttccccagcttgtccagattctgctggtcctgataactatgcatcaacgctcagctcaagcttcaatttcgtgattgtgttgattcagtgtgctctgctttgtctctgccttctctagtaatgttttgttgtgtgtttatgagtgtgtatctaagtacagttcggattaaaataaagacattgtttcacctgaagcatcacgtccttgtaccatttttatattggaaacatttcagcttttggc

SEQ ID NO: 27338 - protein, 350 aa, Arabidopsis thaliana
  peptide (1)..(350): Ceres Seq. ID no. 12421696
  misc_feature (110)..(156): Pfam Name: LysM domain Pfam Description: LysM domain
  misc_feature (8)..(334): Homolog of NCBI NO: 25406518 NR Description: unknown protein T5M16.22 [imported] - Arabidopsis
  misc_feature (8)..(334): Homolog of NCBI NO: 30699276 NR Description: expressed protein [Arabidopsis thaliana]
  misc_feature (9)..(310): Homolog of NCBI NO: 30687570 NR Description: expressed protein [Arabidopsis thaliana]
  misc_feature (9)..(330): Homolog of NCBI NO: 18395044 NR Description: expressed protein
  misc_feature (14)..(344): Homolog of NCBI NO: 22758281 NR Description: Unknown protein [Oryza sativa (japonica
  misc_feature (11)..(346): Homolog of NCBI NO: 28207683 NR Description: Erwinia induced protein 1 [Solanum tuberosum]
  misc_feature (1)..(350): Homolog of NCBI NO: 21593990 NR Description: unknown [Arabidopsis thaliana]
  misc_feature (1)..(350): Homolog of NCBI NO: 18398317 NR Description: expressed protein
METSCFTLLGLLVSLSFFLTLSAQMTGNFNCSGSTSTCQSLVGYSSKNATTLRNIQTLFAVKNLRSILGANNLPLNTSRDQRVNPNQVVRVPIHCSCSNGTGVSNRDIEYTIKKDDILSFVATEIFGGLVTYEKISEVNKIPDPNKIEIGQKFWIPLPCSCDKLNGEDVVHYAHVVKLGSSLGEIAAQFGTDNTTLAQLNGIIGDSQLLADKPLDVPLKACSSSVRKDSLDAPLLLSNNSYVFTANNCVKCTCDALKNWTLSCQSSSEIKPSNWQTCPPFSQCDGALLNASCRQPRDCVYAGYSNQTIFTTASPACPDSAGPDNYASTLSSSFNFVIVLIQCALLCLCLL

SEQ ID NO: 27339 - protein, 326 aa, Arabidopsis thaliana
  peptide (1)..(326): Ceres Seq. ID no. 12421697
  misc_feature (86)..(132): Pfam Name: LysM domain Pfam Description: LysM domain
  misc_feature (1)..(310): Homolog of NCBI NO: 25406518 NR Description: unknown protein T5M16.22 [imported] - Arabidopsis
  misc_feature (1)..(310): Homolog of NCBI NO: 30699276 NR Description: expressed protein [Arabidopsis thaliana]
  misc_feature (1)..(286): Homolog of NCBI NO: 30687570 NR Description: expressed protein [Arabidopsis thaliana]
  misc_feature (1)..(306): Homolog of NCBI NO: 18395044 NR Description: expressed protein
  misc_feature (1)..(320): Homolog of NCBI NO: 22758281 NR Description: Unknown protein [Oryza sativa (japonica
  misc_feature (1)..(322): Homolog of NCBI NO: 28207683 NR Description: Erwinia induced protein 1 [Solanum tuberosum]
  misc_feature (1)..(326): Homolog of NCBI NO: 21593990 NR Description: unknown [Arabidopsis thaliana]
  misc_feature (1)..(326): Homolog of NCBI NO: 18398317 NR Description: expressed protein
MTGNFNCSGSTSTCQSLVGYSSKNATTLRNIQTLFAVKNLRSILGANNLPLNTSRDQRVNPNQVVRVPIHCSCSNGTGVSNRDIEYTIKKDDILSFVATEIFGGLVTYEKISEVNKIPDPNKIEIGQKFWIPLPCSCDKLNGEDVVHYAHVVKLGSSLGEIAAQFGTDNTTLAQLNGIIGDSQLLADKPLDVPLKACSSSVRKDSLDAPLLLSNNSYVFTANNCVKCTCDALKNWTLSCQSSSEIKPSNWQTCPPFSQCDGALLNASCRQPRDCVYAGYSNQTIFTTASPACPDSAGPDNYASTLSSSFNFVIVLIQCALLCLCLL

SEQ ID NO: 27340 - DNA, 829 bp, Arabidopsis thaliana
  misc_feature (1)..(829): Ceres Seq. ID no. 12337764
  misc_feature: MA Experiment ID: 20000185 Result: Up-regulated in Transcription
  misc_feature: MA Experiment 20000185 PARAMETER Experiment Name: At_Roots__P Parameter: Age (day) Value: 7 vs. 21
  misc_feature: MA Experiment 20000185 PARAMETER Experiment Name: At_Roots__P Parameter: Organism Value: A. thaliana
  misc_feature: MA Experiment 20000185 PARAMETER Experiment Name: At_Roots__P Parameter: Tissue Value: Roots vs. Whole Plant
  misc_feature: MA Experiment ID: 20000227 Result: Up-regulated in Transcription
  misc_feature: MA Experiment 20000227 PARAMETER Experiment Name: At_Root-Tips-vs-Tops_P Parameter: Tissue Value: Root Tips vs. Root Tops
  misc_feature: MA Experiment ID: 20000234 Result: Up-regulated in Transcription
  misc_feature: MA Experiment 20000234 PARAMETER Experiment Name: At_Siliques_P Parameter: Age (day) Value: 21
  misc_feature: MA Experiment 20000234 PARAMETER Experiment Name: At_Siliques_P Parameter: Organism Value: A. thaliana
  misc_feature: MA Experiment 20000234 PARAMETER Experiment Name: At_Siliques_P Parameter: Plant Line Value: WS
  misc_feature: MA Experiment 20000234 PARAMETER Experiment Name: At_Siliques_P Parameter: Tissue Value: Less Than 5mm Siliques vs. Whole Plant
  misc_feature: MA Experiment ID: 20000235 Result: Up-regulated in Transcription
  misc_feature: MA Experiment 20000235 PARAMETER Experiment Name: At_Siliques_P Parameter: Age (day) Value: 21
  misc_feature: MA Experiment 20000235 PARAMETER Experiment Name: At_Siliques_P Parameter: Organism Value: A. thaliana
  misc_feature: MA Experiment 20000235 PARAMETER Experiment Name: At_Siliques_P Parameter: Plant Line Value: WS
  misc_feature: MA Experiment 20000235 PARAMETER Experiment Name: At_Siliques_P Parameter: Tissue Value: 5-10mm Siliques vs. Whole Plant
  misc_feature: MA Experiment ID: 20000264 Result: Up-regulated in Transcription
  misc_feature: MA Experiment 20000264 PARAMETER Experiment Name: At_Open_Flower_P Parameter: Age (day) Value: 21
  misc_feature: MA Experiment 20000264 PARAMETER Experiment Name: At_Open_Flower_P Parameter: Plant Line Value: WS
  misc_feature: MA Experiment 20000264 PARAMETER Experiment Name: At_Open_Flower_P Parameter: Tissue Value: Open Flower vs. Whole Plant
  misc_feature: MA Experiment ID: 20000437 Result: Down-regulated in Transcription
  misc_feature: MA Experiment 20000437 PARAMETER Experiment Name: At_Drought_P Parameter: Age (day) Value: 8
  misc_feature: MA Experiment 20000437 PARAMETER Experiment Name: At_Drought_P Parameter: Organism Value: A. thaliana
  misc_feature: MA Experiment 20000437 PARAMETER Experiment Name: At_Drought_P Parameter: Plant Line Value: WS
  misc_feature: MA Experiment 20000437 PARAMETER Experiment Name: At_Drought_P Parameter: Timepoint (hr) Value: 24
  misc_feature: MA Experiment 20000437 PARAMETER Experiment Name: At_Drought_P Parameter: Tissue Value: Whole Plant
  misc_feature: MA Experiment 20000437 PARAMETER Experiment Name: At_Drought_P Parameter: Treatment Value: Drought vs. No Drought
  misc_feature: MA Experiment ID: 20001451 Result: Down-regulated in Transcription
  misc_feature: MA Experiment 20001451 PARAMETER Experiment Name: At_Far-red-induction_P Parameter: Age (day) Value: 7
  misc_feature: MA Experiment 20001451 PARAMETER Experiment Name: At_Far-red-induction_P Parameter: Light Value: Far-red vs. White
  misc_feature: MA Experiment 20001451 PARAMETER Experiment Name: At_Far-red-induction_P Parameter: Organism Value: A. thaliana
  misc_feature: MA Experiment 20001451 PARAMETER Experiment Name: At_Far-red-induction_P Parameter: Plant Line Value: Columbia
  misc_feature: MA Experiment 20001451 PARAMETER Experiment Name: At_Far-red-induction_P Parameter: Timepoint (hr) Value: 24
  misc_feature: MA Experiment 20001451 PARAMETER Experiment Name: At_Far-red-induction_P Parameter: Tissue Value: Whole Plant
  misc_feature: MA Experiment ID: 20001557 Result: Up-regulated in Transcription
  misc_feature: MA Experiment 20001557 PARAMETER Experiment Name: At_Drought_Soil_Dry_P Parameter: Age (day) Value: 27
  misc_feature: MA Experiment 20001557 PARAMETER Experiment Name: At_Drought_Soil_Dry_P Parameter: Organism Value: A. thaliana
  misc_feature: MA Experiment 20001557 PARAMETER Experiment Name: At_Drought_Soil_Dry_P Parameter: Plant Line Value: WS
  misc_feature: MA Experiment 20001557 PARAMETER Experiment Name: At_Drought_Soil_Dry_P Parameter: Post Timepoint (hr) Value: 3
  misc_feature: MA Experiment 20001557 PARAMETER Experiment Name: At_Drought_Soil_Dry_P Parameter: Post-Treatment Value: Re-Water vs. No Drought
  misc_feature: MA Experiment 20001557 PARAMETER Experiment Name: At_Drought_Soil_Dry_P Parameter: Timepoint (day) Value: 13
  misc_feature: MA Experiment 20001557 PARAMETER Experiment Name: At_Drought_Soil_Dry_P Parameter: Treatment Value: Drought vs. No Drought
  misc_feature: MA Experiment ID: 20001558 Result: Up-regulated in Transcription
  misc_feature: MA Experiment 20001558 PARAMETER Experiment Name: At_Drought_Soil_Dry_P Parameter: Age (day) Value: 27
  misc_feature: MA Experiment 20001558 PARAMETER Experiment Name: At_Drought_Soil_Dry_P Parameter: Organism Value: A. thaliana
  misc_feature: MA Experiment 20001558 PARAMETER Experiment Name: At_Drought_Soil_Dry_P Parameter: Plant Line Value: WS
  misc_feature: MA Experiment 20001558 PARAMETER Experiment Name: At_Drought_Soil_Dry_P Parameter: Post Timepoint (hr) Value: 6
  misc_feature: MA Experiment 20001558 PARAMETER Experiment Name: At_Drought_Soil_Dry_P Parameter: Post-Treatment Value: Re-Water vs. No Drought
  misc_feature: MA Experiment 20001558 PARAMETER Experiment Name: At_Drought_Soil_Dry_P Parameter: Timepoint (day) Value: 13
  misc_feature: MA Experiment 20001558 PARAMETER Experiment Name: At_Drought_Soil_Dry_P Parameter: Treatment Value: Drought vs. No Drought
  misc_feature: MA Experiment ID: 20001560 Result: Up-regulated in Transcription
  misc_feature: MA Experiment 20001560 PARAMETER Experiment Name: At_Drought_Soil_Dry_P Parameter: Age (day) Value: 28
  misc_feature: MA Experiment 20001560 PARAMETER Experiment Name: At_Drought_Soil_Dry_P Parameter: Organism Value: A. thaliana
  misc_feature: MA Experiment 20001560 PARAMETER Experiment Name: At_Drought_Soil_Dry_P Parameter: Plant Line Value: WS
  misc_feature: MA Experiment 20001560 PARAMETER Experiment Name: At_Drought_Soil_Dry_P Parameter: Post Timepoint (hr) Value: None
  misc_feature: MA Experiment 20001560 PARAMETER Experiment Name: At_Drought_Soil_Dry_P Parameter: Post-Treatment Value: None
  misc_feature: MA Experiment 20001560 PARAMETER Experiment Name: At_Drought_Soil_Dry_P Parameter: Timepoint (day) Value: 14
  misc_feature: MA Experiment 20001560 PARAMETER Experiment Name: At_Drought_Soil_Dry_P Parameter: Treatment Value: Drought vs. No Drought
  misc_feature: MA Experiment ID: 20001757 Result: Up-regulated in Transcription
  misc_feature: MA Experiment 20001757 PARAMETER Experiment Name: At_50mM_NH4NO3_L-to-H_P Parameter: Timepoint (hr) Value: 6
  misc_feature: MA Experiment 20001757 PARAMETER Experiment Name: At_50mM_NH4NO3_L-to-H_P Parameter: Tissue Value: Leaf
  misc_feature: MA Experiment 20001757 PARAMETER Experiment Name: At_50mM_NH4NO3_L-to-H_P Parameter: Treatment Value: 50mM NH4NO3 vs 100mM Mannitol
attcgtcctggtaaaggtaaaatgaggaatcgtcgttacatttctaggaaaggtcctcttgttgtgtttggaactgaaggagccaagattgtgaaagcttttaggaatcttcctggtgttgagctttgtcacgttgagaggcttaacttgttgaaattagcccctggtggtcaccttcgtaggtttgtgatttggactaagtctgcttttgagaagcttgaatctatctatggctcgtttgagaaaccatcagagaagaagaagggttacgtcttgcctcgtgcgaagatggtgaatgctgatcttgctaggattattaactccgatgaggtacagagtgtggtgaacccgattaaggatggttccaagagagcggttctgaagaagaatccattgaagaaccttaatgtgatgttcaagttgaatccttatgctaagaccgcaaagagaatgtctctgttggctgaagcttcaagggttaaggctaagaaggagaagctcgagaagaagaggaaagtcgtcactaaggaggaggcccaagcgatcaaagcagcaggcaaggcttggtatcagactatgatttcagacagtgactacaccgagttcgataacttcaccaagtggcttggcgctagtcagtaatgatgctctcgtcatcgcaaagtctcttatatctaggcaaagattttggttttctgatttatgttcttcgtttgtattggatttatctgggattttatgttgttgagttggtaagacgatttttaagaactatgatggtgtttttcaaactcttttcaatctgtttcccttagtgctctttactcgc

SEQ ID NO: 27341 - protein, 213 aa, Arabidopsis thaliana
  peptide (1)..(213): Ceres Seq. ID no. 12337765
  misc_feature (1)..(76): Pfam Name: Ribosomal protein L4/L1 family Pfam Description: Ribosomal protein L4/L1 family
  misc_feature (1)..(172): Homolog of NCBI NO: 37779080 NR Description: ribosomal protein L4 [Pagrus major]
  misc_feature (1)..(213): Homolog of NCBI NO: 6441068 NR Description: 60S ribosomal protein L4 [Chlamydomonas sp. HS-5]
  misc_feature (1)..(213): Homolog of NCBI NO: 34897236 NR Description: putative 60S ribosomal protein L1
  misc_feature (1)..(213): Homolog of NCBI NO: 34393487 NR Description: putative 60S ribosomal protein L4/L1
  misc_feature (1)..(213): Homolog of NCBI NO: 17367847 NR Description: 60S ribosomal protein L4 (L1)
  misc_feature (1)..(213): Homolog of NCBI NO: 21593543 NR Description: 60S ribosomal protein L4-B (L1) [Arabidopsis
  misc_feature (1)..(213): Homolog of NCBI NO: 15232723 NR Description: putative 60S ribosomal protein L1
  misc_feature (1)..(213): Homolog of NCBI NO: 26450328 NR Description: putative 60S ribosomal protein [Arabidopsis
  misc_feature (1)..(213): Homolog of NCBI NO: 15242558 NR Description: 60S ribosomal protein - like
  misc_feature (1)..(213): Homolog of NCBI NO: 13605831 NR Description: AT5g02870/F9G14_180 [Arabidopsis thaliana]
IRPGKGKMRNRRYISRKGPLVVFGTEGAKIVKAFRNLPGVELCHVERLNLLKLAPGGHLRRFVIWTKSAFEKLESIYGSFEKPSEKKKGYVLPRAKMVNADLARIINSDEVQSVVNPIKDGSKRAVLKKNPLKNLNVMFKLNPYAKTAKRMSLLAEASRVKAKKEKLEKKRKVVTKEEAQAIKAAGKAWYQTMISDSDYTEFDNFTKWLGASQ

SEQ ID NO: 27342 - protein, 206 aa, Arabidopsis thaliana
  peptide (1)..(206): Ceres Seq. ID no. 12337766
  misc_feature (1)..(69): Pfam Name: Ribosomal protein L4/L1 family Pfam Description: Ribosomal protein L4/L1 family
  misc_feature (1)..(165): Homolog of NCBI NO: 37779080 NR Description: ribosomal protein L4 [Pagrus major]
  misc_feature (1)..(206): Homolog of NCBI NO: 6441068 NR Description: 60S ribosomal protein L4 [Chlamydomonas sp. HS-5]
  misc_feature (1)..(206): Homolog of NCBI NO: 34897236 NR Description: putative 60S ribosomal protein L1
  misc_feature (1)..(206): Homolog of NCBI NO: 34393487 NR Description: putative 60S ribosomal protein L4/L1
  misc_feature (1)..(206): Homolog of NCBI NO: 17367847 NR Description: 60S ribosomal protein L4 (L1)
  misc_feature (1)..(206): Homolog of NCBI NO: 21593543 NR Description: 60S ribosomal protein L4-B (L1) [Arabidopsis
  misc_feature (1)..(206): Homolog of NCBI NO: 15232723 NR Description: putative 60S ribosomal protein L1
  misc_feature (1)..(206): Homolog of NCBI NO: 26450328 NR Description: putative 60S ribosomal protein [Arabidopsis
  misc_feature (1)..(206): Homolog of NCBI NO: 15242558 NR Description: 60S ribosomal protein - like
  misc_feature (1)..(206): Homolog of NCBI NO: 13605831 NR Description: AT5g02870/F9G14_180 [Arabidopsis thaliana]
MRNRRYISRKGPLVVFGTEGAKIVKAFRNLPGVELCHVERLNLLKLAPGGHLRRFVIWTKSAFEKLESIYGSFEKPSEKKKGYVLPRAKMVNADLARIINSDEVQSVVNPIKDGSKRAVLKKNPLKNLNVMFKLNPYAKTAKRMSLLAEASRVKAKKEKLEKKRKVVTKEEAQAIKAAGKAWYQTMISDSDYTEFDNFTKWLGASQ

SEQ ID NO: 27343 - protein, 117 aa, Arabidopsis thaliana
  peptide (1)..(117): Ceres Seq. ID no. 12337767
  misc_feature (1)..(117): Homolog of NCBI NO: 26450328 NR Description: putative 60S ribosomal protein [Arabidopsis
  misc_feature (1)..(117): Homolog of NCBI NO: 15242558 NR Description: 60S ribosomal protein - like
  misc_feature (1)..(117): Homolog of NCBI NO: 13605831 NR Description: AT5g02870/F9G14_180 [Arabidopsis thaliana]
  misc_feature (1)..(76): Homolog of NCBI NO: 37779080 NR Description: ribosomal protein L4 [Pagrus major]
  misc_feature (1)..(117): Homolog of NCBI NO: 6441068 NR Description: 60S ribosomal protein L4 [Chlamydomonas sp. HS-5]
  misc_feature (1)..(117): Homolog of NCBI NO: 34897236 NR Description: putative 60S ribosomal protein L1
  misc_feature (1)..(117): Homolog of NCBI NO: 34393487 NR Description: putative 60S ribosomal protein L4/L1
  misc_feature (1)..(117): Homolog of NCBI NO: 17367847 NR Description: 60S ribosomal protein L4 (L1)
  misc_feature (1)..(117): Homolog of NCBI NO: 21593543 NR Description: 60S ribosomal protein L4-B (L1) [Arabidopsis
  misc_feature (1)..(117): Homolog of NCBI NO: 15232723 NR Description: putative 60S ribosomal protein L1
MVNADLARIINSDEVQSVVNPIKDGSKRAVLKKNPLKNLNVMFKLNPYAKTAKRMSLLAEASRVKAKKEKLEKKRKVVTKEEAQAIKAAGKAWYQTMISDSDYTEFDNFTKWLGASQ

SEQ ID NO: 27344 - DNA, 1574 bp, Arabidopsis thaliana
  misc_feature (1)..(1574): Ceres Seq. ID no. 12331591
  misc_feature: MA Experiment ID: 108434 Result: Up-regulated in Transcription
  misc_feature: MA Experiment 108434 PARAMETER Experiment Name: At_Root_Tips_cDNA_P Parameter: Tissue Value: Root Tips
  misc_feature: MA Experiment ID: 108461 Result: Up-regulated in Transcription
  misc_feature: MA Experiment 108461 PARAMETER Experiment Name: At_Germinating_Seeds_cDNA_P Parameter: Age (day) Value: 1 vs. 0
  misc_feature: MA Experiment 108461 PARAMETER Experiment Name: At_Germinating_Seeds_cDNA_P Parameter: Tissue Value: Germinating Seeds
  misc_feature: MA Experiment ID: 108462 Result: Up-regulated in Transcription
  misc_feature: MA Experiment 108462 PARAMETER Experiment Name: At_Germinating_Seeds_cDNA_P Parameter: Age (day) Value: 2 vs. 0
  misc_feature: MA Experiment 108462 PARAMETER Experiment Name: At_Germinating_Seeds_cDNA_P Parameter: Tissue Value: Germinating Seeds
  misc_feature: MA Experiment ID: 108464 Result: Up-regulated in Transcription
  misc_feature: MA Experiment 108464 PARAMETER Experiment Name: At_Germinating_Seeds_cDNA_P Parameter: Age (day) Value: 4 vs. 0
  misc_feature: MA Experiment 108464 PARAMETER Experiment Name: At_Germinating_Seeds_cDNA_P Parameter: Tissue Value: Germinating Seeds
  misc_feature: MA Experiment ID: 108576 Result: Down-regulated in Transcription
  misc_feature: MA Experiment 108576 PARAMETER Experiment Name: At_42deg_Heat_cDNA_P Parameter: Temperature (deg C) Value: 42 vs. 22
  misc_feature: MA Experiment 108576 PARAMETER Experiment Name: At_42deg_Heat_cDNA_P Parameter: Timepoint (hr) Value: 1
  misc_feature: MA Experiment 108576 PARAMETER Experiment Name: At_42deg_Heat_cDNA_P Parameter: Tissue Value: Aerial
  misc_feature: MA Experiment ID: 108577 Result: Down-regulated in Transcription
  misc_feature: MA Experiment 108577 PARAMETER Experiment Name: At_42deg_Heat_cDNA_P Parameter: Temperature (deg C) Value: 42 vs. 22
  misc_feature: MA Experiment 108577 PARAMETER Experiment Name: At_42deg_Heat_cDNA_P Parameter: Timepoint (hr) Value: 6
  misc_feature: MA Experiment 108577 PARAMETER Experiment Name: At_42deg_Heat_cDNA_P Parameter: Tissue Value: Aerial
  misc_feature: MA Experiment ID: 108595 Result: Down-regulated in Transcription
  misc_feature: MA Experiment 108595 PARAMETER Experiment Name: At_Ler-pi_Ovule_cDNA_P Parameter: Plant Line Value: null
  misc_feature: MA Experiment ID: 108668 Result: Down-regulated in Transcription
  misc_feature: MA Experiment 108668 PARAMETER Experiment Name: At_2mM_SA_cDNA_P Parameter: Plant Line Value: WS
  misc_feature: MA Experiment 108668 PARAMETER Experiment Name: At_2mM_SA_cDNA_P Parameter: Timepoint (hr) Value: 6
  misc_feature: MA Experiment 108668 PARAMETER Experiment Name: At_2mM_SA_cDNA_P Parameter: Treatment Value: 2mM SA vs. No Treatment
  misc_feature: MA Experiment ID: 20000111 Result: Down-regulated in Transcription
  misc_feature: MA Experiment 20000111 PARAMETER Experiment Name: At_42deg_Heat_cDNA_P Parameter: Temperature (deg C) Value: 42 vs. 22
  misc_feature: MA Experiment 20000111 PARAMETER Experiment Name: At_42deg_Heat_cDNA_P Parameter: Timepoint (hr) Value: 6
  misc_feature: MA Experiment 20000111 PARAMETER Experiment Name: At_42deg_Heat_cDNA_P Parameter: Tissue Value: Aerial
  misc_feature: MA Experiment ID: 20000112 Result: Down-regulated in Transcription
  misc_feature: MA Experiment 20000112 PARAMETER Experiment Name: At_42deg_Heat_cDNA_P Parameter: Temperature (deg C) Value: 42 vs. 22
  misc_feature: MA Experiment 20000112 PARAMETER Experiment Name: At_42deg_Heat_cDNA_P Parameter: Timepoint (hr) Value: 2
  misc_feature: MA Experiment 20000112 PARAMETER Experiment Name: At_42deg_Heat_cDNA_P Parameter: Tissue Value: Aerial
  misc_feature: MA Experiment ID: 20000144 Result: Down-regulated in Transcription
  misc_feature: MA Experiment 20000144 PARAMETER Experiment Name: At_42deg_Heat_cDNA_P Parameter: Temperature (deg C) Value: 42 vs. 22
  misc_feature: MA Experiment 20000144 PARAMETER Experiment Name: At_42deg_Heat_cDNA_P Parameter: Timepoint (hr) Value: 1
  misc_feature: MA Experiment 20000144 PARAMETER Experiment Name: At_42deg_Heat_cDNA_P Parameter: Tissue Value: Aerial
  misc_feature: MA Experiment ID: 20000171 Result: Down-regulated in Transcription
  misc_feature: MA Experiment 20000171 PARAMETER Experiment Name: At_42deg_Heat_P Parameter: Age (day) Value: 14
  misc_feature: MA Experiment 20000171 PARAMETER Experiment Name: At_42deg_Heat_P Parameter: Organism Value: A. thaliana
  misc_feature: MA Experiment 20000171 PARAMETER Experiment Name: At_42deg_Heat_P Parameter: Plant Line Value: WS
  misc_feature: MA Experiment 20000171 PARAMETER Experiment Name: At_42deg_Heat_P Parameter: Temperature (deg C) Value: 42 vs. 22
  misc_feature: MA Experiment 20000171 PARAMETER Experiment Name: At_42deg_Heat_P Parameter: Timepoint (hr) Value: 1
  misc_feature: MA Experiment 20000171 PARAMETER Experiment Name: At_42deg_Heat_P Parameter: Tissue Value: Aerial
  misc_feature: MA Experiment ID: 20000173 Result: Down-regulated in Transcription
  misc_feature: MA Experiment 20000173 PARAMETER Experiment Name: At_42deg_Heat_P Parameter: Age (day) Value: 14
  misc_feature: MA Experiment 20000173 PARAMETER Experiment Name: At_42deg_Heat_P Parameter: Organism Value: A. thaliana
  misc_feature: MA Experiment 20000173 PARAMETER Experiment Name: At_42deg_Heat_P Parameter: Plant Line Value: WS
  misc_feature: MA Experiment 20000173 PARAMETER Experiment Name: At_42deg_Heat_P Parameter: Temperature (deg C) Value: 42 vs. 22
  misc_feature: MA Experiment 20000173 PARAMETER Experiment Name: At_42deg_Heat_P Parameter: Timepoint (hr) Value: 6
  misc_feature: MA Experiment 20000173 PARAMETER Experiment Name: At_42deg_Heat_P Parameter: Tissue Value: Aerial
  misc_feature: MA Experiment ID: 20000180 Result: Up-regulated in Transcription
  misc_feature: MA Experiment 20000180 PARAMETER Experiment Name: At_Germinating_Seeds_P Parameter: Age (hr) Value: 24 vs. 0
  misc_feature: MA Experiment 20000180 PARAMETER Experiment Name: At_Germinating_Seeds_P Parameter: Tissue Value: Germinating Seeds
  misc_feature: MA Experiment ID: 20000182 Result: Down-regulated in Transcription
  misc_feature: MA Experiment 20000182 PARAMETER Experiment Name: At_2mM_SA_P Parameter: Age (day) Value: 14
  misc_feature: MA Experiment 20000182 PARAMETER Experiment Name: At_2mM_SA_P Parameter: Organism Value: A. thaliana
  misc_feature: MA Experiment 20000182 PARAMETER Experiment Name: At_2mM_SA_P Parameter: Plant Line Value: WS
  misc_feature: MA Experiment 20000182 PARAMETER Experiment Name: At_2mM_SA_P Parameter: Timepoint (hr) Value: 6
  misc_feature: MA Experiment 20000182 PARAMETER Experiment Name: At_2mM_SA_P Parameter: Tissue Value: Aerial
  misc_feature: MA Experiment 20000182 PARAMETER Experiment Name: At_2mM_SA_P Parameter: Treatment Value: 2mM SA vs. No Treatment
  misc_feature: MA Experiment ID: 20000184 Result: Up-regulated in Transcription
  misc_feature: MA Experiment 20000184 PARAMETER Experiment Name: At_Shoots__P Parameter: Age (day) Value: 7
  misc_feature: MA Experiment 20000184 PARAMETER Experiment Name: At_Shoots__P Parameter: Tissue Value: Shoots vs. Whole Plant
  misc_feature: MA Experiment ID: 20000224 Result: Down-regulated in Transcription
  misc_feature: MA Experiment ID: 20000227 Result: Up-regulated in Transcription
  misc_feature: MA Experiment 20000227 PARAMETER Experiment Name: At_Root-Tips-vs-Tops_P Parameter: Tissue Value: Root Tips vs. Root Tops
  misc_feature: MA Experiment ID: 20000234 Result: Up-regulated in Transcription
  misc_feature: MA Experiment 20000234 PARAMETER Experiment Name: At_Siliques_P Parameter: Age (day) Value: 21
  misc_feature: MA Experiment 20000234 PARAMETER Experiment Name: At_Siliques_P Parameter: Organism Value: A. thaliana
  misc_feature: MA Experiment 20000234 PARAMETER Experiment Name: At_Siliques_P Parameter: Plant Line Value: WS
  misc_feature: MA Experiment 20000234 PARAMETER Experiment Name: At_Siliques_P Parameter: Tissue Value: Less Than 5mm Siliques vs. Whole Plant
  misc_feature: MA Experiment ID: 20000268 Result: Down-regulated in Transcription
  misc_feature: MA Experiment 20000268 PARAMETER Experiment Name: At_100mM_NaCl__P Parameter: Age (day) Value: 14
  misc_feature: MA Experiment 20000268 PARAMETER Experiment Name: At_100mM_NaCl__P Parameter: Organism Value: A. thaliana
  misc_feature: MA Experiment 20000268 PARAMETER Experiment Name: At_100mM_NaCl__P Parameter: Plant Line Value: WS
  misc_feature: MA Experiment 20000268 PARAMETER Experiment Name: At_100mM_NaCl__P Parameter: Timepoint (hr) Value: 6
  misc_feature: MA Experiment 20000268 PARAMETER Experiment Name: At_100mM_NaCl__P Parameter: Tissue Value: Whole Plant
  misc_feature: MA Experiment 20000268 PARAMETER Experiment Name: At_100mM_NaCl__P Parameter: Treatment Value: 100mM NaCl vs. No Treatment
  misc_feature: MA Experiment ID: 20000436 Result: Down-regulated in Transcription
  misc_feature: MA Experiment 20000436 PARAMETER Experiment Name: At_Drought_P Parameter: Age (day) Value: 7
  misc_feature: MA Experiment 20000436 PARAMETER Experiment Name: At_Drought_P Parameter: Organism Value: A. thaliana
  misc_feature: MA Experiment 20000436 PARAMETER Experiment Name: At_Drought_P Parameter: Plant Line Value: WS
  misc_feature: MA Experiment 20000436 PARAMETER Experiment Name: At_Drought_P Parameter: Timepoint (hr) Value: 12
  misc_feature: MA Experiment 20000436 PARAMETER Experiment Name: At_Drought_P Parameter: Tissue Value: Whole Plant
  misc_feature: MA Experiment 20000436 PARAMETER Experiment Name: At_Drought_P Parameter: Treatment Value: Drought vs. No Drought
  misc_feature: MA Experiment ID: 20000437 Result: Down-regulated in Transcription
  misc_feature: MA Experiment 20000437 PARAMETER Experiment Name: At_Drought_P Parameter: Age (day) Value: 8
  misc_feature: MA Experiment 20000437 PARAMETER Experiment Name: At_Drought_P Parameter: Organism Value: A. thaliana
  misc_feature: MA Experiment 20000437 PARAMETER Experiment Name: At_Drought_P Parameter: Plant Line Value: WS
  misc_feature: MA Experiment 20000437 PARAMETER Experiment Name: At_Drought_P Parameter: Timepoint (hr) Value: 24
  misc_feature: MA Experiment 20000437 PARAMETER Experiment Name: At_Drought_P Parameter: Tissue Value: Whole Plant
  misc_feature: MA Experiment 20000437 PARAMETER Experiment Name: At_Drought_P Parameter: Treatment Value: Drought vs. No Drought
  misc_feature: MA Experiment ID: 20000438 Result: Up-regulated in Transcription
  misc_feature: MA Experiment 20000438 PARAMETER Experiment Name: At_Shoots__P Parameter: Age (day) Value: 14
  misc_feature: MA Experiment 20000438 PARAMETER Experiment Name: At_Shoots__P Parameter: Tissue Value: Shoots vs. Whole Plant
  misc_feature: MA Experiment ID: 20000439 Result: Down-regulated in Transcription
  misc_feature: MA Experiment 20000439 PARAMETER Experiment Name: At_Roots__P Parameter: Age (day) Value: 14 vs. 21
  misc_feature: MA Experiment 20000439 PARAMETER Experiment Name: At_Roots__P Parameter: Organism Value: A. thaliana
  misc_feature: MA Experiment 20000439 PARAMETER Experiment Name: At_Roots__P Parameter: Tissue Value: Roots vs. Whole Plant
  misc_feature: MA Experiment ID: 20000445 Result: Down-regulated in Transcription
  misc_feature: MA Experiment 20000445 PARAMETER Experiment Name: At_100uM_NAA__P Parameter: Age (day) Value: 14
  misc_feature: MA Experiment 20000445 PARAMETER Experiment Name: At_100uM_NAA__P Parameter: Organism Value: A. thaliana
  misc_feature: MA Experiment 20000445 PARAMETER Experiment Name: At_100uM_NAA__P Parameter: Plant Line Value: WS
  misc_feature: MA Experiment 20000445 PARAMETER Experiment Name: At_100uM_NAA__P Parameter: Timepoint (hr) Value: 6
  misc_feature: MA Experiment 20000445 PARAMETER Experiment Name: At_100uM_NAA__P Parameter: Tissue Value: Aerial
  misc_feature: MA Experiment 20000445 PARAMETER Experiment Name: At_100uM_NAA__P Parameter: Treatment Value: 100uM NAA vs. No Treatment
  misc_feature: MA Experiment ID: 20000495 Result: Up-regulated in Transcription
  misc_feature: MA Experiment 20000495 PARAMETER Experiment Name: At_Guard_Cells_P Parameter: Harvest Date Value: 8/2/2002
  misc_feature: MA Experiment 20000495 PARAMETER Experiment Name: At_Guard_Cells_P Parameter: Organism Value: A. thaliana
  misc_feature: MA Experiment 20000495 PARAMETER Experiment Name: At_Guard_Cells_P Parameter: Tissue Value: Guard Cells vs. Leaves
  misc_feature: MA Experiment ID: 20000794 Result: Down-regulated in Transcription
  misc_feature: MA Experiment 20000794 PARAMETER Experiment Name: At_Petals_P Parameter: Age (day) Value: 23-25 days
  misc_feature: MA Experiment 20000794 PARAMETER Experiment Name: At_Petals_P Parameter: Plant Line Value: WS
  misc_feature: MA Experiment 20000794 PARAMETER Experiment Name: At_Petals_P Parameter: Tissue Value: Petals vs. Whole plant
  misc_feature: MA Experiment ID: 20001554 Result: Down-regulated in Transcription
  misc_feature: MA Experiment 20001554 PARAMETER Experiment Name: At_Drought_Soil_Dry_P Parameter: Age (day) Value: 21
  misc_feature: MA Experiment 20001554 PARAMETER Experiment Name: At_Drought_Soil_Dry_P Parameter: Organism Value: A. thaliana
  misc_feature: MA Experiment 20001554 PARAMETER Experiment Name: At_Drought_Soil_Dry_P Parameter: Plant Line Value: WS
  misc_feature: MA Experiment 20001554 PARAMETER Experiment Name: At_Drought_Soil_Dry_P Parameter: Post Timepoint (hr) Value: None
  misc_feature: MA Experiment 20001554 PARAMETER Experiment Name: At_Drought_Soil_Dry_P Parameter: Post-Treatment Value: None
  misc_feature: MA Experiment 20001554 PARAMETER Experiment Name: At_Drought_Soil_Dry_P Parameter: Timepoint (day) Value: 7
  misc_feature: MA Experiment 20001554 PARAMETER Experiment Name: At_Drought_Soil_Dry_P Parameter: Treatment Value: Drought vs. No Drought
  misc_feature: MA Experiment ID: 20001555 Result: Down-regulated in Transcription
  misc_feature: MA Experiment 20001555 PARAMETER Experiment Name: At_Drought_Soil_Dry_P Parameter: Age (day) Value: 24
  misc_feature: MA Experiment 20001555 PARAMETER Experiment Name: At_Drought_Soil_Dry_P Parameter: Organism Value: A. thaliana
  misc_feature: MA Experiment 20001555 PARAMETER Experiment Name: At_Drought_Soil_Dry_P Parameter: Plant Line Value: WS
  misc_feature: MA Experiment 20001555 PARAMETER Experiment Name: At_Drought_Soil_Dry_P Parameter: Post Timepoint (hr) Value: None
  misc_feature: MA Experiment 20001555 PARAMETER Experiment Name: At_Drought_Soil_Dry_P Parameter: Post-Treatment Value: None
  misc_feature: MA Experiment 20001555 PARAMETER Experiment Name: At_Drought_Soil_Dry_P Parameter: Timepoint (day) Value: 10
  misc_feature: MA Experiment 20001555 PARAMETER Experiment Name: At_Drought_Soil_Dry_P Parameter: Treatment Value: Drought vs. No Drought
  misc_feature: MA Experiment ID: 20001557 Result: Up-regulated in Transcription
  misc_feature: MA Experiment 20001557 PARAMETER Experiment Name: At_Drought_Soil_Dry_P Parameter: Age (day) Value: 27
  misc_feature: MA Experiment 20001557 PARAMETER Experiment Name: At_Drought_Soil_Dry_P Parameter: Organism Value: A. thaliana
  misc_feature: MA Experiment 20001557 PARAMETER Experiment Name: At_Drought_Soil_Dry_P Parameter: Plant Line Value: WS
  misc_feature: MA Experiment 20001557 PARAMETER Experiment Name: At_Drought_Soil_Dry_P Parameter: Post Timepoint (hr) Value: 3
  misc_feature: MA Experiment 20001557 PARAMETER Experiment Name: At_Drought_Soil_Dry_P Parameter: Post-Treatment Value: Re-Water vs. No Drought
  misc_feature: MA Experiment 20001557 PARAMETER Experiment Name: At_Drought_Soil_Dry_P Parameter: Timepoint (day) Value: 13
  misc_feature: MA Experiment 20001557 PARAMETER Experiment Name: At_Drought_Soil_Dry_P Parameter: Treatment Value: Drought vs. No Drought
  misc_feature: MA Experiment ID: 20001558 Result: Up-regulated in Transcription
  misc_feature: MA Experiment 20001558 PARAMETER Experiment Name: At_Drought_Soil_Dry_P Parameter: Age (day) Value: 27
  misc_feature: MA Experiment 20001558 PARAMETER Experiment Name: At_Drought_Soil_Dry_P Parameter: Organism Value: A. thaliana
  misc_feature: MA Experiment 20001558 PARAMETER Experiment Name: At_Drought_Soil_Dry_P Parameter: Plant Line Value: WS
  misc_feature: MA Experiment 20001558 PARAMETER Experiment Name: At_Drought_Soil_Dry_P Parameter: Post Timepoint (hr) Value: 6
  misc_feature: MA Experiment 20001558 PARAMETER Experiment Name: At_Drought_Soil_Dry_P Parameter: Post-Treatment Value: Re-Water vs. No Drought
  misc_feature: MA Experiment 20001558 PARAMETER Experiment Name: At_Drought_Soil_Dry_P Parameter: Timepoint (day) Value: 13
  misc_feature: MA Experiment 20001558 PARAMETER Experiment Name: At_Drought_Soil_Dry_P Parameter: Treatment Value: Drought vs. No Drought
  misc_feature: MA Experiment ID: 20001559 Result: Down-regulated in Transcription
  misc_feature: MA Experiment 20001559 PARAMETER Experiment Name: At_Drought_Soil_Dry_P Parameter: Age (day) Value: 28
  misc_feature: MA Experiment 20001559 PARAMETER Experiment Name: At_Drought_Soil_Dry_P Parameter: Organism Value: A. thaliana
  misc_feature: MA Experiment 20001559 PARAMETER Experiment Name: At_Drought_Soil_Dry_P Parameter: Plant Line Value: WS
  misc_feature: MA Experiment 20001559 PARAMETER Experiment Name: At_Drought_Soil_Dry_P Parameter: Post Timepoint (hr) Value: 29
  misc_feature: MA Experiment 20001559 PARAMETER Experiment Name: At_Drought_Soil_Dry_P Parameter: Post-Treatment Value: Re-Water vs. No Drought
  misc_feature: MA Experiment 20001559 PARAMETER Experiment Name: At_Drought_Soil_Dry_P Parameter: Timepoint (day) Value: 14
  misc_feature: MA Experiment 20001559 PARAMETER Experiment Name: At_Drought_Soil_Dry_P Parameter: Treatment Value: Drought vs. No Drought
  misc_feature: MA Experiment ID: 20001560 Result: Up-regulated in Transcription
  misc_feature: MA Experiment 20001560 PARAMETER Experiment Name: At_Drought_Soil_Dry_P Parameter: Age (day) Value: 28
  misc_feature: MA Experiment 20001560 PARAMETER Experiment Name: At_Drought_Soil_Dry_P Parameter: Organism Value: A. thaliana
  misc_feature: MA Experiment 20001560 PARAMETER Experiment Name: At_Drought_Soil_Dry_P Parameter: Plant Line Value: WS
  misc_feature: MA Experiment 20001560 PARAMETER Experiment Name: At_Drought_Soil_Dry_P Parameter: Post Timepoint (hr) Value: None
  misc_feature: MA Experiment 20001560 PARAMETER Experiment Name: At_Drought_Soil_Dry_P Parameter: Post-Treatment Value: None
  misc_feature: MA Experiment 20001560 PARAMETER Experiment Name: At_Drought_Soil_Dry_P Parameter: Timepoint (day) Value: 14
  misc_feature: MA Experiment 20001560 PARAMETER Experiment Name: At_Drought_Soil_Dry_P Parameter: Treatment Value: Drought vs. No Drought
  misc_feature: MA Experiment ID: 20001757 Result: Up-regulated in Transcription
  misc_feature: MA Experiment 20001757 PARAMETER Experiment Name: At_50mM_NH4NO3_L-to-H_P Parameter: Timepoint (hr) Value: 6
  misc_feature: MA Experiment 20001757 PARAMETER Experiment Name: At_50mM_NH4NO3_L-to-H_P Parameter: Tissue Value: Leaf
  misc_feature: MA Experiment 20001757 PARAMETER Experiment Name: At_50mM_NH4NO3_L-to-H_P Parameter: Treatment Value: 50mM NH4NO3 vs 100mM Mannitol
  misc_feature: MA Experiment ID: 20001906 Result: Down-regulated in Transcription
  misc_feature: MA Experiment 20001906 PARAMETER Experiment Name: At_Drought_Reproduction_P Parameter: Age (day) Value: 35
  misc_feature: MA Experiment 20001906 PARAMETER Experiment Name: At_Drought_Reproduction_P Parameter: Organism Value: A. thaliana
  misc_feature: MA Experiment 20001906 PARAMETER Experiment Name: At_Drought_Reproduction_P Parameter: Plant Line Value: WS
  misc_feature: MA Experiment 20001906 PARAMETER Experiment Name: At_Drought_Reproduction_P Parameter: Timepoint (day) Value: 5
  misc_feature: MA Experiment 20001906 PARAMETER Experiment Name: At_Drought_Reproduction_P Parameter: Tissue Value: Siliques
  misc_feature: MA Experiment 20001906 PARAMETER Experiment Name: At_Drought_Reproduction_P Parameter: Treatment Value: Drought vs. No Drought
  misc_feature: MA Experiment ID: 20001907 Result: Down-regulated in Transcription
  misc_feature: MA Experiment 20001907 PARAMETER Experiment Name: At_Drought_Reproduction_P Parameter: Age (day) Value: 37
  misc_feature: MA Experiment 20001907 PARAMETER Experiment Name: At_Drought_Reproduction_P Parameter: Organism Value: A. thaliana
  misc_feature: MA Experiment 20001907 PARAMETER Experiment Name: At_Drought_Reproduction_P Parameter: Plant Line Value: WS
  misc_feature: MA Experiment 20001907 PARAMETER Experiment Name: At_Drought_Reproduction_P Parameter: Timepoint (day) Value: 7
  misc_feature: MA Experiment 20001907 PARAMETER Experiment Name: At_Drought_Reproduction_P Parameter: Tissue Value: Siliques
  misc_feature: MA Experiment 20001907 PARAMETER Experiment Name: At_Drought_Reproduction_P Parameter: Treatment Value: Drought vs. No Drought
  misc_feature: MA Experiment ID: 20001908 Result: Down-regulated in Transcription
  misc_feature: MA Experiment 20001908 PARAMETER Experiment Name: At_Drought_Reproduction_P Parameter: Age (day) Value: 40
  misc_feature: MA Experiment 20001908 PARAMETER Experiment Name: At_Drought_Reproduction_P Parameter: Organism Value: A. thaliana
  misc_feature: MA Experiment 20001908 PARAMETER Experiment Name: At_Drought_Reproduction_P Parameter: Plant Line Value: WS
  misc_feature: MA Experiment 20001908 PARAMETER Experiment Name: At_Drought_Reproduction_P Parameter: Timepoint (day) Value: 10
  misc_feature: MA Experiment 20001908 PARAMETER Experiment Name: At_Drought_Reproduction_P Parameter: Tissue Value: Siliques
  misc_feature: MA Experiment 20001908 PARAMETER Experiment Name: At_Drought_Reproduction_P Parameter: Treatment Value: Drought vs. No Drought
  misc_feature: MA Experiment ID: 20001911 Result: Down-regulated in Transcription
  misc_feature: MA Experiment 20001911 PARAMETER Experiment Name: At_Drought_Reproduction_P Parameter: Age (day) Value: 40
  misc_feature: MA Experiment 20001911 PARAMETER Experiment Name: At_Drought_Reproduction_P Parameter: Organism Value: A. thaliana
  misc_feature: MA Experiment 20001911 PARAMETER Experiment Name: At_Drought_Reproduction_P Parameter: Plant Line Value: WS
  misc_feature: MA Experiment 20001911 PARAMETER Experiment Name: At_Drought_Reproduction_P Parameter: Timepoint (day) Value: 10
  misc_feature: MA Experiment 20001911 PARAMETER Experiment Name: At_Drought_Reproduction_P Parameter: Tissue Value: Flowers
  misc_feature: MA Experiment 20001911 PARAMETER Experiment Name: At_Drought_Reproduction_P Parameter: Treatment Value: Drought vs. No Drought
attatctaaatatctctacacaatcacattagccaaaaccatggcctcctcaagtctccatttcttcttcttcttgacacttctcttgccattcactttcaccaccgccacacgtgacacatgtgcgaccgccgctcccgatggttccgacgacctctcaatcatccccattaacgccaaatgctcacctttcgcacccactcacgtctctgcctccgtgatagacacggtccttcacatggcctcctcagactcccatcgactcacctacctctcaagcctcgtcgccggcaaaccaaaacccacctccgtccccgtcgcctccggtaatcagctccacatcggaaactacgtggtccgagccaaactcggcactcctccacagctaatgttcatggtcctagacacaagtaacgacgccgtttggctcccttgctccggctgctccggttgttccaacgcctcaacttctttcaatacaaactcctcatccacttactcaaccgtctcttgctccaccgcacaatgcacccaagcacgtggcctcacgtgcccatcctcctcaccacaaccgtccgtctgctccttcaaccaatcctacggcggagattcatccttctctgccagtctcgtccaagacacgctaacgttagcccctgacgtcatcccaaatttctccttcggctgcatcaactccgcctcaggcaattctctaccaccgcaaggactaatgggcctaggacgcgggcctatgtcattggtctctcaaactacgtcgctttactcaggagtgttctcatactgcctccctagcttcaggtccttctacttctccgggtcgttgaaactgggtctcttgggtcaacccaaatccatcagatacactccactcctccgtaaccctcgccgtccatcactttactatgtgaatctcaccggagtgagtgtcggttccgtccaggtacccgttgacccagtgtatttgacgtttgacgcaaattccggcgccggtacgatcatcgattccggtactgttatcacccgttttgctcaacccgtgtacgaagccattagagacgagtttaggaagcaggtgaatgtgtcgtcattctcaacattgggagcgtttgacacgtgtttctcagcggataacgagaatgtggcgccaaagataacgctgcacatgacgtcactcgacttgaagctgccgatggagaatacgcttatccacagcagcgcgggaacgctgacgtgtctatccatggccgggatacggcagaacgcaaacgctgttctaaacgtgatcgcgaatctccaacagcagaacttaaggatcttgtttgacgttcctaattctcgcataggaattgctcctgagccctgcaactaagagaggacatatgaatgatctctctctccctctctttttattttacgttcttcgtacgttttgatttgaagaggtgcttaatggcgcttgaccttctacatatactttgtatgaacggctatcttcactacgcataacatggcctgcagtttcatctcttgcttcagcgatgtgatttcttttc

SEQ ID NO: 27345 - protein, 462 aa, Arabidopsis thaliana
  peptide (1)..(462): Ceres Seq. ID no. 12331592
  misc_feature (73)..(459): Pfam Name: Eukaryotic aspartyl protease Pfam Description: Eukaryotic aspartyl protease
  misc_feature (105)..(461): Homolog of NCBI NO: 34910676 NR Description: P0690B02.2 [Oryza sativa (japonica
  misc_feature (84)..(461): Homolog of NCBI NO: 21594980 NR Description: chloroplast nucleoid DNA binding protein,
  misc_feature (84)..(461): Homolog of NCBI NO: 15223368 NR Description: chloroplast nucleoid DNA binding protein, putative
  misc_feature (14)..(461): Homolog of NCBI NO: 20161865 NR Description: putative nucleoid DNA-binding-like protein
  misc_feature (10)..(461): Homolog of NCBI NO: 34899068 NR Description: similar to nucleoid DNA-binding-like protein
  misc_feature (17)..(462): Homolog of NCBI NO: 15240680 NR Description: nucleoid DNA-binding-like protein
  misc_feature (49)..(461): Homolog of NCBI NO: 15232503 NR Description: nucleoid DNA-binding - like protein
  misc_feature (49)..(461): Homolog of NCBI NO: 21617933 NR Description: nucleoid DNA-binding-like protein [Arabidopsis
  misc_feature (88)..(462): Homolog of NCBI NO: 21450872 NR Description: unknown protein [Arabidopsis thaliana]
  misc_feature (14)..(462): Homolog of NCBI NO: 18391062 NR Description: expressed protein
LSKYLYTITLAKTMASSSLHFFFFLTLLLPFTFTTATRDTCATAAPDGSDDLSIIPINAKCSPFAPTHVSASVIDTVLHMASSDSHRLTYLSSLVAGKPKPTSVPVASGNQLHIGNYVVRAKLGTPPQLMFMVLDTSNDAVWLPCSGCSGCSNASTSFNTNSSSTYSTVSCSTAQCTQARGLTCPSSSPQPSVCSFNQSYGGDSSFSASLVQDTLTLAPDVIPNFSFGCINSASGNSLPPQGLMGLGRGPMSLVSQTTSLYSGVFSYCLPSFRSFYFSGSLKLGLLGQPKSIRYTPLLRNPRRPSLYYVNLTGVSVGSVQVPVDPVYLTFDANSGAGTIIDSGTVITRFAQPVYEAIRDEFRKQVNVSSFSTLGAFDTCFSADNENVAPKITLHMTSLDLKLPMENTLIHSSAGTLTCLSMAGIRQNANAVLNVIANLQQQNLRILFDVPNSRIGIAPEPCN

SEQ ID NO: 27346 - protein, 449 aa, Arabidopsis thaliana
  peptide (1)..(449): Ceres Seq. ID no. 12331593
  misc_feature (60)..(446): Pfam Name: Eukaryotic aspartyl protease Pfam Description: Eukaryotic aspartyl protease
  misc_feature (92)..(448): Homolog of NCBI NO: 34910676 NR Description: P0690B02.2 [Oryza sativa (japonica
  misc_feature (71)..(448): Homolog of NCBI NO: 21594980 NR Description: chloroplast nucleoid DNA binding protein,
  misc_feature (71)..(448): Homolog of NCBI NO: 15223368 NR Description: chloroplast nucleoid DNA binding protein, putative
  misc_feature (1)..(448): Homolog of NCBI NO: 20161865 NR Description: putative nucleoid DNA-binding-like protein
  misc_feature (1)..(448): Homolog of NCBI NO: 34899068 NR Description: similar to nucleoid DNA-binding-like protein
  misc_feature (4)..(449): Homolog of NCBI NO: 15240680 NR Description: nucleoid DNA-binding-like protein
  misc_feature (36)..(448): Homolog of NCBI NO: 15232503 NR Description: nucleoid DNA-binding - like protein
  misc_feature (36)..(448): Homolog of NCBI NO: 21617933 NR Description: nucleoid DNA-binding-like protein [Arabidopsis
  misc_feature (75)..(449): Homolog of NCBI NO: 21450872 NR Description: unknown protein [Arabidopsis thaliana]
  misc_feature (1)..(449): Homolog of NCBI NO: 18391062 NR Description: expressed protein
MASSSLHFFFFLTLLLPFTFTTATRDTCATAAPDGSDDLSIIPINAKCSPFAPTHVSASVIDTVLHMASSDSHRLTYLSSLVAGKPKPTSVPVASGNQLHIGNYVVRAKLGTPPQLMFMVLDTSNDAVWLPCSGCSGCSNASTSFNTNSSSTYSTVSCSTAQCTQARGLTCPSSSPQPSVCSFNQSYGGDSSFSASLVQDTLTLAPDVIPNFSFGCINSASGNSLPPQGLMGLGRGPMSLVSQTTSLYSGVFSYCLPSFRSFYFSGSLKLGLLGQPKSIRYTPLLRNPRRPSLYYVNLTGVSVGSVQVPVDPVYLTFDANSGAGTIIDSGTVITRFAQPVYEAIRDEFRKQVNVSSFSTLGAFDTCFSADNENVAPKITLHMTSLDLKLPMENTLIHSSAGTLTCLSMAGIRQNANAVLNVIANLQQQNLRILFDVPNSRIGIAPEPCN

SEQ ID NO: 27347 - protein, 383 aa, Arabidopsis thaliana
  peptide (1)..(383): Ceres Seq. ID no. 12331594
  misc_feature (1)..(380): Pfam Name: Eukaryotic aspartyl protease Pfam Description: Eukaryotic aspartyl protease
  misc_feature (26)..(382): Homolog of NCBI NO: 34910676 NR Description: P0690B02.2 [Oryza sativa (japonica
  misc_feature (5)..(382): Homolog of NCBI NO: 21594980 NR Description: chloroplast nucleoid DNA binding protein,
  misc_feature (5)..(382): Homolog of NCBI NO: 15223368 NR Description: chloroplast nucleoid DNA binding protein, putative
  misc_feature (1)..(382): Homolog of NCBI NO: 20161865 NR Description: putative nucleoid DNA-binding-like protein
  misc_feature (1)..(382): Homolog of NCBI NO: 34899068 NR Description: similar to nucleoid DNA-binding-like protein
  misc_feature (1)..(383): Homolog of NCBI NO: 15240680 NR Description: nucleoid DNA-binding-like protein
  misc_feature (1)..(382): Homolog of NCBI NO: 15232503 NR Description: nucleoid DNA-binding - like protein
  misc_feature (1)..(382): Homolog of NCBI NO: 21617933 NR Description: nucleoid DNA-binding-like protein [Arabidopsis
  misc_feature (9)..(383): Homolog of NCBI NO: 21450872 NR Description: unknown protein [Arabidopsis thaliana]
  misc_feature (1)..(383): Homolog of NCBI NO: 18391062 NR Description: expressed protein
MASSDSHRLTYLSSLVAGKPKPTSVPVASGNQLHIGNYVVRAKLGTPPQLMFMVLDTSNDAVWLPCSGCSGCSNASTSFNTNSSSTYSTVSCSTAQCTQARGLTCPSSSPQPSVCSFNQSYGGDSSFSASLVQDTLTLAPDVIPNFSFGCINSASGNSLPPQGLMGLGRGPMSLVSQTTSLYSGVFSYCLPSFRSFYFSGSLKLGLLGQPKSIRYTPLLRNPRRPSLYYVNLTGVSVGSVQVPVDPVYLTFDANSGAGTIIDSGTVITRFAQPVYEAIRDEFRKQVNVSSFSTLGAFDTCFSADNENVAPKITLHMTSLDLKLPMENTLIHSSAGTLTCLSMAGIRQNANAVLNVIANLQQQNLRILFDVPNSRIGIAPEPCN

SEQ ID NO: 27348 - DNA, 1370 bp, Arabidopsis thaliana
  misc_feature (1)..(1370): Ceres Seq. ID no. 12331434
  misc_feature: MA Experiment ID: 20000173 Result: Down-regulated in Transcription
  misc_feature: MA Experiment 20000173 PARAMETER Experiment Name: At_42deg_Heat_P Parameter: Age (day) Value: 14
  misc_feature: MA Experiment 20000173 PARAMETER Experiment Name: At_42deg_Heat_P Parameter: Organism Value: A. thaliana
  misc_feature: MA Experiment 20000173 PARAMETER Experiment Name: At_42deg_Heat_P Parameter: Plant Line Value: WS
  misc_feature: MA Experiment 20000173 PARAMETER Experiment Name: At_42deg_Heat_P Parameter: Temperature (deg C) Value: 42 vs. 22
  misc_feature: MA Experiment 20000173 PARAMETER Experiment Name: At_42deg_Heat_P Parameter: Timepoint (hr) Value: 6
  misc_feature: MA Experiment 20000173 PARAMETER Experiment Name: At_42deg_Heat_P Parameter: Tissue Value: Aerial
  misc_feature: MA Experiment ID: 20000180 Result: Up-regulated in Transcription
  misc_feature: MA Experiment 20000180 PARAMETER Experiment Name: At_Germinating_Seeds_P Parameter: Age (hr) Value: 24 vs. 0
  misc_feature: MA Experiment 20000180 PARAMETER Experiment Name: At_Germinating_Seeds_P Parameter: Tissue Value: Germinating Seeds
  misc_feature: MA Experiment ID: 20000184 Result: Up-regulated in Transcription
  misc_feature: MA Experiment 20000184 PARAMETER Experiment Name: At_Shoots__P Parameter: Age (day) Value: 7
  misc_feature: MA Experiment 20000184 PARAMETER Experiment Name: At_Shoots__P Parameter: Tissue Value: Shoots vs. Whole Plant
  misc_feature: MA Experiment ID: 20000185 Result: Up-regulated in Transcription
  misc_feature: MA Experiment 20000185 PARAMETER Experiment Name: At_Roots__P Parameter: Age (day) Value: 7 vs. 21
  misc_feature: MA Experiment 20000185 PARAMETER Experiment Name: At_Roots__P Parameter: Organism Value: A. thaliana
  misc_feature: MA Experiment 20000185 PARAMETER Experiment Name: At_Roots__P Parameter: Tissue Value: Roots vs. Whole Plant
  misc_feature: MA Experiment ID: 20000211 Result: Up-regulated in Transcription
  misc_feature: MA Experiment 20000211 PARAMETER Experiment Name: At_0.001percent_MeJA__P Parameter: Age (day) Value: 14
  misc_feature: MA Experiment 20000211 PARAMETER Experiment Name: At_0.001percent_MeJA__P Parameter: Organism Value: A. thaliana
  misc_feature: MA Experiment 20000211 PARAMETER Experiment Name: At_0.001percent_MeJA__P Parameter: Plant Line Value: WS
  misc_feature: MA Experiment 20000211 PARAMETER Experiment Name: At_0.001percent_MeJA__P Parameter: Timepoint (hr) Value: 1
  misc_feature: MA Experiment 20000211 PARAMETER Experiment Name: At_0.001percent_MeJA__P Parameter: Tissue Value: Aerial
  misc_feature: MA Experiment 20000211 PARAMETER Experiment Name: At_0.001percent_MeJA__P Parameter: Treatment Value: 0.001percent MeJA vs. No Treatment
  misc_feature: MA Experiment ID: 20000227 Result: Down-regulated in Transcription
  misc_feature: MA Experiment 20000227 PARAMETER Experiment Name: At_Root-Tips-vs-Tops_P Parameter: Tissue Value: Root Tips vs. Root Tops
  misc_feature: MA Experiment ID: 20000264 Result: Up-regulated in Transcription
  misc_feature: MA Experiment 20000264 PARAMETER Experiment Name: At_Open_Flower_P Parameter: Age (day) Value: 21
  misc_feature: MA Experiment 20000264 PARAMETER Experiment Name: At_Open_Flower_P Parameter: Plant Line Value: WS
  misc_feature: MA Experiment 20000264 PARAMETER Experiment Name: At_Open_Flower_P Parameter: Tissue Value: Open Flower vs. Whole Plant
  misc_feature: MA Experiment ID: 20000265 Result: Up-regulated in Transcription
  misc_feature: MA Experiment 20000265 PARAMETER Experiment Name: At_Open_Flower_P Parameter: Age (day) Value: 21
  misc_feature: MA Experiment 20000265 PARAMETER Experiment Name: At_Open_Flower_P Parameter: Plant Line Value: WS
  misc_feature: MA Experiment 20000265 PARAMETER Experiment Name: At_Open_Flower_P Parameter: Tissue Value: Closed Flower vs. Whole Plant
  misc_feature: MA Experiment ID: 20000267 Result: Down-regulated in Transcription
  misc_feature: MA Experiment 20000267 PARAMETER Experiment Name: At_Drought_P Parameter: Age (day) Value: 7
  misc_feature: MA Experiment 20000267 PARAMETER Experiment Name: At_Drought_P Parameter: Organism Value: A. thaliana
  misc_feature: MA Experiment 20000267 PARAMETER Experiment Name: At_Drought_P Parameter: Plant Line Value: WS
  misc_feature: MA Experiment 20000267 PARAMETER Experiment Name: At_Drought_P Parameter: Timepoint (hr) Value: 6
  misc_feature: MA Experiment 20000267 PARAMETER Experiment Name: At_Drought_P Parameter: Tissue Value: Whole Plant
  misc_feature: MA Experiment 20000267 PARAMETER Experiment Name: At_Drought_P Parameter: Treatment Value: Drought vs. No Drought
  misc_feature: MA Experiment ID: 20000269 Result: Up-regulated in Transcription
  misc_feature: MA Experiment 20000269 PARAMETER Experiment Name: At_1mM_KNO3_L-vs-H_Roots_P Parameter: Age (day) Value: 7,10,12
  misc_feature: MA Experiment 20000269 PARAMETER Experiment Name: At_1mM_KNO3_L-vs-H_Roots_P Parameter: Organism Value: A. thaliana
  misc_feature: MA Experiment 20000269 PARAMETER Experiment Name: At_1mM_KNO3_L-vs-H_Roots_P Parameter: Plant Line Value: WS
  misc_feature: MA Experiment 20000269 PARAMETER Experiment Name: At_1mM_KNO3_L-vs-H_Roots_P Parameter: Timepoint (day) Value: 7,10,12
  misc_feature: MA Experiment 20000269 PARAMETER Experiment Name: At_1mM_KNO3_L-vs-H_Roots_P Parameter: Tissue Value: Roots
  misc_feature: MA Experiment 20000269 PARAMETER Experiment Name: At_1mM_KNO3_L-vs-H_Roots_P Parameter: Treatment Value: 1mM KNO3 vs. 50mM KNO3
  misc_feature: MA Experiment ID: 20000286 Result: Up-regulated in Transcription
  misc_feature: MA Experiment 20000286 PARAMETER Experiment Name: At_Open_Flower_P Parameter: Age (day) Value: 21
  misc_feature: MA Experiment 20000286 PARAMETER Experiment Name: At_Open_Flower_P Parameter: Plant Line Value: WS
  misc_feature: MA Experiment 20000286 PARAMETER Experiment Name: At_Open_Flower_P Parameter: Tissue Value: Half Open vs. Whole Plant
  misc_feature: MA Experiment ID: 20000437 Result: Down-regulated in Transcription
  misc_feature: MA Experiment 20000437 PARAMETER Experiment Name: At_Drought_P Parameter: Age (day) Value: 8
  misc_feature: MA Experiment 20000437 PARAMETER Experiment Name: At_Drought_P Parameter: Organism Value: A. thaliana
  misc_feature: MA Experiment 20000437 PARAMETER Experiment Name: At_Drought_P Parameter: Plant Line Value: WS
  misc_feature: MA Experiment 20000437 PARAMETER Experiment Name: At_Drought_P Parameter: Timepoint (hr) Value: 24
  misc_feature: MA Experiment 20000437 PARAMETER Experiment Name: At_Drought_P Parameter: Tissue Value: Whole Plant
  misc_feature: MA Experiment 20000437 PARAMETER Experiment Name: At_Drought_P Parameter: Treatment Value: Drought vs. No Drought
  misc_feature: MA Experiment ID: 20000438 Result: Up-regulated in Transcription
  misc_feature: MA Experiment 20000438 PARAMETER Experiment Name: At_Shoots__P Parameter: Age (day) Value: 14
  misc_feature: MA Experiment 20000438 PARAMETER Experiment Name: At_Shoots__P Parameter: Tissue Value: Shoots vs. Whole Plant
  misc_feature: MA Experiment ID: 20000439 Result: Up-regulated in Transcription
  misc_feature: MA Experiment 20000439 PARAMETER Experiment Name: At_Roots__P Parameter: Age (day) Value: 14 vs. 21
  misc_feature: MA Experiment 20000439 PARAMETER Experiment Name: At_Roots__P Parameter: Organism Value: A. thaliana
  misc_feature: MA Experiment 20000439 PARAMETER Experiment Name: At_Roots__P Parameter: Tissue Value: Roots vs. Whole Plant
  misc_feature: MA Experiment ID: 20000445 Result: Down-regulated in Transcription
  misc_feature: MA Experiment 20000445 PARAMETER Experiment Name: At_100uM_NAA__P Parameter: Age (day) Value: 14
  misc_feature: MA Experiment 20000445 PARAMETER Experiment Name: At_100uM_NAA__P Parameter: Organism Value: A. thaliana
  misc_feature: MA Experiment 20000445 PARAMETER Experiment Name: At_100uM_NAA__P Parameter: Plant Line Value: WS
  misc_feature: MA Experiment 20000445 PARAMETER Experiment Name: At_100uM_NAA__P Parameter: Timepoint (hr) Value: 6
  misc_feature: MA Experiment 20000445 PARAMETER Experiment Name: At_100uM_NAA__P Parameter: Tissue Value: Aerial
  misc_feature: MA Experiment 20000445 PARAMETER Experiment Name: At_100uM_NAA__P Parameter: Treatment Value: 100uM NAA vs. No Treatment
  misc_feature: MA Experiment ID: 20000451 Result: Down-regulated in Transcription
  misc_feature: MA Experiment 20000451 PARAMETER Experiment Name: At_CS6879_Shoots-Roots_P Parameter: Age (day) Value: 14
  misc_feature: MA Experiment 20000451 PARAMETER Experiment Name: At_CS6879_Shoots-Roots_P Parameter: Organism Value: A. thaliana
  misc_feature: MA Experiment 20000451 PARAMETER Experiment Name: At_CS6879_Shoots-Roots_P Parameter: Plant Line Value: CS6879 vs. WS
  misc_feature: MA Experiment 20000451 PARAMETER Experiment Name: At_CS6879_Shoots-Roots_P Parameter: Tissue Value: Roots
  misc_feature: MA Experiment ID: 20000460 Result: Down-regulated in Transcription
  misc_feature: MA Experiment 20000460 PARAMETER Experiment Name: At_10percent_PEG_P Parameter: Age (day) Value: 12
  misc_feature: MA Experiment 20000460 PARAMETER Experiment Name: At_10percent_PEG_P Parameter: Organism Value: A. thaliana
  misc_feature: MA Experiment 20000460 PARAMETER Experiment Name: At_10percent_PEG_P Parameter: Plant Line Value: WS
  misc_feature: MA Experiment 20000460 PARAMETER Experiment Name: At_10percent_PEG_P Parameter: Timepoint (day) Value: 12
  misc_feature: MA Experiment 20000460 PARAMETER Experiment Name: At_10percent_PEG_P Parameter: Tissue Value: Whole Plant
  misc_feature: MA Experiment 20000460 PARAMETER Experiment Name: At_10percent_PEG_P Parameter: Treatment Value: 10percent PEG vs. No Treatment
  misc_feature: MA Experiment ID: 20000495 Result: Up-regulated in Transcription
  misc_feature: MA Experiment 20000495 PARAMETER Experiment Name: At_Guard_Cells_P Parameter: Harvest Date Value: 8/2/2002
  misc_feature: MA Experiment 20000495 PARAMETER Experiment Name: At_Guard_Cells_P Parameter: Organism Value: A. thaliana
  misc_feature: MA Experiment 20000495 PARAMETER Experiment Name: At_Guard_Cells_P Parameter: Tissue Value: Guard Cells vs. Leaves
  misc_feature: MA Experiment ID: 20000527 Result: Down-regulated in Transcription
  misc_feature: MA Experiment 20000527 PARAMETER Experiment Name: At_10percent_PEG_P Parameter: Age (day) Value: 20
  misc_feature: MA Experiment 20000527 PARAMETER Experiment Name: At_10percent_PEG_P Parameter: Organism Value: A. thaliana
  misc_feature: MA Experiment 20000527 PARAMETER Experiment Name: At_10percent_PEG_P Parameter: Plant Line Value: WS
  misc_feature: MA Experiment 20000527 PARAMETER Experiment Name: At_10percent_PEG_P Parameter: Timepoint (day) Value: 20
  misc_feature: MA Experiment 20000527 PARAMETER Experiment Name: At_10percent_PEG_P Parameter: Tissue Value: Whole Plant
  misc_feature: MA Experiment 20000527 PARAMETER Experiment Name: At_10percent_PEG_P Parameter: Treatment Value: 10percent PEG vs. No Treatment
  misc_feature: MA Experiment ID: 20000575 Result: Down-regulated in Transcription
  misc_feature: MA Experiment 20000575 PARAMETER Experiment Name: At_100uM_ABA_Mutants__P Parameter: Organism Value: A. thaliana
  misc_feature: MA Experiment 20000575 PARAMETER Experiment Name: At_100uM_ABA_Mutants__P Parameter: Plant Line Value: CS22
  misc_feature: MA Experiment 20000575 PARAMETER Experiment Name: At_100uM_ABA_Mutants__P Parameter: Timepoint (hr) Value: 6
  misc_feature: MA Experiment 20000575 PARAMETER Experiment Name: At_100uM_ABA_Mutants__P Parameter: Tissue Value: Whole Plant
  misc_feature: MA Experiment 20000575 PARAMETER Experiment Name: At_100uM_ABA_Mutants__P Parameter: Treatment Value: 1uM ABA vs. No Treatment
  misc_feature: MA Experiment ID: 20000576 Result: Down-regulated in Transcription
  misc_feature: MA Experiment 20000576 PARAMETER Experiment Name: At_100uM_ABA_Mutants__P Parameter: Organism Value: A. thaliana
  misc_feature: MA Experiment 20000576 PARAMETER Experiment Name: At_100uM_ABA_Mutants__P Parameter: Plant Line Value: CS23
  misc_feature: MA Experiment 20000576 PARAMETER Experiment Name: At_100uM_ABA_Mutants__P Parameter: Timepoint (hr) Value: 6
  misc_feature: MA Experiment 20000576 PARAMETER Experiment Name: At_100uM_ABA_Mutants__P Parameter: Tissue Value: Whole Plant
  misc_feature: MA Experiment 20000576 PARAMETER Experiment Name: At_100uM_ABA_Mutants__P Parameter: Treatment Value: 1uM ABA vs. No Treatment
  misc_feature: MA Experiment ID: 20000794 Result: Down-regulated in Transcription
  misc_feature: MA Experiment 20000794 PARAMETER Experiment Name: At_Petals_P Parameter: Age (day) Value: 23-25 days
  misc_feature: MA Experiment 20000794 PARAMETER Experiment Name: At_Petals_P Parameter: Plant Line Value: WS
  misc_feature: MA Experiment 20000794 PARAMETER Experiment Name: At_Petals_P Parameter: Tissue Value: Petals vs. Whole plant
  misc_feature: MA Experiment ID: 20001555 Result: Down-regulated in Transcription
  misc_feature: MA Experiment 20001555 PARAMETER Experiment Name: At_Drought_Soil_Dry_P Parameter: Age (day) Value: 24
  misc_feature: MA Experiment 20001555 PARAMETER Experiment Name: At_Drought_Soil_Dry_P Parameter: Organism Value: A. thaliana
  misc_feature: MA Experiment 20001555 PARAMETER Experiment Name: At_Drought_Soil_Dry_P Parameter: Plant Line Value: WS
  misc_feature: MA Experiment 20001555 PARAMETER Experiment Name: At_Drought_Soil_Dry_P Parameter: Post Timepoint (hr) Value: None
  misc_feature: MA Experiment 20001555 PARAMETER Experiment Name: At_Drought_Soil_Dry_P Parameter: Post-Treatment Value: None
  misc_feature: MA Experiment 20001555 PARAMETER Experiment Name: At_Drought_Soil_Dry_P Parameter: Timepoint (day) Value: 10
  misc_feature: MA Experiment 20001555 PARAMETER Experiment Name: At_Drought_Soil_Dry_P Parameter: Treatment Value: Drought vs. No Drought
  misc_feature: MA Experiment ID: 20001556 Result: Down-regulated in Transcription
  misc_feature: MA Experiment 20001556 PARAMETER Experiment Name: At_Drought_Soil_Dry_P Parameter: Age (day) Value: 26
  misc_feature: MA Experiment 20001556 PARAMETER Experiment Name: At_Drought_Soil_Dry_P Parameter: Organism Value: A. thaliana
  misc_feature: MA Experiment 20001556 PARAMETER Experiment Name: At_Drought_Soil_Dry_P Parameter: Plant Line Value: WS
  misc_feature: MA Experiment 20001556 PARAMETER Experiment Name: At_Drought_Soil_Dry_P Parameter: Post Timepoint (hr) Value: None
  misc_feature: MA Experiment 20001556 PARAMETER Experiment Name: At_Drought_Soil_Dry_P Parameter: Post-Treatment Value: None
  misc_feature: MA Experiment 20001556 PARAMETER Experiment Name: At_Drought_Soil_Dry_P Parameter: Timepoint (day) Value: 12
  misc_feature: MA Experiment 20001556 PARAMETER Experiment Name: At_Drought_Soil_Dry_P Parameter: Treatment Value: Drought vs. No Drought
  misc_feature: MA Experiment ID: 20001557 Result: Down-regulated in Transcription
  misc_feature: MA Experiment 20001557 PARAMETER Experiment Name: At_Drought_Soil_Dry_P Parameter: Age (day) Value: 27
  misc_feature: MA Experiment 20001557 PARAMETER Experiment Name: At_Drought_Soil_Dry_P Parameter: Organism Value: A. thaliana
  misc_feature: MA Experiment 20001557 PARAMETER Experiment Name: At_Drought_Soil_Dry_P Parameter: Plant Line Value: WS
  misc_feature: MA Experiment 20001557 PARAMETER Experiment Name: At_Drought_Soil_Dry_P Parameter: Post Timepoint (hr) Value: 3
  misc_feature: MA Experiment 20001557 PARAMETER Experiment Name: At_Drought_Soil_Dry_P Parameter: Post-Treatment Value: Re-Water vs. No Drought
  misc_feature: MA Experiment 20001557 PARAMETER Experiment Name: At_Drought_Soil_Dry_P Parameter: Timepoint (day) Value: 13
  misc_feature: MA Experiment 20001557 PARAMETER Experiment Name: At_Drought_Soil_Dry_P Parameter: Treatment Value: Drought vs. No Drought
  misc_feature: MA Experiment ID: 20001558 Result: Down-regulated in Transcription
  misc_feature: MA Experiment 20001558 PARAMETER Experiment Name: At_Drought_Soil_Dry_P Parameter: Age (day) Value: 27
  misc_feature: MA Experiment 20001558 PARAMETER Experiment Name: At_Drought_Soil_Dry_P Parameter: Organism Value: A. thaliana
  misc_feature: MA Experiment 20001558 PARAMETER Experiment Name: At_Drought_Soil_Dry_P Parameter: Plant Line Value: WS
  misc_feature: MA Experiment 20001558 PARAMETER Experiment Name: At_Drought_Soil_Dry_P Parameter: Post Timepoint (hr) Value: 6
  misc_feature: MA Experiment 20001558 PARAMETER Experiment Name: At_Drought_Soil_Dry_P Parameter: Post-Treatment Value: Re-Water vs. No Drought
  misc_feature: MA Experiment 20001558 PARAMETER Experiment Name: At_Drought_Soil_Dry_P Parameter: Timepoint (day) Value: 13
  misc_feature: MA Experiment 20001558 PARAMETER Experiment Name: At_Drought_Soil_Dry_P Parameter: Treatment Value: Drought vs. No Drought
  misc_feature: MA Experiment ID: 20001559 Result: Down-regulated in Transcription
  misc_feature: MA Experiment 20001559 PARAMETER Experiment Name: At_Drought_Soil_Dry_P Parameter: Age (day) Value: 28
  misc_feature: MA Experiment 20001559 PARAMETER Experiment Name: At_Drought_Soil_Dry_P Parameter: Organism Value: A. thaliana
  misc_feature: MA Experiment 20001559 PARAMETER Experiment Name: At_Drought_Soil_Dry_P Parameter: Plant Line Value: WS
  misc_feature: MA Experiment 20001559 PARAMETER Experiment Name: At_Drought_Soil_Dry_P Parameter: Post Timepoint (hr) Value: 29
  misc_feature: MA Experiment 20001559 PARAMETER Experiment Name: At_Drought_Soil_Dry_P Parameter: Post-Treatment Value: Re-Water vs. No Drought
  misc_feature: MA Experiment 20001559 PARAMETER Experiment Name: At_Drought_Soil_Dry_P Parameter: Timepoint (day) Value: 14
  misc_feature: MA Experiment 20001559 PARAMETER Experiment Name: At_Drought_Soil_Dry_P Parameter: Treatment Value: Drought vs. No Drought
  misc_feature: MA Experiment ID: 20001768 Result: Down-regulated in Transcription
  misc_feature: MA Experiment 20001768 PARAMETER Experiment Name: At_Far-red-enriched-adult_P Parameter: Age (day) Value: 28
  misc_feature: MA Experiment 20001768 PARAMETER Experiment Name: At_Far-red-enriched-adult_P Parameter: Light Value: Far-red enriched vs. White
  misc_feature: MA Experiment 20001768 PARAMETER Experiment Name: At_Far-red-enriched-adult_P Parameter: Organism Value: A. thaliana
  misc_feature: MA Experiment 20001768 PARAMETER Experiment Name: At_Far-red-enriched-adult_P Parameter: Plant Line Value: Columbia
  misc_feature: MA Experiment 20001768 PARAMETER Experiment Name: At_Far-red-enriched-adult_P Parameter: Timepoint (hr) Value: 1
  misc_feature: MA Experiment 20001768 PARAMETER Experiment Name: At_Far-red-enriched-adult_P Parameter: Tissue Value: Aerial
  misc_feature: MA Experiment ID: 20001904 Result: Down-regulated in Transcription
  misc_feature: MA Experiment 20001904 PARAMETER Experiment Name: At_Drought_Reproduction_P Parameter: Age (day) Value: 37
  misc_feature: MA Experiment 20001904 PARAMETER Experiment Name: At_Drought_Reproduction_P Parameter: Organism Value: A. thaliana
  misc_feature: MA Experiment 20001904 PARAMETER Experiment Name: At_Drought_Reproduction_P Parameter: Plant Line Value: WS
  misc_feature: MA Experiment 20001904 PARAMETER Experiment Name: At_Drought_Reproduction_P Parameter: Timepoint (day) Value: 7
  misc_feature: MA Experiment 20001904 PARAMETER Experiment Name: At_Drought_Reproduction_P Parameter: Tissue Value: Rosettes
  misc_feature: MA Experiment 20001904 PARAMETER Experiment Name: At_Drought_Reproduction_P Parameter: Treatment Value: Drought vs. No Drought
  misc_feature: MA Experiment ID: 20001906 Result: Up-regulated in Transcription
  misc_feature: MA Experiment 20001906 PARAMETER Experiment Name: At_Drought_Reproduction_P Parameter: Age (day) Value: 35
  misc_feature: MA Experiment 20001906 PARAMETER Experiment Name: At_Drought_Reproduction_P Parameter: Organism Value: A. thaliana
  misc_feature: MA Experiment 20001906 PARAMETER Experiment Name: At_Drought_Reproduction_P Parameter: Plant Line Value: WS
  misc_feature: MA Experiment 20001906 PARAMETER Experiment Name: At_Drought_Reproduction_P Parameter: Timepoint (day) Value: 5
  misc_feature: MA Experiment 20001906 PARAMETER Experiment Name: At_Drought_Reproduction_P Parameter: Tissue Value: Siliques
  misc_feature: MA Experiment 20001906 PARAMETER Experiment Name: At_Drought_Reproduction_P Parameter: Treatment Value: Drought vs. No Drought
  misc_feature: MA Experiment ID: 20001908 Result: Up-regulated in Transcription
  misc_feature: MA Experiment 20001908 PARAMETER Experiment Name: At_Drought_Reproduction_P Parameter: Age (day) Value: 40
  misc_feature: MA Experiment 20001908 PARAMETER Experiment Name: At_Drought_Reproduction_P Parameter: Organism Value: A. thaliana
  misc_feature: MA Experiment 20001908 PARAMETER Experiment Name: At_Drought_Reproduction_P Parameter: Plant Line Value: WS
  misc_feature: MA Experiment 20001908 PARAMETER Experiment Name: At_Drought_Reproduction_P Parameter: Timepoint (day) Value: 10
  misc_feature: MA Experiment 20001908 PARAMETER Experiment Name: At_Drought_Reproduction_P Parameter: Tissue Value: Siliques
  misc_feature: MA Experiment 20001908 PARAMETER Experiment Name: At_Drought_Reproduction_P Parameter: Treatment Value: Drought vs. No Drought
  misc_feature: MA Experiment ID: 20001911 Result: Down-regulated in Transcription
  misc_feature: MA Experiment 20001911 PARAMETER Experiment Name: At_Drought_Reproduction_P Parameter: Age (day) Value: 40
  misc_feature: MA Experiment 20001911 PARAMETER Experiment Name: At_Drought_Reproduction_P Parameter: Organism Value: A. thaliana
  misc_feature: MA Experiment 20001911 PARAMETER Experiment Name: At_Drought_Reproduction_P Parameter: Plant Line Value: WS
  misc_feature: MA Experiment 20001911 PARAMETER Experiment Name: At_Drought_Reproduction_P Parameter: Timepoint (day) Value: 10
  misc_feature: MA Experiment 20001911 PARAMETER Experiment Name: At_Drought_Reproduction_P Parameter: Tissue Value: Flowers
  misc_feature: MA Experiment 20001911 PARAMETER Experiment Name: At_Drought_Reproduction_P Parameter: Treatment Value: Drought vs. No Drought
aataacacaaaatcctcttctcttctttaataacttttagaaacacaaataaaagtttaattacttttaagcccaacaaaaatgggttatgctaaatcagccatgctgatcttcttactagcattggtcatcgcatcttgtgccacggccatggacatgtccgttgtttcctccaacgataaccaccacgtgaccgccggtcccggccgccgtcagggtattttcgacgctgaagccaccttgatgttcgagtcatggatggtcaaacatgggaaagtgtacgactccgttaccgagaaggaacggcgtttaactatttttgaggacaacctccgttttatcactaaccggaacgctgagaatctcagttaccggcttggtttgaatcggtttgcggatttatctctccatgaatacggagaaatttgccatggggctgatccaagacctcctaggaaccacgtcttcatgactagcagcaaccgatacaagactagtgatggtgatgttcttcctaagtccgttgactggagaagaaggcgcagtgactgaagtcaaagatcaaggcctttgcaggagttgttgggctttctccactgtgggagcagtggaaggtttaaacaagattgtgactggagagctagtaactttgtctgagcaagatttgatcaattgtaacaaagaaaacaatggttgcggaggaggcaaagtcgagacagcctatgagttcatcatgaacaatggtggtcttggtaccgacaacgattatccttacaaagctctcaatggagtctgcgacggccgcctcaaggaaaacaacaagaatgttatgattgatgggtatgagaatttgcctgcaaacgatgaatccgctcttatgaaagcggttgctcaccagcctgtgactgccgttgtcgattccagcagccgagagtttcagctttatgaatcgggagtgtttgatggaacttgcggaacaaacctaaaccatggtgttgttgtggtcgggtatggaaccgagaatggtcgtgactactggattgtgaaaaactcgaggggcgacacatggggggaggctggctacatgaagatggctcgcaacattgccaatccaagaggcctatgtggcatcgcaatgcgagcttcataccctctcaagaactcgttttctacggataaagtttcggttgcctaataatatgaactaaatgtatgccatggaacggatcggttaagccattatcgttattcgactttgaaggaaactaaaaagtaatgtggtcgattggtttggttttgttatatattatgcatttgtatgggggtcagtcaatgtttgaactttgtataatatttctttgggtctagtg

SEQ ID NO: 27349 - protein, 231 aa, Arabidopsis thaliana
  peptide (1)..(231): Ceres Seq. ID no. 12331435
  misc_feature (13)..(219): Pfam Name: Papain family cysteine protease Pfam Description: Papain family cysteine protease
  misc_feature (12)..(221): Homolog of NCBI NO: 30141019 NR Description: cysteine protease-1 [Helianthus annuus]
  misc_feature (12)..(224): Homolog of NCBI NO: 18416165 NR Description: cysteine proteinase; protein id: At4g23520.1
  misc_feature (12)..(220): Homolog of NCBI NO: 18141283 NR Description: senescence-associated cysteine protease [Brassica
  misc_feature (12)..(221): Homolog of NCBI NO: 18401614 NR Description: cysteine proteinase RD21A
  misc_feature (12)..(221): Homolog of NCBI NO: 14517542 NR Description: F2G19.31/F2G19.31 [Arabidopsis thaliana]
  misc_feature (12)..(220): Homolog of NCBI NO: 18422289 NR Description: cysteine proteinase RD21A
  misc_feature (12)..(221): Homolog of NCBI NO: 18141285 NR Description: senescence-associated cysteine protease [Brassica
  misc_feature (13)..(231): Homolog of NCBI NO: 20260334 NR Description: drought-inducible cysteine proteinase RD21A
  misc_feature (13)..(231): Homolog of NCBI NO: 18413505 NR Description: cysteine proteinase; protein id: At4g11310.1
  misc_feature (13)..(231): Homolog of NCBI NO: 18413507 NR Description: cysteine proteinase
MVMFFLSPLTGEEGAVTEVKDQGLCRSCWAFSTVGAVEGLNKIVTGELVTLSEQDLINCNKENNGCGGGKVETAYEFIMNNGGLGTDNDYPYKALNGVCDGRLKENNKNVMIDGYENLPANDESALMKAVAHQPVTAVVDSSSREFQLYESGVFDGTCGTNLNHGVVVVGYGTENGRDYWIVKNSRGDTWGEAGYMKMARNIANPRGLCGIAMRASYPLKNSFSTDKVSVA

SEQ ID NO: 27350 - protein, 229 aa, Arabidopsis thaliana
  peptide (1)..(229): Ceres Seq. ID no. 12331436
  misc_feature (11)..(217): Pfam Name: Papain family cysteine protease Pfam Description: Papain family cysteine protease
  misc_feature (10)..(219): Homolog of NCBI NO: 30141019 NR Description: cysteine protease-1 [Helianthus annuus]
  misc_feature (10)..(222): Homolog of NCBI NO: 18416165 NR Description: cysteine proteinase; protein id: At4g23520.1
  misc_feature (10)..(218): Homolog of NCBI NO: 18141283 NR Description: senescence-associated cysteine protease [Brassica
  misc_feature (10)..(219): Homolog of NCBI NO: 18401614 NR Description: cysteine proteinase RD21A
  misc_feature (10)..(219): Homolog of NCBI NO: 14517542 NR Description: F2G19.31/F2G19.31 [Arabidopsis thaliana]
  misc_feature (10)..(218): Homolog of NCBI NO: 18422289 NR Description: cysteine proteinase RD21A
  misc_feature (10)..(219): Homolog of NCBI NO: 18141285 NR Description: senescence-associated cysteine protease [Brassica
  misc_feature (11)..(229): Homolog of NCBI NO: 20260334 NR Description: drought-inducible cysteine proteinase RD21A
  misc_feature (11)..(229): Homolog of NCBI NO: 18413505 NR Description: cysteine proteinase; protein id: At4g11310.1
  misc_feature (11)..(229): Homolog of NCBI NO: 18413507 NR Description: cysteine proteinase
MFFLSPLTGEEGAVTEVKDQGLCRSCWAFSTVGAVEGLNKIVTGELVTLSEQDLINCNKENNGCGGGKVETAYEFIMNNGGLGTDNDYPYKALNGVCDGRLKENNKNVMIDGYENLPANDESALMKAVAHQPVTAVVDSSSREFQLYESGVFDGTCGTNLNHGVVVVGYGTENGRDYWIVKNSRGDTWGEAGYMKMARNIANPRGLCGIAMRASYPLKNSFSTDKVSVA

SEQ ID NO: 27351 - protein, 156 aa, Arabidopsis thaliana
  peptide (1)..(156): Ceres Seq. ID no. 12331437
  misc_feature (7)..(153): Homolog of NCBI NO: 30141019 NR Description: cysteine protease-1 [Helianthus annuus]
  misc_feature (1)..(152): Homolog of NCBI NO: 18416165 NR Description: cysteine proteinase; protein id: At4g23520.1
  misc_feature (1)..(152): Homolog of NCBI NO: 18141283 NR Description: senescence-associated cysteine protease [Brassica
  misc_feature (1)..(153): Homolog of NCBI NO: 18401614 NR Description: cysteine proteinase RD21A
  misc_feature (1)..(153): Homolog of NCBI NO: 14517542 NR Description: F2G19.31/F2G19.31 [Arabidopsis thaliana]
  misc_feature (1)..(152): Homolog of NCBI NO: 18422289 NR Description: cysteine proteinase RD21A
  misc_feature (1)..(152): Homolog of NCBI NO: 18141285 NR Description: senescence-associated cysteine protease [Brassica
  misc_feature (8)..(151): Homolog of NCBI NO: 20260334 NR Description: drought-inducible cysteine proteinase RD21A
  misc_feature (1)..(151): Homolog of NCBI NO: 18413505 NR Description: cysteine proteinase; protein id: At4g11310.1
  misc_feature (1)..(151): Homolog of NCBI NO: 18413507 NR Description: cysteine proteinase
MGYAKSAMLIFLLALVIASCATAMDMSVVSSNDNHHVTAGPGRRQGIFDAEATLMFESWMVKHGKVYDSVTEKERRLTIFEDNLRFITNRNAENLSYRLGLNRFADLSLHEYGEICHGADPRPPRNHVFMTSSNRYKTSDGDVLPKSVDWRRRRSD

SEQ ID NO: 27352 - DNA, 1461 bp, Arabidopsis thaliana
  misc_feature (1)..(1461): Ceres Seq. ID no. 12389071
  misc_feature: MA Experiment ID: 20000111 Result: Down-regulated in Transcription
  misc_feature: MA Experiment 20000111 PARAMETER Experiment Name: At_42deg_Heat_cDNA_P Parameter: Temperature (deg C) Value: 42 vs. 22
  misc_feature: MA Experiment 20000111 PARAMETER Experiment Name: At_42deg_Heat_cDNA_P Parameter: Timepoint (hr) Value: 6
  misc_feature: MA Experiment 20000111 PARAMETER Experiment Name: At_42deg_Heat_cDNA_P Parameter: Tissue Value: Aerial
  misc_feature: MA Experiment ID: 20000112 Result: Down-regulated in Transcription
  misc_feature: MA Experiment 20000112 PARAMETER Experiment Name: At_42deg_Heat_cDNA_P Parameter: Temperature (deg C) Value: 42 vs. 22
  misc_feature: MA Experiment 20000112 PARAMETER Experiment Name: At_42deg_Heat_cDNA_P Parameter: Timepoint (hr) Value: 2
  misc_feature: MA Experiment 20000112 PARAMETER Experiment Name: At_42deg_Heat_cDNA_P Parameter: Tissue Value: Aerial
  misc_feature: MA Experiment ID: 20000113 Result: Down-regulated in Transcription
  misc_feature: MA Experiment 20000113 PARAMETER Experiment Name: At_42deg_Heat_cDNA_P Parameter: Temperature (deg C) Value: 42 vs. 22
  misc_feature: MA Experiment 20000113 PARAMETER Experiment Name: At_42deg_Heat_cDNA_P Parameter: Timepoint (hr) Value: 8
  misc_feature: MA Experiment 20000113 PARAMETER Experiment Name: At_42deg_Heat_cDNA_P Parameter: Tissue Value: Aerial
  misc_feature: MA Experiment ID: 20000144 Result: Down-regulated in Transcription
  misc_feature: MA Experiment 20000144 PARAMETER Experiment Name: At_42deg_Heat_cDNA_P Parameter: Temperature (deg C) Value: 42 vs. 22
  misc_feature: MA Experiment 20000144 PARAMETER Experiment Name: At_42deg_Heat_cDNA_P Parameter: Timepoint (hr) Value: 1
  misc_feature: MA Experiment 20000144 PARAMETER Experiment Name: At_42deg_Heat_cDNA_P Parameter: Tissue Value: Aerial
  misc_feature: MA Experiment ID: 20000224 Result: Down-regulated in Transcription
agattgtccctaggagtcactgttatcgctctttcaattactgtaatgttgaatttgggtttcatctactaactaagatgaagtttctttgataggatggctcgcttcagttttccttgttttccaaattttgggggttttaatcaggtccaagtaattaggtgaagtttgcctctctctttttttggatctcattggtctgcaatagtctcaattaaaccttctagtttgcatattaccagttgagtgactcttggttccagattcgtttttggtggtcatagtcgcgagctgtgacaaatcgggggcctgagatttcagaaactgctgataattgggtctcaccatctgacattccactcatagaacctaatagtaaagaggatgagagaggcacagctaggcggtcacactctgaggtcccatggaatgactgttgcaaggactcacatgcatgattggatcattctcgtgttacttgttattctcgagtgtgtactccttataatccacccattttatcgctttgtaggtaaagatatgatgactgatctaagttacccgttaaagagtaacaccgtaccaatttggtctgtcccggtatatgcgatgctgttacctttggtaatcttcatctttatctacttccgtcgaagagatgtttatgatcttcatcacgcggtgctaggtctcttatactctgttctggtgacagcagtacttaccgatgcaataaagaatgcagttggtcgaccacgtcctgacttcttctggcgttgttttccagatggcaaagctctttatgatagccttggagatgttatatgccatggtgataaaagcgtcataagggaaggtcacaaaagctttccaagtggacacacgtcatggtctttttcgggtctcggatttctttcgctttacttatcgggaaagattcaagcatttgacggtaaaggccacgttgcaaagctatgcatagtcatactccctttgctatttgcagctcttgtcggcatttcccgtgttgatgactattggcatcattggcaagacgtctttgcaggaggcttgctaggtcttgcgatctctacaatctgttatcttcaatttttcccgccaccatatcacaccgaaggttggggaccatatgcttacttccaagtgttggaggctgcgagagtgcaaggagcagcgaatggagcagtgcagcagccgccgccccaagttaacaacggtgaagaagaagacggtgggtttatgggtttacatttggtggataatccgactatgaggagagaagaggatgtagaaactggtagaggctgagatgaagaaactctgaagctggtttggttacttgttaggacactttctcttgttcttttgattctttgttggacaactttagtagatttctctaagataactaatagagtcgtttggttttggttttggttt

SEQ ID NO: 27353 - protein, 314 aa, Arabidopsis thaliana
  peptide (1)..(314): Ceres Seq. ID no. 12389072
  misc_feature (108)..(248): Pfam Name: PAP2 superfamily Pfam Description: PAP2 superfamily
  misc_feature (1)..(284): Homolog of NCBI NO: 10673973 NR Description: phosphatidic acid phosphatase beta [Vigna
  misc_feature (1)..(273): Homolog of NCBI NO: 21554001 NR Description: putative phosphatidic acid phosphatase
  misc_feature (1)..(273): Homolog of NCBI NO: 25353094 NR Description: probable phosphatidic acid phosphatase
  misc_feature (1)..(273): Homolog of NCBI NO: 18379166 NR Description: putative phosphatidic acid phosphatase
  misc_feature (1)..(273): Homolog of NCBI NO: 15724220 NR Description: At2g01180/F10A8.6 [Arabidopsis thaliana]
  misc_feature (1)..(313): Homolog of NCBI NO: 38637528 NR Description: unknown protein [Oryza sativa (japonica
  misc_feature (1)..(271): Homolog of NCBI NO: 15218051 NR Description: putative phosphatidic acid phosphatase
  misc_feature (1)..(314): Homolog of NCBI NO: 9621903 NR Description: phosphatidic acid phosphatase alpha [Vigna
  misc_feature (1)..(314): Homolog of NCBI NO: 6957723 NR Description: putative phosphatidate phosphohydrolase
  misc_feature (1)..(314): Homolog of NCBI NO: 18396250 NR Description: putative phosphatidate phosphohydrolase
MREAQLGGHTLRSHGMTVARTHMHDWIILVLLVILECVLLIIHPFYRFVGKDMMTDLSYPLKSNTVPIWSVPVYAMLLPLVIFIFIYFRRRDVYDLHHAVLGLLYSVLVTAVLTDAIKNAVGRPRPDFFWRCFPDGKALYDSLGDVICHGDKSVIREGHKSFPSGHTSWSFSGLGFLSLYLSGKIQAFDGKGHVAKLCIVILPLLFAALVGISRVDDYWHHWQDVFAGGLLGLAISTICYLQFFPPPYHTEGWGPYAYFQVLEAARVQGAANGAVQQPPPQVNNGEEEDGGFMGLHLVDNPTMRREEDVETGRG

SEQ ID NO: 27354 - protein, 299 aa, Arabidopsis thaliana
  peptide (1)..(299): Ceres Seq. ID no. 12389073
  misc_feature (93)..(233): Pfam Name: PAP2 superfamily Pfam Description: PAP2 superfamily
  misc_feature (1)..(298): Homolog of NCBI NO: 38637528 NR Description: unknown protein [Oryza sativa (japonica
  misc_feature (1)..(269): Homolog of NCBI NO: 10673973 NR Description: phosphatidic acid phosphatase beta [Vigna
  misc_feature (1)..(258): Homolog of NCBI NO: 21554001 NR Description: putative phosphatidic acid phosphatase
  misc_feature (1)..(258): Homolog of NCBI NO: 25353094 NR Description: probable phosphatidic acid phosphatase
  misc_feature (1)..(258): Homolog of NCBI NO: 18379166 NR Description: putative phosphatidic acid phosphatase
  misc_feature (1)..(258): Homolog of NCBI NO: 15724220 NR Description: At2g01180/F10A8.6 [Arabidopsis thaliana]
  misc_feature (1)..(256): Homolog of NCBI NO: 15218051 NR Description: putative phosphatidic acid phosphatase
  misc_feature (1)..(299): Homolog of NCBI NO: 9621903 NR Description: phosphatidic acid phosphatase alpha [Vigna
  misc_feature (1)..(299): Homolog of NCBI NO: 6957723 NR Description: putative phosphatidate phosphohydrolase
  misc_feature (1)..(299): Homolog of NCBI NO: 18396250 NR Description: putative phosphatidate phosphohydrolase
MTVARTHMHDWIILVLLVILECVLLIIHPFYRFVGKDMMTDLSYPLKSNTVPIWSVPVYAMLLPLVIFIFIYFRRRDVYDLHHAVLGLLYSVLVTAVLTDAIKNAVGRPRPDFFWRCFPDGKALYDSLGDVICHGDKSVIREGHKSFPSGHTSWSFSGLGFLSLYLSGKIQAFDGKGHVAKLCIVILPLLFAALVGISRVDDYWHHWQDVFAGGLLGLAISTICYLQFFPPPYHTEGWGPYAYFQVLEAARVQGAANGAVQQPPPQVNNGEEEDGGFMGLHLVDNPTMRREEDVETGRG

SEQ ID NO: 27355 - protein, 292 aa, Arabidopsis thaliana
  peptide (1)..(292): Ceres Seq. ID no. 12389074
  misc_feature (86)..(226): Pfam Name: PAP2 superfamily Pfam Description: PAP2 superfamily
  misc_feature (1)..(291): Homolog of NCBI NO: 38637528 NR Description: unknown protein [Oryza sativa (japonica
  misc_feature (1)..(262): Homolog of NCBI NO: 10673973 NR Description: phosphatidic acid phosphatase beta [Vigna
  misc_feature (1)..(251): Homolog of NCBI NO: 21554001 NR Description: putative phosphatidic acid phosphatase
  misc_feature (1)..(251): Homolog of NCBI NO: 25353094 NR Description: probable phosphatidic acid phosphatase
  misc_feature (1)..(251): Homolog of NCBI NO: 18379166 NR Description: putative phosphatidic acid phosphatase
  misc_feature (1)..(251): Homolog of NCBI NO: 15724220 NR Description: At2g01180/F10A8.6 [Arabidopsis thaliana]
  misc_feature (1)..(249): Homolog of NCBI NO: 15218051 NR Description: putative phosphatidic acid phosphatase
  misc_feature (1)..(292): Homolog of NCBI NO: 9621903 NR Description: phosphatidic acid phosphatase alpha [Vigna
  misc_feature (1)..(292): Homolog of NCBI NO: 6957723 NR Description: putative phosphatidate phosphohydrolase
  misc_feature (1)..(292): Homolog of NCBI NO: 18396250 NR Description: putative phosphatidate phosphohydrolase
MHDWIILVLLVILECVLLIIHPFYRFVGKDMMTDLSYPLKSNTVPIWSVPVYAMLLPLVIFIFIYFRRRDVYDLHHAVLGLLYSVLVTAVLTDAIKNAVGRPRPDFFWRCFPDGKALYDSLGDVICHGDKSVIREGHKSFPSGHTSWSFSGLGFLSLYLSGKIQAFDGKGHVAKLCIVILPLLFAALVGISRVDDYWHHWQDVFAGGLLGLAISTICYLQFFPPPYHTEGWGPYAYFQVLEAARVQGAANGAVQQPPPQVNNGEEEDGGFMGLHLVDNPTMRREEDVETGRG

SEQ ID NO: 27356 - DNA, 1258 bp, Arabidopsis thaliana
  misc_feature (1)..(1258): Ceres Seq. ID no. 13495791
  misc_feature: MA Experiment ID: 108433 Result: Down-regulated in Transcription
  misc_feature: MA Experiment 108433 PARAMETER Experiment Name: At_rhl_Mutant2_cDNA_P Parameter: Age (day) Value: 7
  misc_feature: MA Experiment 108433 PARAMETER Experiment Name: At_rhl_Mutant2_cDNA_P Parameter: Organism Value: A. thaliana
  misc_feature: MA Experiment 108433 PARAMETER Experiment Name: At_rhl_Mutant2_cDNA_P Parameter: Plant Line Value: rhl Mutant vs. wt landsburg
  misc_feature: MA Experiment 108433 PARAMETER Experiment Name: At_rhl_Mutant2_cDNA_P Parameter: Tissue Value: Roots
  misc_feature: MA Experiment ID: 108434 Result: Down-regulated in Transcription
  misc_feature: MA Experiment 108434 PARAMETER Experiment Name: At_Root_Tips_cDNA_P Parameter: Tissue Value: Root Tips
  misc_feature: MA Experiment ID: 108595 Result: Up-regulated in Transcription
  misc_feature: MA Experiment 108595 PARAMETER Experiment Name: At_Ler-pi_Ovule_cDNA_P Parameter: Plant Line Value: null
  misc_feature: MA Experiment ID: 20000179 Result: Down-regulated in Transcription
  misc_feature: MA Experiment 20000179 PARAMETER Experiment Name: At_Germinating_Seeds_P Parameter: Age (hr) Value: 6 vs. 0
  misc_feature: MA Experiment 20000179 PARAMETER Experiment Name: At_Germinating_Seeds_P Parameter: Tissue Value: Germinating Seeds
  misc_feature: MA Experiment ID: 20000180 Result: Down-regulated in Transcription
  misc_feature: MA Experiment 20000180 PARAMETER Experiment Name: At_Germinating_Seeds_P Parameter: Age (hr) Value: 24 vs. 0
  misc_feature: MA Experiment 20000180 PARAMETER Experiment Name: At_Germinating_Seeds_P Parameter: Tissue Value: Germinating Seeds
  misc_feature: MA Experiment ID: 20000184 Result: Down-regulated in Transcription
  misc_feature: MA Experiment 20000184 PARAMETER Experiment Name: At_Shoots__P Parameter: Age (day) Value: 7
  misc_feature: MA Experiment 20000184 PARAMETER Experiment Name: At_Shoots__P Parameter: Tissue Value: Shoots vs. Whole Plant
  misc_feature: MA Experiment ID: 20000264 Result: Down-regulated in Transcription
  misc_feature: MA Experiment 20000264 PARAMETER Experiment Name: At_Open_Flower_P Parameter: Age (day) Value: 21
  misc_feature: MA Experiment 20000264 PARAMETER Experiment Name: At_Open_Flower_P Parameter: Plant Line Value: WS
  misc_feature: MA Experiment 20000264 PARAMETER Experiment Name: At_Open_Flower_P Parameter: Tissue Value: Open Flower vs. Whole Plant
  misc_feature: MA Experiment ID: 20000451 Result: Up-regulated in Transcription
  misc_feature: MA Experiment 20000451 PARAMETER Experiment Name: At_CS6879_Shoots-Roots_P Parameter: Age (day) Value: 14
  misc_feature: MA Experiment 20000451 PARAMETER Experiment Name: At_CS6879_Shoots-Roots_P Parameter: Organism Value: A. thaliana
  misc_feature: MA Experiment 20000451 PARAMETER Experiment Name: At_CS6879_Shoots-Roots_P Parameter: Plant Line Value: CS6879 vs. WS
  misc_feature: MA Experiment 20000451 PARAMETER Experiment Name: At_CS6879_Shoots-Roots_P Parameter: Tissue Value: Roots
  misc_feature: MA Experiment ID: 20001557 Result: Up-regulated in Transcription
  misc_feature: MA Experiment 20001557 PARAMETER Experiment Name: At_Drought_Soil_Dry_P Parameter: Age (day) Value: 27
  misc_feature: MA Experiment 20001557 PARAMETER Experiment Name: At_Drought_Soil_Dry_P Parameter: Organism Value: A. thaliana
  misc_feature: MA Experiment 20001557 PARAMETER Experiment Name: At_Drought_Soil_Dry_P Parameter: Plant Line Value: WS
  misc_feature: MA Experiment 20001557 PARAMETER Experiment Name: At_Drought_Soil_Dry_P Parameter: Post Timepoint (hr) Value: 3
  misc_feature: MA Experiment 20001557 PARAMETER Experiment Name: At_Drought_Soil_Dry_P Parameter: Post-Treatment Value: Re-Water vs. No Drought
  misc_feature: MA Experiment 20001557 PARAMETER Experiment Name: At_Drought_Soil_Dry_P Parameter: Timepoint (day) Value: 13
  misc_feature: MA Experiment 20001557 PARAMETER Experiment Name: At_Drought_Soil_Dry_P Parameter: Treatment Value: Drought vs. No Drought
accagaaaaaggaacaaaacaaaaataaagcgcgaaattagttttcaccggcgagattttttatcctctctacgagataacacttagaagaagaggcagttaaaacagagagacgacgtcgtgttatttttccaaattccggtgatctgagaatgacgtcggggactagaacgccgacttggaaagagagagagaacaacaaacggcgagagcggcgaagacgagcgattgcggctaagatcttcgcaggactaaggattcatggaaacttcaagctccctaaacactgcgacaacaatgaagtcctcaaagctttatgcaatgaagctggttggactgtagaagacgacggaactacttaccgcaagggatgcaaaccaatggatcgaatggacctcatgaatggttctacttcagctagtccatgctcatcgtatcaacatagccctcgtgcttcctacaatccaagcccttcgtcttcatcattcccgagtcctacaaacccatttggtgatgctaactcactaatcccatggctcaagaacctctcttcaaactcaccttccaagcttcccttcttccatggaaattcaataagcgctcccgtgactccgccattggctcgaagccctactcgtgatcaagtaaccatccctgactctggatggctctcaggaatgcaaactccgcagagcggaccgtcttctcctactttcagtttagtttcaagaaacccgtttttcgacaaagaggcttttaaaatgggagattgtaattcaccaatgtggactcctggacaaagtggaaactgctctccagctattcctgctggtgttgatcagaactctgatgtgccaatggctgatggaatgacggctgagtttgcgtttggttgtaacgcaatggctgcgaatggaatggtgaagccttgggaaggagaaaggatacatggagaatgtgtttcagatgatttagaacttacacttggaaactcaagaaccagatgatcatttcagagaagaatcaaagtcgtttgctatcattaagtcttcttttttgtctgtcttttttttccagtgtgatgtttaaaggtgactcagaggaaaaaaaggagaatagaaagagaaacaaaaaaagaacattttgagctctgttttcttttttttttttctttttttttttgttggcttttgactaaagttgtagttagaatctattttatatcttgaagcttctttaaaaaaaaagttatttgtgg

SEQ ID NO: 27357 - protein, 284 aa, Arabidopsis thaliana
  peptide (1)..(284): Ceres Seq. ID no. 13495792
  misc_feature (2)..(141): Pfam Name: Plant protein of unknown function (DUF822) Pfam Description: Plant protein of unknown function (DUF822)
  misc_feature (6)..(229): Homolog of NCBI NO: 18394728 NR Description: expressed protein [Arabidopsis thaliana]
  misc_feature (6)..(229): Homolog of NCBI NO: 6651069 NR Description: 107 protein [Arabidopsis thaliana]
  misc_feature (6)..(229): Homolog of NCBI NO: 21592457 NR Description: unknown [Arabidopsis thaliana]
  misc_feature (2)..(187): Homolog of NCBI NO: 15215731 NR Description: AT4g36780/C7A10_580 [Arabidopsis thaliana]
  misc_feature (2)..(225): Homolog of NCBI NO: 15230298 NR Description: expressed protein [Arabidopsis thaliana]
  misc_feature (4)..(284): Homolog of NCBI NO: 14626761 NR Description: mature anther-specific protein LAT61
  misc_feature (4)..(225): Homolog of NCBI NO: 34903720 NR Description: P0489A05.26 [Oryza sativa (japonica
  misc_feature (1)..(279): Homolog of NCBI NO: 33146833 NR Description: putative mature anther-specific protein LAT61
  misc_feature (1)..(197): Homolog of NCBI NO: 18412073 NR Description: expressed protein [Arabidopsis thaliana]
  misc_feature (1)..(284): Homolog of NCBI NO: 15234055 NR Description: expressed protein [Arabidopsis thaliana]
MTSGTRTPTWKERENNKRRERRRRAIAAKIFAGLRIHGNFKLPKHCDNNEVLKALCNEAGWTVEDDGTTYRKGCKPMDRMDLMNGSTSASPCSSYQHSPRASYNPSPSSSSFPSPTNPFGDANSLIPWLKNLSSNSPSKLPFFHGNSISAPVTPPLARSPTRDQVTIPDSGWLSGMQTPQSGPSSPTFSLVSRNPFFDKEAFKMGDCNSPMWTPGQSGNCSPAIPAGVDQNSDVPMADGMTAEFAFGCNAMAANGMVKPWEGERIHGECVSDDLELTLGNSRTR

SEQ ID NO: 27358 - protein, 208 aa, Arabidopsis thaliana
  peptide (1)..(208): Ceres Seq. ID no. 13495793
  misc_feature (1)..(65): Pfam Name: Plant protein of unknown function (DUF822) Pfam Description: Plant protein of unknown function (DUF822)
  misc_feature (1)..(153): Homolog of NCBI NO: 18394728 NR Description: expressed protein [Arabidopsis thaliana]
  misc_feature (1)..(153): Homolog of NCBI NO: 6651069 NR Description: 107 protein [Arabidopsis thaliana]
  misc_feature (1)..(153): Homolog of NCBI NO: 21592457 NR Description: unknown [Arabidopsis thaliana]
  misc_feature (1)..(111): Homolog of NCBI NO: 15215731 NR Description: AT4g36780/C7A10_580 [Arabidopsis thaliana]
  misc_feature (1)..(149): Homolog of NCBI NO: 15230298 NR Description: expressed protein [Arabidopsis thaliana]
  misc_feature (1)..(208): Homolog of NCBI NO: 14626761 NR Description: mature anther-specific protein LAT61
  misc_feature (1)..(149): Homolog of NCBI NO: 34903720 NR Description: P0489A05.26 [Oryza sativa (japonica
  misc_feature (1)..(203): Homolog of NCBI NO: 33146833 NR Description: putative mature anther-specific protein LAT61
  misc_feature (1)..(121): Homolog of NCBI NO: 18412073 NR Description: expressed protein [Arabidopsis thaliana]
  misc_feature (1)..(208): Homolog of NCBI NO: 15234055 NR Description: expressed protein [Arabidopsis thaliana]
MDRMDLMNGSTSASPCSSYQHSPRASYNPSPSSSSFPSPTNPFGDANSLIPWLKNLSSNSPSKLPFFHGNSISAPVTPPLARSPTRDQVTIPDSGWLSGMQTPQSGPSSPTFSLVSRNPFFDKEAFKMGDCNSPMWTPGQSGNCSPAIPAGVDQNSDVPMADGMTAEFAFGCNAMAANGMVKPWEGERIHGECVSDDLELTLGNSRTR

SEQ ID NO: 27359 - protein, 205 aa, Arabidopsis thaliana
  peptide (1)..(205): Ceres Seq. ID no. 13495794
  misc_feature (1)..(62): Pfam Name: Plant protein of unknown function (DUF822) Pfam Description: Plant protein of unknown function (DUF822)
  misc_feature (1)..(150): Homolog of NCBI NO: 18394728 NR Description: expressed protein [Arabidopsis thaliana]
  misc_feature (1)..(150): Homolog of NCBI NO: 6651069 NR Description: 107 protein [Arabidopsis thaliana]
  misc_feature (1)..(150): Homolog of NCBI NO: 21592457 NR Description: unknown [Arabidopsis thaliana]
  misc_feature (1)..(108): Homolog of NCBI NO: 15215731 NR Description: AT4g36780/C7A10_580 [Arabidopsis thaliana]
  misc_feature (1)..(146): Homolog of NCBI NO: 15230298 NR Description: expressed protein [Arabidopsis thaliana]
  misc_feature (1)..(205): Homolog of NCBI NO: 14626761 NR Description: mature anther-specific protein LAT61
  misc_feature (1)..(146): Homolog of NCBI NO: 34903720 NR Description: P0489A05.26 [Oryza sativa (japonica
  misc_feature (1)..(200): Homolog of NCBI NO: 33146833 NR Description: putative mature anther-specific protein LAT61
  misc_feature (1)..(118): Homolog of NCBI NO: 18412073 NR Description: expressed protein [Arabidopsis thaliana]
  misc_feature (1)..(205): Homolog of NCBI NO: 15234055 NR Description: expressed protein [Arabidopsis thaliana]
MDLMNGSTSASPCSSYQHSPRASYNPSPSSSSFPSPTNPFGDANSLIPWLKNLSSNSPSKLPFFHGNSISAPVTPPLARSPTRDQVTIPDSGWLSGMQTPQSGPSSPTFSLVSRNPFFDKEAFKMGDCNSPMWTPGQSGNCSPAIPAGVDQNSDVPMADGMTAEFAFGCNAMAANGMVKPWEGERIHGECVSDDLELTLGNSRTR

SEQ ID NO: 27360 - DNA, 751 bp, Arabidopsis thaliana
  misc_feature (1)..(751): Ceres Seq. ID no. 12421235
  misc_feature: MA Experiment ID: 20001451 Result: Down-regulated in Transcription
  misc_feature: MA Experiment 20001451 PARAMETER Experiment Name: At_Far-red-induction_P Parameter: Age (day) Value: 7
  misc_feature: MA Experiment 20001451 PARAMETER Experiment Name: At_Far-red-induction_P Parameter: Light Value: Far-red vs. White
  misc_feature: MA Experiment 20001451 PARAMETER Experiment Name: At_Far-red-induction_P Parameter: Organism Value: A. thaliana
  misc_feature: MA Experiment 20001451 PARAMETER Experiment Name: At_Far-red-induction_P Parameter: Plant Line Value: Columbia
  misc_feature: MA Experiment 20001451 PARAMETER Experiment Name: At_Far-red-induction_P Parameter: Timepoint (hr) Value: 24
  misc_feature: MA Experiment 20001451 PARAMETER Experiment Name: At_Far-red-induction_P Parameter: Tissue Value: Whole Plant
aaacaactacaaacaacatttctgagattgcgccggagtcaaggagagggagagagcgatccaacggttgagatgtttctacgggcaatcggacggccattattggctaaagtgaagcagacgacggggatcgtcgggcttgacgttgttcccaacgcgagagcggtgctgatcgatctctacagcaaaaccctaaaggagatccaagctgtgccggaggatgaagggtaccgtaaagcggtggaatcattcacgcgccaacgtctcaatgtgtgcaaggaagaagaagattgggagatgattgagaagcggcttggttgtggtcaagtcgaagagcttatcgaagaggctcgcgatgagctcacactcattgggaaaatgattgagtgggatccttggggtgtaccagatgattacgagtgtgaagtgattgagaatgatgcgccgattccaaagcatgttcctcagcaccgacctggtcctcttcctgagcagttctataaaacgcttgaaggtctaattgcagagtctaaaacagagatcccagctgctacacccagcgatccgcagttgaaggagtaacttccagtttttacatattgtgtgcttgttgcttttttggctagagttgtttccgaatcagtggtcaagcctctgaataaattgcttaataattttcataacgataacaatgtctgttcacaaatgttttatcactcttattaaacaaatgatgtttcttcccttttgc

SEQ ID NO: 27361 - protein, 193 aa, Arabidopsis thaliana
  peptide (1)..(193): Ceres Seq. ID no. 12421236
  misc_feature (51)..(107): Pfam Name: ETC complex I subunit conserved region Pfam Description: ETC complex I subunit conserved region
  misc_feature (38)..(133): Homolog of NCBI NO: 13386100 NR Description: RIKEN cDNA 2900002J19 [Mus musculus]
  misc_feature (38)..(133): Homolog of NCBI NO: 12844779 NR Description: unnamed protein product [Mus musculus]
  misc_feature (38)..(133): Homolog of NCBI NO: 28461281 NR Description: NADH dehydrogenase (ubiquinone) 1 alpha
  misc_feature (38)..(133): Homolog of NCBI NO: 233598 NR Description: 13 kDa-B polypeptide of iron-sulfur protein
  misc_feature (38)..(144): Homolog of NCBI NO: 28829489 NR Description: similar to NADH-ubiquinone oxidoreductase 13 KD-B
  misc_feature (35)..(133): Homolog of NCBI NO: 24662306 NR Description: CG6463-PA [Drosophila melanogaster]
  misc_feature (25)..(51): Homolog of NCBI NO: 22328992 NR Description: hypothetical protein; protein id: At4g28005.1
  misc_feature (89)..(193): Homolog of NCBI NO: 22328992 NR Description: hypothetical protein; protein id: At4g28005.1
  misc_feature (39)..(188): Homolog of NCBI NO: 16930745 NR Description: NADH-ubiquinone oxidoreductase [Retama raetam]
  misc_feature (25)..(193): Homolog of NCBI NO: 18423437 NR Description: expressed protein
KQLQTTFLRLRRSQGEGESDPTVEMFLRAIGRPLLAKVKQTTGIVGLDVVPNARAVLIDLYSKTLKEIQAVPEDEGYRKAVESFTRQRLNVCKEEEDWEMIEKRLGCGQVEELIEEARDELTLIGKMIEWDPWGVPDDYECEVIENDAPIPKHVPQHRPGPLPEQFYKTLEGLIAESKTEIPAATPSDPQLKE

SEQ ID NO: 27362 - protein, 169 aa, Arabidopsis thaliana
  peptide (1)..(169): Ceres Seq. ID no. 12421237
  misc_feature (27)..(83): Pfam Name: ETC complex I subunit conserved region Pfam Description: ETC complex I subunit conserved region
  misc_feature (14)..(109): Homolog of NCBI NO: 13386100 NR Description: RIKEN cDNA 2900002J19 [Mus musculus]
  misc_feature (14)..(109): Homolog of NCBI NO: 12844779 NR Description: unnamed protein product [Mus musculus]
  misc_feature (14)..(109): Homolog of NCBI NO: 28461281 NR Description: NADH dehydrogenase (ubiquinone) 1 alpha
  misc_feature (14)..(109): Homolog of NCBI NO: 233598 NR Description: 13 kDa-B polypeptide of iron-sulfur protein
  misc_feature (14)..(120): Homolog of NCBI NO: 28829489 NR Description: similar to NADH-ubiquinone oxidoreductase 13 KD-B
  misc_feature (11)..(109): Homolog of NCBI NO: 24662306 NR Description: CG6463-PA [Drosophila melanogaster]
  misc_feature (1)..(27): Homolog of NCBI NO: 22328992 NR Description: hypothetical protein; protein id: At4g28005.1
  misc_feature (65)..(169): Homolog of NCBI NO: 22328992 NR Description: hypothetical protein; protein id: At4g28005.1
  misc_feature (15)..(164): Homolog of NCBI NO: 16930745 NR Description: NADH-ubiquinone oxidoreductase [Retama raetam]
  misc_feature (1)..(169): Homolog of NCBI NO: 18423437 NR Description: expressed protein
MFLRAIGRPLLAKVKQTTGIVGLDVVPNARAVLIDLYSKTLKEIQAVPEDEGYRKAVESFTRQRLNVCKEEEDWEMIEKRLGCGQVEELIEEARDELTLIGKMIEWDPWGVPDDYECEVIENDAPIPKHVPQHRPGPLPEQFYKTLEGLIAESKTEIPAATPSDPQLKE

SEQ ID NO: 27363 - DNA, 1291 bp, Arabidopsis thaliana
  misc_feature (1)..(1291): Ceres Seq. ID no. 12337912
  misc_feature: MA Experiment ID: 108435 Result: Up-regulated in Transcription
  misc_feature: MA Experiment 108435 PARAMETER Experiment Name: At_stm_Mutants_cDNA_P Parameter: Plant Line Value: wt Landsburg vs stm
  misc_feature: MA Experiment 108435 PARAMETER Experiment Name: At_stm_Mutants_cDNA_P Parameter: Tissue Value: Shoot Apical Meristem Region
  misc_feature: MA Experiment ID: 108461 Result: Up-regulated in Transcription
  misc_feature: MA Experiment 108461 PARAMETER Experiment Name: At_Germinating_Seeds_cDNA_P Parameter: Age (day) Value: 1 vs. 0
  misc_feature: MA Experiment 108461 PARAMETER Experiment Name: At_Germinating_Seeds_cDNA_P Parameter: Tissue Value: Germinating Seeds
  misc_feature: MA Experiment ID: 108462 Result: Up-regulated in Transcription
  misc_feature: MA Experiment 108462 PARAMETER Experiment Name: At_Germinating_Seeds_cDNA_P Parameter: Age (day) Value: 2 vs. 0
  misc_feature: MA Experiment 108462 PARAMETER Experiment Name: At_Germinating_Seeds_cDNA_P Parameter: Tissue Value: Germinating Seeds
  misc_feature: MA Experiment ID: 108473 Result: Down-regulated in Transcription
  misc_feature: MA Experiment 108473 PARAMETER Experiment Name: At_Drought_Flowers_cDNA_P Parameter: Timepoint (hr) Value: 7 d
  misc_feature: MA Experiment 108473 PARAMETER Experiment Name: At_Drought_Flowers_cDNA_P Parameter: Tissue Value: Flower
  misc_feature: MA Experiment 108473 PARAMETER Experiment Name: At_Drought_Flowers_cDNA_P Parameter: Treatment Value: Drought vs. No Drought
  misc_feature: MA Experiment ID: 20000069 Result: Down-regulated in Transcription
  misc_feature: MA Experiment 20000069 PARAMETER Experiment Name: At_100uM_ABA_Mutants_cDNA_P Parameter: Plant Line Value: CS23
  misc_feature: MA Experiment 20000069 PARAMETER Experiment Name: At_100uM_ABA_Mutants_cDNA_P Parameter: Timepoint (hr) Value: 6
  misc_feature: MA Experiment 20000069 PARAMETER Experiment Name: At_100uM_ABA_Mutants_cDNA_P Parameter: Tissue Value: Aerial
  misc_feature: MA Experiment 20000069 PARAMETER Experiment Name: At_100uM_ABA_Mutants_cDNA_P Parameter: Treatment Value: 100uM ABA vs. No Treatment
  misc_feature: MA Experiment ID: 20000111 Result: Down-regulated in Transcription
  misc_feature: MA Experiment 20000111 PARAMETER Experiment Name: At_42deg_Heat_cDNA_P Parameter: Temperature (deg C) Value: 42 vs. 22
  misc_feature: MA Experiment 20000111 PARAMETER Experiment Name: At_42deg_Heat_cDNA_P Parameter: Timepoint (hr) Value: 6
  misc_feature: MA Experiment 20000111 PARAMETER Experiment Name: At_42deg_Heat_cDNA_P Parameter: Tissue Value: Aerial
  misc_feature: MA Experiment ID: 20000144 Result: Down-regulated in Transcription
  misc_feature: MA Experiment 20000144 PARAMETER Experiment Name: At_42deg_Heat_cDNA_P Parameter: Temperature (deg C) Value: 42 vs. 22
  misc_feature: MA Experiment 20000144 PARAMETER Experiment Name: At_42deg_Heat_cDNA_P Parameter: Timepoint (hr) Value: 1
  misc_feature: MA Experiment 20000144 PARAMETER Experiment Name: At_42deg_Heat_cDNA_P Parameter: Tissue Value: Aerial
  misc_feature: MA Experiment ID: 20000180 Result: Up-regulated in Transcription
  misc_feature: MA Experiment 20000180 PARAMETER Experiment Name: At_Germinating_Seeds_P Parameter: Age (hr) Value: 24 vs. 0
  misc_feature: MA Experiment 20000180 PARAMETER Experiment Name: At_Germinating_Seeds_P Parameter: Tissue Value: Germinating Seeds
  misc_feature: MA Experiment ID: 20000185 Result: Down-regulated in Transcription
  misc_feature: MA Experiment 20000185 PARAMETER Experiment Name: At_Roots__P Parameter: Age (day) Value: 7 vs. 21
  misc_feature: MA Experiment 20000185 PARAMETER Experiment Name: At_Roots__P Parameter: Organism Value: A. thaliana
  misc_feature: MA Experiment 20000185 PARAMETER Experiment Name: At_Roots__P Parameter: Tissue Value: Roots vs. Whole Plant
  misc_feature: MA Experiment ID: 20000224 Result: Up-regulated in Transcription
  misc_feature: MA Experiment ID: 20000234 Result: Up-regulated in Transcription
  misc_feature: MA Experiment 20000234 PARAMETER Experiment Name: At_Siliques_P Parameter: Age (day) Value: 21
  misc_feature: MA Experiment 20000234 PARAMETER Experiment Name: At_Siliques_P Parameter: Organism Value: A. thaliana
  misc_feature: MA Experiment 20000234 PARAMETER Experiment Name: At_Siliques_P Parameter: Plant Line Value: WS
  misc_feature: MA Experiment 20000234 PARAMETER Experiment Name: At_Siliques_P Parameter: Tissue Value: Less Than 5mm Siliques vs. Whole Plant
  misc_feature: MA Experiment ID: 20000265 Result: Up-regulated in Transcription
  misc_feature: MA Experiment 20000265 PARAMETER Experiment Name: At_Open_Flower_P Parameter: Age (day) Value: 21
  misc_feature: MA Experiment 20000265 PARAMETER Experiment Name: At_Open_Flower_P Parameter: Plant Line Value: WS
  misc_feature: MA Experiment 20000265 PARAMETER Experiment Name: At_Open_Flower_P Parameter: Tissue Value: Closed Flower vs. Whole Plant
  misc_feature: MA Experiment ID: 20000286 Result: Up-regulated in Transcription
  misc_feature: MA Experiment 20000286 PARAMETER Experiment Name: At_Open_Flower_P Parameter: Age (day) Value: 21
  misc_feature: MA Experiment 20000286 PARAMETER Experiment Name: At_Open_Flower_P Parameter: Plant Line Value: WS
  misc_feature: MA Experiment 20000286 PARAMETER Experiment Name: At_Open_Flower_P Parameter: Tissue Value: Half Open vs. Whole Plant
  misc_feature: MA Experiment ID: 20000437 Result: Down-regulated in Transcription
  misc_feature: MA Experiment 20000437 PARAMETER Experiment Name: At_Drought_P Parameter: Age (day) Value: 8
  misc_feature: MA Experiment 20000437 PARAMETER Experiment Name: At_Drought_P Parameter: Organism Value: A. thaliana
  misc_feature: MA Experiment 20000437 PARAMETER Experiment Name: At_Drought_P Parameter: Plant Line Value: WS
  misc_feature: MA Experiment 20000437 PARAMETER Experiment Name: At_Drought_P Parameter: Timepoint (hr) Value: 24
  misc_feature: MA Experiment 20000437 PARAMETER Experiment Name: At_Drought_P Parameter: Tissue Value: Whole Plant
  misc_feature: MA Experiment 20000437 PARAMETER Experiment Name: At_Drought_P Parameter: Treatment Value: Drought vs. No Drought
  misc_feature: MA Experiment ID: 20000439 Result: Down-regulated in Transcription
  misc_feature: MA Experiment 20000439 PARAMETER Experiment Name: At_Roots__P Parameter: Age (day) Value: 14 vs. 21
  misc_feature: MA Experiment 20000439 PARAMETER Experiment Name: At_Roots__P Parameter: Organism Value: A. thaliana
  misc_feature: MA Experiment 20000439 PARAMETER Experiment Name: At_Roots__P Parameter: Tissue Value: Roots vs. Whole Plant
  misc_feature: MA Experiment ID: 20000495 Result: Up-regulated in Transcription
  misc_feature: MA Experiment 20000495 PARAMETER Experiment Name: At_Guard_Cells_P Parameter: Harvest Date Value: 8/2/2002
  misc_feature: MA Experiment 20000495 PARAMETER Experiment Name: At_Guard_Cells_P Parameter: Organism Value: A. thaliana
  misc_feature: MA Experiment 20000495 PARAMETER Experiment Name: At_Guard_Cells_P Parameter: Tissue Value: Guard Cells vs. Leaves
  misc_feature: MA Experiment ID: 20001248 Result: Down-regulated in Transcription
  misc_feature: MA Experiment 20001248 PARAMETER Experiment Name: At_Far-red-induction_P Parameter: Age (day) Value: 7
  misc_feature: MA Experiment 20001248 PARAMETER Experiment Name: At_Far-red-induction_P Parameter: Light Value: Far-red vs. White
  misc_feature: MA Experiment 20001248 PARAMETER Experiment Name: At_Far-red-induction_P Parameter: Organism Value: A. thaliana
  misc_feature: MA Experiment 20001248 PARAMETER Experiment Name: At_Far-red-induction_P Parameter: Plant Line Value: Columbia
  misc_feature: MA Experiment 20001248 PARAMETER Experiment Name: At_Far-red-induction_P Parameter: Timepoint (hr) Value: 4
  misc_feature: MA Experiment 20001248 PARAMETER Experiment Name: At_Far-red-induction_P Parameter: Tissue Value: Whole Plant
  misc_feature: MA Experiment ID: 20001555 Result: Down-regulated in Transcription
  misc_feature: MA Experiment 20001555 PARAMETER Experiment Name: At_Drought_Soil_Dry_P Parameter: Age (day) Value: 24
  misc_feature: MA Experiment 20001555 PARAMETER Experiment Name: At_Drought_Soil_Dry_P Parameter: Organism Value: A. thaliana
  misc_feature: MA Experiment 20001555 PARAMETER Experiment Name: At_Drought_Soil_Dry_P Parameter: Plant Line Value: WS
  misc_feature: MA Experiment 20001555 PARAMETER Experiment Name: At_Drought_Soil_Dry_P Parameter: Post Timepoint (hr) Value: None
  misc_feature: MA Experiment 20001555 PARAMETER Experiment Name: At_Drought_Soil_Dry_P Parameter: Post-Treatment Value: None
  misc_feature: MA Experiment 20001555 PARAMETER Experiment Name: At_Drought_Soil_Dry_P Parameter: Timepoint (day) Value: 10
  misc_feature: MA Experiment 20001555 PARAMETER Experiment Name: At_Drought_Soil_Dry_P Parameter: Treatment Value: Drought vs. No Drought
acatcttaaaaagtaaaaacacattcatctatccaacaaaaaaaaaaaaaaaaggagaaatggaaggaatcgatcatagaatggtgagtgtcaatggcataactatgcacattgccgagaaaggtcccaaagaaggacctgtggtgcttctcctccatggattccctgatctctggtacacgtggcgtcaccagattagtgggttatcatctctaggttaccgcgctgtagctccagacctccgaggctacggagactctgattcgccagagtctttctccgagtacacgtgtcttaacgtcgttggggacctcgtagctcttctggacagtgttgctggaaatcaagagaaggtgtttctggtcggtcatgattggggagccattatcggatggtttctctgtttgtttcgacctgaaaagattaacggctttgtgtgtttgagtgtgccgtatagatcaagaaaccctaaagtcaagcccgttcaagggttcaaggctgtatttggagatgattactacatttgtagatttcaggaaccggggaagattgaaggagagattgcaagtgcagatccaagaatatttctgaggaacctcttcacagggaggacactcggtccgccgattttacctaaggataatccctttggggaaaaacctaaccctaatagcgaaaacattgaattgcctgaatggttttctaagaaagatctcgatttctatgtctccaaattcgagaaggcaggatttaccggtggattgaactactacagagccatggatctgaattgggagctcactgcaccatggaccggagctaagattcaagttccagtgaagttcatgacaggtgacttcgacatggtttacaccacaccagggatgaaagagtacattcacggtggtggatttgctgcagatgttccaactcttcaagagatagtggtgattgaagatgctggtcacttcgttaaccaagagaaacctcaagaggtcactgctcacatcaatgacttcttcaccaagcttcgggacaacaacaaaagcttttagagttctcgtttggttctattatgttggctctcaaaacaagttggttcttgcatgtgttgtttcgacaagattttgaataagacttggcattatgaagctcaacgtgtgtaggaacaatcgattctggcgaaaatagttagaaggctggattgaagatttcaaaagaaaaccaattttttttatagatttcacaatgattttataagcaaactaaatgaaccagaaataaccaagtg

SEQ ID NO: 27364 - protein, 350 aa, Arabidopsis thaliana
  peptide (1)..(350): Ceres Seq. ID no. 12337913
  misc_feature (73)..(338): Pfam Name: alpha/beta hydrolase fold Pfam Description: alpha/beta hydrolase fold
  misc_feature (73)..(338): Pfam Name: alpha/beta hydrolase fold Pfam Description: alpha/beta hydrolase fold
  misc_feature (20)..(350): Homolog of NCBI NO: 15230018 NR Description: putative epoxide hydrolase
  misc_feature (20)..(350): Homolog of NCBI NO: 15230018 NR Description: putative epoxide hydrolase
ILKSKNTFIYPTKKKKKGEMEGIDHRMVSVNGITMHIAEKGPKEGPVVLLLHGFPDLWYTWRHQISGLSSLGYRAVAPDLRGYGDSDSPESFSEYTCLNVVGDLVALLDSVAGNQEKVFLVGHDWGAIIGWFLCLFRPEKINGFVCLSVPYRSRNPKVKPVQGFKAVFGDDYYICRFQEPGKIEGEIASADPRIFLRNLFTGRTLGPPILPKDNPFGEKPNPNSENIELPEWFSKKDLDFYVSKFEKAGFTGGLNYYRAMDLNWELTAPWTGAKIQVPVKFMTGDFDMVYTTPGMKEYIHGGGFAADVPTLQEIVVIEDAGHFVNQEKPQEVTAHINDFFTKLRDNNKSF

SEQ ID NO: 27365 - protein, 331 aa, Arabidopsis thaliana; identical to SEQ ID NO: 21476
  peptide (1)..(331): Ceres Seq. ID no. 12337914
  misc_feature (54)..(319): Pfam Name: alpha/beta hydrolase fold Pfam Description: alpha/beta hydrolase fold
  misc_feature (54)..(319): Pfam Name: alpha/beta hydrolase fold Pfam Description: alpha/beta hydrolase fold
  misc_feature (1)..(331): Homolog of NCBI NO: 15230018 NR Description: putative epoxide hydrolase
  misc_feature (1)..(331): Homolog of NCBI NO: 15230018 NR Description: putative epoxide hydrolase

SEQ ID NO: 27366 - protein, 324 aa, Arabidopsis thaliana; identical to SEQ ID NO: 21477
  peptide (1)..(324): Ceres Seq. ID no. 12337915
  misc_feature (47)..(312): Pfam Name: alpha/beta hydrolase fold Pfam Description: alpha/beta hydrolase fold
  misc_feature (47)..(312): Pfam Name: alpha/beta hydrolase fold Pfam Description: alpha/beta hydrolase fold
  misc_feature (1)..(324): Homolog of NCBI NO: 15230018 NR Description: putative epoxide hydrolase
  misc_feature (1)..(324): Homolog of NCBI NO: 15230018 NR Description: putative epoxide hydrolase

SEQ ID NO: 27367 - DNA, 978 bp, Arabidopsis thaliana
  misc_feature (1)..(978): Ceres Seq. ID no. 13488242
  misc_feature: MA Experiment ID: 108435 Result: Down-regulated in Transcription
  misc_feature: MA Experiment 108435 PARAMETER Experiment Name: At_stm_Mutants_cDNA_P Parameter: Plant Line Value: wt Landsburg vs stm
  misc_feature: MA Experiment 108435 PARAMETER Experiment Name: At_stm_Mutants_cDNA_P Parameter: Tissue Value: Shoot Apical Meristem Region
  misc_feature: MA Experiment ID: 108461 Result: Up-regulated in Transcription
  misc_feature: MA Experiment 108461 PARAMETER Experiment Name: At_Germinating_Seeds_cDNA_P Parameter: Age (day) Value: 1 vs. 0
  misc_feature: MA Experiment 108461 PARAMETER Experiment Name: At_Germinating_Seeds_cDNA_P Parameter: Tissue Value: Germinating Seeds
  misc_feature: MA Experiment ID: 108462 Result: Up-regulated in Transcription
  misc_feature: MA Experiment 108462 PARAMETER Experiment Name: At_Germinating_Seeds_cDNA_P Parameter: Age (day) Value: 2 vs. 0
  misc_feature: MA Experiment 108462 PARAMETER Experiment Name: At_Germinating_Seeds_cDNA_P Parameter: Tissue Value: Germinating Seeds
  misc_feature: MA Experiment ID: 108488 Result: Up-regulated in Transcription
  misc_feature: MA Experiment ID: 108573 Result: Down-regulated in Transcription
  misc_feature: MA Experiment 108573 PARAMETER Experiment Name: At_Drought_cDNA_P Parameter: Timepoint (hr) Value: 6
  misc_feature: MA Experiment 108573 PARAMETER Experiment Name: At_Drought_cDNA_P Parameter: Tissue Value: Aerial
  misc_feature: MA Experiment 108573 PARAMETER Experiment Name: At_Drought_cDNA_P Parameter: Treatment Value: Drought vs. No Drought
  misc_feature: MA Experiment ID: 108579 Result: Up-regulated in Transcription
  misc_feature: MA Experiment 108579 PARAMETER Experiment Name: At_4deg_Cold_cDNA_P Parameter: Temperature (deg C) Value: 4 vs. 22
  misc_feature: MA Experiment 108579 PARAMETER Experiment Name: At_4deg_Cold_cDNA_P Parameter: Timepoint (hr) Value: 6
  misc_feature: MA Experiment 108579 PARAMETER Experiment Name: At_4deg_Cold_cDNA_P Parameter: Tissue Value: Aerial
  misc_feature: MA Experiment ID: 108595 Result: Down-regulated in Transcription
  misc_feature: MA Experiment 108595 PARAMETER Experiment Name: At_Ler-pi_Ovule_cDNA_P Parameter: Plant Line Value: null
  misc_feature: MA Experiment ID: 108605 Result: Down-regulated in Transcription
  misc_feature: MA Experiment 108605 PARAMETER Experiment Name: At_100uM_ABA_cDNA_P Parameter: Timepoint (hr) Value: 6
  misc_feature: MA Experiment 108605 PARAMETER Experiment Name: At_100uM_ABA_cDNA_P Parameter: Tissue Value: Aerial
  misc_feature: MA Experiment 108605 PARAMETER Experiment Name: At_100uM_ABA_cDNA_P Parameter: Treatment Value: 100uM ABA vs. No Treatment
  misc_feature: MA Experiment ID: 108607 Result: Down-regulated in Transcription
  misc_feature: MA Experiment 108607 PARAMETER Experiment Name: At_100uM_ABA_cDNA_P Parameter: Timepoint (hr) Value: 4
  misc_feature: MA Experiment 108607 PARAMETER Experiment Name: At_100uM_ABA_cDNA_P Parameter: Tissue Value: Aerial
  misc_feature: MA Experiment 108607 PARAMETER Experiment Name: At_100uM_ABA_cDNA_P Parameter: Treatment Value: 100uM ABA vs. No Treatment
  misc_feature: MA Experiment ID: 20000069 Result: Down-regulated in Transcription
  misc_feature: MA Experiment 20000069 PARAMETER Experiment Name: At_100uM_ABA_Mutants_cDNA_P Parameter: Plant Line Value: CS23
  misc_feature: MA Experiment 20000069 PARAMETER Experiment Name: At_100uM_ABA_Mutants_cDNA_P Parameter: Timepoint (hr) Value: 6
  misc_feature: MA Experiment 20000069 PARAMETER Experiment Name: At_100uM_ABA_Mutants_cDNA_P Parameter: Tissue Value: Aerial
  misc_feature: MA Experiment 20000069 PARAMETER Experiment Name: At_100uM_ABA_Mutants_cDNA_P Parameter: Treatment Value: 100uM ABA vs. No Treatment
  misc_feature: MA Experiment ID: 20000070 Result: Down-regulated in Transcription
  misc_feature: MA Experiment 20000070 PARAMETER Experiment Name: At_100uM_ABA_Mutants_cDNA_P Parameter: Plant Line Value: CS24
  misc_feature: MA Experiment 20000070 PARAMETER Experiment Name: At_100uM_ABA_Mutants_cDNA_P Parameter: Timepoint (hr) Value: 6
  misc_feature: MA Experiment 20000070 PARAMETER Experiment Name: At_100uM_ABA_Mutants_cDNA_P Parameter: Tissue Value: Aerial
  misc_feature: MA Experiment 20000070 PARAMETER Experiment Name: At_100uM_ABA_Mutants_cDNA_P Parameter: Treatment Value: 100uM ABA vs. No Treatment
  misc_feature: MA Experiment ID: 20000071 Result: Down-regulated in Transcription
  misc_feature: MA Experiment 20000071 PARAMETER Experiment Name: At_100uM_ABA_Mutants_cDNA_P Parameter: Plant Line Value: CS8104
  misc_feature: MA Experiment 20000071 PARAMETER Experiment Name: At_100uM_ABA_Mutants_cDNA_P Parameter: Timepoint (hr) Value: 6
  misc_feature: MA Experiment 20000071 PARAMETER Experiment Name: At_100uM_ABA_Mutants_cDNA_P Parameter: Tissue Value: Aerial
  misc_feature: MA Experiment 20000071 PARAMETER Experiment Name: At_100uM_ABA_Mutants_cDNA_P Parameter: Treatment Value: 100uM ABA vs. No Treatment
  misc_feature: MA Experiment ID: 20000072 Result: Down-regulated in Transcription
  misc_feature: MA Experiment 20000072 PARAMETER Experiment Name: At_100uM_ABA_Mutants_cDNA_P Parameter: Plant Line Value: CS8105
  misc_feature: MA Experiment 20000072 PARAMETER Experiment Name: At_100uM_ABA_Mutants_cDNA_P Parameter: Timepoint (hr) Value: 6
  misc_feature: MA Experiment 20000072 PARAMETER Experiment Name: At_100uM_ABA_Mutants_cDNA_P Parameter: Tissue Value: Aerial
  misc_feature: MA Experiment 20000072 PARAMETER Experiment Name: At_100uM_ABA_Mutants_cDNA_P Parameter: Treatment Value: 100uM ABA vs. No Treatment
  misc_feature: MA Experiment ID: 20000086 Result: Down-regulated in Transcription
  misc_feature: MA Experiment 20000086 PARAMETER Experiment Name: At_100uM_ABA_Mutants_cDNA_P Parameter: Plant Line Value: CS22
  misc_feature: MA Experiment 20000086 PARAMETER Experiment Name: At_100uM_ABA_Mutants_cDNA_P Parameter: Timepoint (hr) Value: 6
  misc_feature: MA Experiment 20000086 PARAMETER Experiment Name: At_100uM_ABA_Mutants_cDNA_P Parameter: Tissue Value: Aerial
  misc_feature: MA Experiment 20000086 PARAMETER Experiment Name: At_100uM_ABA_Mutants_cDNA_P Parameter: Treatment Value: 100uM ABA vs. No Treatment
  misc_feature: MA Experiment ID: 20000087 Result: Down-regulated in Transcription
  misc_feature: MA Experiment 20000087 PARAMETER Experiment Name: At_100uM_ABA_Mutants_cDNA_P Parameter: Plant Line Value: WS
  misc_feature: MA Experiment 20000087 PARAMETER Experiment Name: At_100uM_ABA_Mutants_cDNA_P Parameter: Timepoint (hr) Value: 6
  misc_feature: MA Experiment 20000087 PARAMETER Experiment Name: At_100uM_ABA_Mutants_cDNA_P Parameter: Tissue Value: Aerial
  misc_feature: MA Experiment 20000087 PARAMETER Experiment Name: At_100uM_ABA_Mutants_cDNA_P Parameter: Treatment Value: 100uM ABA vs. No Treatment
  misc_feature: MA Experiment ID: 20000089 Result: Down-regulated in Transcription
  misc_feature: MA Experiment ID: 20000117 Result: Down-regulated in Transcription
  misc_feature: MA Experiment 20000117 PARAMETER Experiment Name: At_100uM_ABA_Mutants_cDNA_P Parameter: Plant Line Value: Columbia
  misc_feature: MA Experiment 20000117 PARAMETER Experiment Name: At_100uM_ABA_Mutants_cDNA_P Parameter: Timepoint (hr) Value: 6
  misc_feature: MA Experiment 20000117 PARAMETER Experiment Name: At_100uM_ABA_Mutants_cDNA_P Parameter: Tissue Value: Aerial
  misc_feature: MA Experiment 20000117 PARAMETER Experiment Name: At_100uM_ABA_Mutants_cDNA_P Parameter: Treatment Value: 100uM ABA vs. No Treatment
  misc_feature: MA Experiment ID: 20000184 Result: Up-regulated in Transcription
  misc_feature: MA Experiment 20000184 PARAMETER Experiment Name: At_Shoots__P Parameter: Age (day) Value: 7
  misc_feature: MA Experiment 20000184 PARAMETER Experiment Name: At_Shoots__P Parameter: Tissue Value: Shoots vs. Whole Plant
  misc_feature: MA Experiment ID: 20000185 Result: Down-regulated in Transcription
  misc_feature: MA Experiment 20000185 PARAMETER Experiment Name: At_Roots__P Parameter: Age (day) Value: 7 vs. 21
  misc_feature: MA Experiment 20000185 PARAMETER Experiment Name: At_Roots__P Parameter: Organism Value: A. thaliana
  misc_feature: MA Experiment 20000185 PARAMETER Experiment Name: At_Roots__P Parameter: Tissue Value: Roots vs. Whole Plant
  misc_feature: MA Experiment ID: 20000214 Result: Up-regulated in Transcription
  misc_feature: MA Experiment 20000214 PARAMETER Experiment Name: At_4deg_Cold_P Parameter: Timepoint (hr) Value: 6
  misc_feature: MA Experiment ID: 20000286 Result: Down-regulated in Transcription
  misc_feature: MA Experiment 20000286 PARAMETER Experiment Name: At_Open_Flower_P Parameter: Age (day) Value: 21
  misc_feature: MA Experiment 20000286 PARAMETER Experiment Name: At_Open_Flower_P Parameter: Plant Line Value: WS
  misc_feature: MA Experiment 20000286 PARAMETER Experiment Name: At_Open_Flower_P Parameter: Tissue Value: Half Open vs. Whole Plant
  misc_feature: MA Experiment ID: 20000437 Result: Down-regulated in Transcription
  misc_feature: MA Experiment 20000437 PARAMETER Experiment Name: At_Drought_P Parameter: Age (day) Value: 8
  misc_feature: MA Experiment 20000437 PARAMETER Experiment Name: At_Drought_P Parameter: Organism Value: A. thaliana
  misc_feature: MA Experiment 20000437 PARAMETER Experiment Name: At_Drought_P Parameter: Plant Line Value: WS
  misc_feature: MA Experiment 20000437 PARAMETER Experiment Name: At_Drought_P Parameter: Timepoint (hr) Value: 24
  misc_feature: MA Experiment 20000437 PARAMETER Experiment Name: At_Drought_P Parameter: Tissue Value: Whole Plant
  misc_feature: MA Experiment 20000437 PARAMETER Experiment Name: At_Drought_P Parameter: Treatment Value: Drought vs. No Drought
  misc_feature: MA Experiment ID: 20000439 Result: Down-regulated in Transcription
  misc_feature: MA Experiment 20000439 PARAMETER Experiment Name: At_Roots__P Parameter: Age (day) Value: 14 vs. 21
  misc_feature: MA Experiment 20000439 PARAMETER Experiment Name: At_Roots__P Parameter: Organism Value: A. thaliana
  misc_feature: MA Experiment 20000439 PARAMETER Experiment Name: At_Roots__P Parameter: Tissue Value: Roots vs. Whole Plant
  misc_feature: MA Experiment ID: 20000495 Result: Down-regulated in Transcription
  misc_feature: MA Experiment 20000495 PARAMETER Experiment Name: At_Guard_Cells_P Parameter: Harvest Date Value: 8/2/2002
  misc_feature: MA Experiment 20000495 PARAMETER Experiment Name: At_Guard_Cells_P Parameter: Organism Value: A. thaliana
  misc_feature: MA Experiment 20000495 PARAMETER Experiment Name: At_Guard_Cells_P Parameter: Tissue Value: Guard Cells vs. Leaves
  misc_feature: MA Experiment ID: 20000794 Result: Down-regulated in Transcription
  misc_feature: MA Experiment 20000794 PARAMETER Experiment Name: At_Petals_P Parameter: Age (day) Value: 23-25 days
  misc_feature: MA Experiment 20000794 PARAMETER Experiment Name: At_Petals_P Parameter: Plant Line Value: WS
  misc_feature: MA Experiment 20000794 PARAMETER Experiment Name: At_Petals_P Parameter: Tissue Value: Petals vs. Whole plant
  misc_feature: MA Experiment ID: 20001248 Result: Down-regulated in Transcription
  misc_feature: MA Experiment 20001248 PARAMETER Experiment Name: At_Far-red-induction_P Parameter: Age (day) Value: 7
  misc_feature: MA Experiment 20001248 PARAMETER Experiment Name: At_Far-red-induction_P Parameter: Light Value: Far-red vs. White
  misc_feature: MA Experiment 20001248 PARAMETER Experiment Name: At_Far-red-induction_P Parameter: Organism Value: A. thaliana
  misc_feature: MA Experiment 20001248 PARAMETER Experiment Name: At_Far-red-induction_P Parameter: Plant Line Value: Columbia
  misc_feature: MA Experiment 20001248 PARAMETER Experiment Name: At_Far-red-induction_P Parameter: Timepoint (hr) Value: 4
  misc_feature: MA Experiment 20001248 PARAMETER Experiment Name: At_Far-red-induction_P Parameter: Tissue Value: Whole Plant
  misc_feature: MA Experiment ID: 20001450 Result: Down-regulated in Transcription
  misc_feature: MA Experiment 20001450 PARAMETER Experiment Name: At_Far-red-induction_P Parameter: Age (day) Value: 7
  misc_feature: MA Experiment 20001450 PARAMETER Experiment Name: At_Far-red-induction_P Parameter: Light Value: Far-red vs. White
  misc_feature: MA Experiment 20001450 PARAMETER Experiment Name: At_Far-red-induction_P Parameter: Organism Value: A. thaliana
  misc_feature: MA Experiment 20001450 PARAMETER Experiment Name: At_Far-red-induction_P Parameter: Plant Line Value: Columbia
  misc_feature: MA Experiment 20001450 PARAMETER Experiment Name: At_Far-red-induction_P Parameter: Timepoint (hr) Value: 8
  misc_feature: MA Experiment 20001450 PARAMETER Experiment Name: At_Far-red-induction_P Parameter: Tissue Value: Whole Plant
  misc_feature: MA Experiment ID: 20001757 Result: Up-regulated in Transcription
  misc_feature: MA Experiment 20001757 PARAMETER Experiment Name: At_50mM_NH4NO3_L-to-H_P Parameter: Timepoint (hr) Value: 6
  misc_feature: MA Experiment 20001757 PARAMETER Experiment Name: At_50mM_NH4NO3_L-to-H_P Parameter: Tissue Value: Leaf
  misc_feature: MA Experiment 20001757 PARAMETER Experiment Name: At_50mM_NH4NO3_L-to-H_P Parameter: Treatment Value: 50mM NH4NO3 vs 100mM Mannitol
  misc_feature: MA Experiment ID: 20001906 Result: Down-regulated in Transcription
  misc_feature: MA Experiment 20001906 PARAMETER Experiment Name: At_Drought_Reproduction_P Parameter: Age (day) Value: 35
  misc_feature: MA Experiment 20001906 PARAMETER Experiment Name: At_Drought_Reproduction_P Parameter: Organism Value: A. thaliana
  misc_feature: MA Experiment 20001906 PARAMETER Experiment Name: At_Drought_Reproduction_P Parameter: Plant Line Value: WS
  misc_feature: MA Experiment 20001906 PARAMETER Experiment Name: At_Drought_Reproduction_P Parameter: Timepoint (day) Value: 5
  misc_feature: MA Experiment 20001906 PARAMETER Experiment Name: At_Drought_Reproduction_P Parameter: Tissue Value: Siliques
  misc_feature: MA Experiment 20001906 PARAMETER Experiment Name: At_Drought_Reproduction_P Parameter: Treatment Value: Drought vs. No Drought
  misc_feature: MA Experiment ID: 20001911 Result: Down-regulated in Transcription
  misc_feature: MA Experiment 20001911 PARAMETER Experiment Name: At_Drought_Reproduction_P Parameter: Age (day) Value: 40
  misc_feature: MA Experiment 20001911 PARAMETER Experiment Name: At_Drought_Reproduction_P Parameter: Organism Value: A. thaliana
  misc_feature: MA Experiment 20001911 PARAMETER Experiment Name: At_Drought_Reproduction_P Parameter: Plant Line Value: WS
  misc_feature: MA Experiment 20001911 PARAMETER Experiment Name: At_Drought_Reproduction_P Parameter: Timepoint (day) Value: 10
  misc_feature: MA Experiment 20001911 PARAMETER Experiment Name: At_Drought_Reproduction_P Parameter: Tissue Value: Flowers
  misc_feature: MA Experiment 20001911 PARAMETER Experiment Name: At_Drought_Reproduction_P Parameter: Treatment Value: Drought vs. No Drought
gatttcattttatttcttctccaaccattctcaatcctctctctccaatggcttccttatccttcgtttcctcttctcaccttacgctacgcactccttctattgccctacgcagcactggctcttctcctcgaacctccgtttcattctccgtcaaggctcaatccgtcgcgctttcacaggacgatttgaagaagctcgcggcggagaaagctgtggaggcaattaaacctgggatggttctagggctcggaaccggatccaccgcagctttcgctgttgatcagatcgggaaactactctcttccggtgaactctacgatattgtcggtatcccaacgtcgaaacgaacggaggaacaagcacggtcgttagggattcctcttgttgggttagatacacatccgagaatcgatctcgctattgacggagcagacgaggtagatccgaatcttgatttagtcaaaggtcgtggaggtgctcttctccgtgagaaaatggtggaagctgtggctgacaagtttattgttgtggctgatgataccaaactcgttacaggactcggtggaagtggattagctatgccggtggaagttgttcaattctgctggaactttaatttgattagattgcaagacctcttcaaggaatttggatgtgaatcaaagcttagagttgatggtgatggcaagccttatgtgactgataacagtaattacattattgatttgtattttaagactcctttgaaggatggattcgctgcggctaaagagattgggaagtttcaaggagtggtggagcatggtctgtttctcggaatggctacttctgtcattatcgctggaaagaatggcgttgaagttatgaccaagtgaggttaaaagttcaatctttctcttcttctttgattgacaaatttttctcctttgtaaaattatcaattgagtttttatgtgagatcatttcaatttcgtg

SEQ ID NO: 27368 - protein, 291 aa, Arabidopsis thaliana
  peptide (1)..(291): Ceres Seq. ID no. 13488243
  misc_feature (108)..(287): Pfam Name: Ribose 5-phosphate isomerase A (phosphoriboisomerase A) Pfam Description: Ribose 5-phosphate isomerase A
  misc_feature (46)..(291): Homolog of NCBI NO: 34393836 NR Description: putative ribose-5-phosphate isomerase
  misc_feature (35)..(291): Homolog of NCBI NO: 34393835 NR Description: putative ribose-5-phosphate isomerase
  misc_feature (58)..(285): Homolog of NCBI NO: 38347196 NR Description: OSJNBa0023J03.8 [Oryza sativa (japonica
  misc_feature (58)..(291): Homolog of NCBI NO: 15223936 NR Description: ribose 5-phosphate isomerase -related
  misc_feature (41)..(291): Homolog of NCBI NO: 15226223 NR Description: ribose 5-phosphate isomerase -related
  misc_feature (13)..(291): Homolog of NCBI NO: 18654317 NR Description: ribose-5-phosphate isomerase [Spinacia oleracea]
  misc_feature (58)..(291): Homolog of NCBI NO: 21592672 NR Description: putative ribose 5-phosphate isomerase
  misc_feature (58)..(291): Homolog of NCBI NO: 13430836 NR Description: putative ribose 5-phosphate isomerase
  misc_feature (16)..(291): Homolog of NCBI NO: 21594002 NR Description: putative ribose 5-phosphate isomerase
  misc_feature (16)..(291): Homolog of NCBI NO: 15229349 NR Description: ribose 5-phosphate isomerase -related
FHFISSPTILNPLSPMASLSFVSSSHLTLRTPSIALRSTGSSPRTSVSFSVKAQSVALSQDDLKKLAAEKAVEAIKPGMVLGLGTGSTAAFAVDQIGKLLSSGELYDIVGIPTSKRTEEQARSLGIPLVGLDTHPRIDLAIDGADEVDPNLDLVKGRGGALLREKMVEAVADKFIVVADDTKLVTGLGGSGLAMPVEVVQFCWNFNLIRLQDLFKEFGCESKLRVDGDGKPYVTDNSNYIIDLYFKTPLKDGFAAAKEIGKFQGVVEHGLFLGMATSVIIAGKNGVEVMTK

SEQ ID NO: 27369 - protein, 276 aa, Arabidopsis thaliana
  peptide (1)..(276): Ceres Seq. ID no. 13488244
  misc_feature (93)..(272): Pfam Name: Ribose 5-phosphate isomerase A (phosphoriboisomerase A) Pfam Description: Ribose 5-phosphate isomerase A
  misc_feature (43)..(270): Homolog of NCBI NO: 38347196 NR Description: OSJNBa0023J03.8 [Oryza sativa (japonica
  misc_feature (43)..(276): Homolog of NCBI NO: 13430836 NR Description: putative ribose 5-phosphate isomerase
  misc_feature (43)..(276): Homolog of NCBI NO: 15223936 NR Description: ribose 5-phosphate isomerase -related
  misc_feature (43)..(276): Homolog of NCBI NO: 21592672 NR Description: putative ribose 5-phosphate isomerase
  misc_feature (26)..(276): Homolog of NCBI NO: 15226223 NR Description: ribose 5-phosphate isomerase -related
  misc_feature (1)..(276): Homolog of NCBI NO: 18654317 NR Description: ribose-5-phosphate isomerase [Spinacia oleracea]
  misc_feature (31)..(276): Homolog of NCBI NO: 34393836 NR Description: putative ribose-5-phosphate isomerase
  misc_feature (20)..(276): Homolog of NCBI NO: 34393835 NR Description: putative ribose-5-phosphate isomerase
  misc_feature (1)..(276): Homolog of NCBI NO: 21594002 NR Description: putative ribose 5-phosphate isomerase
  misc_feature (1)..(276): Homolog of NCBI NO: 15229349 NR Description: ribose 5-phosphate isomerase -related
MASLSFVSSSHLTLRTPSIALRSTGSSPRTSVSFSVKAQSVALSQDDLKKLAAEKAVEAIKPGMVLGLGTGSTAAFAVDQIGKLLSSGELYDIVGIPTSKRTEEQARSLGIPLVGLDTHPRIDLAIDGADEVDPNLDLVKGRGGALLREKMVEAVADKFIVVADDTKLVTGLGGSGLAMPVEVVQFCWNFNLIRLQDLFKEFGCESKLRVDGDGKPYVTDNSNYIIDLYFKTPLKDGFAAAKEIGKFQGVVEHGLFLGMATSVIIAGKNGVEVMTK

SEQ ID NO: 27370 - protein, 213 aa, Arabidopsis thaliana
  peptide (1)..(213): Ceres Seq. ID no. 13488245
  misc_feature (30)..(209): Pfam Name: Ribose 5-phosphate isomerase A (phosphoriboisomerase A) Pfam Description: Ribose 5-phosphate isomerase A
  misc_feature (1)..(207): Homolog of NCBI NO: 38347196 NR Description: OSJNBa0023J03.8 [Oryza sativa (japonica
  misc_feature (1)..(213): Homolog of NCBI NO: 13430836 NR Description: putative ribose 5-phosphate isomerase
  misc_feature (1)..(213): Homolog of NCBI NO: 15223936 NR Description: ribose 5-phosphate isomerase -related
  misc_feature (1)..(213): Homolog of NCBI NO: 21592672 NR Description: putative ribose 5-phosphate isomerase
  misc_feature (1)..(213): Homolog of NCBI NO: 15226223 NR Description: ribose 5-phosphate isomerase -related
  misc_feature (1)..(213): Homolog of NCBI NO: 18654317 NR Description: ribose-5-phosphate isomerase [Spinacia oleracea]
  misc_feature (1)..(213): Homolog of NCBI NO: 34393836 NR Description: putative ribose-5-phosphate isomerase
  misc_feature (1)..(213): Homolog of NCBI NO: 34393835 NR Description: putative ribose-5-phosphate isomerase
  misc_feature (1)..(213): Homolog of NCBI NO: 21594002 NR Description: putative ribose 5-phosphate isomerase
  misc_feature (1)..(213): Homolog of NCBI NO: 15229349 NR Description: ribose 5-phosphate isomerase -related
MVLGLGTGSTAAFAVDQIGKLLSSGELYDIVGIPTSKRTEEQARSLGIPLVGLDTHPRIDLAIDGADEVDPNLDLVKGRGGALLREKMVEAVADKFIVVADDTKLVTGLGGSGLAMPVEVVQFCWNFNLIRLQDLFKEFGCESKLRVDGDGKPYVTDNSNYIIDLYFKTPLKDGFAAAKEIGKFQGVVEHGLFLGMATSVIIAGKNGVEVMTK

SEQ ID NO: 27371 - DNA, 1216 bp, Arabidopsis thaliana
  misc_feature (1)..(1216): Ceres Seq. ID no. 12332484
  misc_feature: MA Experiment ID: 108434 Result: Up-regulated in Transcription
  misc_feature: MA Experiment 108434 PARAMETER Experiment Name: At_Root_Tips_cDNA_P Parameter: Tissue Value: Root Tips
  misc_feature: MA Experiment ID: 108461 Result: Down-regulated in Transcription
  misc_feature: MA Experiment 108461 PARAMETER Experiment Name: At_Germinating_Seeds_cDNA_P Parameter: Age (day) Value: 1 vs. 0
  misc_feature: MA Experiment 108461 PARAMETER Experiment Name: At_Germinating_Seeds_cDNA_P Parameter: Tissue Value: Germinating Seeds
  misc_feature: MA Experiment ID: 108462 Result: Down-regulated in Transcription
  misc_feature: MA Experiment 108462 PARAMETER Experiment Name: At_Germinating_Seeds_cDNA_P Parameter: Age (day) Value: 2 vs. 0
  misc_feature: MA Experiment 108462 PARAMETER Experiment Name: At_Germinating_Seeds_cDNA_P Parameter: Tissue Value: Germinating Seeds
  misc_feature: MA Experiment ID: 108463 Result: Down-regulated in Transcription
  misc_feature: MA Experiment 108463 PARAMETER Experiment Name: At_Germinating_Seeds_cDNA_P Parameter: Age (day) Value: 3 vs. 0
  misc_feature: MA Experiment 108463 PARAMETER Experiment Name: At_Germinating_Seeds_cDNA_P Parameter: Tissue Value: Germinating Seeds
  misc_feature: MA Experiment ID: 20000090 Result: Up-regulated in Transcription
  misc_feature: MA Experiment ID: 20000111 Result: Up-regulated in Transcription
  misc_feature: MA Experiment 20000111 PARAMETER Experiment Name: At_42deg_Heat_cDNA_P Parameter: Temperature (deg C) Value: 42 vs. 22
  misc_feature: MA Experiment 20000111 PARAMETER Experiment Name: At_42deg_Heat_cDNA_P Parameter: Timepoint (hr) Value: 6
  misc_feature: MA Experiment 20000111 PARAMETER Experiment Name: At_42deg_Heat_cDNA_P Parameter: Tissue Value: Aerial
  misc_feature: MA Experiment ID: 20000113 Result: Up-regulated in Transcription
  misc_feature: MA Experiment 20000113 PARAMETER Experiment Name: At_42deg_Heat_cDNA_P Parameter: Temperature (deg C) Value: 42 vs. 22
  misc_feature: MA Experiment 20000113 PARAMETER Experiment Name: At_42deg_Heat_cDNA_P Parameter: Timepoint (hr) Value: 8
  misc_feature: MA Experiment 20000113 PARAMETER Experiment Name: At_42deg_Heat_cDNA_P Parameter: Tissue Value: Aerial
  misc_feature: MA Experiment ID: 20000173 Result: Up-regulated in Transcription
  misc_feature: MA Experiment 20000173 PARAMETER Experiment Name: At_42deg_Heat_P Parameter: Age (day) Value: 14
  misc_feature: MA Experiment 20000173 PARAMETER Experiment Name: At_42deg_Heat_P Parameter: Organism Value: A. thaliana
  misc_feature: MA Experiment 20000173 PARAMETER Experiment Name: At_42deg_Heat_P Parameter: Plant Line Value: WS
  misc_feature: MA Experiment 20000173 PARAMETER Experiment Name: At_42deg_Heat_P Parameter: Temperature (deg C) Value: 42 vs. 22
  misc_feature: MA Experiment 20000173 PARAMETER Experiment Name: At_42deg_Heat_P Parameter: Timepoint (hr) Value: 6
  misc_feature: MA Experiment 20000173 PARAMETER Experiment Name: At_42deg_Heat_P Parameter: Tissue Value: Aerial
  misc_feature: MA Experiment ID: 20001757 Result: Up-regulated in Transcription
  misc_feature: MA Experiment 20001757 PARAMETER Experiment Name: At_50mM_NH4NO3_L-to-H_P Parameter: Timepoint (hr) Value: 6
  misc_feature: MA Experiment 20001757 PARAMETER Experiment Name: At_50mM_NH4NO3_L-to-H_P Parameter: Tissue Value: Leaf
  misc_feature: MA Experiment 20001757 PARAMETER Experiment Name: At_50mM_NH4NO3_L-to-H_P Parameter: Treatment Value: 50mM NH4NO3 vs 100mM Mannitol
aaaaatcctgatttctgagctttaaaccctaacccctctcttctctcttctccacgccatttccagaattttcagctaatttgcagattatctttgtctctttttcgtcgatccaagttttccttgggtgttcgtgaaaagatgaattttaagaatgtcaaagttcccaaaggtcctggtggtggtgttatagctgcggtggttattggggggctcagtctttacggtgctacgcacactctctacaatgtcgatggaggtcatcgagccattgtctttaaccggcttgttggtatcaaagacaaggtctaccctgagggtactcaccttatgattccatggttcgaaaggccaatcatctatgacgttcgtgcaaagccttatctagttgagagcacatctgggagccgtgatctccagatggttaagattgggcttcgggttctcacccgtcctatggctgaccaattaccagaggtataccggtcccttggtgagaattaccgcgagagagtcttgccttctatcatccacgagaccttgaaagctgtggttgctcagtacaacgcaagccaacttattactcagagagagtcggtgagtagagaaatcaggaaaatcctaactctaagagccgcaaacttccacattgcactggatgatgtgtccatcacaggcttgacattcggaaaggagttcacggcagccatagaaggaaagcaggtcgctgctcaagaggccgaacgggctaagttcattgtcgagaaagctgaacaggacaagagaagtgctgttatccgcgccgagggagaagccaagagtgctcagctcattggtcaagcaatcgcaaacaaccaagcgttcttaacactgaggaagatcgaagcagctagagagatcgcacagaccatctctaggtcggcgaacaaggtttacttgagctctaacgatctgttgcttaacctacaggctatggaccttgatgtgaagccgaagaagtagagaatgatatgattaaaccacaccagagctcttcttccataatcgtattttcaattcacggattcttagaccaaaagctatgagttctatcttgtgaatttcagacactatcgtgcgtttgtagtctttcttttgtgagatcaagaagaaaagaaaagatttatgtttttacaagttgtttacatttggttataatgttaataatgatgttcac

SEQ ID NO: 27372 - protein, 286 aa, Arabidopsis thaliana; identical to SEQ ID NO: 27300
  peptide (1)..(286): Ceres Seq. ID no. 12332485
  misc_feature (8)..(286): Homolog of NCBI NO: 7716462 NR Description: prohibitin [Zea mays]
  misc_feature (1)..(56): Homolog of NCBI NO: 34901014 NR Description: putative prohibitin [Oryza sativa (japonica
  misc_feature (55)..(286): Homolog of NCBI NO: 34901014 NR Description: putative prohibitin [Oryza sativa (japonica
  misc_feature (1)..(286): Homolog of NCBI NO: 7716456 NR Description: prohibitin [Zea mays]
  misc_feature (1)..(286): Homolog of NCBI NO: 34394832 NR Description: putative prohibitin [Oryza sativa (japonica
  misc_feature (1)..(286): Homolog of NCBI NO: 15219569 NR Description: putative prohibitin 2
  misc_feature (5)..(285): Homolog of NCBI NO: 21593626 NR Description: prohibitin-like protein [Arabidopsis thaliana]
  misc_feature (5)..(285): Homolog of NCBI NO: 15235317 NR Description: prohibitin-like protein
  misc_feature (1)..(286): Homolog of NCBI NO: 12751303 NR Description: prohibitin 1-like protein [Brassica napus]
  misc_feature (1)..(286): Homolog of NCBI NO: 15225374 NR Description: putative prohibitin

SEQ ID NO: 27373 - protein, 223 aa, Arabidopsis thaliana; identical to SEQ ID NO: 27301
  peptide (1)..(223): Ceres Seq. ID no. 12332486
  misc_feature (1)..(213): Homolog of NCBI NO: 15241424 NR Description: prohibitin; protein id: At5g44140.1 [Arabidopsis
  misc_feature (1)..(223): Homolog of NCBI NO: 7716462 NR Description: prohibitin [Zea mays]
  misc_feature (1)..(223): Homolog of NCBI NO: 34901014 NR Description: putative prohibitin [Oryza sativa (japonica
  misc_feature (1)..(223): Homolog of NCBI NO: 7716456 NR Description: prohibitin [Zea mays]
  misc_feature (1)..(223): Homolog of NCBI NO: 34394832 NR Description: putative prohibitin [Oryza sativa (japonica
  misc_feature (1)..(223): Homolog of NCBI NO: 15219569 NR Description: putative prohibitin 2
  misc_feature (1)..(222): Homolog of NCBI NO: 21593626 NR Description: prohibitin-like protein [Arabidopsis thaliana]
  misc_feature (1)..(222): Homolog of NCBI NO: 15235317 NR Description: prohibitin-like protein
  misc_feature (1)..(223): Homolog of NCBI NO: 12751303 NR Description: prohibitin 1-like protein [Brassica napus]
  misc_feature (1)..(223): Homolog of NCBI NO: 15225374 NR Description: putative prohibitin

SEQ ID NO: 27374 - protein, 193 aa, Arabidopsis thaliana; identical to SEQ ID NO: 27302
  peptide (1)..(193): Ceres Seq. ID no. 12332487
  misc_feature (1)..(183): Homolog of NCBI NO: 15241424 NR Description: prohibitin; protein id: At5g44140.1 [Arabidopsis
  misc_feature (1)..(193): Homolog of NCBI NO: 7716462 NR Description: prohibitin [Zea mays]
  misc_feature (1)..(193): Homolog of NCBI NO: 34901014 NR Description: putative prohibitin [Oryza sativa (japonica
  misc_feature (1)..(193): Homolog of NCBI NO: 7716456 NR Description: prohibitin [Zea mays]
  misc_feature (1)..(193): Homolog of NCBI NO: 34394832 NR Description: putative prohibitin [Oryza sativa (japonica
  misc_feature (1)..(193): Homolog of NCBI NO: 15219569 NR Description: putative prohibitin 2
  misc_feature (1)..(192): Homolog of NCBI NO: 21593626 NR Description: prohibitin-like protein [Arabidopsis thaliana]
  misc_feature (1)..(192): Homolog of NCBI NO: 15235317 NR Description: prohibitin-like protein
  misc_feature (1)..(193): Homolog of NCBI NO: 12751303 NR Description: prohibitin 1-like protein [Brassica napus]
  misc_feature (1)..(193): Homolog of NCBI NO: 15225374 NR Description: putative prohibitin

SEQ ID NO: 27375 - DNA, 1884 bp, Arabidopsis thaliana
  misc_feature (1)..(1884): Ceres Seq. ID no. 12332488
  misc_feature: MA Experiment ID: 108463 Result: Down-regulated in Transcription
  misc_feature: MA Experiment 108463 PARAMETER Experiment Name: At_Germinating_Seeds_cDNA_P Parameter: Age (day) Value: 3 vs. 0
  misc_feature: MA Experiment 108463 PARAMETER Experiment Name: At_Germinating_Seeds_cDNA_P Parameter: Tissue Value: Germinating Seeds
  misc_feature: MA Experiment ID: 108595 Result: Down-regulated in Transcription
  misc_feature: MA Experiment 108595 PARAMETER Experiment Name: At_Ler-pi_Ovule_cDNA_P Parameter: Plant Line Value: null
  misc_feature: MA Experiment ID: 20000227 Result: Down-regulated in Transcription
  misc_feature: MA Experiment 20000227 PARAMETER Experiment Name: At_Root-Tips-vs-Tops_P Parameter: Tissue Value: Root Tips vs. Root Tops
  misc_feature: MA Experiment ID: 20000794 Result: Up-regulated in Transcription
  misc_feature: MA Experiment 20000794 PARAMETER Experiment Name: At_Petals_P Parameter: Age (day) Value: 23-25 days
  misc_feature: MA Experiment 20000794 PARAMETER Experiment Name: At_Petals_P Parameter: Plant Line Value: WS
  misc_feature: MA Experiment 20000794 PARAMETER Experiment Name: At_Petals_P Parameter: Tissue Value: Petals vs. Whole plant
gtaaataaactgagaaaaagcctccgtctcctcctctctctctattcatcagcctcaacctctctttcgtcgtcgactcagtttccgatttagggttacccaatcttcgccatgtatcgcacggcagcttcacgagccagggctcttaagggagttcttactcgtagtttgagaccagcgcgttatgctagttctagtgctgttgcggagacgagttcgtcaacgccggcttacttgagctggttgagtggtgggtctcgtgctgcgcttacttcattggatatgcctctacaaggtgtttctcttcctccgccgcttgctgataaagtcgagccgagcaaacttcagatcactactcttccaaatggtcttaagatagcctcagagacgactccgaatccggcagcttcgattggtttatatgttgattgcggttctatttatgaggcgccttatttccatggagctacacatttgcttgaaagaatggctttcaagagcacgttgaacagaactcattttcgtcttgtgagggaaattgaggctattggaggcaacacatccgcttctgcgtctcgagagcaaatgagttacactattgatgctcttaagacctatgtccctgaaatggttgaagttcttattgacagtgttagaaaccctgctttcttggactgggaagtgaatgaagagctacggaagatgaaggtagagatagcggaacttgcaaagaaccctatgggtttcctcttggaggccattcattctgctggttactctggtccattggcaagtcctctgtacgcaccggagtctgctttagatagattgaatggggagctcttggaagagtttatgactgagaatttcactgctgcacggatggtattggcggcaagtggagtagaacatgaggaacttttaaaagttgctgagccattaacttctgaccttcctaatgtaccaccccaattggctccaaaatctcagtatgtcggtggagattttcgccaacatactggtggagaggctacacactttgcggttgctttcgaggtgcctggctggaataacgagaaagaagcagtcaccgccactgttctccagatgcttatgggaggaggtggctcattctctgcgggaggtcctggaaaaggaatgcactcgtggctttatcgccgtgttctaaacgaatatcaggaggttcagtcatgcactgcattcactagcatctttaacgacaccgggttgtttggaatctatggttgctcgagtcctcaattcgctgcaaaagcaattgaattagcagctaaagaactcaaagatgttgcaggaggaaaagttaaccaggcacatcttgatcgtgccaaggcagccacaaaatctgcagttctgatgaatttggaatctcggatgattgcagcagaagacattggtagacagatacttacatacggagagaggaaaccagttgatcaattcttgaagtcagtagaccaactaaccttgaaagacattgcagacttcaccagcaaggttatttcaaagcctttgacaatgggttcctttggagatgtgttggctgttccgagctatgacacaataagcagcaaatttcgttgaagcaaaacaaacaatttgccaaatcaacaatattttgggacttgtaaaataaagaagatcttggggagaagaagacccaaccaattttaattttaattttttttttacaattacagtttcgtatttttatgaaatggattttgtttccatcgacagatataaatgactggattttgtccggtttgtctctccaattttcaggagtatttgtattccaataaataatcttttactacgtgtaatgcaaacaacttcagtggt

SEQ ID NO: 27376 - protein, 503 aa, Arabidopsis thaliana
  peptide (1)..(503): Ceres Seq. ID no. 12332489
  misc_feature (239)..(423): Pfam Name: Peptidase M16 inactive domain Pfam Description: Peptidase M16 inactive domain
  misc_feature (1)..(488): Homolog of NCBI NO: 34906418 NR Description: putative mitochondrial processing peptidase
  misc_feature (1)..(502): Homolog of NCBI NO: 11993905 NR Description: mitochondrial processing peptidase alpha-chain
  misc_feature (1)..(502): Homolog of NCBI NO: 15076515 NR Description: mitochondrial processing peptidase alpha subunit
  misc_feature (23)..(502): Homolog of NCBI NO: 34909352 NR Description: putative mitochondrial processing peptidase alpha
  misc_feature (1)..(502): Homolog of NCBI NO: 2117355 NR Description: mitochondrial processing peptidase (EC 3.4.24.64)
  misc_feature (1)..(503): Homolog of NCBI NO: 266567 NR Description: Mitochondrial processing peptidase alpha subunit, precursor (Alpha-MPP) (Ubiquinol-cytochrome C reductase subunit
  misc_feature (1)..(503): Homolog of NCBI NO: 14334534 NR Description: putative mitochondrial processing peptidase alpha
  misc_feature (1)..(503): Homolog of NCBI NO: 18401141 NR Description: putative mitochondrial processing peptidase alpha
  misc_feature (1)..(503): Homolog of NCBI NO: 21594004 NR Description: mitochondrial processing peptidase alpha subunit,
  misc_feature (1)..(503): Homolog of NCBI NO: 15218090 NR Description: mitochondrial processing peptidase alpha subunit,
MYRTAASRARALKGVLTRSLRPARYASSSAVAETSSSTPAYLSWLSGGSRAALTSLDMPLQGVSLPPPLADKVEPSKLQITTLPNGLKIASETTPNPAASIGLYVDCGSIYEAPYFHGATHLLERMAFKSTLNRTHFRLVREIEAIGGNTSASASREQMSYTIDALKTYVPEMVEVLIDSVRNPAFLDWEVNEELRKMKVEIAELAKNPMGFLLEAIHSAGYSGPLASPLYAPESALDRLNGELLEEFMTENFTAARMVLAASGVEHEELLKVAEPLTSDLPNVPPQLAPKSQYVGGDFRQHTGGEATHFAVAFEVPGWNNEKEAVTATVLQMLMGGGGSFSAGGPGKGMHSWLYRRVLNEYQEVQSCTAFTSIFNDTGLFGIYGCSSPQFAAKAIELAAKELKDVAGGKVNQAHLDRAKAATKSAVLMNLESRMIAAEDIGRQILTYGERKPVDQFLKSVDQLTLKDIADFTSKVISKPLTMGSFGDVLAVPSYDTISSKFR

SEQ ID NO: 27377 - protein, 446 aa, Arabidopsis thaliana
  peptide (1)..(446): Ceres Seq. ID no. 12332490
  misc_feature (182)..(366): Pfam Name: Peptidase M16 inactive domain Pfam Description: Peptidase M16 inactive domain
  misc_feature (1)..(431): Homolog of NCBI NO: 34906418 NR Description: putative mitochondrial processing peptidase
  misc_feature (1)..(445): Homolog of NCBI NO: 11993905 NR Description: mitochondrial processing peptidase alpha-chain
  misc_feature (1)..(445): Homolog of NCBI NO: 15076515 NR Description: mitochondrial processing peptidase alpha subunit
  misc_feature (1)..(445): Homolog of NCBI NO: 34909352 NR Description: putative mitochondrial processing peptidase alpha
  misc_feature (1)..(445): Homolog of NCBI NO: 2117355 NR Description: mitochondrial processing peptidase (EC 3.4.24.64)
  misc_feature (1)..(446): Homolog of NCBI NO: 266567 NR Description: Mitochondrial processing peptidase alpha subunit, precursor (Alpha-MPP) (Ubiquinol-cytochrome C reductase subunit
  misc_feature (1)..(446): Homolog of NCBI NO: 14334534 NR Description: putative mitochondrial processing peptidase alpha
  misc_feature (1)..(446): Homolog of NCBI NO: 18401141 NR Description: putative mitochondrial processing peptidase alpha
  misc_feature (1)..(446): Homolog of NCBI NO: 21594004 NR Description: mitochondrial processing peptidase alpha subunit,
  misc_feature (1)..(446): Homolog of NCBI NO: 15218090 NR Description: mitochondrial processing peptidase alpha subunit,
MPLQGVSLPPPLADKVEPSKLQITTLPNGLKIASETTPNPAASIGLYVDCGSIYEAPYFHGATHLLERMAFKSTLNRTHFRLVREIEAIGGNTSASASREQMSYTIDALKTYVPEMVEVLIDSVRNPAFLDWEVNEELRKMKVEIAELAKNPMGFLLEAIHSAGYSGPLASPLYAPESALDRLNGELLEEFMTENFTAARMVLAASGVEHEELLKVAEPLTSDLPNVPPQLAPKSQYVGGDFRQHTGGEATHFAVAFEVPGWNNEKEAVTATVLQMLMGGGGSFSAGGPGKGMHSWLYRRVLNEYQEVQSCTAFTSIFNDTGLFGIYGCSSPQFAAKAIELAAKELKDVAGGKVNQAHLDRAKAATKSAVLMNLESRMIAAEDIGRQILTYGERKPVDQFLKSVDQLTLKDIADFTSKVISKPLTMGSFGDVLAVPSYDTISSKFR

SEQ ID NO: 27378 - protein, 378 aa, Arabidopsis thaliana
  peptide (1)..(378): Ceres Seq. ID no. 12332491
  misc_feature (114)..(298): Pfam Name: Peptidase M16 inactive domain Pfam Description: Peptidase M16 inactive domain
  misc_feature (1)..(377): Homolog of NCBI NO: 11993905 NR Description: mitochondrial processing peptidase alpha-chain
  misc_feature (1)..(377): Homolog of NCBI NO: 15076515 NR Description: mitochondrial processing peptidase alpha subunit
  misc_feature (1)..(377): Homolog of NCBI NO: 34909352 NR Description: putative mitochondrial processing peptidase alpha
  misc_feature (1)..(377): Homolog of NCBI NO: 2117355 NR Description: mitochondrial processing peptidase (EC 3.4.24.64)
  misc_feature (1)..(378): Homolog of NCBI NO: 266567 NR Description: Mitochondrial processing peptidase alpha subunit, precursor (Alpha-MPP) (Ubiquinol-cytochrome C reductase subunit
  misc_feature (1)..(363): Homolog of NCBI NO: 34906418 NR Description: putative mitochondrial processing peptidase
  misc_feature (1)..(378): Homolog of NCBI NO: 14334534 NR Description: putative mitochondrial processing peptidase alpha
  misc_feature (1)..(378): Homolog of NCBI NO: 18401141 NR Description: putative mitochondrial processing peptidase alpha
  misc_feature (1)..(378): Homolog of NCBI NO: 21594004 NR Description: mitochondrial processing peptidase alpha subunit,
  misc_feature (1)..(378): Homolog of NCBI NO: 15218090 NR Description: mitochondrial processing peptidase alpha subunit,
MAFKSTLNRTHFRLVREIEAIGGNTSASASREQMSYTIDALKTYVPEMVEVLIDSVRNPAFLDWEVNEELRKMKVEIAELAKNPMGFLLEAIHSAGYSGPLASPLYAPESALDRLNGELLEEFMTENFTAARMVLAASGVEHEELLKVAEPLTSDLPNVPPQLAPKSQYVGGDFRQHTGGEATHFAVAFEVPGWNNEKEAVTATVLQMLMGGGGSFSAGGPGKGMHSWLYRRVLNEYQEVQSCTAFTSIFNDTGLFGIYGCSSPQFAAKAIELAAKELKDVAGGKVNQAHLDRAKAATKSAVLMNLESRMIAAEDIGRQILTYGERKPVDQFLKSVDQLTLKDIADFTSKVISKPLTMGSFGDVLAVPSYDTISSKFR

SEQ ID NO: 27379 - DNA, 1156 bp, Arabidopsis thaliana
  misc_feature (1)..(1156): Ceres Seq. ID no. 12396270
  misc_feature: MA Experiment ID: 108434 Result: Up-regulated in Transcription
  misc_feature: MA Experiment 108434 PARAMETER Experiment Name: At_Root_Tips_cDNA_P Parameter: Tissue Value: Root Tips
  misc_feature: MA Experiment ID: 108435 Result: Up-regulated in Transcription
  misc_feature: MA Experiment 108435 PARAMETER Experiment Name: At_stm_Mutants_cDNA_P Parameter: Plant Line Value: wt Landsburg vs stm
  misc_feature: MA Experiment 108435 PARAMETER Experiment Name: At_stm_Mutants_cDNA_P Parameter: Tissue Value: Shoot Apical Meristem Region
  misc_feature: MA Experiment ID: 108501 Result: Down-regulated in Transcription
  misc_feature: MA Experiment 108501 PARAMETER Experiment Name: At_ap2_floral_buds_cDNA_P Parameter: Plant Line Value: ap2 (Ler.)
  misc_feature: MA Experiment 108501 PARAMETER Experiment Name: At_ap2_floral_buds_cDNA_P Parameter: Tissue Value: Closed Flower
  misc_feature: MA Experiment ID: 108609 Result: Down-regulated in Transcription
  misc_feature: MA Experiment 108609 PARAMETER Experiment Name: At_100uM_ABA_cDNA_P Parameter: Timepoint (hr) Value: 24
  misc_feature: MA Experiment 108609 PARAMETER Experiment Name: At_100uM_ABA_cDNA_P Parameter: Tissue Value: Aerial
  misc_feature: MA Experiment 108609 PARAMETER Experiment Name: At_100uM_ABA_cDNA_P Parameter: Treatment Value: 100uM ABA vs. No Treatment
  misc_feature: MA Experiment ID: 20000069 Result: Down-regulated in Transcription
  misc_feature: MA Experiment 20000069 PARAMETER Experiment Name: At_100uM_ABA_Mutants_cDNA_P Parameter: Plant Line Value: CS23
  misc_feature: MA Experiment 20000069 PARAMETER Experiment Name: At_100uM_ABA_Mutants_cDNA_P Parameter: Timepoint (hr) Value: 6
  misc_feature: MA Experiment 20000069 PARAMETER Experiment Name: At_100uM_ABA_Mutants_cDNA_P Parameter: Tissue Value: Aerial
  misc_feature: MA Experiment 20000069 PARAMETER Experiment Name: At_100uM_ABA_Mutants_cDNA_P Parameter: Treatment Value: 100uM ABA vs. No Treatment
  misc_feature: MA Experiment ID: 20000071 Result: Down-regulated in Transcription
  misc_feature: MA Experiment 20000071 PARAMETER Experiment Name: At_100uM_ABA_Mutants_cDNA_P Parameter: Plant Line Value: CS8104
  misc_feature: MA Experiment 20000071 PARAMETER Experiment Name: At_100uM_ABA_Mutants_cDNA_P Parameter: Timepoint (hr) Value: 6
  misc_feature: MA Experiment 20000071 PARAMETER Experiment Name: At_100uM_ABA_Mutants_cDNA_P Parameter: Tissue Value: Aerial
  misc_feature: MA Experiment 20000071 PARAMETER Experiment Name: At_100uM_ABA_Mutants_cDNA_P Parameter: Treatment Value: 100uM ABA vs. No Treatment
  misc_feature: MA Experiment ID: 20000072 Result: Down-regulated in Transcription
  misc_feature: MA Experiment 20000072 PARAMETER Experiment Name: At_100uM_ABA_Mutants_cDNA_P Parameter: Plant Line Value: CS8105
  misc_feature: MA Experiment 20000072 PARAMETER Experiment Name: At_100uM_ABA_Mutants_cDNA_P Parameter: Timepoint (hr) Value: 6
  misc_feature: MA Experiment 20000072 PARAMETER Experiment Name: At_100uM_ABA_Mutants_cDNA_P Parameter: Tissue Value: Aerial
  misc_feature: MA Experiment 20000072 PARAMETER Experiment Name: At_100uM_ABA_Mutants_cDNA_P Parameter: Treatment Value: 100uM ABA vs. No Treatment
  misc_feature: MA Experiment ID: 20000112 Result: Up-regulated in Transcription
  misc_feature: MA Experiment 20000112 PARAMETER Experiment Name: At_42deg_Heat_cDNA_P Parameter: Temperature (deg C) Value: 42 vs. 22
  misc_feature: MA Experiment 20000112 PARAMETER Experiment Name: At_42deg_Heat_cDNA_P Parameter: Timepoint (hr) Value: 2
  misc_feature: MA Experiment 20000112 PARAMETER Experiment Name: At_42deg_Heat_cDNA_P Parameter: Tissue Value: Aerial
  misc_feature: MA Experiment ID: 20000117 Result: Down-regulated in Transcription
  misc_feature: MA Experiment 20000117 PARAMETER Experiment Name: At_100uM_ABA_Mutants_cDNA_P Parameter: Plant Line Value: Columbia
  misc_feature: MA Experiment 20000117 PARAMETER Experiment Name: At_100uM_ABA_Mutants_cDNA_P Parameter: Timepoint (hr) Value: 6
  misc_feature: MA Experiment 20000117 PARAMETER Experiment Name: At_100uM_ABA_Mutants_cDNA_P Parameter: Tissue Value: Aerial
  misc_feature: MA Experiment 20000117 PARAMETER Experiment Name: At_100uM_ABA_Mutants_cDNA_P Parameter: Treatment Value: 100uM ABA vs. No Treatment
  misc_feature: MA Experiment ID: 20000227 Result: Up-regulated in Transcription
  misc_feature: MA Experiment 20000227 PARAMETER Experiment Name: At_Root-Tips-vs-Tops_P Parameter: Tissue Value: Root Tips vs. Root Tops
  misc_feature: MA Experiment ID: 20000234 Result: Up-regulated in Transcription
  misc_feature: MA Experiment 20000234 PARAMETER Experiment Name: At_Siliques_P Parameter: Age (day) Value: 21
  misc_feature: MA Experiment 20000234 PARAMETER Experiment Name: At_Siliques_P Parameter: Organism Value: A. thaliana
  misc_feature: MA Experiment 20000234 PARAMETER Experiment Name: At_Siliques_P Parameter: Plant Line Value: WS
  misc_feature: MA Experiment 20000234 PARAMETER Experiment Name: At_Siliques_P Parameter: Tissue Value: Less Than 5mm Siliques vs. Whole Plant
  misc_feature: MA Experiment ID: 20000235 Result: Up-regulated in Transcription
  misc_feature: MA Experiment 20000235 PARAMETER Experiment Name: At_Siliques_P Parameter: Age (day) Value: 21
  misc_feature: MA Experiment 20000235 PARAMETER Experiment Name: At_Siliques_P Parameter: Organism Value: A. thaliana
  misc_feature: MA Experiment 20000235 PARAMETER Experiment Name: At_Siliques_P Parameter: Plant Line Value: WS
  misc_feature: MA Experiment 20000235 PARAMETER Experiment Name: At_Siliques_P Parameter: Tissue Value: 5-10mm Siliques vs. Whole Plant
  misc_feature: MA Experiment ID: 20000264 Result: Up-regulated in Transcription
  misc_feature: MA Experiment 20000264 PARAMETER Experiment Name: At_Open_Flower_P Parameter: Age (day) Value: 21
  misc_feature: MA Experiment 20000264 PARAMETER Experiment Name: At_Open_Flower_P Parameter: Plant Line Value: WS
  misc_feature: MA Experiment 20000264 PARAMETER Experiment Name: At_Open_Flower_P Parameter: Tissue Value: Open Flower vs. Whole Plant
  misc_feature: MA Experiment ID: 20000265 Result: Up-regulated in Transcription
  misc_feature: MA Experiment 20000265 PARAMETER Experiment Name: At_Open_Flower_P Parameter: Age (day) Value: 21
  misc_feature: MA Experiment 20000265 PARAMETER Experiment Name: At_Open_Flower_P Parameter: Plant Line Value: WS
  misc_feature: MA Experiment 20000265 PARAMETER Experiment Name: At_Open_Flower_P Parameter: Tissue Value: Closed Flower vs. Whole Plant
  misc_feature: MA Experiment ID: 20000286 Result: Up-regulated in Transcription
  misc_feature: MA Experiment 20000286 PARAMETER Experiment Name: At_Open_Flower_P Parameter: Age (day) Value: 21
  misc_feature: MA Experiment 20000286 PARAMETER Experiment Name: At_Open_Flower_P Parameter: Plant Line Value: WS
  misc_feature: MA Experiment 20000286 PARAMETER Experiment Name: At_Open_Flower_P Parameter: Tissue Value: Half Open vs. Whole Plant
  misc_feature: MA Experiment ID: 20001450 Result: Up-regulated in Transcription
  misc_feature: MA Experiment 20001450 PARAMETER Experiment Name: At_Far-red-induction_P Parameter: Age (day) Value: 7
  misc_feature: MA Experiment 20001450 PARAMETER Experiment Name: At_Far-red-induction_P Parameter: Light Value: Far-red vs. White
  misc_feature: MA Experiment 20001450 PARAMETER Experiment Name: At_Far-red-induction_P Parameter: Organism Value: A. thaliana
  misc_feature: MA Experiment 20001450 PARAMETER Experiment Name: At_Far-red-induction_P Parameter: Plant Line Value: Columbia
  misc_feature: MA Experiment 20001450 PARAMETER Experiment Name: At_Far-red-induction_P Parameter: Timepoint (hr) Value: 8
  misc_feature: MA Experiment 20001450 PARAMETER Experiment Name: At_Far-red-induction_P Parameter: Tissue Value: Whole Plant
  misc_feature: MA Experiment ID: 20001451 Result: Up-regulated in Transcription
  misc_feature: MA Experiment 20001451 PARAMETER Experiment Name: At_Far-red-induction_P Parameter: Age (day) Value: 7
  misc_feature: MA Experiment 20001451 PARAMETER Experiment Name: At_Far-red-induction_P Parameter: Light Value: Far-red vs. White
  misc_feature: MA Experiment 20001451 PARAMETER Experiment Name: At_Far-red-induction_P Parameter: Organism Value: A. thaliana
  misc_feature: MA Experiment 20001451 PARAMETER Experiment Name: At_Far-red-induction_P Parameter: Plant Line Value: Columbia
  misc_feature: MA Experiment 20001451 PARAMETER Experiment Name: At_Far-red-induction_P Parameter: Timepoint (hr) Value: 24
  misc_feature: MA Experiment 20001451 PARAMETER Experiment Name: At_Far-red-induction_P Parameter: Tissue Value: Whole Plant
  misc_feature: MA Experiment ID: 20001559 Result: Up-regulated in Transcription
  misc_feature: MA Experiment 20001559 PARAMETER Experiment Name: At_Drought_Soil_Dry_P Parameter: Age (day) Value: 28
  misc_feature: MA Experiment 20001559 PARAMETER Experiment Name: At_Drought_Soil_Dry_P Parameter: Organism Value: A. thaliana
  misc_feature: MA Experiment 20001559 PARAMETER Experiment Name: At_Drought_Soil_Dry_P Parameter: Plant Line Value: WS
  misc_feature: MA Experiment 20001559 PARAMETER Experiment Name: At_Drought_Soil_Dry_P Parameter: Post Timepoint (hr) Value: 29
  misc_feature: MA Experiment 20001559 PARAMETER Experiment Name: At_Drought_Soil_Dry_P Parameter: Post-Treatment Value: Re-Water vs. No Drought
  misc_feature: MA Experiment 20001559 PARAMETER Experiment Name: At_Drought_Soil_Dry_P Parameter: Timepoint (day) Value: 14
  misc_feature: MA Experiment 20001559 PARAMETER Experiment Name: At_Drought_Soil_Dry_P Parameter: Treatment Value: Drought vs. No Drought
  misc_feature: MA Experiment ID: 20001904 Result: Up-regulated in Transcription
  misc_feature: MA Experiment 20001904 PARAMETER Experiment Name: At_Drought_Reproduction_P Parameter: Age (day) Value: 37
  misc_feature: MA Experiment 20001904 PARAMETER Experiment Name: At_Drought_Reproduction_P Parameter: Organism Value: A. thaliana
  misc_feature: MA Experiment 20001904 PARAMETER Experiment Name: At_Drought_Reproduction_P Parameter: Plant Line Value: WS
  misc_feature: MA Experiment 20001904 PARAMETER Experiment Name: At_Drought_Reproduction_P Parameter: Timepoint (day) Value: 7
  misc_feature: MA Experiment 20001904 PARAMETER Experiment Name: At_Drought_Reproduction_P Parameter: Tissue Value: Rosettes
  misc_feature: MA Experiment 20001904 PARAMETER Experiment Name: At_Drought_Reproduction_P Parameter: Treatment Value: Drought vs. No Drought
  misc_feature: MA Experiment ID: 20001905 Result: Up-regulated in Transcription
  misc_feature: MA Experiment 20001905 PARAMETER Experiment Name: At_Drought_Reproduction_P Parameter: Age (day) Value: 40
  misc_feature: MA Experiment 20001905 PARAMETER Experiment Name: At_Drought_Reproduction_P Parameter: Organism Value: A. thaliana
  misc_feature: MA Experiment 20001905 PARAMETER Experiment Name: At_Drought_Reproduction_P Parameter: Plant Line Value: WS
  misc_feature: MA Experiment 20001905 PARAMETER Experiment Name: At_Drought_Reproduction_P Parameter: Timepoint (day) Value: 10
  misc_feature: MA Experiment 20001905 PARAMETER Experiment Name: At_Drought_Reproduction_P Parameter: Tissue Value: Rosettes
  misc_feature: MA Experiment 20001905 PARAMETER Experiment Name: At_Drought_Reproduction_P Parameter: Treatment Value: Drought vs. No Drought
ataacatatatttcttcttcgtttcattcataatcgtcttataaccacagattctaaaacatgggagaagaagtaaaaccagaggcaaaggaggcagcctctgctccacaggccgtccccgctgaggaggaggagaagaagaaagatgtagcggaggagaagaaagtggcggctgaggaggagaaaccaaaggaggaagaggagccgcaaccaccaccaccgcctccacccttcatactctacgtcgacttgcattgtgttggatgcgctaagaagattgaaagatctattctaaaaattagaggtgtggaagaagtggtgatggatatgaatgagaaccaagtgacgataaagggagtgttggatccgcaagcagtgtgcaacaaaatcaagaagaagactaaaagaatggccaaagtcctctcgccgcttccggcagctgagggagagcctctgccaccaatcataacctctcaggtctccggcggcctcaccaccgtcgagctcagcgttaacatgcactgccaagcttgtgctgaccagctcaagaagaagattctcaaaatgagaggggtccaaacaactgtgacagagcacaccacgggaaaagtaatagtgactgggacaatggacgctgagaagcttgtggattacgtctaccgtcggaccaaaaagcaagcccgaatcgtaccccaacctgacccggaacctgaagcccccgcggccgcgcaggaagaaaagaaggaggagagcggtgaaggcaatgaaaaaccaccagagaccggagaggaaaaggaagaagagaagaagaaggagggagaggaaaatggagaggaaggtggtggagaagaggcggcggctacggaggaagagagacgagacaatgaaatgacggctatggcccaagaagaagggatgaagaggatgatgtattactatcaaccttcatacgtcatagagaggattcctccgccgcagctttttagcgacgagaaccctaatgcttgttgcatttcttaattaaatttggtttcgtatatgtctatggaaaatataattagaggaattaataattaggtaagaaaagaaagaaaataggtaaagaatttgtaaactatttattttttaatataatgtacgtgtgtttggtatctct

SEQ ID NO: 27380 - protein, 319 aa, Arabidopsis thaliana
  peptide (1)..(319): Ceres Seq. ID no. 12396271
  misc_feature (148)..(209): Pfam Name: Heavy-metal-associated domain Pfam Description: Heavy-metal-associated domain
  misc_feature (64)..(264): Homolog of NCBI NO: 25408515 NR Description: probable farnesylated protein [imported] -
  misc_feature (24)..(264): Homolog of NCBI NO: 18404283 NR Description: expressed protein
  misc_feature (45)..(318): Homolog of NCBI NO: 15218784 NR Description: hypothetical protein; protein id: At1g29000.1
  misc_feature (30)..(237): Homolog of NCBI NO: 37532382 NR Description: putative ATFP3 [Oryza sativa (japonica
  misc_feature (3)..(274): Homolog of NCBI NO: 38344582 NR Description: OSJNBa0053B21.14 [Oryza sativa (japonica
  misc_feature (47)..(318): Homolog of NCBI NO: 4097547 NR Description: ATFP3 [Arabidopsis thaliana]
  misc_feature (3)..(318): Homolog of NCBI NO: 18424719 NR Description: copper chaperone (CCH)-related
  misc_feature (3)..(318): Homolog of NCBI NO: 9758294 NR Description: contains similarity to ATFP3~gene_id:MLE2.16
  misc_feature (1)..(319): Homolog of NCBI NO: 21594005 NR Description: unknown [Arabidopsis thaliana]
  misc_feature (1)..(319): Homolog of NCBI NO: 18420811 NR Description: expressed protein
MGEEVKPEAKEAASAPQAVPAEEEEKKKDVAEEKKVAAEEEKPKEEEEPQPPPPPPPFILYVDLHCVGCAKKIERSILKIRGVEEVVMDMNENQVTIKGVLDPQAVCNKIKKKTKRMAKVLSPLPAAEGEPLPPIITSQVSGGLTTVELSVNMHCQACADQLKKKILKMRGVQTTVTEHTTGKVIVTGTMDAEKLVDYVYRRTKKQARIVPQPDPEPEAPAAAQEEKKEESGEGNEKPPETGEEKEEEKKKEGEENGEEGGGEEAAATEEERRDNEMTAMAQEEGMKRMMYYYQPSYVIERIPPPQLFSDENPNACCIS

SEQ ID NO: 27381 - protein, 232 aa, Arabidopsis thaliana
  peptide (1)..(232): Ceres Seq. ID no. 12396272
  misc_feature (61)..(122): Pfam Name: Heavy-metal-associated domain Pfam Description: Heavy-metal-associated domain
  misc_feature (1)..(177): Homolog of NCBI NO: 25408515 NR Description: probable farnesylated protein [imported] -
  misc_feature (1)..(177): Homolog of NCBI NO: 18404283 NR Description: expressed protein
  misc_feature (1)..(231): Homolog of NCBI NO: 15218784 NR Description: hypothetical protein; protein id: At1g29000.1
  misc_feature (1)..(150): Homolog of NCBI NO: 37532382 NR Description: putative ATFP3 [Oryza sativa (japonica
  misc_feature (1)..(187): Homolog of NCBI NO: 38344582 NR Description: OSJNBa0053B21.14 [Oryza sativa (japonica
  misc_feature (1)..(231): Homolog of NCBI NO: 4097547 NR Description: ATFP3 [Arabidopsis thaliana]
  misc_feature (1)..(231): Homolog of NCBI NO: 18424719 NR Description: copper chaperone (CCH)-related
  misc_feature (1)..(231): Homolog of NCBI NO: 9758294 NR Description: contains similarity to ATFP3~gene_id:MLE2.16
  misc_feature (1)..(232): Homolog of NCBI NO: 21594005 NR Description: unknown [Arabidopsis thaliana]
  misc_feature (1)..(232): Homolog of NCBI NO: 18420811 NR Description: expressed protein
MDMNENQVTIKGVLDPQAVCNKIKKKTKRMAKVLSPLPAAEGEPLPPIITSQVSGGLTTVELSVNMHCQACADQLKKKILKMRGVQTTVTEHTTGKVIVTGTMDAEKLVDYVYRRTKKQARIVPQPDPEPEAPAAAQEEKKEESGEGNEKPPETGEEKEEEKKKEGEENGEEGGGEEAAATEEERRDNEMTAMAQEEGMKRMMYYYQPSYVIERIPPPQLFSDENPNACCIS

SEQ ID NO: 27382 - protein, 230 aa, Arabidopsis thaliana
  peptide (1)..(230): Ceres Seq. ID no. 12396273
  misc_feature (59)..(120): Pfam Name: Heavy-metal-associated domain Pfam Description: Heavy-metal-associated domain
  misc_feature (1)..(175): Homolog of NCBI NO: 25408515 NR Description: probable farnesylated protein [imported] -
  misc_feature (1)..(175): Homolog of NCBI NO: 18404283 NR Description: expressed protein
  misc_feature (1)..(229): Homolog of NCBI NO: 15218784 NR Description: hypothetical protein; protein id: At1g29000.1
  misc_feature (1)..(148): Homolog of NCBI NO: 37532382 NR Description: putative ATFP3 [Oryza sativa (japonica
  misc_feature (1)..(185): Homolog of NCBI NO: 38344582 NR Description: OSJNBa0053B21.14 [Oryza sativa (japonica
  misc_feature (1)..(229): Homolog of NCBI NO: 4097547 NR Description: ATFP3 [Arabidopsis thaliana]
  misc_feature (1)..(229): Homolog of NCBI NO: 18424719 NR Description: copper chaperone (CCH)-related
  misc_feature (1)..(229): Homolog of NCBI NO: 9758294 NR Description: contains similarity to ATFP3~gene_id:MLE2.16
  misc_feature (1)..(230): Homolog of NCBI NO: 21594005 NR Description: unknown [Arabidopsis thaliana]
  misc_feature (1)..(230): Homolog of NCBI NO: 18420811 NR Description: expressed protein
MNENQVTIKGVLDPQAVCNKIKKKTKRMAKVLSPLPAAEGEPLPPIITSQVSGGLTTVELSVNMHCQACADQLKKKILKMRGVQTTVTEHTTGKVIVTGTMDAEKLVDYVYRRTKKQARIVPQPDPEPEAPAAAQEEKKEESGEGNEKPPETGEEKEEEKKKEGEENGEEGGGEEAAATEEERRDNEMTAMAQEEGMKRMMYYYQPSYVIERIPPPQLFSDENPNACCIS

SEQ ID NO: 27383 - DNA, 1089 bp, Arabidopsis thaliana
  misc_feature (1)..(1089): Ceres Seq. ID no. 12327068
  misc_feature: MA Experiment ID: 108434 Result: Up-regulated in Transcription
  misc_feature: MA Experiment 108434 PARAMETER Experiment Name: At_Root_Tips_cDNA_P Parameter: Tissue Value: Root Tips
  misc_feature: MA Experiment ID: 108435 Result: Up-regulated in Transcription
  misc_feature: MA Experiment 108435 PARAMETER Experiment Name: At_stm_Mutants_cDNA_P Parameter: Plant Line Value: wt Landsburg vs stm
  misc_feature: MA Experiment 108435 PARAMETER Experiment Name: At_stm_Mutants_cDNA_P Parameter: Tissue Value: Shoot Apical Meristem Region
  misc_feature: MA Experiment ID: 108462 Result: Down-regulated in Transcription
  misc_feature: MA Experiment 108462 PARAMETER Experiment Name: At_Germinating_Seeds_cDNA_P Parameter: Age (day) Value: 2 vs. 0
  misc_feature: MA Experiment 108462 PARAMETER Experiment Name: At_Germinating_Seeds_cDNA_P Parameter: Tissue Value: Germinating Seeds
  misc_feature: MA Experiment ID: 108463 Result: Down-regulated in Transcription
  misc_feature: MA Experiment 108463 PARAMETER Experiment Name: At_Germinating_Seeds_cDNA_P Parameter: Age (day) Value: 3 vs. 0
  misc_feature: MA Experiment 108463 PARAMETER Experiment Name: At_Germinating_Seeds_cDNA_P Parameter: Tissue Value: Germinating Seeds
  misc_feature: MA Experiment ID: 108464 Result: Down-regulated in Transcription
  misc_feature: MA Experiment 108464 PARAMETER Experiment Name: At_Germinating_Seeds_cDNA_P Parameter: Age (day) Value: 4 vs. 0
  misc_feature: MA Experiment 108464 PARAMETER Experiment Name: At_Germinating_Seeds_cDNA_P Parameter: Tissue Value: Germinating Seeds
  misc_feature: MA Experiment ID: 108573 Result: Down-regulated in Transcription
  misc_feature: MA Experiment 108573 PARAMETER Experiment Name: At_Drought_cDNA_P Parameter: Timepoint (hr) Value: 6
  misc_feature: MA Experiment 108573 PARAMETER Experiment Name: At_Drought_cDNA_P Parameter: Tissue Value: Aerial
  misc_feature: MA Experiment 108573 PARAMETER Experiment Name: At_Drought_cDNA_P Parameter: Treatment Value: Drought vs. No Drought
  misc_feature: MA Experiment ID: 20000184 Result: Up-regulated in Transcription
  misc_feature: MA Experiment 20000184 PARAMETER Experiment Name: At_Shoots__P Parameter: Age (day) Value: 7
  misc_feature: MA Experiment 20000184 PARAMETER Experiment Name: At_Shoots__P Parameter: Tissue Value: Shoots vs. Whole Plant
  misc_feature: MA Experiment ID: 20000227 Result: Up-regulated in Transcription
  misc_feature: MA Experiment 20000227 PARAMETER Experiment Name: At_Root-Tips-vs-Tops_P Parameter: Tissue Value: Root Tips vs. Root Tops
  misc_feature: MA Experiment ID: 20000234 Result: Up-regulated in Transcription
  misc_feature: MA Experiment 20000234 PARAMETER Experiment Name: At_Siliques_P Parameter: Age (day) Value: 21
  misc_feature: MA Experiment 20000234 PARAMETER Experiment Name: At_Siliques_P Parameter: Organism Value: A. thaliana
  misc_feature: MA Experiment 20000234 PARAMETER Experiment Name: At_Siliques_P Parameter: Plant Line Value: WS
  misc_feature: MA Experiment 20000234 PARAMETER Experiment Name: At_Siliques_P Parameter: Tissue Value: Less Than 5mm Siliques vs. Whole Plant
  misc_feature: MA Experiment ID: 20000264 Result: Up-regulated in Transcription
  misc_feature: MA Experiment 20000264 PARAMETER Experiment Name: At_Open_Flower_P Parameter: Age (day) Value: 21
  misc_feature: MA Experiment 20000264 PARAMETER Experiment Name: At_Open_Flower_P Parameter: Plant Line Value: WS
  misc_feature: MA Experiment 20000264 PARAMETER Experiment Name: At_Open_Flower_P Parameter: Tissue Value: Open Flower vs. Whole Plant
  misc_feature: MA Experiment ID: 20001248 Result: Down-regulated in Transcription
  misc_feature: MA Experiment 20001248 PARAMETER Experiment Name: At_Far-red-induction_P Parameter: Age (day) Value: 7
  misc_feature: MA Experiment 20001248 PARAMETER Experiment Name: At_Far-red-induction_P Parameter: Light Value: Far-red vs. White
  misc_feature: MA Experiment 20001248 PARAMETER Experiment Name: At_Far-red-induction_P Parameter: Organism Value: A. thaliana
  misc_feature: MA Experiment 20001248 PARAMETER Experiment Name: At_Far-red-induction_P Parameter: Plant Line Value: Columbia
  misc_feature: MA Experiment 20001248 PARAMETER Experiment Name: At_Far-red-induction_P Parameter: Timepoint (hr) Value: 4
  misc_feature: MA Experiment 20001248 PARAMETER Experiment Name: At_Far-red-induction_P Parameter: Tissue Value: Whole Plant
  misc_feature: MA Experiment ID: 20001557 Result: Up-regulated in Transcription
  misc_feature: MA Experiment 20001557 PARAMETER Experiment Name: At_Drought_Soil_Dry_P Parameter: Age (day) Value: 27
  misc_feature: MA Experiment 20001557 PARAMETER Experiment Name: At_Drought_Soil_Dry_P Parameter: Organism Value: A. thaliana
  misc_feature: MA Experiment 20001557 PARAMETER Experiment Name: At_Drought_Soil_Dry_P Parameter: Plant Line Value: WS
  misc_feature: MA Experiment 20001557 PARAMETER Experiment Name: At_Drought_Soil_Dry_P Parameter: Post Timepoint (hr) Value: 3
  misc_feature: MA Experiment 20001557 PARAMETER Experiment Name: At_Drought_Soil_Dry_P Parameter: Post-Treatment Value: Re-Water vs. No Drought
  misc_feature: MA Experiment 20001557 PARAMETER Experiment Name: At_Drought_Soil_Dry_P Parameter: Timepoint (day) Value: 13
  misc_feature: MA Experiment 20001557 PARAMETER Experiment Name: At_Drought_Soil_Dry_P Parameter: Treatment Value: Drought vs. No Drought
  misc_feature: MA Experiment ID: 20001558 Result: Up-regulated in Transcription
  misc_feature: MA Experiment 20001558 PARAMETER Experiment Name: At_Drought_Soil_Dry_P Parameter: Age (day) Value: 27
  misc_feature: MA Experiment 20001558 PARAMETER Experiment Name: At_Drought_Soil_Dry_P Parameter: Organism Value: A. thaliana
  misc_feature: MA Experiment 20001558 PARAMETER Experiment Name: At_Drought_Soil_Dry_P Parameter: Plant Line Value: WS
  misc_feature: MA Experiment 20001558 PARAMETER Experiment Name: At_Drought_Soil_Dry_P Parameter: Post Timepoint (hr) Value: 6
  misc_feature: MA Experiment 20001558 PARAMETER Experiment Name: At_Drought_Soil_Dry_P Parameter: Post-Treatment Value: Re-Water vs. No Drought
  misc_feature: MA Experiment 20001558 PARAMETER Experiment Name: At_Drought_Soil_Dry_P Parameter: Timepoint (day) Value: 13
  misc_feature: MA Experiment 20001558 PARAMETER Experiment Name: At_Drought_Soil_Dry_P Parameter: Treatment Value: Drought vs. No Drought
  misc_feature: MA Experiment ID: 20001560 Result: Up-regulated in Transcription
  misc_feature: MA Experiment 20001560 PARAMETER Experiment Name: At_Drought_Soil_Dry_P Parameter: Age (day) Value: 28
  misc_feature: MA Experiment 20001560 PARAMETER Experiment Name: At_Drought_Soil_Dry_P Parameter: Organism Value: A. thaliana
  misc_feature: MA Experiment 20001560 PARAMETER Experiment Name: At_Drought_Soil_Dry_P Parameter: Plant Line Value: WS
  misc_feature: MA Experiment 20001560 PARAMETER Experiment Name: At_Drought_Soil_Dry_P Parameter: Post Timepoint (hr) Value: None
  misc_feature: MA Experiment 20001560 PARAMETER Experiment Name: At_Drought_Soil_Dry_P Parameter: Post-Treatment Value: None
  misc_feature: MA Experiment 20001560 PARAMETER Experiment Name: At_Drought_Soil_Dry_P Parameter: Timepoint (day) Value: 14
  misc_feature: MA Experiment 20001560 PARAMETER Experiment Name: At_Drought_Soil_Dry_P Parameter: Treatment Value: Drought vs. No Drought
  misc_feature: MA Experiment ID: 20001757 Result: Up-regulated in Transcription
  misc_feature: MA Experiment 20001757 PARAMETER Experiment Name: At_50mM_NH4NO3_L-to-H_P Parameter: Timepoint (hr) Value: 6
  misc_feature: MA Experiment 20001757 PARAMETER Experiment Name: At_50mM_NH4NO3_L-to-H_P Parameter: Tissue Value: Leaf
  misc_feature: MA Experiment 20001757 PARAMETER Experiment Name: At_50mM_NH4NO3_L-to-H_P Parameter: Treatment Value: 50mM NH4NO3 vs 100mM Mannitol
actcttcgactcagccgtcctttcgcagaaaccatttggagttggagctttggacgacgacaatggccccgaagaaaggagtgaaggtagctgctaagaagaagaccgcggagaaagtttcaaaccctctattcgagaggaggcctaagcaattcggtattggtggagctttacctcctaagaaggatctctctcgctacatcaaatggcccaaatccatccgtcttcaaaggcaaaagaggatcctgaagcagaggttgaaggtccctccagctcttaaccaattcaccaagactcttgacaagaatcttgctaccagcctcttcaaggtccttctgaagtacaggccagaagacaaagctgccaagaaggagcgtcttgtaaagaaggcccaagctgaagctgagggaaagccttctgagtctaagaagcccattgtagtcaaatacggcctcaaccatgtgacctacctcattgagcagaacaaggcccaacttgttgttattgctcatgatgtcgacccaattgagttggttgtctggttgcctgctctgtgcaggaagatggaagtcccgtactgcattgtcaagggcaaatctcgtcttggagcggttgttcaccagaagactgcttcttgcttgtgtttgaccactgtcaagaacgaggacaagctagagttcagcaaaatcctggaagctatcaaggccaacttcaatgacaagtacgaggagtacaggaagaaatggggaggaggcataatgggatctaagtctcaggcaaagaccaaggcaaaggaaagagttattgcaaaggaggctgcccaaaggatgaattaagaggctagcttcttttgtttgtggtttgctcggattcgtaaaacttaatagagctttttgtttagctggttcttgaagtacctcttttttagttgaaccctttattatggatgttttgcaatttcttgggacagtttcaatgttattcaagctgctggatcctctttggtctctcaaccacttaaaacttgacagtgtgaaattttagccaaatgcttattgcattctggaaagagttataagtttaattccc

SEQ ID NO: 27384 - protein, 277 aa, Arabidopsis thaliana
  peptide (1)..(277): Ceres Seq. ID no. 12327069
  misc_feature (132)..(227): Pfam Name: Ribosomal protein L7Ae/L30e/S12e/Gadd45 family Pfam Description: Ribosomal protein L7Ae/L30e/S12e/Gadd45 family
  misc_feature (32)..(276): Homolog of NCBI NO: 34932126 NR Description: similar to Rpl7a protein [Rattus norvegicus]
  misc_feature (25)..(276): Homolog of NCBI NO: 417673 NR Description: 60S RIBOSOMAL PROTEIN L7A
  misc_feature (37)..(276): Homolog of NCBI NO: 22758896 NR Description: ribosomal protein L7a [Argopecten irradians]
  misc_feature (25)..(276): Homolog of NCBI NO: 6094094 NR Description: 60S RIBOSOMAL PROTEIN L7A (SURFEIT LOCUS PROTEIN
  misc_feature (18)..(275): Homolog of NCBI NO: 1173062 NR Description: 60S RIBOSOMAL PROTEIN L7A
  misc_feature (18)..(275): Homolog of NCBI NO: 17530825 NR Description: Ribosomal protein L7A CG3314-PD
  misc_feature (21)..(276): Homolog of NCBI NO: 20161741 NR Description: putative 60S ribosomal protein
  misc_feature (21)..(276): Homolog of NCBI NO: 548774 NR Description: 60S RIBOSOMAL PROTEIN L7A
  misc_feature (21)..(277): Homolog of NCBI NO: 15229338 NR Description: 60S RIBOSOMAL PROTEIN L7A protein
  misc_feature (21)..(277): Homolog of NCBI NO: 15226635 NR Description: 60S ribosomal protein L7A
SSTQPSFRRNHLELELWTTTMAPKKGVKVAAKKKTAEKVSNPLFERRPKQFGIGGALPPKKDLSRYIKWPKSIRLQRQKRILKQRLKVPPALNQFTKTLDKNLATSLFKVLLKYRPEDKAAKKERLVKKAQAEAEGKPSESKKPIVVKYGLNHVTYLIEQNKAQLVVIAHDVDPIELVVWLPALCRKMEVPYCIVKGKSRLGAVVHQKTASCLCLTTVKNEDKLEFSKILEAIKANFNDKYEEYRKKWGGGIMGSKSQAKTKAKERVIAKEAAQRMN

SEQ ID NO: 27385 - protein, 257 aa, Arabidopsis thaliana
  peptide (1)..(257): Ceres Seq. ID no. 12327070
  misc_feature (112)..(207): Pfam Name: Ribosomal protein L7Ae/L30e/S12e/Gadd45 family Pfam Description: Ribosomal protein L7Ae/L30e/S12e/Gadd45 family
  misc_feature (12)..(256): Homolog of NCBI NO: 34932126 NR Description: similar to Rpl7a protein [Rattus norvegicus]
  misc_feature (5)..(256): Homolog of NCBI NO: 417673 NR Description: 60S RIBOSOMAL PROTEIN L7A
  misc_feature (17)..(256): Homolog of NCBI NO: 22758896 NR Description: ribosomal protein L7a [Argopecten irradians]
  misc_feature (5)..(256): Homolog of NCBI NO: 6094094 NR Description: 60S RIBOSOMAL PROTEIN L7A (SURFEIT LOCUS PROTEIN
  misc_feature (1)..(255): Homolog of NCBI NO: 1173062 NR Description: 60S RIBOSOMAL PROTEIN L7A
  misc_feature (1)..(255): Homolog of NCBI NO: 17530825 NR Description: Ribosomal protein L7A CG3314-PD
  misc_feature (1)..(256): Homolog of NCBI NO: 20161741 NR Description: putative 60S ribosomal protein
  misc_feature (1)..(256): Homolog of NCBI NO: 548774 NR Description: 60S RIBOSOMAL PROTEIN L7A
  misc_feature (1)..(257): Homolog of NCBI NO: 15229338 NR Description: 60S RIBOSOMAL PROTEIN L7A protein
  misc_feature (1)..(257): Homolog of NCBI NO: 15226635 NR Description: 60S ribosomal protein L7A
MAPKKGVKVAAKKKTAEKVSNPLFERRPKQFGIGGALPPKKDLSRYIKWPKSIRLQRQKRILKQRLKVPPALNQFTKTLDKNLATSLFKVLLKYRPEDKAAKKERLVKKAQAEAEGKPSESKKPIVVKYGLNHVTYLIEQNKAQLVVIAHDVDPIELVVWLPALCRKMEVPYCIVKGKSRLGAVVHQKTASCLCLTTVKNEDKLEFSKILEAIKANFNDKYEEYRKKWGGGIMGSKSQAKTKAKERVIAKEAAQRMN

SEQ ID NO: 27386 - DNA, 914 bp, Arabidopsis thaliana
  misc_feature (1)..(914): Ceres Seq. ID no. 12343471
  misc_feature: MA Experiment ID: 108574 Result: Up-regulated in Transcription
  misc_feature: MA Experiment 108574 PARAMETER Experiment Name: At_Wounding__cDNA_P Parameter: Timepoint (hr) Value: 1
  misc_feature: MA Experiment 108574 PARAMETER Experiment Name: At_Wounding__cDNA_P Parameter: Tissue Value: Aerial
  misc_feature: MA Experiment 108574 PARAMETER Experiment Name: At_Wounding__cDNA_P Parameter: Treatment Value: Wounding vs. No Wounding
  misc_feature: MA Experiment ID: 108585 Result: Up-regulated in Transcription
  misc_feature: MA Experiment 108585 PARAMETER Experiment Name: At_5mM_NaNP_cDNA_P Parameter: Timepoint (hr) Value: 6
  misc_feature: MA Experiment 108585 PARAMETER Experiment Name: At_5mM_NaNP_cDNA_P Parameter: Tissue Value: Aerial
  misc_feature: MA Experiment 108585 PARAMETER Experiment Name: At_5mM_NaNP_cDNA_P Parameter: Treatment Value: null
  misc_feature: MA Experiment ID: 108667 Result: Up-regulated in Transcription
  misc_feature: MA Experiment 108667 PARAMETER Experiment Name: At_2mM_SA_cDNA_P Parameter: Plant Line Value: WS
  misc_feature: MA Experiment 108667 PARAMETER Experiment Name: At_2mM_SA_cDNA_P Parameter: Timepoint (hr) Value: 1
  misc_feature: MA Experiment 108667 PARAMETER Experiment Name: At_2mM_SA_cDNA_P Parameter: Treatment Value: 2mM SA vs. No Treatment
  misc_feature: MA Experiment ID: 20000171 Result: Down-regulated in Transcription
  misc_feature: MA Experiment 20000171 PARAMETER Experiment Name: At_42deg_Heat_P Parameter: Age (day) Value: 14
  misc_feature: MA Experiment 20000171 PARAMETER Experiment Name: At_42deg_Heat_P Parameter: Organism Value: A. thaliana
  misc_feature: MA Experiment 20000171 PARAMETER Experiment Name: At_42deg_Heat_P Parameter: Plant Line Value: WS
  misc_feature: MA Experiment 20000171 PARAMETER Experiment Name: At_42deg_Heat_P Parameter: Temperature (deg C) Value: 42 vs. 22
  misc_feature: MA Experiment 20000171 PARAMETER Experiment Name: At_42deg_Heat_P Parameter: Timepoint (hr) Value: 1
  misc_feature: MA Experiment 20000171 PARAMETER Experiment Name: At_42deg_Heat_P Parameter: Tissue Value: Aerial
  misc_feature: MA Experiment ID: 20000182 Result: Up-regulated in Transcription
  misc_feature: MA Experiment 20000182 PARAMETER Experiment Name: At_2mM_SA_P Parameter: Age (day) Value: 14
  misc_feature: MA Experiment 20000182 PARAMETER Experiment Name: At_2mM_SA_P Parameter: Organism Value: A. thaliana
  misc_feature: MA Experiment 20000182 PARAMETER Experiment Name: At_2mM_SA_P Parameter: Plant Line Value: WS
  misc_feature: MA Experiment 20000182 PARAMETER Experiment Name: At_2mM_SA_P Parameter: Timepoint (hr) Value: 6
  misc_feature: MA Experiment 20000182 PARAMETER Experiment Name: At_2mM_SA_P Parameter: Tissue Value: Aerial
  misc_feature: MA Experiment 20000182 PARAMETER Experiment Name: At_2mM_SA_P Parameter: Treatment Value: 2mM SA vs. No Treatment
  misc_feature: MA Experiment ID: 20000184 Result: Down-regulated in Transcription
  misc_feature: MA Experiment 20000184 PARAMETER Experiment Name: At_Shoots__P Parameter: Age (day) Value: 7
  misc_feature: MA Experiment 20000184 PARAMETER Experiment Name: At_Shoots__P Parameter: Tissue Value: Shoots vs. Whole Plant
  misc_feature: MA Experiment ID: 20000234 Result: Down-regulated in Transcription
  misc_feature: MA Experiment 20000234 PARAMETER Experiment Name: At_Siliques_P Parameter: Age (day) Value: 21
  misc_feature: MA Experiment 20000234 PARAMETER Experiment Name: At_Siliques_P Parameter: Organism Value: A. thaliana
  misc_feature: MA Experiment 20000234 PARAMETER Experiment Name: At_Siliques_P Parameter: Plant Line Value: WS
  misc_feature: MA Experiment 20000234 PARAMETER Experiment Name: At_Siliques_P Parameter: Tissue Value: Less Than 5mm Siliques vs. Whole Plant
  misc_feature: MA Experiment ID: 20000235 Result: Down-regulated in Transcription
  misc_feature: MA Experiment 20000235 PARAMETER Experiment Name: At_Siliques_P Parameter: Age (day) Value: 21
  misc_feature: MA Experiment 20000235 PARAMETER Experiment Name: At_Siliques_P Parameter: Organism Value: A. thaliana
  misc_feature: MA Experiment 20000235 PARAMETER Experiment Name: At_Siliques_P Parameter: Plant Line Value: WS
  misc_feature: MA Experiment 20000235 PARAMETER Experiment Name: At_Siliques_P Parameter: Tissue Value: 5-10mm Siliques vs. Whole Plant
  misc_feature: MA Experiment ID: 20000264 Result: Down-regulated in Transcription
  misc_feature: MA Experiment 20000264 PARAMETER Experiment Name: At_Open_Flower_P Parameter: Age (day) Value: 21
  misc_feature: MA Experiment 20000264 PARAMETER Experiment Name: At_Open_Flower_P Parameter: Plant Line Value: WS
  misc_feature: MA Experiment 20000264 PARAMETER Experiment Name: At_Open_Flower_P Parameter: Tissue Value: Open Flower vs. Whole Plant
  misc_feature: MA Experiment ID: 20000265 Result: Down-regulated in Transcription
  misc_feature: MA Experiment 20000265 PARAMETER Experiment Name: At_Open_Flower_P Parameter: Age (day) Value: 21
  misc_feature: MA Experiment 20000265 PARAMETER Experiment Name: At_Open_Flower_P Parameter: Plant Line Value: WS
  misc_feature: MA Experiment 20000265 PARAMETER Experiment Name: At_Open_Flower_P Parameter: Tissue Value: Closed Flower vs. Whole Plant
  misc_feature: MA Experiment ID: 20000267 Result: Up-regulated in Transcription
  misc_feature: MA Experiment 20000267 PARAMETER Experiment Name: At_Drought_P Parameter: Age (day) Value: 7
  misc_feature: MA Experiment 20000267 PARAMETER Experiment Name: At_Drought_P Parameter: Organism Value: A. thaliana
  misc_feature: MA Experiment 20000267 PARAMETER Experiment Name: At_Drought_P Parameter: Plant Line Value: WS
  misc_feature: MA Experiment 20000267 PARAMETER Experiment Name: At_Drought_P Parameter: Timepoint (hr) Value: 6
  misc_feature: MA Experiment 20000267 PARAMETER Experiment Name: At_Drought_P Parameter: Tissue Value: Whole Plant
  misc_feature: MA Experiment 20000267 PARAMETER Experiment Name: At_Drought_P Parameter: Treatment Value: Drought vs. No Drought
  misc_feature: MA Experiment ID: 20000286 Result: Down-regulated in Transcription
  misc_feature: MA Experiment 20000286 PARAMETER Experiment Name: At_Open_Flower_P Parameter: Age (day) Value: 21
  misc_feature: MA Experiment 20000286 PARAMETER Experiment Name: At_Open_Flower_P Parameter: Plant Line Value: WS
  misc_feature: MA Experiment 20000286 PARAMETER Experiment Name: At_Open_Flower_P Parameter: Tissue Value: Half Open vs. Whole Plant
  misc_feature: MA Experiment ID: 20000438 Result: Down-regulated in Transcription
  misc_feature: MA Experiment 20000438 PARAMETER Experiment Name: At_Shoots__P Parameter: Age (day) Value: 14
  misc_feature: MA Experiment 20000438 PARAMETER Experiment Name: At_Shoots__P Parameter: Tissue Value: Shoots vs. Whole Plant
  misc_feature: MA Experiment ID: 20000441 Result: Up-regulated in Transcription
  misc_feature: MA Experiment 20000441 PARAMETER Experiment Name: At_1uM_BR-BRZ__P Parameter: Tissue Value: Shoot Apices
  misc_feature: MA Experiment 20000441 PARAMETER Experiment Name: At_1uM_BR-BRZ__P Parameter: Treatment Value: 1uM BR vs. No Treatment
  misc_feature: MA Experiment ID: 20000460 Result: Up-regulated in Transcription
  misc_feature: MA Experiment 20000460 PARAMETER Experiment Name: At_10percent_PEG_P Parameter: Age (day) Value: 12
  misc_feature: MA Experiment 20000460 PARAMETER Experiment Name: At_10percent_PEG_P Parameter: Organism Value: A. thaliana
  misc_feature: MA Experiment 20000460 PARAMETER Experiment Name: At_10percent_PEG_P Parameter: Plant Line Value: WS
  misc_feature: MA Experiment 20000460 PARAMETER Experiment Name: At_10percent_PEG_P Parameter: Timepoint (day) Value: 12
  misc_feature: MA Experiment 20000460 PARAMETER Experiment Name: At_10percent_PEG_P Parameter: Tissue Value: Whole Plant
  misc_feature: MA Experiment 20000460 PARAMETER Experiment Name: At_10percent_PEG_P Parameter: Treatment Value: 10percent PEG vs. No Treatment
  misc_feature: MA Experiment ID: 20000527 Result: Up-regulated in Transcription
  misc_feature: MA Experiment 20000527 PARAMETER Experiment Name: At_10percent_PEG_P Parameter: Age (day) Value: 20
  misc_feature: MA Experiment 20000527 PARAMETER Experiment Name: At_10percent_PEG_P Parameter: Organism Value: A. thaliana
  misc_feature: MA Experiment 20000527 PARAMETER Experiment Name: At_10percent_PEG_P Parameter: Plant Line Value: WS
  misc_feature: MA Experiment 20000527 PARAMETER Experiment Name: At_10percent_PEG_P Parameter: Timepoint (day) Value: 20
  misc_feature: MA Experiment 20000527 PARAMETER Experiment Name: At_10percent_PEG_P Parameter: Tissue Value: Whole Plant
  misc_feature: MA Experiment 20000527 PARAMETER Experiment Name: At_10percent_PEG_P Parameter: Treatment Value: 10percent PEG vs. No Treatment
  misc_feature: MA Experiment ID: 20000573 Result: Down-regulated in Transcription
  misc_feature: MA Experiment 20000573 PARAMETER Experiment Name: At_100uM_ABA_Mutants__P Parameter: Organism Value: A. thaliana
  misc_feature: MA Experiment 20000573 PARAMETER Experiment Name: At_100uM_ABA_Mutants__P Parameter: Plant Line Value: CS22 vs. Ler wt
  misc_feature: MA Experiment 20000573 PARAMETER Experiment Name: At_100uM_ABA_Mutants__P Parameter: Timepoint (hr) Value: N/A
  misc_feature: MA Experiment 20000573 PARAMETER Experiment Name: At_100uM_ABA_Mutants__P Parameter: Tissue Value: Whole Plant
  misc_feature: MA Experiment 20000573 PARAMETER Experiment Name: At_100uM_ABA_Mutants__P Parameter: Treatment Value: None
  misc_feature: MA Experiment ID: 20000574 Result: Down-regulated in Transcription
  misc_feature: MA Experiment 20000574 PARAMETER Experiment Name: At_100uM_ABA_Mutants__P Parameter: Organism Value: A. thaliana
  misc_feature: MA Experiment 20000574 PARAMETER Experiment Name: At_100uM_ABA_Mutants__P Parameter: Plant Line Value: CS23 vs. Ler wt
  misc_feature: MA Experiment 20000574 PARAMETER Experiment Name: At_100uM_ABA_Mutants__P Parameter: Timepoint (hr) Value: N/A
  misc_feature: MA Experiment 20000574 PARAMETER Experiment Name: At_100uM_ABA_Mutants__P Parameter: Tissue Value: Whole Plant
  misc_feature: MA Experiment 20000574 PARAMETER Experiment Name: At_100uM_ABA_Mutants__P Parameter: Treatment Value: None
  misc_feature: MA Experiment ID: 20001773 Result: Down-regulated in Transcription
  misc_feature: MA Experiment 20001773 PARAMETER Experiment Name: At_Far-red-enriched-adult_P Parameter: Age (day) Value: 30
  misc_feature: MA Experiment 20001773 PARAMETER Experiment Name: At_Far-red-enriched-adult_P Parameter: Light Value: Far-red enriched vs. White
  misc_feature: MA Experiment 20001773 PARAMETER Experiment Name: At_Far-red-enriched-adult_P Parameter: Organism Value: A. thaliana
  misc_feature: MA Experiment 20001773 PARAMETER Experiment Name: At_Far-red-enriched-adult_P Parameter: Plant Line Value: Columbia
  misc_feature: MA Experiment 20001773 PARAMETER Experiment Name: At_Far-red-enriched-adult_P Parameter: Timepoint (hr) Value: 48
  misc_feature: MA Experiment 20001773 PARAMETER Experiment Name: At_Far-red-enriched-adult_P Parameter: Tissue Value: Aerial
acttcattagtctccaagaagaaaacatctctcactctctaaaatacacactctcatcaaaaaccttctcttcggttcagaagcattcaagaatccattatgagctcatctgattccgttaataacggcgttaactcacggatgtacttccgtaacccgagtttcagcaacgttatcttaaacgataactggagcgacttgccgttaagtgtcgacgattctcaagacatggctatttacaacactctccgtgatgccgttagctccggctggacaccctccgttcctcccgttacctctccggcggaggaaaataagcctccggcgacgaaggcgagtggctcacacgcgccgaggcagaaggggatgcagtacagaggagtgaggaggaggccgtgggggaaattcgcggcggagattagggatccgaagaagaacggagctagggtttggctcgggacttacgagacgccggaggacgcggcggtggcgtacgaccgagcggcgtttcagctcagaggatcgaaagctaagctgaattttccgcatttgattggttcttgtaagtatgagccggttaggattaggcctcgccgtcgctcgccggaaccgtcagtctccgatcagttaacgtcggagcagaagagggaaagccacgtggatgacggcgagtctagtttggttgtaccggagttggatttcacggtggatcagttttacttcgatggtagtttattaatggaccaatcagaatgttcttattctgataatcggatataattagttttaagattaagcaaaatttgtccaacgagttttgctgtatgaaatatctatcgatgactcaacaggttttgatcatgatcatatgtaatgtgatggaaattaaatattgacgtttgtttttttcttcc

SEQ ID NO: 27387 - protein, 226 aa, Arabidopsis thaliana
  peptide (1)..(226): Ceres Seq. ID no. 12343472
  misc_feature (89)..(154): Pfam Name: AP2 domain Pfam Description: AP2 domain
  misc_feature (74)..(185): Homolog of NCBI NO: 8980313 NR Description: AP2-domain DNA-binding protein [Catharanthus
  misc_feature (15)..(172): Homolog of NCBI NO: 17385636 NR Description: ethylene-responsive element binding protein1
  misc_feature (29)..(198): Homolog of NCBI NO: 3695034 NR Description: ethylene response element binding protein 1
  misc_feature (15)..(185): Homolog of NCBI NO: 28274828 NR Description: ethylene response factor 1 [Lycopersicon
  misc_feature (21)..(196): Homolog of NCBI NO: 7489113 NR Description: DNA binding protein EREBP-2 - common tobacco
  misc_feature (15)..(174): Homolog of NCBI NO: 8809571 NR Description: ethylene-responsive element binding factor
  misc_feature (8)..(191): Homolog of NCBI NO: 7489077 NR Description: transcription factor Pti4 - tomato (fragment)
  misc_feature (15)..(198): Homolog of NCBI NO: 7489123 NR Description: ethylene-responsive transcription factor ERF1 -
  misc_feature (1)..(226): Homolog of NCBI NO: 21594007 NR Description: putative ethylene response element binding
  misc_feature (1)..(226): Homolog of NCBI NO: 15225361 NR Description: putative ethylene response element binding
MSSSDSVNNGVNSRMYFRNPSFSNVILNDNWSDLPLSVDDSQDMAIYNTLRDAVSSGWTPSVPPVTSPAEENKPPATKASGSHAPRQKGMQYRGVRRRPWGKFAAEIRDPKKNGARVWLGTYETPEDAAVAYDRAAFQLRGSKAKLNFPHLIGSCKYEPVRIRPRRRSPEPSVSDQLTSEQKRESHVDDGESSLVVPELDFTVDQFYFDGSLLMDQSECSYSDNRI

SEQ ID NO: 27388 - protein, 212 aa, Arabidopsis thaliana
  peptide (1)..(212): Ceres Seq. ID no. 12343473
  misc_feature (75)..(140): Pfam Name: AP2 domain Pfam Description: AP2 domain
  misc_feature (60)..(171): Homolog of NCBI NO: 8980313 NR Description: AP2-domain DNA-binding protein [Catharanthus
  misc_feature (1)..(158): Homolog of NCBI NO: 17385636 NR Description: ethylene-responsive element binding protein1
  misc_feature (15)..(184): Homolog of NCBI NO: 3695034 NR Description: ethylene response element binding protein 1
  misc_feature (1)..(171): Homolog of NCBI NO: 28274828 NR Description: ethylene response factor 1 [Lycopersicon
  misc_feature (7)..(182): Homolog of NCBI NO: 7489113 NR Description: DNA binding protein EREBP-2 - common tobacco
  misc_feature (1)..(160): Homolog of NCBI NO: 8809571 NR Description: ethylene-responsive element binding factor
  misc_feature (1)..(177): Homolog of NCBI NO: 7489077 NR Description: transcription factor Pti4 - tomato (fragment)
  misc_feature (1)..(184): Homolog of NCBI NO: 7489123 NR Description: ethylene-responsive transcription factor ERF1 -
  misc_feature (1)..(212): Homolog of NCBI NO: 21594007 NR Description: putative ethylene response element binding
  misc_feature (1)..(212): Homolog of NCBI NO: 15225361 NR Description: putative ethylene response element binding
MYFRNPSFSNVILNDNWSDLPLSVDDSQDMAIYNTLRDAVSSGWTPSVPPVTSPAEENKPPATKASGSHAPRQKGMQYRGVRRRPWGKFAAEIRDPKKNGARVWLGTYETPEDAAVAYDRAAFQLRGSKAKLNFPHLIGSCKYEPVRIRPRRRSPEPSVSDQLTSEQKRESHVDDGESSLVVPELDFTVDQFYFDGSLLMDQSECSYSDNRI

SEQ ID NO: 27389 - protein, 183 aa, Arabidopsis thaliana
  peptide (1)..(183): Ceres Seq. ID no. 12343474
  misc_feature (46)..(111): Pfam Name: AP2 domain Pfam Description: AP2 domain
  misc_feature (31)..(142): Homolog of NCBI NO: 8980313 NR Description: AP2-domain DNA-binding protein [Catharanthus
  misc_feature (1)..(129): Homolog of NCBI NO: 17385636 NR Description: ethylene-responsive element binding protein1
  misc_feature (1)..(155): Homolog of NCBI NO: 3695034 NR Description: ethylene response element binding protein 1
  misc_feature (1)..(142): Homolog of NCBI NO: 28274828 NR Description: ethylene response factor 1 [Lycopersicon
  misc_feature (1)..(153): Homolog of NCBI NO: 7489113 NR Description: DNA binding protein EREBP-2 - common tobacco
  misc_feature (1)..(131): Homolog of NCBI NO: 8809571 NR Description: ethylene-responsive element binding factor
  misc_feature (1)..(148): Homolog of NCBI NO: 7489077 NR Description: transcription factor Pti4 - tomato (fragment)
  misc_feature (1)..(155): Homolog of NCBI NO: 7489123 NR Description: ethylene-responsive transcription factor ERF1 -
  misc_feature (1)..(183): Homolog of NCBI NO: 21594007 NR Description: putative ethylene response element binding
  misc_feature (1)..(183): Homolog of NCBI NO: 15225361 NR Description: putative ethylene response element binding
MAIYNTLRDAVSSGWTPSVPPVTSPAEENKPPATKASGSHAPRQKGMQYRGVRRRPWGKFAAEIRDPKKNGARVWLGTYETPEDAAVAYDRAAFQLRGSKAKLNFPHLIGSCKYEPVRIRPRRRSPEPSVSDQLTSEQKRESHVDDGESSLVVPELDFTVDQFYFDGSLLMDQSECSYSDNRI

SEQ ID NO: 27390 - DNA, 1767 bp, Arabidopsis thaliana
  misc_feature (1)..(1767): Ceres Seq. ID no. 12326034
  misc_feature: MA Experiment ID: 108461 Result: Up-regulated in Transcription
  misc_feature: MA Experiment 108461 PARAMETER Experiment Name: At_Germinating_Seeds_cDNA_P Parameter: Age (day) Value: 1 vs. 0
  misc_feature: MA Experiment 108461 PARAMETER Experiment Name: At_Germinating_Seeds_cDNA_P Parameter: Tissue Value: Germinating Seeds
  misc_feature: MA Experiment ID: 108463 Result: Up-regulated in Transcription
  misc_feature: MA Experiment 108463 PARAMETER Experiment Name: At_Germinating_Seeds_cDNA_P Parameter: Age (day) Value: 3 vs. 0
  misc_feature: MA Experiment 108463 PARAMETER Experiment Name: At_Germinating_Seeds_cDNA_P Parameter: Tissue Value: Germinating Seeds
  misc_feature: MA Experiment ID: 108464 Result: Up-regulated in Transcription
  misc_feature: MA Experiment 108464 PARAMETER Experiment Name: At_Germinating_Seeds_cDNA_P Parameter: Age (day) Value: 4 vs. 0
  misc_feature: MA Experiment 108464 PARAMETER Experiment Name: At_Germinating_Seeds_cDNA_P Parameter: Tissue Value: Germinating Seeds
  misc_feature: MA Experiment ID: 108585 Result: Up-regulated in Transcription
  misc_feature: MA Experiment 108585 PARAMETER Experiment Name: At_5mM_NaNP_cDNA_P Parameter: Timepoint (hr) Value: 6
  misc_feature: MA Experiment 108585 PARAMETER Experiment Name: At_5mM_NaNP_cDNA_P Parameter: Tissue Value: Aerial
  misc_feature: MA Experiment 108585 PARAMETER Experiment Name: At_5mM_NaNP_cDNA_P Parameter: Treatment Value: null
  misc_feature: MA Experiment ID: 20000070 Result: Down-regulated in Transcription
  misc_feature: MA Experiment 20000070 PARAMETER Experiment Name: At_100uM_ABA_Mutants_cDNA_P Parameter: Plant Line Value: CS24
  misc_feature: MA Experiment 20000070 PARAMETER Experiment Name: At_100uM_ABA_Mutants_cDNA_P Parameter: Timepoint (hr) Value: 6
  misc_feature: MA Experiment 20000070 PARAMETER Experiment Name: At_100uM_ABA_Mutants_cDNA_P Parameter: Tissue Value: Aerial
  misc_feature: MA Experiment 20000070 PARAMETER Experiment Name: At_100uM_ABA_Mutants_cDNA_P Parameter: Treatment Value: 100uM ABA vs. No Treatment
  misc_feature: MA Experiment ID: 20000071 Result: Down-regulated in Transcription
  misc_feature: MA Experiment 20000071 PARAMETER Experiment Name: At_100uM_ABA_Mutants_cDNA_P Parameter: Plant Line Value: CS8104
  misc_feature: MA Experiment 20000071 PARAMETER Experiment Name: At_100uM_ABA_Mutants_cDNA_P Parameter: Timepoint (hr) Value: 6
  misc_feature: MA Experiment 20000071 PARAMETER Experiment Name: At_100uM_ABA_Mutants_cDNA_P Parameter: Tissue Value: Aerial
  misc_feature: MA Experiment 20000071 PARAMETER Experiment Name: At_100uM_ABA_Mutants_cDNA_P Parameter: Treatment Value: 100uM ABA vs. No Treatment
  misc_feature: MA Experiment ID: 20000089 Result: Down-regulated in Transcription
  misc_feature: MA Experiment ID: 20000117 Result: Down-regulated in Transcription
  misc_feature: MA Experiment 20000117 PARAMETER Experiment Name: At_100uM_ABA_Mutants_cDNA_P Parameter: Plant Line Value: Columbia
  misc_feature: MA Experiment 20000117 PARAMETER Experiment Name: At_100uM_ABA_Mutants_cDNA_P Parameter: Timepoint (hr) Value: 6
  misc_feature: MA Experiment 20000117 PARAMETER Experiment Name: At_100uM_ABA_Mutants_cDNA_P Parameter: Tissue Value: Aerial
  misc_feature: MA Experiment 20000117 PARAMETER Experiment Name: At_100uM_ABA_Mutants_cDNA_P Parameter: Treatment Value: 100uM ABA vs. No Treatment
  misc_feature: MA Experiment ID: 20000306 Result: Up-regulated in Transcription
  misc_feature: MA Experiment 20000306 PARAMETER Experiment Name: At_Germinating_Seeds_Sub_P Parameter: Age (hr) Value: 6 vs. 0
  misc_feature: MA Experiment 20000306 PARAMETER Experiment Name: At_Germinating_Seeds_Sub_P Parameter: Organism Value: A. thaliana
  misc_feature: MA Experiment 20000306 PARAMETER Experiment Name: At_Germinating_Seeds_Sub_P Parameter: Plant Line Value: WS
  misc_feature: MA Experiment 20000306 PARAMETER Experiment Name: At_Germinating_Seeds_Sub_P Parameter: Tissue Value: Germinating Seeds
  misc_feature: MA Experiment ID: 20000307 Result: Up-regulated in Transcription
  misc_feature: MA Experiment 20000307 PARAMETER Experiment Name: At_Germinating_Seeds_Sub_P Parameter: Age (hr) Value: 24 vs. 0
  misc_feature: MA Experiment 20000307 PARAMETER Experiment Name: At_Germinating_Seeds_Sub_P Parameter: Organism Value: A. thaliana
  misc_feature: MA Experiment 20000307 PARAMETER Experiment Name: At_Germinating_Seeds_Sub_P Parameter: Plant Line Value: WS
  misc_feature: MA Experiment 20000307 PARAMETER Experiment Name: At_Germinating_Seeds_Sub_P Parameter: Tissue Value: Germinating Seeds
  misc_feature: MA Experiment ID: 20000327 Result: Down-regulated in Transcription
  misc_feature: MA Experiment 20000327 PARAMETER Experiment Name: At_42deg_Heat_Sub_P Parameter: Age (day) Value: 14
  misc_feature: MA Experiment 20000327 PARAMETER Experiment Name: At_42deg_Heat_Sub_P Parameter: Organism Value: A. thaliana
  misc_feature: MA Experiment 20000327 PARAMETER Experiment Name: At_42deg_Heat_Sub_P Parameter: Plant Line Value: WS
  misc_feature: MA Experiment 20000327 PARAMETER Experiment Name: At_42deg_Heat_Sub_P Parameter: Temperature (deg C) Value: 42 vs. 22
  misc_feature: MA Experiment 20000327 PARAMETER Experiment Name: At_42deg_Heat_Sub_P Parameter: Timepoint (hr) Value: 1
  misc_feature: MA Experiment 20000327 PARAMETER Experiment Name: At_42deg_Heat_Sub_P Parameter: Tissue Value: Aerial
  misc_feature: MA Experiment ID: 20000328 Result: Down-regulated in Transcription
  misc_feature: MA Experiment 20000328 PARAMETER Experiment Name: At_42deg_Heat_Sub_P Parameter: Age (day) Value: 14
  misc_feature: MA Experiment 20000328 PARAMETER Experiment Name: At_42deg_Heat_Sub_P Parameter: Organism Value: A. thaliana
  misc_feature: MA Experiment 20000328 PARAMETER Experiment Name: At_42deg_Heat_Sub_P Parameter: Plant Line Value: WS
  misc_feature: MA Experiment 20000328 PARAMETER Experiment Name: At_42deg_Heat_Sub_P Parameter: Temperature (deg C) Value: 42 vs. 22
  misc_feature: MA Experiment 20000328 PARAMETER Experiment Name: At_42deg_Heat_Sub_P Parameter: Timepoint (hr) Value: 6
  misc_feature: MA Experiment 20000328 PARAMETER Experiment Name: At_42deg_Heat_Sub_P Parameter: Tissue Value: Aerial
  misc_feature: MA Experiment ID: 20000440 Result: Down-regulated in Transcription
  misc_feature: MA Experiment 20000440 PARAMETER Experiment Name: At_Closed-Flower__Sub_P Parameter: Tissue Value: Closed Flower vs. Whole Plant
atatttatcacatttttcttcaccggctgatttgtttgcccggagattatctctccgtcgtaattaagatctatacacacagaaacacaaagttaaagaatcctcatggaaggagtaaactcttcaagctctatatccgacctagacgaattggctcggttacttgaccggccgagggtaaatattgaacggaaaagatcgtttgacgagaggtccttcagcgaaatgggaatcttcgacaacgttaattctcccggaggatgggaaactccggtgtcttcggctagaaactcgtttgagccacatcctatggttgcagaggcttgggatgctttgagacgatcattggtttactttcgtggccaaccggttggtactatcgctgcttatgaccatgctactgaggaagtcttgaattatgatcaggttttcgtaagagactttgttccaagtgcactagcttttctcatgaacggagaaccagacatagttaaaaactttctcctcaagacaattcaaatccaaggaagggagaaaagaatagaccgattcaagctcggtgaaggcgcaatgccggctagtttcaaggtcattcacgacccgatcaaggaaaccgactctatcaatgctgactttggcgagagcgcgattggaagagtggctccggtggactcaggtttctggtggatcattctccttagagcctacacaaaatccaccggagacacttctctagctgaaacatctgaatgtcaaaagggaatgagactcattctctctctttgtctctccgaaggtttcgatactttccctaccttactttgtgctgatggctgctccatgatcgatcgaagaatgggggtttacgggtatccgatagagatccaagctctcttcttcatggctcttagatcagcaatgtcgatgctaaagcacgacgcggaaggtaaagagttcatggagaggatagtgaagcggctacacgcgcttagcttccacatgagaagttatttctggctcgattttcagcagctcaacgacatttaccgttacaaaacagaagagtactcgcacacagcggttaacaagttcaacgttatccctgactcgatccctgagtgggtcttcgatttcatgcctctacgtggcggttactttataggaaacgttagtccagctcgtatggattttaggtggttcgctctaggcaactgcgtagcgatccttgcttctttagccacgcctgagcagtcggcttcaatcatggacttgatagaggaacggtgggaggagttggtcggagcgatgccggttaaaatttgtcatccggcaatcgagagccatgagtggaggattgttaccggttgcgaccctaagaatactcgttggagttaccataacggtggttcttggccagtattgttgtggctattaacagctgcatgcataaagacgggacggccacaaatagcaagacgggccatagacctggcggaagcacggctgttgaaggatggttggccggagtactacgacgggaaatcaggaaggttcatcggaaaacaggcgaggaagtttcagacatggtctatcgccggttacttggtcgccaagatgttgttggaagatccttctcatcttggaatgatctcattggaagaagacaaacagactaaacctgtcattaagagatcttattcttggacttgataatttgttgtcaattcttttgagaagagcaggctaaaatttgatctaaattttgtt

SEQ ID NO: 27391 - protein, 534 aa, Arabidopsis thaliana
  peptide (1)..(534): Ceres Seq. ID no. 12326035
  misc_feature (61)..(528): Pfam Name: Plant neutral invertase Pfam Description: Plant neutral invertase
  misc_feature (41)..(534): Homolog of NCBI NO: 7487359 NR Description: hypothetical protein T22J18.18 - Arabidopsis
  misc_feature (1)..(534): Homolog of NCBI NO: 18395144 NR Description: putative invertase
  misc_feature (12)..(52): Homolog of NCBI NO: 38344939 NR Description: OSJNBa0084A10.15 [Oryza sativa (japonica
  misc_feature (41)..(534): Homolog of NCBI NO: 15218303 NR Description: neutral invertase, putative; protein id:
  misc_feature (1)..(534): Homolog of NCBI NO: 25354737 NR Description: neutral invertase like protein [imported] -
  misc_feature (1)..(534): Homolog of NCBI NO: 18413234 NR Description: neutral invertase like protein
  misc_feature (1)..(533): Homolog of NCBI NO: 30693221 NR Description: invertase -related [Arabidopsis thaliana]
  misc_feature (41)..(534): Homolog of NCBI NO: 38344939 NR Description: OSJNBa0084A10.15 [Oryza sativa (japonica
  misc_feature (10)..(534): Homolog of NCBI NO: 15236209 NR Description: invertase - like protein
  misc_feature (1)..(534): Homolog of NCBI NO: 21594008 NR Description: putative invertase [Arabidopsis thaliana]
MEGVNSSSSISDLDELARLLDRPRVNIERKRSFDERSFSEMGIFDNVNSPGGWETPVSSARNSFEPHPMVAEAWDALRRSLVYFRGQPVGTIAAYDHATEEVLNYDQVFVRDFVPSALAFLMNGEPDIVKNFLLKTIQIQGREKRIDRFKLGEGAMPASFKVIHDPIKETDSINADFGESAIGRVAPVDSGFWWIILLRAYTKSTGDTSLAETSECQKGMRLILSLCLSEGFDTFPTLLCADGCSMIDRRMGVYGYPIEIQALFFMALRSAMSMLKHDAEGKEFMERIVKRLHALSFHMRSYFWLDFQQLNDIYRYKTEEYSHTAVNKFNVIPDSIPEWVFDFMPLRGGYFIGNVSPARMDFRWFALGNCVAILASLATPEQSASIMDLIEERWEELVGAMPVKICHPAIESHEWRIVTGCDPKNTRWSYHNGGSWPVLLWLLTAACIKTGRPQIARRAIDLAEARLLKDGWPEYYDGKSGRFIGKQARKFQTWSIAGYLVAKMLLEDPSHLGMISLEEDKQTKPVIKRSYSWT

SEQ ID NO: 27392 - protein, 494 aa, Arabidopsis thaliana
  peptide (1)..(494): Ceres Seq. ID no. 12326036
  misc_feature (21)..(488): Pfam Name: Plant neutral invertase Pfam Description: Plant neutral invertase
  misc_feature (1)..(494): Homolog of NCBI NO: 15236209 NR Description: invertase - like protein
  misc_feature (1)..(12): Homolog of NCBI NO: 38344939 NR Description: OSJNBa0084A10.15 [Oryza sativa (japonica
  misc_feature (1)..(494): Homolog of NCBI NO: 38344939 NR Description: OSJNBa0084A10.15 [Oryza sativa (japonica
  misc_feature (1)..(494): Homolog of NCBI NO: 15218303 NR Description: neutral invertase, putative; protein id:
  misc_feature (1)..(493): Homolog of NCBI NO: 30693221 NR Description: invertase -related [Arabidopsis thaliana]
  misc_feature (1)..(494): Homolog of NCBI NO: 25354737 NR Description: neutral invertase like protein [imported] -
  misc_feature (1)..(494): Homolog of NCBI NO: 18413234 NR Description: neutral invertase like protein
  misc_feature (1)..(494): Homolog of NCBI NO: 7487359 NR Description: hypothetical protein T22J18.18 - Arabidopsis
  misc_feature (1)..(494): Homolog of NCBI NO: 18395144 NR Description: putative invertase
  misc_feature (1)..(494): Homolog of NCBI NO: 21594008 NR Description: putative invertase [Arabidopsis thaliana]
MGIFDNVNSPGGWETPVSSARNSFEPHPMVAEAWDALRRSLVYFRGQPVGTIAAYDHATEEVLNYDQVFVRDFVPSALAFLMNGEPDIVKNFLLKTIQIQGREKRIDRFKLGEGAMPASFKVIHDPIKETDSINADFGESAIGRVAPVDSGFWWIILLRAYTKSTGDTSLAETSECQKGMRLILSLCLSEGFDTFPTLLCADGCSMIDRRMGVYGYPIEIQALFFMALRSAMSMLKHDAEGKEFMERIVKRLHALSFHMRSYFWLDFQQLNDIYRYKTEEYSHTAVNKFNVIPDSIPEWVFDFMPLRGGYFIGNVSPARMDFRWFALGNCVAILASLATPEQSASIMDLIEERWEELVGAMPVKICHPAIESHEWRIVTGCDPKNTRWSYHNGGSWPVLLWLLTAACIKTGRPQIARRAIDLAEARLLKDGWPEYYDGKSGRFIGKQARKFQTWSIAGYLVAKMLLEDPSHLGMISLEEDKQTKPVIKRSYSWT

SEQ ID NO: 27393 - protein, 466 aa, Arabidopsis thaliana
  peptide (1)..(466): Ceres Seq. ID no. 12326037
  misc_feature (1)..(460): Pfam Name: Plant neutral invertase Pfam Description: Plant neutral invertase
  misc_feature (1)..(452): Homolog of NCBI NO: 34894878 NR Description: putative neutral invertase
  misc_feature (1)..(466): Homolog of NCBI NO: 15236209 NR Description: invertase - like protein
  misc_feature (1)..(466): Homolog of NCBI NO: 38344939 NR Description: OSJNBa0084A10.15 [Oryza sativa (japonica
  misc_feature (1)..(466): Homolog of NCBI NO: 15218303 NR Description: neutral invertase, putative; protein id:
  misc_feature (1)..(465): Homolog of NCBI NO: 30693221 NR Description: invertase -related [Arabidopsis thaliana]
  misc_feature (1)..(466): Homolog of NCBI NO: 25354737 NR Description: neutral invertase like protein [imported] -
  misc_feature (1)..(466): Homolog of NCBI NO: 18413234 NR Description: neutral invertase like protein
  misc_feature (1)..(466): Homolog of NCBI NO: 7487359 NR Description: hypothetical protein T22J18.18 - Arabidopsis
  misc_feature (1)..(466): Homolog of NCBI NO: 18395144 NR Description: putative invertase
  misc_feature (1)..(466): Homolog of NCBI NO: 21594008 NR Description: putative invertase [Arabidopsis thaliana]
MVAEAWDALRRSLVYFRGQPVGTIAAYDHATEEVLNYDQVFVRDFVPSALAFLMNGEPDIVKNFLLKTIQIQGREKRIDRFKLGEGAMPASFKVIHDPIKETDSINADFGESAIGRVAPVDSGFWWIILLRAYTKSTGDTSLAETSECQKGMRLILSLCLSEGFDTFPTLLCADGCSMIDRRMGVYGYPIEIQALFFMALRSAMSMLKHDAEGKEFMERIVKRLHALSFHMRSYFWLDFQQLNDIYRYKTEEYSHTAVNKFNVIPDSIPEWVFDFMPLRGGYFIGNVSPARMDFRWFALGNCVAILASLATPEQSASIMDLIEERWEELVGAMPVKICHPAIESHEWRIVTGCDPKNTRWSYHNGGSWPVLLWLLTAACIKTGRPQIARRAIDLAEARLLKDGWPEYYDGKSGRFIGKQARKFQTWSIAGYLVAKMLLEDPSHLGMISLEEDKQTKPVIKRSYSWT

SEQ ID NO: 27394 - DNA, 1024 bp, Arabidopsis thaliana
  misc_feature (1)..(1024): Ceres Seq. ID no. 12338773
  misc_feature: MA Experiment ID: 20001911 Result: Down-regulated in Transcription
  misc_feature: MA Experiment 20001911 PARAMETER Experiment Name: At_Drought_Reproduction_P Parameter: Age (day) Value: 40
  misc_feature: MA Experiment 20001911 PARAMETER Experiment Name: At_Drought_Reproduction_P Parameter: Organism Value: A. thaliana
  misc_feature: MA Experiment 20001911 PARAMETER Experiment Name: At_Drought_Reproduction_P Parameter: Plant Line Value: WS
  misc_feature: MA Experiment 20001911 PARAMETER Experiment Name: At_Drought_Reproduction_P Parameter: Timepoint (day) Value: 10
  misc_feature: MA Experiment 20001911 PARAMETER Experiment Name: At_Drought_Reproduction_P Parameter: Tissue Value: Flowers
  misc_feature: MA Experiment 20001911 PARAMETER Experiment Name: At_Drought_Reproduction_P Parameter: Treatment Value: Drought vs. No Drought
accccaccaaactttactttctattcagacaagacatttcgatagcttatttctatggtctgatcacacgatagtgtattctgatatcatcactctaccaaagagataccaaattatggaaggagaatctatcacttccggtgaagataaaccggagatccaatctccaattccaccaaatcagatcttcatactctctggacaaagcaatatggccggacgcggcggcgtcgtcaaagatcaccaccacaatcgctgggtctgggataaaatcctcccaccggaatgcgcaccaaactcatcgatcctccgcctgtccgcagatctccggtgggaagaagcacacgagccactacacgttgacattgacacaggtaaagtgtgtggagtaggtccaggaatggcgttcgctaacgcggtgaagaatcgcgtggaaacagattcggctgtgatcgggttggtgccgtgcgcttccggtggaacggcgataaaagagtgggagcgtggaagccacttgtacgagaggatggtcaagagaacggaggagagtaggaaatgcggcggagagatcaaggcggtgttgtggtatcaaggagagagtgacgtgttggacatccatgacgccgagagctacgggaacaatatggatcgtttgattaagaacctccgtcatgatctcaaccttccttctcttcccattattcaggtggcaatagcatcgggaggaggatacatagataaggtgagagaagcacagttgggactgaaactgtcgaatgtggtctgtgtagatgctaagggattgccgctaaagtccgacaatcttcacttaaccaccgaggctcaagtccagcttggtctctccttagcacaagcttacctttccaacttctgctagacaatcaagtaagttcgtgataaggttcatgaatctttctgaatgtatgtggtggactagttatatggatatcacaaaactttgtaataatggattggtaaaacattgatgttcatagtgaagaac

SEQ ID NO: 27395 - protein, 298 aa, Arabidopsis thaliana
  peptide (1)..(298): Ceres Seq. ID no. 12338774
  misc_feature (47)..(291): Homolog of NCBI NO: 29349588 NR Description: acetyl xylan esterase A [Bacteroides
  misc_feature (71)..(236): Homolog of NCBI NO: 11357879 NR Description: hypothetical protein F8J2.180 - Arabidopsis
  misc_feature (48)..(236): Homolog of NCBI NO: 30693749 NR Description: expressed protein [Arabidopsis thaliana]
  misc_feature (59)..(294): Homolog of NCBI NO: 38345580 NR Description: OSJNBa0027H06.16 [Oryza sativa (japonica
  misc_feature (59)..(295): Homolog of NCBI NO: 30102977 NR Description: hypothetical protein [Oryza sativa (japonica
  misc_feature (57)..(295): Homolog of NCBI NO: 30102980 NR Description: unknown protein [Oryza sativa (japonica
  misc_feature (61)..(297): Homolog of NCBI NO: 38347110 NR Description: OSJNBa0009K15.7 [Oryza sativa (japonica
  misc_feature (10)..(239): Homolog of NCBI NO: 7488258 NR Description: protein kinase homolog F28A23.20 - Arabidopsis
  misc_feature (39)..(298): Homolog of NCBI NO: 18418402 NR Description: Expressed protein
  misc_feature (39)..(298): Homolog of NCBI NO: 21594009 NR Description: unknown [Arabidopsis thaliana]
PHQTLLSIQTRHFDSLFLWSDHTIVYSDIITLPKRYQIMEGESITSGEDKPEIQSPIPPNQIFILSGQSNMAGRGGVVKDHHHNRWVWDKILPPECAPNSSILRLSADLRWEEAHEPLHVDIDTGKVCGVGPGMAFANAVKNRVETDSAVIGLVPCASGGTAIKEWERGSHLYERMVKRTEESRKCGGEIKAVLWYQGESDVLDIHDAESYGNNMDRLIKNLRHDLNLPSLPIIQVAIASGGGYIDKVREAQLGLKLSNVVCVDAKGLPLKSDNLHLTTEAQVQLGLSLAQAYLSNFC

SEQ ID NO: 27396 - protein, 260 aa, Arabidopsis thaliana
  peptide (1)..(260): Ceres Seq. ID no. 12338775
  misc_feature (9)..(253): Homolog of NCBI NO: 29349588 NR Description: acetyl xylan esterase A [Bacteroides
  misc_feature (33)..(198): Homolog of NCBI NO: 11357879 NR Description: hypothetical protein F8J2.180 - Arabidopsis
  misc_feature (10)..(198): Homolog of NCBI NO: 30693749 NR Description: expressed protein [Arabidopsis thaliana]
  misc_feature (21)..(256): Homolog of NCBI NO: 38345580 NR Description: OSJNBa0027H06.16 [Oryza sativa (japonica
  misc_feature (21)..(257): Homolog of NCBI NO: 30102977 NR Description: hypothetical protein [Oryza sativa (japonica
  misc_feature (19)..(257): Homolog of NCBI NO: 30102980 NR Description: unknown protein [Oryza sativa (japonica
  misc_feature (23)..(259): Homolog of NCBI NO: 38347110 NR Description: OSJNBa0009K15.7 [Oryza sativa (japonica
  misc_feature (1)..(201): Homolog of NCBI NO: 7488258 NR Description: protein kinase homolog F28A23.20 - Arabidopsis
  misc_feature (1)..(260): Homolog of NCBI NO: 18418402 NR Description: Expressed protein
  misc_feature (1)..(260): Homolog of NCBI NO: 21594009 NR Description: unknown [Arabidopsis thaliana]
MEGESITSGEDKPEIQSPIPPNQIFILSGQSNMAGRGGVVKDHHHNRWVWDKILPPECAPNSSILRLSADLRWEEAHEPLHVDIDTGKVCGVGPGMAFANAVKNRVETDSAVIGLVPCASGGTAIKEWERGSHLYERMVKRTEESRKCGGEIKAVLWYQGESDVLDIHDAESYGNNMDRLIKNLRHDLNLPSLPIIQVAIASGGGYIDKVREAQLGLKLSNVVCVDAKGLPLKSDNLHLTTEAQVQLGLSLAQAYLSNFC

SEQ ID NO: 27397 - protein, 228 aa, Arabidopsis thaliana
  peptide (1)..(228): Ceres Seq. ID no. 12338777
  misc_feature (1)..(221): Homolog of NCBI NO: 29349588 NR Description: acetyl xylan esterase A [Bacteroides
  misc_feature (1)..(166): Homolog of NCBI NO: 11357879 NR Description: hypothetical protein F8J2.180 - Arabidopsis
  misc_feature (1)..(166): Homolog of NCBI NO: 30693749 NR Description: expressed protein [Arabidopsis thaliana]
  misc_feature (1)..(224): Homolog of NCBI NO: 38345580 NR Description: OSJNBa0027H06.16 [Oryza sativa (japonica
  misc_feature (1)..(225): Homolog of NCBI NO: 30102977 NR Description: hypothetical protein [Oryza sativa (japonica
  misc_feature (1)..(225): Homolog of NCBI NO: 30102980 NR Description: unknown protein [Oryza sativa (japonica
  misc_feature (1)..(227): Homolog of NCBI NO: 38347110 NR Description: OSJNBa0009K15.7 [Oryza sativa (japonica
  misc_feature (1)..(169): Homolog of NCBI NO: 7488258 NR Description: protein kinase homolog F28A23.20 - Arabidopsis
  misc_feature (1)..(228): Homolog of NCBI NO: 18418402 NR Description: Expressed protein
  misc_feature (1)..(228): Homolog of NCBI NO: 21594009 NR Description: unknown [Arabidopsis thaliana]
MAGRGGVVKDHHHNRWVWDKILPPECAPNSSILRLSADLRWEEAHEPLHVDIDTGKVCGVGPGMAFANAVKNRVETDSAVIGLVPCASGGTAIKEWERGSHLYERMVKRTEESRKCGGEIKAVLWYQGESDVLDIHDAESYGNNMDRLIKNLRHDLNLPSLPIIQVAIASGGGYIDKVREAQLGLKLSNVVCVDAKGLPLKSDNLHLTTEAQVQLGLSLAQAYLSNFC

SEQ ID NO: 27398 - DNA, 2256 bp, Arabidopsis thaliana; identical to SEQ ID NO: 22038
  misc_feature (1)..(2256): Ceres Seq. ID no. 13646318
  misc_feature: MA Experiment ID: 108434 Result: Up-regulated in Transcription
  misc_feature: MA Experiment 108434 PARAMETER Experiment Name: At_Root_Tips_cDNA_P Parameter: Tissue Value: Root Tips
  misc_feature: MA Experiment ID: 108462 Result: Down-regulated in Transcription
  misc_feature: MA Experiment 108462 PARAMETER Experiment Name: At_Germinating_Seeds_cDNA_P Parameter: Age (day) Value: 2 vs. 0
  misc_feature: MA Experiment 108462 PARAMETER Experiment Name: At_Germinating_Seeds_cDNA_P Parameter: Tissue Value: Germinating Seeds
  misc_feature: MA Experiment ID: 108463 Result: Down-regulated in Transcription
  misc_feature: MA Experiment 108463 PARAMETER Experiment Name: At_Germinating_Seeds_cDNA_P Parameter: Age (day) Value: 3 vs. 0
  misc_feature: MA Experiment 108463 PARAMETER Experiment Name: At_Germinating_Seeds_cDNA_P Parameter: Tissue Value: Germinating Seeds
  misc_feature: MA Experiment ID: 108464 Result: Down-regulated in Transcription
  misc_feature: MA Experiment 108464 PARAMETER Experiment Name: At_Germinating_Seeds_cDNA_P Parameter: Age (day) Value: 4 vs. 0
  misc_feature: MA Experiment 108464 PARAMETER Experiment Name: At_Germinating_Seeds_cDNA_P Parameter: Tissue Value: Germinating Seeds
  misc_feature: MA Experiment ID: 108501 Result: Up-regulated in Transcription
  misc_feature: MA Experiment 108501 PARAMETER Experiment Name: At_ap2_floral_buds_cDNA_P Parameter: Plant Line Value: ap2 (Ler.)
  misc_feature: MA Experiment 108501 PARAMETER Experiment Name: At_ap2_floral_buds_cDNA_P Parameter: Tissue Value: Closed Flower
  misc_feature: MA Experiment ID: 108573 Result: Up-regulated in Transcription
  misc_feature: MA Experiment 108573 PARAMETER Experiment Name: At_Drought_cDNA_P Parameter: Timepoint (hr) Value: 6
  misc_feature: MA Experiment 108573 PARAMETER Experiment Name: At_Drought_cDNA_P Parameter: Tissue Value: Aerial
  misc_feature: MA Experiment 108573 PARAMETER Experiment Name: At_Drought_cDNA_P Parameter: Treatment Value: Drought vs. No Drought
  misc_feature: MA Experiment ID: 108576 Result: Up-regulated in Transcription
  misc_feature: MA Experiment 108576 PARAMETER Experiment Name: At_42deg_Heat_cDNA_P Parameter: Temperature (deg C) Value: 42 vs. 22
  misc_feature: MA Experiment 108576 PARAMETER Experiment Name: At_42deg_Heat_cDNA_P Parameter: Timepoint (hr) Value: 1
  misc_feature: MA Experiment 108576 PARAMETER Experiment Name: At_42deg_Heat_cDNA_P Parameter: Tissue Value: Aerial
  misc_feature: MA Experiment ID: 108577 Result: Up-regulated in Transcription
  misc_feature: MA Experiment 108577 PARAMETER Experiment Name: At_42deg_Heat_cDNA_P Parameter: Temperature (deg C) Value: 42 vs. 22
  misc_feature: MA Experiment 108577 PARAMETER Experiment Name: At_42deg_Heat_cDNA_P Parameter: Timepoint (hr) Value: 6
  misc_feature: MA Experiment 108577 PARAMETER Experiment Name: At_42deg_Heat_cDNA_P Parameter: Tissue Value: Aerial
  misc_feature: MA Experiment ID: 108585 Result: Up-regulated in Transcription
  misc_feature: MA Experiment 108585 PARAMETER Experiment Name: At_5mM_NaNP_cDNA_P Parameter: Timepoint (hr) Value: 6
  misc_feature: MA Experiment 108585 PARAMETER Experiment Name: At_5mM_NaNP_cDNA_P Parameter: Tissue Value: Aerial
  misc_feature: MA Experiment 108585 PARAMETER Experiment Name: At_5mM_NaNP_cDNA_P Parameter: Treatment Value: null
  misc_feature: MA Experiment ID: 108595 Result: Down-regulated in Transcription
  misc_feature: MA Experiment 108595 PARAMETER Experiment Name: At_Ler-pi_Ovule_cDNA_P Parameter: Plant Line Value: null
  misc_feature: MA Experiment ID: 20000069 Result: Down-regulated in Transcription
  misc_feature: MA Experiment 20000069 PARAMETER Experiment Name: At_100uM_ABA_Mutants_cDNA_P Parameter: Plant Line Value: CS23
  misc_feature: MA Experiment 20000069 PARAMETER Experiment Name: At_100uM_ABA_Mutants_cDNA_P Parameter: Timepoint (hr) Value: 6
  misc_feature: MA Experiment 20000069 PARAMETER Experiment Name: At_100uM_ABA_Mutants_cDNA_P Parameter: Tissue Value: Aerial
  misc_feature: MA Experiment 20000069 PARAMETER Experiment Name: At_100uM_ABA_Mutants_cDNA_P Parameter: Treatment Value: 100uM ABA vs. No Treatment
  misc_feature: MA Experiment ID: 20000087 Result: Down-regulated in Transcription
  misc_feature: MA Experiment 20000087 PARAMETER Experiment Name: At_100uM_ABA_Mutants_cDNA_P Parameter: Plant Line Value: WS
  misc_feature: MA Experiment 20000087 PARAMETER Experiment Name: At_100uM_ABA_Mutants_cDNA_P Parameter: Timepoint (hr) Value: 6
  misc_feature: MA Experiment 20000087 PARAMETER Experiment Name: At_100uM_ABA_Mutants_cDNA_P Parameter: Tissue Value: Aerial
  misc_feature: MA Experiment 20000087 PARAMETER Experiment Name: At_100uM_ABA_Mutants_cDNA_P Parameter: Treatment Value: 100uM ABA vs. No Treatment
  misc_feature: MA Experiment ID: 20000111 Result: Up-regulated in Transcription
  misc_feature: MA Experiment 20000111 PARAMETER Experiment Name: At_42deg_Heat_cDNA_P Parameter: Temperature (deg C) Value: 42 vs. 22
  misc_feature: MA Experiment 20000111 PARAMETER Experiment Name: At_42deg_Heat_cDNA_P Parameter: Timepoint (hr) Value: 6
  misc_feature: MA Experiment 20000111 PARAMETER Experiment Name: At_42deg_Heat_cDNA_P Parameter: Tissue Value: Aerial
  misc_feature: MA Experiment ID: 20000112 Result: Up-regulated in Transcription
  misc_feature: MA Experiment 20000112 PARAMETER Experiment Name: At_42deg_Heat_cDNA_P Parameter: Temperature (deg C) Value: 42 vs. 22
  misc_feature: MA Experiment 20000112 PARAMETER Experiment Name: At_42deg_Heat_cDNA_P Parameter: Timepoint (hr) Value: 2
  misc_feature: MA Experiment 20000112 PARAMETER Experiment Name: At_42deg_Heat_cDNA_P Parameter: Tissue Value: Aerial
  misc_feature: MA Experiment ID: 20000113 Result: Up-regulated in Transcription
  misc_feature: MA Experiment 20000113 PARAMETER Experiment Name: At_42deg_Heat_cDNA_P Parameter: Temperature (deg C) Value: 42 vs. 22
  misc_feature: MA Experiment 20000113 PARAMETER Experiment Name: At_42deg_Heat_cDNA_P Parameter: Timepoint (hr) Value: 8
  misc_feature: MA Experiment 20000113 PARAMETER Experiment Name: At_42deg_Heat_cDNA_P Parameter: Tissue Value: Aerial
  misc_feature: MA Experiment ID: 20000144 Result: Up-regulated in Transcription
  misc_feature: MA Experiment 20000144 PARAMETER Experiment Name: At_42deg_Heat_cDNA_P Parameter: Temperature (deg C) Value: 42 vs. 22
  misc_feature: MA Experiment 20000144 PARAMETER Experiment Name: At_42deg_Heat_cDNA_P Parameter: Timepoint (hr) Value: 1
  misc_feature: MA Experiment 20000144 PARAMETER Experiment Name: At_42deg_Heat_cDNA_P Parameter: Tissue Value: Aerial
  misc_feature: MA Experiment ID: 20000314 Result: Down-regulated in Transcription
  misc_feature: MA Experiment 20000314 PARAMETER Experiment Name: At_14day_Shoots-Roots_Sub_P Parameter: Age (day) Value: 14
  misc_feature: MA Experiment 20000314 PARAMETER Experiment Name: At_14day_Shoots-Roots_Sub_P Parameter: Organism Value: A. thaliana
  misc_feature: MA Experiment 20000314 PARAMETER Experiment Name: At_14day_Shoots-Roots_Sub_P Parameter: Plant Line Value: WS
  misc_feature: MA Experiment 20000314 PARAMETER Experiment Name: At_14day_Shoots-Roots_Sub_P Parameter: Tissue Value: Roots vs. Whole Plant
  misc_feature: MA Experiment ID: 20000327 Result: Up-regulated in Transcription
  misc_feature: MA Experiment 20000327 PARAMETER Experiment Name: At_42deg_Heat_Sub_P Parameter: Age (day) Value: 14
  misc_feature: MA Experiment 20000327 PARAMETER Experiment Name: At_42deg_Heat_Sub_P Parameter: Organism Value: A. thaliana
  misc_feature: MA Experiment 20000327 PARAMETER Experiment Name: At_42deg_Heat_Sub_P Parameter: Plant Line Value: WS
  misc_feature: MA Experiment 20000327 PARAMETER Experiment Name: At_42deg_Heat_Sub_P Parameter: Temperature (deg C) Value: 42 vs. 22
  misc_feature: MA Experiment 20000327 PARAMETER Experiment Name: At_42deg_Heat_Sub_P Parameter: Timepoint (hr) Value: 1
  misc_feature: MA Experiment 20000327 PARAMETER Experiment Name: At_42deg_Heat_Sub_P Parameter: Tissue Value: Aerial
  misc_feature: MA Experiment ID: 20000328 Result: Up-regulated in Transcription
  misc_feature: MA Experiment 20000328 PARAMETER Experiment Name: At_42deg_Heat_Sub_P Parameter: Age (day) Value: 14
  misc_feature: MA Experiment 20000328 PARAMETER Experiment Name: At_42deg_Heat_Sub_P Parameter: Organism Value: A. thaliana
  misc_feature: MA Experiment 20000328 PARAMETER Experiment Name: At_42deg_Heat_Sub_P Parameter: Plant Line Value: WS
  misc_feature: MA Experiment 20000328 PARAMETER Experiment Name: At_42deg_Heat_Sub_P Parameter: Temperature (deg C) Value: 42 vs. 22
  misc_feature: MA Experiment 20000328 PARAMETER Experiment Name: At_42deg_Heat_Sub_P Parameter: Timepoint (hr) Value: 6
  misc_feature: MA Experiment 20000328 PARAMETER Experiment Name: At_42deg_Heat_Sub_P Parameter: Tissue Value: Aerial
  misc_feature: MA Experiment ID: 20000355 Result: Down-regulated in Transcription
  misc_feature: MA Experiment 20000355 PARAMETER Experiment Name: At_Siliques_Sub_P Parameter: Age (day) Value: 21
  misc_feature: MA Experiment 20000355 PARAMETER Experiment Name: At_Siliques_Sub_P Parameter: Organism Value: A. thaliana
  misc_feature: MA Experiment 20000355 PARAMETER Experiment Name: At_Siliques_Sub_P Parameter: Plant Line Value: WS
  misc_feature: MA Experiment 20000355 PARAMETER Experiment Name: At_Siliques_Sub_P Parameter: Tissue Value: Less Than 5mm Siliques vs. Whole Plant
  misc_feature: MA Experiment ID: 20001807 Result: Up-regulated in Transcription
  misc_feature: MA Experiment 20001807 PARAMETER Experiment Name: At_50mM_NH4NO3_L-to-H_Sub_P Parameter: Timepoint (hr) Value: 6
  misc_feature: MA Experiment 20001807 PARAMETER Experiment Name: At_50mM_NH4NO3_L-to-H_Sub_P Parameter: Tissue Value: Leaf
  misc_feature: MA Experiment 20001807 PARAMETER Experiment Name: At_50mM_NH4NO3_L-to-H_Sub_P Parameter: Treatment Value: 50mM NH4NO3 vs 100mM Mannitol

SEQ ID NO: 27399 - protein, 651 aa, Arabidopsis thaliana; identical to SEQ ID NO: 22039
  peptide (1)..(651): Ceres Seq. ID no. 13646319
  misc_feature (124)..(646): Homolog of NCBI NO: 4164594 NR Description: heat shock protein 70 [Paracoccidioides
  misc_feature (1)..(635): Homolog of NCBI NO: 23480384 NR Description: heat shock protein [Plasmodium yoelii yoelii]
  misc_feature (3)..(635): Homolog of NCBI NO: 29539338 NR Description: Heat shock 70 kDa protein [Cyanidioschyzon
  misc_feature (1)..(626): Homolog of NCBI NO: 481576 NR Description: dnaK-type molecular chaperone GRP78/BiP -
  misc_feature (3)..(635): Homolog of NCBI NO: 1037176 NR Description: immunoglobulin heavy chain binding protein
  misc_feature (1)..(635): Homolog of NCBI NO: 6016151 NR Description: Luminal binding protein 3 precursor (BiP3)
  misc_feature (8)..(651): Homolog of NCBI NO: 14423732 NR Description: Heat shock 70 kDa protein
  misc_feature (6)..(626): Homolog of NCBI NO: 21263753 NR Description: Heat shock cognate 71 kDa protein (Hsc70.1)
  misc_feature (124)..(646): Homolog of NCBI NO: 4164594 NR Description: heat shock protein 70 [Paracoccidioides
  misc_feature (1)..(635): Homolog of NCBI NO: 23480384 NR Description: heat shock protein [Plasmodium yoelii yoelii]
  misc_feature (3)..(635): Homolog of NCBI NO: 29539338 NR Description: Heat shock 70 kDa protein [Cyanidioschyzon
  misc_feature (1)..(626): Homolog of NCBI NO: 481576 NR Description: dnaK-type molecular chaperone GRP78/BiP -
  misc_feature (3)..(635): Homolog of NCBI NO: 1037176 NR Description: immunoglobulin heavy chain binding protein
  misc_feature (1)..(635): Homolog of NCBI NO: 6016151 NR Description: Luminal binding protein 3 precursor (BiP3)
  misc_feature (8)..(651): Homolog of NCBI NO: 14423732 NR Description: Heat shock 70 kDa protein
  misc_feature (6)..(626): Homolog of NCBI NO: 21263753 NR Description: Heat shock cognate 71 kDa protein (Hsc70.1)
  misc_feature (124)..(646): Homolog of NCBI NO: 4164594 NR Description: heat shock protein 70 [Paracoccidioides
  misc_feature (1)..(635): Homolog of NCBI NO: 23480384 NR Description: heat shock protein [Plasmodium yoelii yoelii]
  misc_feature (3)..(635): Homolog of NCBI NO: 29539338 NR Description: Heat shock 70 kDa protein [Cyanidioschyzon
  misc_feature (1)..(626): Homolog of NCBI NO: 481576 NR Description: dnaK-type molecular chaperone GRP78/BiP -
  misc_feature (3)..(635): Homolog of NCBI NO: 1037176 NR Description: immunoglobulin heavy chain binding protein
  misc_feature (1)..(635): Homolog of NCBI NO: 6016151 NR Description: Luminal binding protein 3 precursor (BiP3)
  misc_feature (8)..(651): Homolog of NCBI NO: 14423732 NR Description: Heat shock 70 kDa protein
  misc_feature (6)..(626): Homolog of NCBI NO: 21263753 NR Description: Heat shock cognate 71 kDa protein (Hsc70.1)
  misc_feature (124)..(646): Homolog of NCBI NO: 4164594 NR Description: heat shock protein 70 [Paracoccidioides
  misc_feature (1)..(635): Homolog of NCBI NO: 23480384 NR Description: heat shock protein [Plasmodium yoelii yoelii]
  misc_feature (3)..(635): Homolog of NCBI NO: 29539338 NR Description: Heat shock 70 kDa protein [Cyanidioschyzon
  misc_feature (1)..(626): Homolog of NCBI NO: 481576 NR Description: dnaK-type molecular chaperone GRP78/BiP -
  misc_feature (3)..(635): Homolog of NCBI NO: 1037176 NR Description: immunoglobulin heavy chain binding protein
  misc_feature (1)..(635): Homolog of NCBI NO: 6016151 NR Description: Luminal binding protein 3 precursor (BiP3)
  misc_feature (8)..(651): Homolog of NCBI NO: 14423732 NR Description: Heat shock 70 kDa protein
  misc_feature (6)..(626): Homolog of NCBI NO: 21263753 NR Description: Heat shock cognate 71 kDa protein (Hsc70.1)
  misc_feature (124)..(646): Homolog of NCBI NO: 4164594 NR Description: heat shock protein 70 [Paracoccidioides
  misc_feature (1)..(635): Homolog of NCBI NO: 23480384 NR Description: heat shock protein [Plasmodium yoelii yoelii]
  misc_feature (3)..(635): Homolog of NCBI NO: 29539338 NR Description: Heat shock 70 kDa protein [Cyanidioschyzon
  misc_feature (1)..(626): Homolog of NCBI NO: 481576 NR Description: dnaK-type molecular chaperone GRP78/BiP -
  misc_feature (3)..(635): Homolog of NCBI NO: 1037176 NR Description: immunoglobulin heavy chain binding protein
  misc_feature (1)..(635): Homolog of NCBI NO: 6016151 NR Description: Luminal binding protein 3 precursor (BiP3)
  misc_feature (8)..(651): Homolog of NCBI NO: 14423732 NR Description: Heat shock 70 kDa protein
  misc_feature (6)..(626): Homolog of NCBI NO: 21263753 NR Description: Heat shock cognate 71 kDa protein (Hsc70.1)
  misc_feature (124)..(646): Homolog of NCBI NO: 4164594 NR Description: heat shock protein 70 [Paracoccidioides
  misc_feature (1)..(635): Homolog of NCBI NO: 23480384 NR Description: heat shock protein [Plasmodium yoelii yoelii]
  misc_feature (3)..(635): Homolog of NCBI NO: 29539338 NR Description: Heat shock 70 kDa protein [Cyanidioschyzon
  misc_feature (1)..(626): Homolog of NCBI NO: 481576 NR Description: dnaK-type molecular chaperone GRP78/BiP -
  misc_feature (3)..(635): Homolog of NCBI NO: 1037176 NR Description: immunoglobulin heavy chain binding protein
  misc_feature (1)..(635): Homolog of NCBI NO: 6016151 NR Description: Luminal binding protein 3 precursor (BiP3)
  misc_feature (8)..(651): Homolog of NCBI NO: 14423732 NR Description: Heat shock 70 kDa protein
  misc_feature (6)..(626): Homolog of NCBI NO: 21263753 NR Description: Heat shock cognate 71 kDa protein (Hsc70.1)
  misc_feature (124)..(646): Homolog of NCBI NO: 4164594 NR Description: heat shock protein 70 [Paracoccidioides
  misc_feature (1)..(635): Homolog of NCBI NO: 23480384 NR Description: heat shock protein [Plasmodium yoelii yoelii]
  misc_feature (3)..(635): Homolog of NCBI NO: 29539338 NR Description: Heat shock 70 kDa protein [Cyanidioschyzon
  misc_feature (1)..(626): Homolog of NCBI NO: 481576 NR Description: dnaK-type molecular chaperone GRP78/BiP -
  misc_feature (3)..(635): Homolog of NCBI NO: 1037176 NR Description: immunoglobulin heavy chain binding protein
  misc_feature (1)..(635): Homolog of NCBI NO: 6016151 NR Description: Luminal binding protein 3 precursor (BiP3)
  misc_feature (8)..(651): Homolog of NCBI NO: 14423732 NR Description: Heat shock 70 kDa protein
  misc_feature (6)..(626): Homolog of NCBI NO: 21263753 NR Description: Heat shock cognate 71 kDa protein (Hsc70.1)

SEQ ID NO: 27400 - protein, 588 aa, Arabidopsis thaliana; identical to SEQ ID NO: 22040
  peptide (1)..(588): Ceres Seq. ID no. 13646320
  misc_feature (61)..(583): Homolog of NCBI NO: 4164594 NR Description: heat shock protein 70 [Paracoccidioides
  misc_feature (1)..(572): Homolog of NCBI NO: 23480384 NR Description: heat shock protein [Plasmodium yoelii yoelii]
  misc_feature (1)..(572): Homolog of NCBI NO: 29539338 NR Description: Heat shock 70 kDa protein [Cyanidioschyzon
  misc_feature (1)..(563): Homolog of NCBI NO: 481576 NR Description: dnaK-type molecular chaperone GRP78/BiP -
  misc_feature (1)..(572): Homolog of NCBI NO: 1037176 NR Description: immunoglobulin heavy chain binding protein
  misc_feature (1)..(572): Homolog of NCBI NO: 6016151 NR Description: Luminal binding protein 3 precursor (BiP3)
  misc_feature (1)..(588): Homolog of NCBI NO: 14423732 NR Description: Heat shock 70 kDa protein
  misc_feature (1)..(563): Homolog of NCBI NO: 21263753 NR Description: Heat shock cognate 71 kDa protein (Hsc70.1)
  misc_feature (61)..(583): Homolog of NCBI NO: 4164594 NR Description: heat shock protein 70 [Paracoccidioides
  misc_feature (1)..(572): Homolog of NCBI NO: 23480384 NR Description: heat shock protein [Plasmodium yoelii yoelii]
  misc_feature (1)..(572): Homolog of NCBI NO: 29539338 NR Description: Heat shock 70 kDa protein [Cyanidioschyzon
  misc_feature (1)..(563): Homolog of NCBI NO: 481576 NR Description: dnaK-type molecular chaperone GRP78/BiP -
  misc_feature (1)..(572): Homolog of NCBI NO: 1037176 NR Description: immunoglobulin heavy chain binding protein
  misc_feature (1)..(572): Homolog of NCBI NO: 6016151 NR Description: Luminal binding protein 3 precursor (BiP3)
  misc_feature (1)..(588): Homolog of NCBI NO: 14423732 NR Description: Heat shock 70 kDa protein
  misc_feature (1)..(563): Homolog of NCBI NO: 21263753 NR Description: Heat shock cognate 71 kDa protein (Hsc70.1)
  misc_feature (61)..(583): Homolog of NCBI NO: 4164594 NR Description: heat shock protein 70 [Paracoccidioides
  misc_feature (1)..(572): Homolog of NCBI NO: 23480384 NR Description: heat shock protein [Plasmodium yoelii yoelii]
  misc_feature (1)..(572): Homolog of NCBI NO: 29539338 NR Description: Heat shock 70 kDa protein [Cyanidioschyzon
  misc_feature (1)..(563): Homolog of NCBI NO: 481576 NR Description: dnaK-type molecular chaperone GRP78/BiP -
  misc_feature (1)..(572): Homolog of NCBI NO: 1037176 NR Description: immunoglobulin heavy chain binding protein
  misc_feature (1)..(572): Homolog of NCBI NO: 6016151 NR Description: Luminal binding protein 3 precursor (BiP3)
  misc_feature (1)..(588): Homolog of NCBI NO: 14423732 NR Description: Heat shock 70 kDa protein
  misc_feature (1)..(563): Homolog of NCBI NO: 21263753 NR Description: Heat shock cognate 71 kDa protein (Hsc70.1)
  misc_feature (61)..(583): Homolog of NCBI NO: 4164594 NR Description: heat shock protein 70 [Paracoccidioides
  misc_feature (1)..(572): Homolog of NCBI NO: 23480384 NR Description: heat shock protein [Plasmodium yoelii yoelii]
  misc_feature (1)..(572): Homolog of NCBI NO: 29539338 NR Description: Heat shock 70 kDa protein [Cyanidioschyzon
  misc_feature (1)..(563): Homolog of NCBI NO: 481576 NR Description: dnaK-type molecular chaperone GRP78/BiP -
  misc_feature (1)..(572): Homolog of NCBI NO: 1037176 NR Description: immunoglobulin heavy chain binding protein
  misc_feature (1)..(572): Homolog of NCBI NO: 6016151 NR Description: Luminal binding protein 3 precursor (BiP3)
  misc_feature (1)..(588): Homolog of NCBI NO: 14423732 NR Description: Heat shock 70 kDa protein
  misc_feature (1)..(563): Homolog of NCBI NO: 21263753 NR Description: Heat shock cognate 71 kDa protein (Hsc70.1)
  misc_feature (61)..(583): Homolog of NCBI NO: 4164594 NR Description: heat shock protein 70 [Paracoccidioides
  misc_feature (1)..(572): Homolog of NCBI NO: 23480384 NR Description: heat shock protein [Plasmodium yoelii yoelii]
  misc_feature (1)..(572): Homolog of NCBI NO: 29539338 NR Description: Heat shock 70 kDa protein [Cyanidioschyzon
  misc_feature (1)..(563): Homolog of NCBI NO: 481576 NR Description: dnaK-type molecular chaperone GRP78/BiP -
  misc_feature (1)..(572): Homolog of NCBI NO: 1037176 NR Description: immunoglobulin heavy chain binding protein
  misc_feature (1)..(572): Homolog of NCBI NO: 6016151 NR Description: Luminal binding protein 3 precursor (BiP3)
  misc_feature (1)..(588): Homolog of NCBI NO: 14423732 NR Description: Heat shock 70 kDa protein
  misc_feature (1)..(563): Homolog of NCBI NO: 21263753 NR Description: Heat shock cognate 71 kDa protein (Hsc70.1)
  misc_feature (61)..(583): Homolog of NCBI NO: 4164594 NR Description: heat shock protein 70 [Paracoccidioides
  misc_feature (1)..(572): Homolog of NCBI NO: 23480384 NR Description: heat shock protein [Plasmodium yoelii yoelii]
  misc_feature (1)..(572): Homolog of NCBI NO: 29539338 NR Description: Heat shock 70 kDa protein [Cyanidioschyzon
  misc_feature (1)..(563): Homolog of NCBI NO: 481576 NR Description: dnaK-type molecular chaperone GRP78/BiP -
  misc_feature (1)..(572): Homolog of NCBI NO: 1037176 NR Description: immunoglobulin heavy chain binding protein
  misc_feature (1)..(572): Homolog of NCBI NO: 6016151 NR Description: Luminal binding protein 3 precursor (BiP3)
  misc_feature (1)..(588): Homolog of NCBI NO: 14423732 NR Description: Heat shock 70 kDa protein
  misc_feature (1)..(563): Homolog of NCBI NO: 21263753 NR Description: Heat shock cognate 71 kDa protein (Hsc70.1)
  misc_feature (61)..(583): Homolog of NCBI NO: 4164594 NR Description: heat shock protein 70 [Paracoccidioides
  misc_feature (1)..(572): Homolog of NCBI NO: 23480384 NR Description: heat shock protein [Plasmodium yoelii yoelii]
  misc_feature (1)..(572): Homolog of NCBI NO: 29539338 NR Description: Heat shock 70 kDa protein [Cyanidioschyzon
  misc_feature (1)..(563): Homolog of NCBI NO: 481576 NR Description: dnaK-type molecular chaperone GRP78/BiP -
  misc_feature (1)..(572): Homolog of NCBI NO: 1037176 NR Description: immunoglobulin heavy chain binding protein
  misc_feature (1)..(572): Homolog of NCBI NO: 6016151 NR Description: Luminal binding protein 3 precursor (BiP3)
  misc_feature (1)..(588): Homolog of NCBI NO: 14423732 NR Description: Heat shock 70 kDa protein
  misc_feature (1)..(563): Homolog of NCBI NO: 21263753 NR Description: Heat shock cognate 71 kDa protein (Hsc70.1)

SEQ ID NO: 27401 - protein, 562 aa, Arabidopsis thaliana; identical to SEQ ID NO: 22041
  peptide (1)..(562): Ceres Seq. ID no. 13646321
  misc_feature (35)..(557): Homolog of NCBI NO: 4164594 NR Description: heat shock protein 70 [Paracoccidioides
  misc_feature (1)..(546): Homolog of NCBI NO: 23480384 NR Description: heat shock protein [Plasmodium yoelii yoelii]
  misc_feature (1)..(546): Homolog of NCBI NO: 29539338 NR Description: Heat shock 70 kDa protein [Cyanidioschyzon
  misc_feature (1)..(537): Homolog of NCBI NO: 481576 NR Description: dnaK-type molecular chaperone GRP78/BiP -
  misc_feature (1)..(546): Homolog of NCBI NO: 1037176 NR Description: immunoglobulin heavy chain binding protein
  misc_feature (1)..(546): Homolog of NCBI NO: 6016151 NR Description: Luminal binding protein 3 precursor (BiP3)
  misc_feature (1)..(562): Homolog of NCBI NO: 14423732 NR Description: Heat shock 70 kDa protein
  misc_feature (1)..(537): Homolog of NCBI NO: 21263753 NR Description: Heat shock cognate 71 kDa protein (Hsc70.1)
  misc_feature (35)..(557): Homolog of NCBI NO: 4164594 NR Description: heat shock protein 70 [Paracoccidioides
  misc_feature (1)..(546): Homolog of NCBI NO: 23480384 NR Description: heat shock protein [Plasmodium yoelii yoelii]
  misc_feature (1)..(546): Homolog of NCBI NO: 29539338 NR Description: Heat shock 70 kDa protein [Cyanidioschyzon
  misc_feature (1)..(537): Homolog of NCBI NO: 481576 NR Description: dnaK-type molecular chaperone GRP78/BiP -
  misc_feature (1)..(546): Homolog of NCBI NO: 1037176 NR Description: immunoglobulin heavy chain binding protein
  misc_feature (1)..(546): Homolog of NCBI NO: 6016151 NR Description: Luminal binding protein 3 precursor (BiP3)
  misc_feature (1)..(562): Homolog of NCBI NO: 14423732 NR Description: Heat shock 70 kDa protein
  misc_feature (1)..(537): Homolog of NCBI NO: 21263753 NR Description: Heat shock cognate 71 kDa protein (Hsc70.1)
  misc_feature (35)..(557): Homolog of NCBI NO: 4164594 NR Description: heat shock protein 70 [Paracoccidioides
  misc_feature (1)..(546): Homolog of NCBI NO: 23480384 NR Description: heat shock protein [Plasmodium yoelii yoelii]
  misc_feature (1)..(546): Homolog of NCBI NO: 29539338 NR Description: Heat shock 70 kDa protein [Cyanidioschyzon
  misc_feature (1)..(537): Homolog of NCBI NO: 481576 NR Description: dnaK-type molecular chaperone GRP78/BiP -
  misc_feature (1)..(546): Homolog of NCBI NO: 1037176 NR Description: immunoglobulin heavy chain binding protein
  misc_feature (1)..(546): Homolog of NCBI NO: 6016151 NR Description: Luminal binding protein 3 precursor (BiP3)
  misc_feature (1)..(562): Homolog of NCBI NO: 14423732 NR Description: Heat shock 70 kDa protein
  misc_feature (1)..(537): Homolog of NCBI NO: 21263753 NR Description: Heat shock cognate 71 kDa protein (Hsc70.1)
  misc_feature (35)..(557): Homolog of NCBI NO: 4164594 NR Description: heat shock protein 70 [Paracoccidioides
  misc_feature (1)..(546): Homolog of NCBI NO: 23480384 NR Description: heat shock protein [Plasmodium yoelii yoelii]
  misc_feature (1)..(546): Homolog of NCBI NO: 29539338 NR Description: Heat shock 70 kDa protein [Cyanidioschyzon
  misc_feature (1)..(537): Homolog of NCBI NO: 481576 NR Description: dnaK-type molecular chaperone GRP78/BiP -
  misc_feature (1)..(546): Homolog of NCBI NO: 1037176 NR Description: immunoglobulin heavy chain binding protein
  misc_feature (1)..(546): Homolog of NCBI NO: 6016151 NR Description: Luminal binding protein 3 precursor (BiP3)
  misc_feature (1)..(562): Homolog of NCBI NO: 14423732 NR Description: Heat shock 70 kDa protein
  misc_feature (1)..(537): Homolog of NCBI NO: 21263753 NR Description: Heat shock cognate 71 kDa protein (Hsc70.1)
  misc_feature (35)..(557): Homolog of NCBI NO: 4164594 NR Description: heat shock protein 70 [Paracoccidioides
  misc_feature (1)..(546): Homolog of NCBI NO: 23480384 NR Description: heat shock protein [Plasmodium yoelii yoelii]
  misc_feature (1)..(546): Homolog of NCBI NO: 29539338 NR Description: Heat shock 70 kDa protein [Cyanidioschyzon
  misc_feature (1)..(537): Homolog of NCBI NO: 481576 NR Description: dnaK-type molecular chaperone GRP78/BiP -
  misc_feature (1)..(546): Homolog of NCBI NO: 1037176 NR Description: immunoglobulin heavy chain binding protein
  misc_feature (1)..(546): Homolog of NCBI NO: 6016151 NR Description: Luminal binding protein 3 precursor (BiP3)
  misc_feature (1)..(562): Homolog of NCBI NO: 14423732 NR Description: Heat shock 70 kDa protein
  misc_feature (1)..(537): Homolog of NCBI NO: 21263753 NR Description: Heat shock cognate 71 kDa protein (Hsc70.1)
  misc_feature (1)..(546): Homolog of NCBI NO: 29539338 NR Description: Heat shock 70 kDa protein [Cyanidioschyzon
  misc_feature (1)..(537): Homolog of NCBI NO: 481576 NR Description: dnaK-type molecular chaperone GRP78/BiP -
  misc_feature (1)..(546): Homolog of NCBI NO: 1037176 NR Description: immunoglobulin heavy chain binding protein
  misc_feature (1)..(546): Homolog of NCBI NO: 6016151 NR Description: Luminal binding protein 3 precursor (BiP3)
  misc_feature (1)..(562): Homolog of NCBI NO: 14423732 NR Description: Heat shock 70 kDa protein
  misc_feature (1)..(537): Homolog of NCBI NO: 21263753 NR Description: Heat shock cognate 71 kDa protein (Hsc70.1)
  misc_feature (35)..(557): Homolog of NCBI NO: 4164594 NR Description: heat shock protein 70 [Paracoccidioides
  misc_feature (1)..(546): Homolog of NCBI NO: 23480384 NR Description: heat shock protein [Plasmodium yoelii yoelii]
  misc_feature (35)..(557): Homolog of NCBI NO: 4164594 NR Description: heat shock protein 70 [Paracoccidioides
  misc_feature (1)..(546): Homolog of NCBI NO: 23480384 NR Description: heat shock protein [Plasmodium yoelii yoelii]
  misc_feature (1)..(546): Homolog of NCBI NO: 29539338 NR Description: Heat shock 70 kDa protein [Cyanidioschyzon
  misc_feature (1)..(537): Homolog of NCBI NO: 481576 NR Description: dnaK-type molecular chaperone GRP78/BiP -
  misc_feature (1)..(546): Homolog of NCBI NO: 1037176 NR Description: immunoglobulin heavy chain binding protein
  misc_feature (1)..(546): Homolog of NCBI NO: 6016151 NR Description: Luminal binding protein 3 precursor (BiP3)
  misc_feature (1)..(562): Homolog of NCBI NO: 14423732 NR Description: Heat shock 70 kDa protein
  misc_feature (1)..(537): Homolog of NCBI NO: 21263753 NR Description: Heat shock cognate 71 kDa protein (Hsc70.1)

SEQ ID NO: 27402 - DNA, 988 bp, Arabidopsis thaliana
  misc_feature (1)..(988): Ceres Seq. ID no. 13489274
  misc_feature: MA Experiment ID: 108434 Result: Down-regulated in Transcription
  misc_feature: MA Experiment 108434 PARAMETER Experiment Name: At_Root_Tips_cDNA_P Parameter: Tissue Value: Root Tips
  misc_feature: MA Experiment ID: 108462 Result: Down-regulated in Transcription
  misc_feature: MA Experiment 108462 PARAMETER Experiment Name: At_Germinating_Seeds_cDNA_P Parameter: Age (day) Value: 2 vs. 0
  misc_feature: MA Experiment 108462 PARAMETER Experiment Name: At_Germinating_Seeds_cDNA_P Parameter: Tissue Value: Germinating Seeds
  misc_feature: MA Experiment ID: 108463 Result: Down-regulated in Transcription
  misc_feature: MA Experiment 108463 PARAMETER Experiment Name: At_Germinating_Seeds_cDNA_P Parameter: Age (day) Value: 3 vs. 0
  misc_feature: MA Experiment 108463 PARAMETER Experiment Name: At_Germinating_Seeds_cDNA_P Parameter: Tissue Value: Germinating Seeds
  misc_feature: MA Experiment ID: 108464 Result: Down-regulated in Transcription
  misc_feature: MA Experiment 108464 PARAMETER Experiment Name: At_Germinating_Seeds_cDNA_P Parameter: Age (day) Value: 4 vs. 0
  misc_feature: MA Experiment 108464 PARAMETER Experiment Name: At_Germinating_Seeds_cDNA_P Parameter: Tissue Value: Germinating Seeds
  misc_feature: MA Experiment ID: 108488 Result: Up-regulated in Transcription
  misc_feature: MA Experiment ID: 108501 Result: Down-regulated in Transcription
  misc_feature: MA Experiment 108501 PARAMETER Experiment Name: At_ap2_floral_buds_cDNA_P Parameter: Plant Line Value: ap2 (Ler.)
  misc_feature: MA Experiment 108501 PARAMETER Experiment Name: At_ap2_floral_buds_cDNA_P Parameter: Tissue Value: Closed Flower
  misc_feature: MA Experiment ID: 108573 Result: Up-regulated in Transcription
  misc_feature: MA Experiment 108573 PARAMETER Experiment Name: At_Drought_cDNA_P Parameter: Timepoint (hr) Value: 6
  misc_feature: MA Experiment 108573 PARAMETER Experiment Name: At_Drought_cDNA_P Parameter: Tissue Value: Aerial
  misc_feature: MA Experiment 108573 PARAMETER Experiment Name: At_Drought_cDNA_P Parameter: Treatment Value: Drought vs. No Drought
  misc_feature: MA Experiment ID: 108576 Result: Up-regulated in Transcription
  misc_feature: MA Experiment 108576 PARAMETER Experiment Name: At_42deg_Heat_cDNA_P Parameter: Temperature (deg C) Value: 42 vs. 22
  misc_feature: MA Experiment 108576 PARAMETER Experiment Name: At_42deg_Heat_cDNA_P Parameter: Timepoint (hr) Value: 1
  misc_feature: MA Experiment 108576 PARAMETER Experiment Name: At_42deg_Heat_cDNA_P Parameter: Tissue Value: Aerial
  misc_feature: MA Experiment ID: 108577 Result: Up-regulated in Transcription
  misc_feature: MA Experiment 108577 PARAMETER Experiment Name: At_42deg_Heat_cDNA_P Parameter: Temperature (deg C) Value: 42 vs. 22
  misc_feature: MA Experiment 108577 PARAMETER Experiment Name: At_42deg_Heat_cDNA_P Parameter: Timepoint (hr) Value: 6
  misc_feature: MA Experiment 108577 PARAMETER Experiment Name: At_42deg_Heat_cDNA_P Parameter: Tissue Value: Aerial
  misc_feature: MA Experiment ID: 108595 Result: Up-regulated in Transcription
  misc_feature: MA Experiment 108595 PARAMETER Experiment Name: At_Ler-pi_Ovule_cDNA_P Parameter: Plant Line Value: null
  misc_feature: MA Experiment ID: 20000070 Result: Up-regulated in Transcription
  misc_feature: MA Experiment 20000070 PARAMETER Experiment Name: At_100uM_ABA_Mutants_cDNA_P Parameter: Plant Line Value: CS24
  misc_feature: MA Experiment 20000070 PARAMETER Experiment Name: At_100uM_ABA_Mutants_cDNA_P Parameter: Timepoint (hr) Value: 6
  misc_feature: MA Experiment 20000070 PARAMETER Experiment Name: At_100uM_ABA_Mutants_cDNA_P Parameter: Tissue Value: Aerial
  misc_feature: MA Experiment 20000070 PARAMETER Experiment Name: At_100uM_ABA_Mutants_cDNA_P Parameter: Treatment Value: 100uM ABA vs. No Treatment
  misc_feature: MA Experiment ID: 20000088 Result: Up-regulated in Transcription
  misc_feature: MA Experiment 20000088 PARAMETER Experiment Name: At_100uM_ABA_Mutants_cDNA_P Parameter: Plant Line Value: Landsberg
  misc_feature: MA Experiment 20000088 PARAMETER Experiment Name: At_100uM_ABA_Mutants_cDNA_P Parameter: Timepoint (hr) Value: 6
  misc_feature: MA Experiment 20000088 PARAMETER Experiment Name: At_100uM_ABA_Mutants_cDNA_P Parameter: Tissue Value: Aerial
  misc_feature: MA Experiment 20000088 PARAMETER Experiment Name: At_100uM_ABA_Mutants_cDNA_P Parameter: Treatment Value: 100uM ABA vs. No Treatment
  misc_feature: MA Experiment ID: 20000093 Result: Up-regulated in Transcription
  misc_feature: MA Experiment 20000093 PARAMETER Experiment Name: At_42deg_Heat_cDNA_P Parameter: Temperature (deg C) Value: 42 vs. 22
  misc_feature: MA Experiment 20000093 PARAMETER Experiment Name: At_42deg_Heat_cDNA_P Parameter: Timepoint (hr) Value: 0.5
  misc_feature: MA Experiment 20000093 PARAMETER Experiment Name: At_42deg_Heat_cDNA_P Parameter: Tissue Value: Aerial
  misc_feature: MA Experiment ID: 20000111 Result: Up-regulated in Transcription
  misc_feature: MA Experiment 20000111 PARAMETER Experiment Name: At_42deg_Heat_cDNA_P Parameter: Temperature (deg C) Value: 42 vs. 22
  misc_feature: MA Experiment 20000111 PARAMETER Experiment Name: At_42deg_Heat_cDNA_P Parameter: Timepoint (hr) Value: 6
  misc_feature: MA Experiment 20000111 PARAMETER Experiment Name: At_42deg_Heat_cDNA_P Parameter: Tissue Value: Aerial
  misc_feature: MA Experiment ID: 20000112 Result: Up-regulated in Transcription
  misc_feature: MA Experiment 20000112 PARAMETER Experiment Name: At_42deg_Heat_cDNA_P Parameter: Temperature (deg C) Value: 42 vs. 22
  misc_feature: MA Experiment 20000112 PARAMETER Experiment Name: At_42deg_Heat_cDNA_P Parameter: Timepoint (hr) Value: 2
  misc_feature: MA Experiment 20000112 PARAMETER Experiment Name: At_42deg_Heat_cDNA_P Parameter: Tissue Value: Aerial
  misc_feature: MA Experiment ID: 20000113 Result: Up-regulated in Transcription
  misc_feature: MA Experiment 20000113 PARAMETER Experiment Name: At_42deg_Heat_cDNA_P Parameter: Temperature (deg C) Value: 42 vs. 22
  misc_feature: MA Experiment 20000113 PARAMETER Experiment Name: At_42deg_Heat_cDNA_P Parameter: Timepoint (hr) Value: 8
  misc_feature: MA Experiment 20000113 PARAMETER Experiment Name: At_42deg_Heat_cDNA_P Parameter: Tissue Value: Aerial
  misc_feature: MA Experiment ID: 20000144 Result: Up-regulated in Transcription
  misc_feature: MA Experiment 20000144 PARAMETER Experiment Name: At_42deg_Heat_cDNA_P Parameter: Temperature (deg C) Value: 42 vs. 22
  misc_feature: MA Experiment 20000144 PARAMETER Experiment Name: At_42deg_Heat_cDNA_P Parameter: Timepoint (hr) Value: 1
  misc_feature: MA Experiment 20000144 PARAMETER Experiment Name: At_42deg_Heat_cDNA_P Parameter: Tissue Value: Aerial
  misc_feature: MA Experiment ID: 20000171 Result: Up-regulated in Transcription
  misc_feature: MA Experiment 20000171 PARAMETER Experiment Name: At_42deg_Heat_P Parameter: Age (day) Value: 14
  misc_feature: MA Experiment 20000171 PARAMETER Experiment Name: At_42deg_Heat_P Parameter: Organism Value: A. thaliana
  misc_feature: MA Experiment 20000171 PARAMETER Experiment Name: At_42deg_Heat_P Parameter: Plant Line Value: WS
  misc_feature: MA Experiment 20000171 PARAMETER Experiment Name: At_42deg_Heat_P Parameter: Temperature (deg C) Value: 42 vs. 22
  misc_feature: MA Experiment 20000171 PARAMETER Experiment Name: At_42deg_Heat_P Parameter: Timepoint (hr) Value: 1
  misc_feature: MA Experiment 20000171 PARAMETER Experiment Name: At_42deg_Heat_P Parameter: Tissue Value: Aerial
  misc_feature: MA Experiment ID: 20000173 Result: Up-regulated in Transcription
  misc_feature: MA Experiment 20000173 PARAMETER Experiment Name: At_42deg_Heat_P Parameter: Age (day) Value: 14
  misc_feature: MA Experiment 20000173 PARAMETER Experiment Name: At_42deg_Heat_P Parameter: Organism Value: A. thaliana
  misc_feature: MA Experiment 20000173 PARAMETER Experiment Name: At_42deg_Heat_P Parameter: Plant Line Value: WS
  misc_feature: MA Experiment 20000173 PARAMETER Experiment Name: At_42deg_Heat_P Parameter: Temperature (deg C) Value: 42 vs. 22
  misc_feature: MA Experiment 20000173 PARAMETER Experiment Name: At_42deg_Heat_P Parameter: Timepoint (hr) Value: 6
  misc_feature: MA Experiment 20000173 PARAMETER Experiment Name: At_42deg_Heat_P Parameter: Tissue Value: Aerial
  misc_feature: MA Experiment ID: 20000184 Result: Down-regulated in Transcription
  misc_feature: MA Experiment 20000184 PARAMETER Experiment Name: At_Shoots__P Parameter: Age (day) Value: 7
  misc_feature: MA Experiment 20000184 PARAMETER Experiment Name: At_Shoots__P Parameter: Tissue Value: Shoots vs. Whole Plant
  misc_feature: MA Experiment ID: 20000264 Result: Up-regulated in Transcription
  misc_feature: MA Experiment 20000264 PARAMETER Experiment Name: At_Open_Flower_P Parameter: Age (day) Value: 21
  misc_feature: MA Experiment 20000264 PARAMETER Experiment Name: At_Open_Flower_P Parameter: Plant Line Value: WS
  misc_feature: MA Experiment 20000264 PARAMETER Experiment Name: At_Open_Flower_P Parameter: Tissue Value: Open Flower vs. Whole Plant
  misc_feature: MA Experiment ID: 20000265 Result: Up-regulated in Transcription
  misc_feature: MA Experiment 20000265 PARAMETER Experiment Name: At_Open_Flower_P Parameter: Age (day) Value: 21
  misc_feature: MA Experiment 20000265 PARAMETER Experiment Name: At_Open_Flower_P Parameter: Plant Line Value: WS
  misc_feature: MA Experiment 20000265 PARAMETER Experiment Name: At_Open_Flower_P Parameter: Tissue Value: Closed Flower vs. Whole Plant
  misc_feature: MA Experiment ID: 20000267 Result: Up-regulated in Transcription
  misc_feature: MA Experiment 20000267 PARAMETER Experiment Name: At_Drought_P Parameter: Age (day) Value: 7
  misc_feature: MA Experiment 20000267 PARAMETER Experiment Name: At_Drought_P Parameter: Organism Value: A. thaliana
  misc_feature: MA Experiment 20000267 PARAMETER Experiment Name: At_Drought_P Parameter: Plant Line Value: WS
  misc_feature: MA Experiment 20000267 PARAMETER Experiment Name: At_Drought_P Parameter: Timepoint (hr) Value: 6
  misc_feature: MA Experiment 20000267 PARAMETER Experiment Name: At_Drought_P Parameter: Tissue Value: Whole Plant
  misc_feature: MA Experiment 20000267 PARAMETER Experiment Name: At_Drought_P Parameter: Treatment Value: Drought vs. No Drought
  misc_feature: MA Experiment ID: 20000268 Result: Up-regulated in Transcription
  misc_feature: MA Experiment 20000268 PARAMETER Experiment Name: At_100mM_NaCl__P Parameter: Age (day) Value: 14
  misc_feature: MA Experiment 20000268 PARAMETER Experiment Name: At_100mM_NaCl__P Parameter: Organism Value: A. thaliana
  misc_feature: MA Experiment 20000268 PARAMETER Experiment Name: At_100mM_NaCl__P Parameter: Plant Line Value: WS
  misc_feature: MA Experiment 20000268 PARAMETER Experiment Name: At_100mM_NaCl__P Parameter: Timepoint (hr) Value: 6
  misc_feature: MA Experiment 20000268 PARAMETER Experiment Name: At_100mM_NaCl__P Parameter: Tissue Value: Whole Plant
  misc_feature: MA Experiment 20000268 PARAMETER Experiment Name: At_100mM_NaCl__P Parameter: Treatment Value: 100mM NaCl vs. No Treatment
  misc_feature: MA Experiment ID: 20000286 Result: Up-regulated in Transcription
  misc_feature: MA Experiment 20000286 PARAMETER Experiment Name: At_Open_Flower_P Parameter: Age (day) Value: 21
  misc_feature: MA Experiment 20000286 PARAMETER Experiment Name: At_Open_Flower_P Parameter: Plant Line Value: WS
  misc_feature: MA Experiment 20000286 PARAMETER Experiment Name: At_Open_Flower_P Parameter: Tissue Value: Half Open vs. Whole Plant
  misc_feature: MA Experiment ID: 20000436 Result: Up-regulated in Transcription
  misc_feature: MA Experiment 20000436 PARAMETER Experiment Name: At_Drought_P Parameter: Age (day) Value: 7
  misc_feature: MA Experiment 20000436 PARAMETER Experiment Name: At_Drought_P Parameter: Organism Value: A. thaliana
  misc_feature: MA Experiment 20000436 PARAMETER Experiment Name: At_Drought_P Parameter: Plant Line Value: WS
  misc_feature: MA Experiment 20000436 PARAMETER Experiment Name: At_Drought_P Parameter: Timepoint (hr) Value: 12
  misc_feature: MA Experiment 20000436 PARAMETER Experiment Name: At_Drought_P Parameter: Tissue Value: Whole Plant
  misc_feature: MA Experiment 20000436 PARAMETER Experiment Name: At_Drought_P Parameter: Treatment Value: Drought vs. No Drought
  misc_feature: MA Experiment ID: 20000437 Result: Up-regulated in Transcription
  misc_feature: MA Experiment 20000437 PARAMETER Experiment Name: At_Drought_P Parameter: Age (day) Value: 8
  misc_feature: MA Experiment 20000437 PARAMETER Experiment Name: At_Drought_P Parameter: Organism Value: A. thaliana
  misc_feature: MA Experiment 20000437 PARAMETER Experiment Name: At_Drought_P Parameter: Plant Line Value: WS
  misc_feature: MA Experiment 20000437 PARAMETER Experiment Name: At_Drought_P Parameter: Timepoint (hr) Value: 24
  misc_feature: MA Experiment 20000437 PARAMETER Experiment Name: At_Drought_P Parameter: Tissue Value: Whole Plant
  misc_feature: MA Experiment 20000437 PARAMETER Experiment Name: At_Drought_P Parameter: Treatment Value: Drought vs. No Drought
  misc_feature: MA Experiment ID: 20000439 Result: Down-regulated in Transcription
  misc_feature: MA Experiment 20000439 PARAMETER Experiment Name: At_Roots__P Parameter: Age (day) Value: 14 vs. 21
  misc_feature: MA Experiment 20000439 PARAMETER Experiment Name: At_Roots__P Parameter: Organism Value: A. thaliana
  misc_feature: MA Experiment 20000439 PARAMETER Experiment Name: At_Roots__P Parameter: Tissue Value: Roots vs. Whole Plant
  misc_feature: MA Experiment ID: 20000573 Result: Up-regulated in Transcription
  misc_feature: MA Experiment 20000573 PARAMETER Experiment Name: At_100uM_ABA_Mutants__P Parameter: Organism Value: A. thaliana
  misc_feature: MA Experiment 20000573 PARAMETER Experiment Name: At_100uM_ABA_Mutants__P Parameter: Plant Line Value: CS22 vs. Ler wt
  misc_feature: MA Experiment 20000573 PARAMETER Experiment Name: At_100uM_ABA_Mutants__P Parameter: Timepoint (hr) Value: N/A
  misc_feature: MA Experiment 20000573 PARAMETER Experiment Name: At_100uM_ABA_Mutants__P Parameter: Tissue Value: Whole Plant
  misc_feature: MA Experiment 20000573 PARAMETER Experiment Name: At_100uM_ABA_Mutants__P Parameter: Treatment Value: None
  misc_feature: MA Experiment ID: 20000794 Result: Up-regulated in Transcription
  misc_feature: MA Experiment 20000794 PARAMETER Experiment Name: At_Petals_P Parameter: Age (day) Value: 23-25 days
  misc_feature: MA Experiment 20000794 PARAMETER Experiment Name: At_Petals_P Parameter: Plant Line Value: WS
  misc_feature: MA Experiment 20000794 PARAMETER Experiment Name: At_Petals_P Parameter: Tissue Value: Petals vs. Whole plant
  misc_feature: MA Experiment ID: 20001554 Result: Up-regulated in Transcription
  misc_feature: MA Experiment 20001554 PARAMETER Experiment Name: At_Drought_Soil_Dry_P Parameter: Age (day) Value: 21
  misc_feature: MA Experiment 20001554 PARAMETER Experiment Name: At_Drought_Soil_Dry_P Parameter: Organism Value: A. thaliana
  misc_feature: MA Experiment 20001554 PARAMETER Experiment Name: At_Drought_Soil_Dry_P Parameter: Plant Line Value: WS
  misc_feature: MA Experiment 20001554 PARAMETER Experiment Name: At_Drought_Soil_Dry_P Parameter: Post Timepoint (hr) Value: None
  misc_feature: MA Experiment 20001554 PARAMETER Experiment Name: At_Drought_Soil_Dry_P Parameter: Post-Treatment Value: None
  misc_feature: MA Experiment 20001554 PARAMETER Experiment Name: At_Drought_Soil_Dry_P Parameter: Timepoint (day) Value: 7
  misc_feature: MA Experiment 20001554 PARAMETER Experiment Name: At_Drought_Soil_Dry_P Parameter: Treatment Value: Drought vs. No Drought
  misc_feature: MA Experiment ID: 20001555 Result: Up-regulated in Transcription
  misc_feature: MA Experiment 20001555 PARAMETER Experiment Name: At_Drought_Soil_Dry_P Parameter: Age (day) Value: 24
  misc_feature: MA Experiment 20001555 PARAMETER Experiment Name: At_Drought_Soil_Dry_P Parameter: Organism Value: A. thaliana
  misc_feature: MA Experiment 20001555 PARAMETER Experiment Name: At_Drought_Soil_Dry_P Parameter: Plant Line Value: WS
  misc_feature: MA Experiment 20001555 PARAMETER Experiment Name: At_Drought_Soil_Dry_P Parameter: Post Timepoint (hr) Value: None
  misc_feature: MA Experiment 20001555 PARAMETER Experiment Name: At_Drought_Soil_Dry_P Parameter: Post-Treatment Value: None
  misc_feature: MA Experiment 20001555 PARAMETER Experiment Name: At_Drought_Soil_Dry_P Parameter: Timepoint (day) Value: 10
  misc_feature: MA Experiment 20001555 PARAMETER Experiment Name: At_Drought_Soil_Dry_P Parameter: Treatment Value: Drought vs. No Drought
  misc_feature: MA Experiment ID: 20001556 Result: Up-regulated in Transcription
  misc_feature: MA Experiment 20001556 PARAMETER Experiment Name: At_Drought_Soil_Dry_P Parameter: Age (day) Value: 26
  misc_feature: MA Experiment 20001556 PARAMETER Experiment Name: At_Drought_Soil_Dry_P Parameter: Organism Value: A. thaliana
  misc_feature: MA Experiment 20001556 PARAMETER Experiment Name: At_Drought_Soil_Dry_P Parameter: Plant Line Value: WS
  misc_feature: MA Experiment 20001556 PARAMETER Experiment Name: At_Drought_Soil_Dry_P Parameter: Post Timepoint (hr) Value: None
  misc_feature: MA Experiment 20001556 PARAMETER Experiment Name: At_Drought_Soil_Dry_P Parameter: Post-Treatment Value: None
  misc_feature: MA Experiment 20001556 PARAMETER Experiment Name: At_Drought_Soil_Dry_P Parameter: Timepoint (day) Value: 12
  misc_feature: MA Experiment 20001556 PARAMETER Experiment Name: At_Drought_Soil_Dry_P Parameter: Treatment Value: Drought vs. No Drought
  misc_feature: MA Experiment ID: 20001559 Result: Up-regulated in Transcription
  misc_feature: MA Experiment 20001559 PARAMETER Experiment Name: At_Drought_Soil_Dry_P Parameter: Age (day) Value: 28
  misc_feature: MA Experiment 20001559 PARAMETER Experiment Name: At_Drought_Soil_Dry_P Parameter: Organism Value: A. thaliana
  misc_feature: MA Experiment 20001559 PARAMETER Experiment Name: At_Drought_Soil_Dry_P Parameter: Plant Line Value: WS
  misc_feature: MA Experiment 20001559 PARAMETER Experiment Name: At_Drought_Soil_Dry_P Parameter: Post Timepoint (hr) Value: 29
  misc_feature: MA Experiment 20001559 PARAMETER Experiment Name: At_Drought_Soil_Dry_P Parameter: Post-Treatment Value: Re-Water vs. No Drought
  misc_feature: MA Experiment 20001559 PARAMETER Experiment Name: At_Drought_Soil_Dry_P Parameter: Timepoint (day) Value: 14
  misc_feature: MA Experiment 20001559 PARAMETER Experiment Name: At_Drought_Soil_Dry_P Parameter: Treatment Value: Drought vs. No Drought
  misc_feature: MA Experiment ID: 20001904 Result: Up-regulated in Transcription
  misc_feature: MA Experiment 20001904 PARAMETER Experiment Name: At_Drought_Reproduction_P Parameter: Age (day) Value: 37
  misc_feature: MA Experiment 20001904 PARAMETER Experiment Name: At_Drought_Reproduction_P Parameter: Organism Value: A. thaliana
  misc_feature: MA Experiment 20001904 PARAMETER Experiment Name: At_Drought_Reproduction_P Parameter: Plant Line Value: WS
  misc_feature: MA Experiment 20001904 PARAMETER Experiment Name: At_Drought_Reproduction_P Parameter: Timepoint (day) Value: 7
  misc_feature: MA Experiment 20001904 PARAMETER Experiment Name: At_Drought_Reproduction_P Parameter: Tissue Value: Rosettes
  misc_feature: MA Experiment 20001904 PARAMETER Experiment Name: At_Drought_Reproduction_P Parameter: Treatment Value: Drought vs. No Drought
  misc_feature: MA Experiment ID: 20001911 Result: Down-regulated in Transcription
  misc_feature: MA Experiment 20001911 PARAMETER Experiment Name: At_Drought_Reproduction_P Parameter: Age (day) Value: 40
  misc_feature: MA Experiment 20001911 PARAMETER Experiment Name: At_Drought_Reproduction_P Parameter: Organism Value: A. thaliana
  misc_feature: MA Experiment 20001911 PARAMETER Experiment Name: At_Drought_Reproduction_P Parameter: Plant Line Value: WS
  misc_feature: MA Experiment 20001911 PARAMETER Experiment Name: At_Drought_Reproduction_P Parameter: Timepoint (day) Value: 10
  misc_feature: MA Experiment 20001911 PARAMETER Experiment Name: At_Drought_Reproduction_P Parameter: Tissue Value: Flowers
  misc_feature: MA Experiment 20001911 PARAMETER Experiment Name: At_Drought_Reproduction_P Parameter: Treatment Value: Drought vs. No Drought
attttctctcactttctctctcagcttacgaacaagaaaaaaagaagaatctttagccacctttgagatcaaaagatgaacatcgctcacactatcttcggcgttttcggaaatgcaactgctctgtttcttttcttggctccttcgataacattcaagagaatcatcaagaacaaatccactgaacaattctctggtatcccttatccaatgactctcctcaactgtctcctctctgcttggtatggacttccctttgtgtcaaaagacaacacacttgtgagcacaatcaatggcacaggagcagtgatcgaaacagtctacgtgttaatctttcttttctacgcaccaaagaaggagaaaattaagatctttggtatcttctcttgcgttttggctgtattcgcaacagtagctctcgtctctctctttgctcttcaaggaaacggtagaaaactcttttgtggtctcgcagctactgttttctccatcatcatgtacgcttctccactctccatcatgagattggtggtaaagacgaagagtgtagagtttatgccattctttttgtcactctttgtcttcctctgtggtacttcgtggttcgtctatggtctaatcggtcgtgacccttttgttgcaatcccaaatgggtttggatgtgcattagggacactgcaattgatactatacttcatctactgtggaaacaaaggagagaaatctgcagatgctcagaaagatgagaagtcagtggagatgaaagatgatgagaagaagcagaatgtggttaatggaaagcaagaccttcaagtttaaaagagcttttgaggatgatttggttatgtgatttcgtattaactctgcttaactagagttttccttttcgtttcgttggaatgtaaaaaaaatgatgctgaaaaatgtaacgtttcctagtttcgtactgatacactagtgattgatgaagaatgacgatgccttttgt

SEQ ID NO: 27403 - protein, 247 aa, Arabidopsis thaliana
  peptide (1)..(247): Ceres Seq. ID no. 13489275
  misc_feature (6)..(95): Pfam Name: MtN3/saliva family Pfam Description: MtN3/saliva family
  misc_feature (4)..(229): Homolog of NCBI NO: 34912462 NR Description: MtN3-like protein [Oryza sativa (japonica
  misc_feature (4)..(229): Homolog of NCBI NO: 34912454 NR Description: P0681B11.31 [Oryza sativa (japonica
  misc_feature (9)..(213): Homolog of NCBI NO: 15238678 NR Description: nodulin MtN3 family protein [Arabidopsis
  misc_feature (1)..(209): Homolog of NCBI NO: 15219732 NR Description: nodulin MtN3 family protein [Arabidopsis
  misc_feature (1)..(216): Homolog of NCBI NO: 18400517 NR Description: nodulin MtN3 family protein [Arabidopsis
  misc_feature (9)..(213): Homolog of NCBI NO: 34146818 NR Description: At5g53190 [Arabidopsis thaliana]
  misc_feature (1)..(225): Homolog of NCBI NO: 18413388 NR Description: nodulin MtN3 family protein [Arabidopsis
  misc_feature (2)..(234): Homolog of NCBI NO: 34907420 NR Description: P0018C10.36 [Oryza sativa (japonica
  misc_feature (46)..(247): Homolog of NCBI NO: 25518644 NR Description: hypothetical protein F24J8.9 - Arabidopsis
  misc_feature (1)..(247): Homolog of NCBI NO: 18394992 NR Description: nodulin MtN3 family protein [Arabidopsis
MNIAHTIFGVFGNATALFLFLAPSITFKRIIKNKSTEQFSGIPYPMTLLNCLLSAWYGLPFVSKDNTLVSTINGTGAVIETVYVLIFLFYAPKKEKIKIFGIFSCVLAVFATVALVSLFALQGNGRKLFCGLAATVFSIIMYASPLSIMRLVVKTKSVEFMPFFLSLFVFLCGTSWFVYGLIGRDPFVAIPNGFGCALGTLQLILYFIYCGNKGEKSADAQKDEKSVEMKDDEKKQNVVNGKQDLQV

SEQ ID NO: 27404 - protein, 202 aa, Arabidopsis thaliana
  peptide (1)..(202): Ceres Seq. ID no. 13489276
  misc_feature (1)..(202): Homolog of NCBI NO: 18394992 NR Description: nodulin MtN3 family protein [Arabidopsis
  misc_feature (1)..(184): Homolog of NCBI NO: 34912462 NR Description: MtN3-like protein [Oryza sativa (japonica
  misc_feature (1)..(184): Homolog of NCBI NO: 34912454 NR Description: P0681B11.31 [Oryza sativa (japonica
  misc_feature (1)..(168): Homolog of NCBI NO: 15238678 NR Description: nodulin MtN3 family protein [Arabidopsis
  misc_feature (1)..(164): Homolog of NCBI NO: 15219732 NR Description: nodulin MtN3 family protein [Arabidopsis
  misc_feature (1)..(171): Homolog of NCBI NO: 18400517 NR Description: nodulin MtN3 family protein [Arabidopsis
  misc_feature (1)..(168): Homolog of NCBI NO: 34146818 NR Description: At5g53190 [Arabidopsis thaliana]
  misc_feature (1)..(180): Homolog of NCBI NO: 18413388 NR Description: nodulin MtN3 family protein [Arabidopsis
  misc_feature (1)..(189): Homolog of NCBI NO: 34907420 NR Description: P0018C10.36 [Oryza sativa (japonica
  misc_feature (1)..(202): Homolog of NCBI NO: 25518644 NR Description: hypothetical protein F24J8.9 - Arabidopsis
MTLLNCLLSAWYGLPFVSKDNTLVSTINGTGAVIETVYVLIFLFYAPKKEKIKIFGIFSCVLAVFATVALVSLFALQGNGRKLFCGLAATVFSIIMYASPLSIMRLVVKTKSVEFMPFFLSLFVFLCGTSWFVYGLIGRDPFVAIPNGFGCALGTLQLILYFIYCGNKGEKSADAQKDEKSVEMKDDEKKQNVVNGKQDLQV

SEQ ID NO: 27405 - DNA, 1174 bp, Arabidopsis thaliana
  misc_feature (1)..(1174): Ceres Seq. ID no. 13489740
  misc_feature: MA Experiment ID: 20000185 Result: Down-regulated in Transcription
  misc_feature: MA Experiment 20000185 PARAMETER Experiment Name: At_Roots__P Parameter: Age (day) Value: 7 vs. 21
  misc_feature: MA Experiment 20000185 PARAMETER Experiment Name: At_Roots__P Parameter: Organism Value: A. thaliana
  misc_feature: MA Experiment 20000185 PARAMETER Experiment Name: At_Roots__P Parameter: Tissue Value: Roots vs. Whole Plant
  misc_feature: MA Experiment ID: 20000234 Result: Up-regulated in Transcription
  misc_feature: MA Experiment 20000234 PARAMETER Experiment Name: At_Siliques_P Parameter: Age (day) Value: 21
  misc_feature: MA Experiment 20000234 PARAMETER Experiment Name: At_Siliques_P Parameter: Organism Value: A. thaliana
  misc_feature: MA Experiment 20000234 PARAMETER Experiment Name: At_Siliques_P Parameter: Plant Line Value: WS
  misc_feature: MA Experiment 20000234 PARAMETER Experiment Name: At_Siliques_P Parameter: Tissue Value: Less Than 5mm Siliques vs. Whole Plant
  misc_feature: MA Experiment ID: 20000235 Result: Up-regulated in Transcription
  misc_feature: MA Experiment 20000235 PARAMETER Experiment Name: At_Siliques_P Parameter: Age (day) Value: 21
  misc_feature: MA Experiment 20000235 PARAMETER Experiment Name: At_Siliques_P Parameter: Organism Value: A. thaliana
  misc_feature: MA Experiment 20000235 PARAMETER Experiment Name: At_Siliques_P Parameter: Plant Line Value: WS
  misc_feature: MA Experiment 20000235 PARAMETER Experiment Name: At_Siliques_P Parameter: Tissue Value: 5-10mm Siliques vs. Whole Plant
  misc_feature: MA Experiment ID: 20000264 Result: Up-regulated in Transcription
  misc_feature: MA Experiment 20000264 PARAMETER Experiment Name: At_Open_Flower_P Parameter: Age (day) Value: 21
  misc_feature: MA Experiment 20000264 PARAMETER Experiment Name: At_Open_Flower_P Parameter: Plant Line Value: WS
  misc_feature: MA Experiment 20000264 PARAMETER Experiment Name: At_Open_Flower_P Parameter: Tissue Value: Open Flower vs. Whole Plant
  misc_feature: MA Experiment ID: 20000265 Result: Up-regulated in Transcription
  misc_feature: MA Experiment 20000265 PARAMETER Experiment Name: At_Open_Flower_P Parameter: Age (day) Value: 21
  misc_feature: MA Experiment 20000265 PARAMETER Experiment Name: At_Open_Flower_P Parameter: Plant Line Value: WS
  misc_feature: MA Experiment 20000265 PARAMETER Experiment Name: At_Open_Flower_P Parameter: Tissue Value: Closed Flower vs. Whole Plant
  misc_feature: MA Experiment ID: 20000439 Result: Down-regulated in Transcription
  misc_feature: MA Experiment 20000439 PARAMETER Experiment Name: At_Roots__P Parameter: Age (day) Value: 14 vs. 21
  misc_feature: MA Experiment 20000439 PARAMETER Experiment Name: At_Roots__P Parameter: Organism Value: A. thaliana
  misc_feature: MA Experiment 20000439 PARAMETER Experiment Name: At_Roots__P Parameter: Tissue Value: Roots vs. Whole Plant
  misc_feature: MA Experiment ID: 20000794 Result: Up-regulated in Transcription
  misc_feature: MA Experiment 20000794 PARAMETER Experiment Name: At_Petals_P Parameter: Age (day) Value: 23-25 days
  misc_feature: MA Experiment 20000794 PARAMETER Experiment Name: At_Petals_P Parameter: Plant Line Value: WS
  misc_feature: MA Experiment 20000794 PARAMETER Experiment Name: At_Petals_P Parameter: Tissue Value: Petals vs. Whole plant
aaataaaccacattagtcttttcagattttttgtacacttccttcatcccccacccatctctctctctctctctcatccttcctctttcttctttgcttgcccttttctttttattttattcttccaaaatcaaatagttccttctttgatctcattgggataactaaaagtttcaagaagagaaacatatcattgaagagagaacccacacaaaaaaaaatgtctgtagatttctcatctgagcgtgtttgctatgtccactgcagcttctgcaccacgattttagcggtaagtgtaccatacgcaagtttgttcacacttgtgacggtgagatgtggccattgtaccaatttgctatccctcaacattggagtttcacttcatcaaacctcagctcctcccattcaccaagatcttcagcctcatagacagcacacaacctctctggtgacaaggaaagattgtgcatcgtcttctaggagcaccaacaatttatcggaaaacattgatcgtgaggctcctagaatgcctcctattcgcccaccggagaaaagacaacgtgttccttcggcctacaacagattcatcaaggaggaaatccaaaggattaaggcttgcaatccagagattagccaccgtgaggcatttagcactgctgctaaaaattgggcacattttcctcacattcactttggattaaagctggatggcaacaagaaaggcaagcaattagaccagtcagttgcaggccaaaagtctaatggctattactaaagcctttatatatatacacacatatatacacttatacgtatatatatgtgtatagatatatatgcgtgtgtatgatttatgtttatctttgtacgtacgcattaatgaatgtgtaagcagagagctgatgatggaaagagatcaggcgaggaagaagaagatcatataacgttacatatatatacatgtatgtatatatgttcctttcttttttcttgcgtgtgcttcatctataacttcatttctagttttattctcctaataagtgaagtctataaatttgaacctaaaatgtttaggaagaatcttctttctgaagattgtaatataaatttcaactttactcattctgaaaaggtgtggtcacgactttatatatataatccctagttttatggt

SEQ ID NO: 27406 - protein, 184 aa, Arabidopsis thaliana
  peptide (1)..(184): Ceres Seq. ID no. 13489741
  misc_feature (1)..(160): Pfam Name: YABBY protein Pfam Description: YABBY protein
  misc_feature (1)..(168): Homolog of NCBI NO: 11280863 NR Description: hypothetical protein [imported] - rice
  misc_feature (8)..(175): Homolog of NCBI NO: 11280864 NR Description: hypothetical protein 2 [imported] - rice
  misc_feature (7)..(63): Homolog of NCBI NO: 32330677 NR Description: yabby15 protein [Zea mays]
  misc_feature (97)..(167): Homolog of NCBI NO: 32330677 NR Description: yabby15 protein [Zea mays]
  misc_feature (1)..(62): Homolog of NCBI NO: 37551421 NR Description: FIL-like protein [Triticum aestivum]
  misc_feature (100)..(183): Homolog of NCBI NO: 37551421 NR Description: FIL-like protein [Triticum aestivum]
  misc_feature (6)..(163): Homolog of NCBI NO: 27804377 NR Description: MADS-box transcription factor CDM51
  misc_feature (6)..(169): Homolog of NCBI NO: 30683176 NR Description: expressed protein [Arabidopsis thaliana]
  misc_feature (1)..(184): Homolog of NCBI NO: 6664311 NR Description: T27G7.15 [Arabidopsis thaliana]
  misc_feature (1)..(184): Homolog of NCBI NO: 4928751 NR Description: YABBY2 [Arabidopsis thaliana]
MSVDFSSERVCYVHCSFCTTILAVSVPYASLFTLVTVRCGHCTNLLSLNIGVSLHQTSAPPIHQDLQPHRQHTTSLVTRKDCASSSRSTNNLSENIDREAPRMPPIRPPEKRQRVPSAYNRFIKEEIQRIKACNPEISHREAFSTAAKNWAHFPHIHFGLKLDGNKKGKQLDQSVAGQKSNGYY

SEQ ID NO: 27407 - protein, 93 aa, Arabidopsis thaliana
  peptide (1)..(93): Ceres Seq. ID no. 13489742
MCKQRADDGKRSGEEEEDHITLHIYTCMYICSFLFSCVCFIYNFISSFILLISEVYKFEPKMFRKNLLSEDCNINFNFTHSEKVWSRLYIYNP

SEQ ID NO: 27408 - DNA, 1263 bp, Arabidopsis thaliana
  misc_feature (1)..(1263): Ceres Seq. ID no. 12331595
  misc_feature: MA Experiment ID: 108434 Result: Down-regulated in Transcription
  misc_feature: MA Experiment 108434 PARAMETER Experiment Name: At_Root_Tips_cDNA_P Parameter: Tissue Value: Root Tips
  misc_feature: MA Experiment ID: 108488 Result: Up-regulated in Transcription
  misc_feature: MA Experiment ID: 108595 Result: Down-regulated in Transcription
  misc_feature: MA Experiment 108595 PARAMETER Experiment Name: At_Ler-pi_Ovule_cDNA_P Parameter: Plant Line Value: null
  misc_feature: MA Experiment ID: 20000072 Result: Down-regulated in Transcription
  misc_feature: MA Experiment 20000072 PARAMETER Experiment Name: At_100uM_ABA_Mutants_cDNA_P Parameter: Plant Line Value: CS8105
  misc_feature: MA Experiment 20000072 PARAMETER Experiment Name: At_100uM_ABA_Mutants_cDNA_P Parameter: Timepoint (hr) Value: 6
  misc_feature: MA Experiment 20000072 PARAMETER Experiment Name: At_100uM_ABA_Mutants_cDNA_P Parameter: Tissue Value: Aerial
  misc_feature: MA Experiment 20000072 PARAMETER Experiment Name: At_100uM_ABA_Mutants_cDNA_P Parameter: Treatment Value: 100uM ABA vs. No Treatment
  misc_feature: MA Experiment ID: 20000439 Result: Down-regulated in Transcription
  misc_feature: MA Experiment 20000439 PARAMETER Experiment Name: At_Roots__P Parameter: Age (day) Value: 14 vs. 21
  misc_feature: MA Experiment 20000439 PARAMETER Experiment Name: At_Roots__P Parameter: Organism Value: A. thaliana
  misc_feature: MA Experiment 20000439 PARAMETER Experiment Name: At_Roots__P Parameter: Tissue Value: Roots vs. Whole Plant
  misc_feature: MA Experiment ID: 20001451 Result: Down-regulated in Transcription
  misc_feature: MA Experiment 20001451 PARAMETER Experiment Name: At_Far-red-induction_P Parameter: Age (day) Value: 7
  misc_feature: MA Experiment 20001451 PARAMETER Experiment Name: At_Far-red-induction_P Parameter: Light Value: Far-red vs. White
  misc_feature: MA Experiment 20001451 PARAMETER Experiment Name: At_Far-red-induction_P Parameter: Organism Value: A. thaliana
  misc_feature: MA Experiment 20001451 PARAMETER Experiment Name: At_Far-red-induction_P Parameter: Plant Line Value: Columbia
  misc_feature: MA Experiment 20001451 PARAMETER Experiment Name: At_Far-red-induction_P Parameter: Timepoint (hr) Value: 24
  misc_feature: MA Experiment 20001451 PARAMETER Experiment Name: At_Far-red-induction_P Parameter: Tissue Value: Whole Plant
  misc_feature: MA Experiment ID: 20001905 Result: Down-regulated in Transcription
  misc_feature: MA Experiment 20001905 PARAMETER Experiment Name: At_Drought_Reproduction_P Parameter: Age (day) Value: 40
  misc_feature: MA Experiment 20001905 PARAMETER Experiment Name: At_Drought_Reproduction_P Parameter: Organism Value: A. thaliana
  misc_feature: MA Experiment 20001905 PARAMETER Experiment Name: At_Drought_Reproduction_P Parameter: Plant Line Value: WS
  misc_feature: MA Experiment 20001905 PARAMETER Experiment Name: At_Drought_Reproduction_P Parameter: Timepoint (day) Value: 10
  misc_feature: MA Experiment 20001905 PARAMETER Experiment Name: At_Drought_Reproduction_P Parameter: Tissue Value: Rosettes
  misc_feature: MA Experiment 20001905 PARAMETER Experiment Name: At_Drought_Reproduction_P Parameter: Treatment Value: Drought vs. No Drought
gagagaagcgacagagtgaggccatgcctgtgtccgtacattccgttatcgccacgaacctagccactacactatcatcgaattaccggaatgtttctcgccgtagaactatctccacctctgtgaattgttcggtggagattacggaggctgatcggtcggtgaaactgaagaacgggaacgattcactggagatatgcagagttctcaacgggatgtggcaaacgagcggaggatgggggaagattgatcgaaacgacgccgttgattcaatgcttcgttacgccgatgctggtctctctactttcgatatggctgatcactatggtcctgctgaagatctttacggtatttttatcaatagagttcgtcgagagcgtccaccggagtacttggagaagattaaaggtttgacaaaatgggtgcctcctccaataaagatgacaagtagctatgttcgtcagaacatcgatatatcgaggaagagaatggatgtggctgctcttgatatgcttcagtttcactggtgggattatgcgaatgacggctatcttgatgcactgaaacatctcacagacttgaaggaagaagggaaaatcaagactgttgctttgactaattttgatacagagagacttcagaaaatcttagagaatggaatccctgtcgttagcaatcaggtgcaacactccatcgtagacatgcgtcctcaacagagaatggctcagctttgcgagcttacaggggtcaaacttataacatatgggacagttatgggtggtctcttgtcagagaagtttcttgataccaatctaacaatcccttttgctggccctcgcttgaatactccatctctccaaaaatacaaaaggatggttgatgcatggggagggtggaatctatttcaaggtttacttcgaacaatgaagaccatatccacaaaacatggagtctctataccaacagtggctgtgagatatgtactagatcagcaaggagttggtggatcaatgattggagtgagactcgggttagcggaacacatacaagacgcaaatgctatattctcattggtattggatgaagaagatgttaatagcatacaagaggttaccaagaaaggtaaagatcttctccaagtgattggtgactgcggagacgaataccgacgtatatgatgtgtagctatgtactctatactgtatacaatatcatcaactcatgtaattacacttttatgtgtagaggaatcatttttacatt

SEQ ID NO: 27409 - protein, 391 aa, Arabidopsis thaliana
  peptide (1)..(391): Ceres Seq. ID no. 12331596
  misc_feature (92)..(370): Homolog of NCBI NO: 40644844 NR Description: side-chain ketoreductase [Streptomyces griseus
  misc_feature (98)..(351): Homolog of NCBI NO: 21399879 NR Description: aldo_ket_red, Aldo/keto reductase family
  misc_feature (140)..(373): Homolog of NCBI NO: 24216672 NR Description: Aldo/keto reductase family protein
  misc_feature (98)..(370): Homolog of NCBI NO: 30262030 NR Description: oxidoreductase, aldo/keto reductase family
  misc_feature (98)..(370): Homolog of NCBI NO: 30020137 NR Description: IolS protein [Bacillus cereus ATCC 14579]
  misc_feature (63)..(389): Homolog of NCBI NO: 40741502 NR Description: hypothetical protein AN8658.2 [Aspergillus
  misc_feature (65)..(388): Homolog of NCBI NO: 13475981 NR Description: hypothetical protein [Mesorhizobium loti]
  misc_feature (63)..(390): Homolog of NCBI NO: 23123814 NR Description: hypothetical protein [Nostoc punctiforme]
  misc_feature (80)..(391): Homolog of NCBI NO: 11762116 NR Description: At2g27680 [Arabidopsis thaliana]
  misc_feature (8)..(391): Homolog of NCBI NO: 18401495 NR Description: expressed protein
EKRQSEAMPVSVHSVIATNLATTLSSNYRNVSRRRTISTSVNCSVEITEADRSVKLKNGNDSLEICRVLNGMWQTSGGWGKIDRNDAVDSMLRYADAGLSTFDMADHYGPAEDLYGIFINRVRRERPPEYLEKIKGLTKWVPPPIKMTSSYVRQNIDISRKRMDVAALDMLQFHWWDYANDGYLDALKHLTDLKEEGKIKTVALTNFDTERLQKILENGIPVVSNQVQHSIVDMRPQQRMAQLCELTGVKLITYGTVMGGLLSEKFLDTNLTIPFAGPRLNTPSLQKYKRMVDAWGGWNLFQGLLRTMKTISTKHGVSIPTVAVRYVLDQQGVGGSMIGVRLGLAEHIQDANAIFSLVLDEEDVNSIQEVTKKGKDLLQVIGDCGDEYRRI

SEQ ID NO: 27410 - protein, 384 aa, Arabidopsis thaliana
  peptide (1)..(384): Ceres Seq. ID no. 12331597
  misc_feature (85)..(363): Homolog of NCBI NO: 40644844 NR Description: side-chain ketoreductase [Streptomyces griseus
  misc_feature (91)..(344): Homolog of NCBI NO: 21399879 NR Description: aldo_ket_red, Aldo/keto reductase family
  misc_feature (133)..(366): Homolog of NCBI NO: 24216672 NR Description: Aldo/keto reductase family protein
  misc_feature (91)..(363): Homolog of NCBI NO: 30262030 NR Description: oxidoreductase, aldo/keto reductase family
  misc_feature (91)..(363): Homolog of NCBI NO: 30020137 NR Description: IolS protein [Bacillus cereus ATCC 14579]
  misc_feature (56)..(382): Homolog of NCBI NO: 40741502 NR Description: hypothetical protein AN8658.2 [Aspergillus
  misc_feature (58)..(381): Homolog of NCBI NO: 13475981 NR Description: hypothetical protein [Mesorhizobium loti]
  misc_feature (56)..(383): Homolog of NCBI NO: 23123814 NR Description: hypothetical protein [Nostoc punctiforme]
  misc_feature (73)..(384): Homolog of NCBI NO: 11762116 NR Description: At2g27680 [Arabidopsis thaliana]
  misc_feature (1)..(384): Homolog of NCBI NO: 18401495 NR Description: expressed protein
MPVSVHSVIATNLATTLSSNYRNVSRRRTISTSVNCSVEITEADRSVKLKNGNDSLEICRVLNGMWQTSGGWGKIDRNDAVDSMLRYADAGLSTFDMADHYGPAEDLYGIFINRVRRERPPEYLEKIKGLTKWVPPPIKMTSSYVRQNIDISRKRMDVAALDMLQFHWWDYANDGYLDALKHLTDLKEEGKIKTVALTNFDTERLQKILENGIPVVSNQVQHSIVDMRPQQRMAQLCELTGVKLITYGTVMGGLLSEKFLDTNLTIPFAGPRLNTPSLQKYKRMVDAWGGWNLFQGLLRTMKTISTKHGVSIPTVAVRYVLDQQGVGGSMIGVRLGLAEHIQDANAIFSLVLDEEDVNSIQEVTKKGKDLLQVIGDCGDEYRRI

SEQ ID NO: 27411 - protein, 320 aa, Arabidopsis thaliana
  peptide (1)..(320): Ceres Seq. ID no. 12331598
  misc_feature (21)..(299): Homolog of NCBI NO: 40644844 NR Description: side-chain ketoreductase [Streptomyces griseus
  misc_feature (27)..(280): Homolog of NCBI NO: 21399879 NR Description: aldo_ket_red, Aldo/keto reductase family
  misc_feature (69)..(302): Homolog of NCBI NO: 24216672 NR Description: Aldo/keto reductase family protein
  misc_feature (27)..(299): Homolog of NCBI NO: 30262030 NR Description: oxidoreductase, aldo/keto reductase family
  misc_feature (27)..(299): Homolog of NCBI NO: 30020137 NR Description: IolS protein [Bacillus cereus ATCC 14579]
  misc_feature (1)..(318): Homolog of NCBI NO: 40741502 NR Description: hypothetical protein AN8658.2 [Aspergillus
  misc_feature (1)..(317): Homolog of NCBI NO: 13475981 NR Description: hypothetical protein [Mesorhizobium loti]
  misc_feature (1)..(319): Homolog of NCBI NO: 23123814 NR Description: hypothetical protein [Nostoc punctiforme]
  misc_feature (9)..(320): Homolog of NCBI NO: 11762116 NR Description: At2g27680 [Arabidopsis thaliana]
  misc_feature (1)..(320): Homolog of NCBI NO: 18401495 NR Description: expressed protein
MWQTSGGWGKIDRNDAVDSMLRYADAGLSTFDMADHYGPAEDLYGIFINRVRRERPPEYLEKIKGLTKWVPPPIKMTSSYVRQNIDISRKRMDVAALDMLQFHWWDYANDGYLDALKHLTDLKEEGKIKTVALTNFDTERLQKILENGIPVVSNQVQHSIVDMRPQQRMAQLCELTGVKLITYGTVMGGLLSEKFLDTNLTIPFAGPRLNTPSLQKYKRMVDAWGGWNLFQGLLRTMKTISTKHGVSIPTVAVRYVLDQQGVGGSMIGVRLGLAEHIQDANAIFSLVLDEEDVNSIQEVTKKGKDLLQVIGDCGDEYRRI

SEQ ID NO: 27412 - DNA, 1189 bp, Arabidopsis thaliana
  misc_feature (1)..(1189): Ceres Seq. ID no. 13489927
  misc_feature: MA Experiment ID: 108434 Result: Down-regulated in Transcription
  misc_feature: MA Experiment 108434 PARAMETER Experiment Name: At_Root_Tips_cDNA_P Parameter: Tissue Value: Root Tips
  misc_feature: MA Experiment ID: 108463 Result: Up-regulated in Transcription
  misc_feature: MA Experiment 108463 PARAMETER Experiment Name: At_Germinating_Seeds_cDNA_P Parameter: Age (day) Value: 3 vs. 0
  misc_feature: MA Experiment 108463 PARAMETER Experiment Name: At_Germinating_Seeds_cDNA_P Parameter: Tissue Value: Germinating Seeds
  misc_feature: MA Experiment ID: 108469 Result: Up-regulated in Transcription
  misc_feature: MA Experiment ID: 108488 Result: Down-regulated in Transcription
  misc_feature: MA Experiment ID: 108501 Result: Down-regulated in Transcription
  misc_feature: MA Experiment 108501 PARAMETER Experiment Name: At_ap2_floral_buds_cDNA_P Parameter: Plant Line Value: ap2 (Ler.)
  misc_feature: MA Experiment 108501 PARAMETER Experiment Name: At_ap2_floral_buds_cDNA_P Parameter: Tissue Value: Closed Flower
  misc_feature: MA Experiment ID: 108574 Result: Up-regulated in Transcription
  misc_feature: MA Experiment 108574 PARAMETER Experiment Name: At_Wounding__cDNA_P Parameter: Timepoint (hr) Value: 1
  misc_feature: MA Experiment 108574 PARAMETER Experiment Name: At_Wounding__cDNA_P Parameter: Tissue Value: Aerial
  misc_feature: MA Experiment 108574 PARAMETER Experiment Name: At_Wounding__cDNA_P Parameter: Treatment Value: Wounding vs. No Wounding
  misc_feature: MA Experiment ID: 108579 Result: Up-regulated in Transcription
  misc_feature: MA Experiment 108579 PARAMETER Experiment Name: At_4deg_Cold_cDNA_P Parameter: Temperature (deg C) Value: 4 vs. 22
  misc_feature: MA Experiment 108579 PARAMETER Experiment Name: At_4deg_Cold_cDNA_P Parameter: Timepoint (hr) Value: 6
  misc_feature: MA Experiment 108579 PARAMETER Experiment Name: At_4deg_Cold_cDNA_P Parameter: Tissue Value: Aerial
  misc_feature: MA Experiment ID: 108585 Result: Up-regulated in Transcription
  misc_feature: MA Experiment 108585 PARAMETER Experiment Name: At_5mM_NaNP_cDNA_P Parameter: Timepoint (hr) Value: 6
  misc_feature: MA Experiment 108585 PARAMETER Experiment Name: At_5mM_NaNP_cDNA_P Parameter: Tissue Value: Aerial
  misc_feature: MA Experiment 108585 PARAMETER Experiment Name: At_5mM_NaNP_cDNA_P Parameter: Treatment Value: null
  misc_feature: MA Experiment ID: 108594 Result: Up-regulated in Transcription
  misc_feature: MA Experiment 108594 PARAMETER Experiment Name: At_Ler-rhl_Root_cDNA_P Parameter: Plant Line Value: null
  misc_feature: MA Experiment ID: 108595 Result: Up-regulated in Transcription
  misc_feature: MA Experiment 108595 PARAMETER Experiment Name: At_Ler-pi_Ovule_cDNA_P Parameter: Plant Line Value: null
  misc_feature: MA Experiment ID: 108667 Result: Up-regulated in Transcription
  misc_feature: MA Experiment 108667 PARAMETER Experiment Name: At_2mM_SA_cDNA_P Parameter: Plant Line Value: WS
  misc_feature: MA Experiment 108667 PARAMETER Experiment Name: At_2mM_SA_cDNA_P Parameter: Timepoint (hr) Value: 1
  misc_feature: MA Experiment 108667 PARAMETER Experiment Name: At_2mM_SA_cDNA_P Parameter: Treatment Value: 2mM SA vs. No Treatment
  misc_feature: MA Experiment ID: 20000069 Result: Up-regulated in Transcription
  misc_feature: MA Experiment 20000069 PARAMETER Experiment Name: At_100uM_ABA_Mutants_cDNA_P Parameter: Plant Line Value: CS23
  misc_feature: MA Experiment 20000069 PARAMETER Experiment Name: At_100uM_ABA_Mutants_cDNA_P Parameter: Timepoint (hr) Value: 6
  misc_feature: MA Experiment 20000069 PARAMETER Experiment Name: At_100uM_ABA_Mutants_cDNA_P Parameter: Tissue Value: Aerial
  misc_feature: MA Experiment 20000069 PARAMETER Experiment Name: At_100uM_ABA_Mutants_cDNA_P Parameter: Treatment Value: 100uM ABA vs. No Treatment
  misc_feature: MA Experiment ID: 20000090 Result: Up-regulated in Transcription
  misc_feature: MA Experiment ID: 20000111 Result: Down-regulated in Transcription
  misc_feature: MA Experiment 20000111 PARAMETER Experiment Name: At_42deg_Heat_cDNA_P Parameter: Temperature (deg C) Value: 42 vs. 22
  misc_feature: MA Experiment 20000111 PARAMETER Experiment Name: At_42deg_Heat_cDNA_P Parameter: Timepoint (hr) Value: 6
  misc_feature: MA Experiment 20000111 PARAMETER Experiment Name: At_42deg_Heat_cDNA_P Parameter: Tissue Value: Aerial
  misc_feature: MA Experiment ID: 20000144 Result: Down-regulated in Transcription
  misc_feature: MA Experiment 20000144 PARAMETER Experiment Name: At_42deg_Heat_cDNA_P Parameter: Temperature (deg C) Value: 42 vs. 22
  misc_feature: MA Experiment 20000144 PARAMETER Experiment Name: At_42deg_Heat_cDNA_P Parameter: Timepoint (hr) Value: 1
  misc_feature: MA Experiment 20000144 PARAMETER Experiment Name: At_42deg_Heat_cDNA_P Parameter: Tissue Value: Aerial
  misc_feature: MA Experiment ID: 20000224 Result: Up-regulated in Transcription
acaatcccaccattaaaaaagaagaacccaagatcgactcttacttcgaatctctctcaactttcttcctcagcttacgggaacttccacacatatacatccacaagaacccatatcgaagattcatcctacatatatttacatggatcagtactcatcctctttggtcgatacttcattagatctcactattggcgttactcgtatgcgagttgaagaagatccaccgacaagtgctttggtggaagaattaaaccgagttagtgctgagaacaagaagctctcggagatgctaaccttgatgtgtgacaactacaacgtcttgaggaagcaacttatggaatatgttaacaagagcaacataaccgagagggatcaaatcagccctcccaagaaacgcaaatccccggcgagagaggacgcattcagctgcgcggttattggcggagtgtcggagagtagctcaacggatcaagatgagtatttgtgtaagaagcagagagaagagactgtcgtgaaggagaaagtctcaagggtctattacaagaccgaagcttctgacactaccctcgttgtgaaagatgggtatcaatggaggaaatatggacagaaagtgactagagacaatccatctccaagagcttacttcaaatgtgcttgtgctccaagctgttctgtcaaaaagaaggttcagagaagtgtggaggatcagtccgtgttagttgcaacttatgagggtgaacacaaccatccaatgccatcgcagatcgattcaaacaatggcttaaaccgccacatctctcatggtggttcagcttcaacacccgttgcagcaaacagaagaagtagcttgactgtgccggtgactaccgtagatatgattgaatcgaagaaagtgacgagcccaacgtcaagaatcgattttccccaagttcagaaacttttggtggagcaaatggcttcttccttaaccaaagatcctaactttacagcagctttagcagcagctgttaccggaaaattgtatcaacagaatcataccgagaaatagtttagcttcaaattccgttagagtttttagatttgaatttgtcatgagtaagagaaggagagtagattataatccattgtgatactgaaaatgtaacatgtaatcgtttttcatacaatctccaatacattcggcttt

SEQ ID NO: 27413 - protein, 302 aa, Arabidopsis thaliana
  peptide (1)..(302): Ceres Seq. ID no. 13489928
  misc_feature (145)..(205): Pfam Name: WRKY DNA -binding domain Pfam Description: WRKY DNA -binding domain
  misc_feature (214)..(300): Homolog of NCBI NO: 18417877 NR Description: WRKY family transcription factor [Arabidopsis
  misc_feature (21)..(226): Homolog of NCBI NO: 18417877 NR Description: WRKY family transcription factor [Arabidopsis
  misc_feature (262)..(301): Homolog of NCBI NO: 40645752 NR Description: WRKY transcription factor 1 [Spinacia oleracea]
  misc_feature (30)..(257): Homolog of NCBI NO: 40645752 NR Description: WRKY transcription factor 1 [Spinacia oleracea]
  misc_feature (249)..(299): Homolog of NCBI NO: 6472585 NR Description: WIZZ [Nicotiana tabacum]
  misc_feature (18)..(252): Homolog of NCBI NO: 6472585 NR Description: WIZZ [Nicotiana tabacum]
  misc_feature (21)..(298): Homolog of NCBI NO: 11493822 NR Description: transcription factor WRKY4 [Petroselinum crispum]
  misc_feature (1)..(302): Homolog of NCBI NO: 40060529 NR Description: putative WRKY4 transcription factor [Vitis
  misc_feature (1)..(302): Homolog of NCBI NO: 21594015 NR Description: transcription factor, putative [Arabidopsis
  misc_feature (1)..(302): Homolog of NCBI NO: 15220859 NR Description: WRKY family transcription factor [Arabidopsis
MDQYSSSLVDTSLDLTIGVTRMRVEEDPPTSALVEELNRVSAENKKLSEMLTLMCDNYNVLRKQLMEYVNKSNITERDQISPPKKRKSPAREDAFSCAVIGGVSESSSTDQDEYLCKKQREETVVKEKVSRVYYKTEASDTTLVVKDGYQWRKYGQKVTRDNPSPRAYFKCACAPSCSVKKKVQRSVEDQSVLVATYEGEHNHPMPSQIDSNNGLNRHISHGGSASTPVAANRRSSLTVPVTTVDMIESKKVTSPTSRIDFPQVQKLLVEQMASSLTKDPNFTAALAAAVTGKLYQQNHTEK

SEQ ID NO: 27414 - protein, 281 aa, Arabidopsis thaliana
  peptide (1)..(281): Ceres Seq. ID no. 13489929
  misc_feature (124)..(184): Pfam Name: WRKY DNA -binding domain Pfam Description: WRKY DNA -binding domain
  misc_feature (193)..(279): Homolog of NCBI NO: 18417877 NR Description: WRKY family transcription factor [Arabidopsis
  misc_feature (1)..(205): Homolog of NCBI NO: 18417877 NR Description: WRKY family transcription factor [Arabidopsis
  misc_feature (241)..(280): Homolog of NCBI NO: 40645752 NR Description: WRKY transcription factor 1 [Spinacia oleracea]
  misc_feature (9)..(236): Homolog of NCBI NO: 40645752 NR Description: WRKY transcription factor 1 [Spinacia oleracea]
  misc_feature (228)..(278): Homolog of NCBI NO: 6472585 NR Description: WIZZ [Nicotiana tabacum]
  misc_feature (1)..(231): Homolog of NCBI NO: 6472585 NR Description: WIZZ [Nicotiana tabacum]
  misc_feature (1)..(277): Homolog of NCBI NO: 11493822 NR Description: transcription factor WRKY4 [Petroselinum crispum]
  misc_feature (1)..(281): Homolog of NCBI NO: 40060529 NR Description: putative WRKY4 transcription factor [Vitis
  misc_feature (1)..(281): Homolog of NCBI NO: 21594015 NR Description: transcription factor, putative [Arabidopsis
  misc_feature (1)..(281): Homolog of NCBI NO: 15220859 NR Description: WRKY family transcription factor [Arabidopsis
MRVEEDPPTSALVEELNRVSAENKKLSEMLTLMCDNYNVLRKQLMEYVNKSNITERDQISPPKKRKSPAREDAFSCAVIGGVSESSSTDQDEYLCKKQREETVVKEKVSRVYYKTEASDTTLVVKDGYQWRKYGQKVTRDNPSPRAYFKCACAPSCSVKKKVQRSVEDQSVLVATYEGEHNHPMPSQIDSNNGLNRHISHGGSASTPVAANRRSSLTVPVTTVDMIESKKVTSPTSRIDFPQVQKLLVEQMASSLTKDPNFTAALAAAVTGKLYQQNHTEK

SEQ ID NO: 27415 - protein, 253 aa, Arabidopsis thaliana
  peptide (1)..(253): Ceres Seq. ID no. 13489930
  misc_feature (96)..(156): Pfam Name: WRKY DNA -binding domain Pfam Description: WRKY DNA -binding domain
  misc_feature (165)..(251): Homolog of NCBI NO: 18417877 NR Description: WRKY family transcription factor [Arabidopsis
  misc_feature (1)..(177): Homolog of NCBI NO: 18417877 NR Description: WRKY family transcription factor [Arabidopsis
  misc_feature (213)..(252): Homolog of NCBI NO: 40645752 NR Description: WRKY transcription factor 1 [Spinacia oleracea]
  misc_feature (1)..(208): Homolog of NCBI NO: 40645752 NR Description: WRKY transcription factor 1 [Spinacia oleracea]
  misc_feature (200)..(250): Homolog of NCBI NO: 6472585 NR Description: WIZZ [Nicotiana tabacum]
  misc_feature (1)..(203): Homolog of NCBI NO: 6472585 NR Description: WIZZ [Nicotiana tabacum]
  misc_feature (1)..(249): Homolog of NCBI NO: 11493822 NR Description: transcription factor WRKY4 [Petroselinum crispum]
  misc_feature (1)..(253): Homolog of NCBI NO: 40060529 NR Description: putative WRKY4 transcription factor [Vitis
  misc_feature (1)..(253): Homolog of NCBI NO: 21594015 NR Description: transcription factor, putative [Arabidopsis
  misc_feature (1)..(253): Homolog of NCBI NO: 15220859 NR Description: WRKY family transcription factor [Arabidopsis
MLTLMCDNYNVLRKQLMEYVNKSNITERDQISPPKKRKSPAREDAFSCAVIGGVSESSSTDQDEYLCKKQREETVVKEKVSRVYYKTEASDTTLVVKDGYQWRKYGQKVTRDNPSPRAYFKCACAPSCSVKKKVQRSVEDQSVLVATYEGEHNHPMPSQIDSNNGLNRHISHGGSASTPVAANRRSSLTVPVTTVDMIESKKVTSPTSRIDFPQVQKLLVEQMASSLTKDPNFTAALAAAVTGKLYQQNHTEK

SEQ ID NO: 27416 - DNA, 996 bp, Arabidopsis thaliana
  misc_feature (1)..(996): Ceres Seq. ID no. 12421702
  misc_feature: MA Experiment ID: 108434 Result: Down-regulated in Transcription
  misc_feature: MA Experiment 108434 PARAMETER Experiment Name: At_Root_Tips_cDNA_P Parameter: Tissue Value: Root Tips
  misc_feature: MA Experiment ID: 108435 Result: Down-regulated in Transcription
  misc_feature: MA Experiment 108435 PARAMETER Experiment Name: At_stm_Mutants_cDNA_P Parameter: Plant Line Value: wt Landsburg vs stm
  misc_feature: MA Experiment 108435 PARAMETER Experiment Name: At_stm_Mutants_cDNA_P Parameter: Tissue Value: Shoot Apical Meristem Region
  misc_feature: MA Experiment ID: 108462 Result: Up-regulated in Transcription
  misc_feature: MA Experiment 108462 PARAMETER Experiment Name: At_Germinating_Seeds_cDNA_P Parameter: Age (day) Value: 2 vs. 0
  misc_feature: MA Experiment 108462 PARAMETER Experiment Name: At_Germinating_Seeds_cDNA_P Parameter: Tissue Value: Germinating Seeds
  misc_feature: MA Experiment ID: 108463 Result: Up-regulated in Transcription
  misc_feature: MA Experiment 108463 PARAMETER Experiment Name: At_Germinating_Seeds_cDNA_P Parameter: Age (day) Value: 3 vs. 0
  misc_feature: MA Experiment 108463 PARAMETER Experiment Name: At_Germinating_Seeds_cDNA_P Parameter: Tissue Value: Germinating Seeds
  misc_feature: MA Experiment ID: 108488 Result: Up-regulated in Transcription
  misc_feature: MA Experiment ID: 108489 Result: Down-regulated in Transcription
  misc_feature: MA Experiment ID: 108573 Result: Up-regulated in Transcription
  misc_feature: MA Experiment 108573 PARAMETER Experiment Name: At_Drought_cDNA_P Parameter: Timepoint (hr) Value: 6
  misc_feature: MA Experiment 108573 PARAMETER Experiment Name: At_Drought_cDNA_P Parameter: Tissue Value: Aerial
  misc_feature: MA Experiment 108573 PARAMETER Experiment Name: At_Drought_cDNA_P Parameter: Treatment Value: Drought vs. No Drought
  misc_feature: MA Experiment ID: 108577 Result: Up-regulated in Transcription
  misc_feature: MA Experiment 108577 PARAMETER Experiment Name: At_42deg_Heat_cDNA_P Parameter: Temperature (deg C) Value: 42 vs. 22
  misc_feature: MA Experiment 108577 PARAMETER Experiment Name: At_42deg_Heat_cDNA_P Parameter: Timepoint (hr) Value: 6
  misc_feature: MA Experiment 108577 PARAMETER Experiment Name: At_42deg_Heat_cDNA_P Parameter: Tissue Value: Aerial
  misc_feature: MA Experiment ID: 108579 Result: Up-regulated in Transcription
  misc_feature: MA Experiment 108579 PARAMETER Experiment Name: At_4deg_Cold_cDNA_P Parameter: Temperature (deg C) Value: 4 vs. 22
  misc_feature: MA Experiment 108579 PARAMETER Experiment Name: At_4deg_Cold_cDNA_P Parameter: Timepoint (hr) Value: 6
  misc_feature: MA Experiment 108579 PARAMETER Experiment Name: At_4deg_Cold_cDNA_P Parameter: Tissue Value: Aerial
  misc_feature: MA Experiment ID: 108609 Result: Down-regulated in Transcription
  misc_feature: MA Experiment 108609 PARAMETER Experiment Name: At_100uM_ABA_cDNA_P Parameter: Timepoint (hr) Value: 24
  misc_feature: MA Experiment 108609 PARAMETER Experiment Name: At_100uM_ABA_cDNA_P Parameter: Tissue Value: Aerial
  misc_feature: MA Experiment 108609 PARAMETER Experiment Name: At_100uM_ABA_cDNA_P Parameter: Treatment Value: 100uM ABA vs. No Treatment
  misc_feature: MA Experiment ID: 20000069 Result: Down-regulated in Transcription
  misc_feature: MA Experiment 20000069 PARAMETER Experiment Name: At_100uM_ABA_Mutants_cDNA_P Parameter: Plant Line Value: CS23
  misc_feature: MA Experiment 20000069 PARAMETER Experiment Name: At_100uM_ABA_Mutants_cDNA_P Parameter: Timepoint (hr) Value: 6
  misc_feature: MA Experiment 20000069 PARAMETER Experiment Name: At_100uM_ABA_Mutants_cDNA_P Parameter: Tissue Value: Aerial
  misc_feature: MA Experiment 20000069 PARAMETER Experiment Name: At_100uM_ABA_Mutants_cDNA_P Parameter: Treatment Value: 100uM ABA vs. No Treatment
  misc_feature: MA Experiment ID: 20000070 Result: Down-regulated in Transcription
  misc_feature: MA Experiment 20000070 PARAMETER Experiment Name: At_100uM_ABA_Mutants_cDNA_P Parameter: Plant Line Value: CS24
  misc_feature: MA Experiment 20000070 PARAMETER Experiment Name: At_100uM_ABA_Mutants_cDNA_P Parameter: Timepoint (hr) Value: 6
  misc_feature: MA Experiment 20000070 PARAMETER Experiment Name: At_100uM_ABA_Mutants_cDNA_P Parameter: Tissue Value: Aerial
  misc_feature: MA Experiment 20000070 PARAMETER Experiment Name: At_100uM_ABA_Mutants_cDNA_P Parameter: Treatment Value: 100uM ABA vs. No Treatment
  misc_feature: MA Experiment ID: 20000071 Result: Down-regulated in Transcription
  misc_feature: MA Experiment 20000071 PARAMETER Experiment Name: At_100uM_ABA_Mutants_cDNA_P Parameter: Plant Line Value: CS8104
  misc_feature: MA Experiment 20000071 PARAMETER Experiment Name: At_100uM_ABA_Mutants_cDNA_P Parameter: Timepoint (hr) Value: 6
  misc_feature: MA Experiment 20000071 PARAMETER Experiment Name: At_100uM_ABA_Mutants_cDNA_P Parameter: Tissue Value: Aerial
  misc_feature: MA Experiment 20000071 PARAMETER Experiment Name: At_100uM_ABA_Mutants_cDNA_P Parameter: Treatment Value: 100uM ABA vs. No Treatment
  misc_feature: MA Experiment ID: 20000086 Result: Down-regulated in Transcription
  misc_feature: MA Experiment 20000086 PARAMETER Experiment Name: At_100uM_ABA_Mutants_cDNA_P Parameter: Plant Line Value: CS22
  misc_feature: MA Experiment 20000086 PARAMETER Experiment Name: At_100uM_ABA_Mutants_cDNA_P Parameter: Timepoint (hr) Value: 6
  misc_feature: MA Experiment 20000086 PARAMETER Experiment Name: At_100uM_ABA_Mutants_cDNA_P Parameter: Tissue Value: Aerial
  misc_feature: MA Experiment 20000086 PARAMETER Experiment Name: At_100uM_ABA_Mutants_cDNA_P Parameter: Treatment Value: 100uM ABA vs. No Treatment
  misc_feature: MA Experiment ID: 20000087 Result: Down-regulated in Transcription
  misc_feature: MA Experiment 20000087 PARAMETER Experiment Name: At_100uM_ABA_Mutants_cDNA_P Parameter: Plant Line Value: WS
  misc_feature: MA Experiment 20000087 PARAMETER Experiment Name: At_100uM_ABA_Mutants_cDNA_P Parameter: Timepoint (hr) Value: 6
  misc_feature: MA Experiment 20000087 PARAMETER Experiment Name: At_100uM_ABA_Mutants_cDNA_P Parameter: Tissue Value: Aerial
  misc_feature: MA Experiment 20000087 PARAMETER Experiment Name: At_100uM_ABA_Mutants_cDNA_P Parameter: Treatment Value: 100uM ABA vs. No Treatment
  misc_feature: MA Experiment ID: 20000089 Result: Down-regulated in Transcription
  misc_feature: MA Experiment ID: 20000090 Result: Down-regulated in Transcription
  misc_feature: MA Experiment ID: 20000180 Result: Up-regulated in Transcription
  misc_feature: MA Experiment 20000180 PARAMETER Experiment Name: At_Germinating_Seeds_P Parameter: Age (hr) Value: 24 vs. 0
  misc_feature: MA Experiment 20000180 PARAMETER Experiment Name: At_Germinating_Seeds_P Parameter: Tissue Value: Germinating Seeds
  misc_feature: MA Experiment ID: 20000185 Result: Down-regulated in Transcription
  misc_feature: MA Experiment 20000185 PARAMETER Experiment Name: At_Roots__P Parameter: Age (day) Value: 7 vs. 21
  misc_feature: MA Experiment 20000185 PARAMETER Experiment Name: At_Roots__P Parameter: Organism Value: A. thaliana
  misc_feature: MA Experiment 20000185 PARAMETER Experiment Name: At_Roots__P Parameter: Tissue Value: Roots vs. Whole Plant
  misc_feature: MA Experiment ID: 20000213 Result: Up-regulated in Transcription
  misc_feature: MA Experiment 20000213 PARAMETER Experiment Name: At_4deg_Cold_P Parameter: Timepoint (hr) Value: 2
  misc_feature: MA Experiment ID: 20000234 Result: Up-regulated in Transcription
  misc_feature: MA Experiment 20000234 PARAMETER Experiment Name: At_Siliques_P Parameter: Age (day) Value: 21
  misc_feature: MA Experiment 20000234 PARAMETER Experiment Name: At_Siliques_P Parameter: Organism Value: A. thaliana
  misc_feature: MA Experiment 20000234 PARAMETER Experiment Name: At_Siliques_P Parameter: Plant Line Value: WS
  misc_feature: MA Experiment 20000234 PARAMETER Experiment Name: At_Siliques_P Parameter: Tissue Value: Less Than 5mm Siliques vs. Whole Plant
  misc_feature: MA Experiment ID: 20000264 Result: Up-regulated in Transcription
  misc_feature: MA Experiment 20000264 PARAMETER Experiment Name: At_Open_Flower_P Parameter: Age (day) Value: 21
  misc_feature: MA Experiment 20000264 PARAMETER Experiment Name: At_Open_Flower_P Parameter: Plant Line Value: WS
  misc_feature: MA Experiment 20000264 PARAMETER Experiment Name: At_Open_Flower_P Parameter: Tissue Value: Open Flower vs. Whole Plant
  misc_feature: MA Experiment ID: 20000265 Result: Up-regulated in Transcription
  misc_feature: MA Experiment 20000265 PARAMETER Experiment Name: At_Open_Flower_P Parameter: Age (day) Value: 21
  misc_feature: MA Experiment 20000265 PARAMETER Experiment Name: At_Open_Flower_P Parameter: Plant Line Value: WS
  misc_feature: MA Experiment 20000265 PARAMETER Experiment Name: At_Open_Flower_P Parameter: Tissue Value: Closed Flower vs. Whole Plant
  misc_feature: MA Experiment ID: 20000286 Result: Up-regulated in Transcription
  misc_feature: MA Experiment 20000286 PARAMETER Experiment Name: At_Open_Flower_P Parameter: Age (day) Value: 21
  misc_feature: MA Experiment 20000286 PARAMETER Experiment Name: At_Open_Flower_P Parameter: Plant Line Value: WS
  misc_feature: MA Experiment 20000286 PARAMETER Experiment Name: At_Open_Flower_P Parameter: Tissue Value: Half Open vs. Whole Plant
  misc_feature: MA Experiment ID: 20000437 Result: Down-regulated in Transcription
  misc_feature: MA Experiment 20000437 PARAMETER Experiment Name: At_Drought_P Parameter: Age (day) Value: 8
  misc_feature: MA Experiment 20000437 PARAMETER Experiment Name: At_Drought_P Parameter: Organism Value: A. thaliana
  misc_feature: MA Experiment 20000437 PARAMETER Experiment Name: At_Drought_P Parameter: Plant Line Value: WS
  misc_feature: MA Experiment 20000437 PARAMETER Experiment Name: At_Drought_P Parameter: Timepoint (hr) Value: 24
  misc_feature: MA Experiment 20000437 PARAMETER Experiment Name: At_Drought_P Parameter: Tissue Value: Whole Plant
  misc_feature: MA Experiment 20000437 PARAMETER Experiment Name: At_Drought_P Parameter: Treatment Value: Drought vs. No Drought
  misc_feature: MA Experiment ID: 20000438 Result: Down-regulated in Transcription
  misc_feature: MA Experiment 20000438 PARAMETER Experiment Name: At_Shoots__P Parameter: Age (day) Value: 14
  misc_feature: MA Experiment 20000438 PARAMETER Experiment Name: At_Shoots__P Parameter: Tissue Value: Shoots vs. Whole Plant
  misc_feature: MA Experiment ID: 20000439 Result: Down-regulated in Transcription
  misc_feature: MA Experiment 20000439 PARAMETER Experiment Name: At_Roots__P Parameter: Age (day) Value: 14 vs. 21
  misc_feature: MA Experiment 20000439 PARAMETER Experiment Name: At_Roots__P Parameter: Organism Value: A. thaliana
  misc_feature: MA Experiment 20000439 PARAMETER Experiment Name: At_Roots__P Parameter: Tissue Value: Roots vs. Whole Plant
  misc_feature: MA Experiment ID: 20000453 Result: Down-regulated in Transcription
  misc_feature: MA Experiment 20000453 PARAMETER Experiment Name: At_100uM_ABA_P Parameter: Age (day) Value: 15
  misc_feature: MA Experiment 20000453 PARAMETER Experiment Name: At_100uM_ABA_P Parameter: Organism Value: A. thaliana
  misc_feature: MA Experiment 20000453 PARAMETER Experiment Name: At_100uM_ABA_P Parameter: Plant Line Value: WS
  misc_feature: MA Experiment 20000453 PARAMETER Experiment Name: At_100uM_ABA_P Parameter: Timepoint (hr) Value: 24
  misc_feature: MA Experiment 20000453 PARAMETER Experiment Name: At_100uM_ABA_P Parameter: Tissue Value: Aerial
  misc_feature: MA Experiment 20000453 PARAMETER Experiment Name: At_100uM_ABA_P Parameter: Treatment Value: 100uM ABA vs. No Treatment
  misc_feature: MA Experiment ID: 20000455 Result: Down-regulated in Transcription
  misc_feature: MA Experiment 20000455 PARAMETER Experiment Name: At_100uM_ABA_P Parameter: Age (day) Value: 16
  misc_feature: MA Experiment 20000455 PARAMETER Experiment Name: At_100uM_ABA_P Parameter: Organism Value: A. thaliana
  misc_feature: MA Experiment 20000455 PARAMETER Experiment Name: At_100uM_ABA_P Parameter: Plant Line Value: WS
  misc_feature: MA Experiment 20000455 PARAMETER Experiment Name: At_100uM_ABA_P Parameter: Timepoint (hr) Value: 48
  misc_feature: MA Experiment 20000455 PARAMETER Experiment Name: At_100uM_ABA_P Parameter: Tissue Value: Aerial
  misc_feature: MA Experiment 20000455 PARAMETER Experiment Name: At_100uM_ABA_P Parameter: Treatment Value: 100uM ABA vs. No Treatment
  misc_feature: MA Experiment ID: 20000495 Result: Down-regulated in Transcription
  misc_feature: MA Experiment 20000495 PARAMETER Experiment Name: At_Guard_Cells_P Parameter: Harvest Date Value: 8/2/2002
  misc_feature: MA Experiment 20000495 PARAMETER Experiment Name: At_Guard_Cells_P Parameter: Organism Value: A. thaliana
  misc_feature: MA Experiment 20000495 PARAMETER Experiment Name: At_Guard_Cells_P Parameter: Tissue Value: Guard Cells vs. Leaves
  misc_feature: MA Experiment ID: 20000496 Result: Down-regulated in Transcription
  misc_feature: MA Experiment 20000496 PARAMETER Experiment Name: At_Guard_Cells_P Parameter: Harvest Date Value: 7/19/2002
  misc_feature: MA Experiment 20000496 PARAMETER Experiment Name: At_Guard_Cells_P Parameter: Organism Value: Canola
  misc_feature: MA Experiment 20000496 PARAMETER Experiment Name: At_Guard_Cells_P Parameter: Tissue Value: Guard Cells vs. Leaves
  misc_feature: MA Experiment ID: 20000794 Result: Up-regulated in Transcription
  misc_feature: MA Experiment 20000794 PARAMETER Experiment Name: At_Petals_P Parameter: Age (day) Value: 23-25 days
  misc_feature: MA Experiment 20000794 PARAMETER Experiment Name: At_Petals_P Parameter: Plant Line Value: WS
  misc_feature: MA Experiment 20000794 PARAMETER Experiment Name: At_Petals_P Parameter: Tissue Value: Petals vs. Whole plant
  misc_feature: MA Experiment ID: 20001248 Result: Down-regulated in Transcription
  misc_feature: MA Experiment 20001248 PARAMETER Experiment Name: At_Far-red-induction_P Parameter: Age (day) Value: 7
  misc_feature: MA Experiment 20001248 PARAMETER Experiment Name: At_Far-red-induction_P Parameter: Light Value: Far-red vs. White
  misc_feature: MA Experiment 20001248 PARAMETER Experiment Name: At_Far-red-induction_P Parameter: Organism Value: A. thaliana
  misc_feature: MA Experiment 20001248 PARAMETER Experiment Name: At_Far-red-induction_P Parameter: Plant Line Value: Columbia
  misc_feature: MA Experiment 20001248 PARAMETER Experiment Name: At_Far-red-induction_P Parameter: Timepoint (hr) Value: 4
  misc_feature: MA Experiment 20001248 PARAMETER Experiment Name: At_Far-red-induction_P Parameter: Tissue Value: Whole Plant
  misc_feature: MA Experiment ID: 20001450 Result: Down-regulated in Transcription
  misc_feature: MA Experiment 20001450 PARAMETER Experiment Name: At_Far-red-induction_P Parameter: Age (day) Value: 7
  misc_feature: MA Experiment 20001450 PARAMETER Experiment Name: At_Far-red-induction_P Parameter: Light Value: Far-red vs. White
  misc_feature: MA Experiment 20001450 PARAMETER Experiment Name: At_Far-red-induction_P Parameter: Organism Value: A. thaliana
  misc_feature: MA Experiment 20001450 PARAMETER Experiment Name: At_Far-red-induction_P Parameter: Plant Line Value: Columbia
  misc_feature: MA Experiment 20001450 PARAMETER Experiment Name: At_Far-red-induction_P Parameter: Timepoint (hr) Value: 8
  misc_feature: MA Experiment 20001450 PARAMETER Experiment Name: At_Far-red-induction_P Parameter: Tissue Value: Whole Plant
  misc_feature: MA Experiment ID: 20001451 Result: Down-regulated in Transcription
  misc_feature: MA Experiment 20001451 PARAMETER Experiment Name: At_Far-red-induction_P Parameter: Age (day) Value: 7
  misc_feature: MA Experiment 20001451 PARAMETER Experiment Name: At_Far-red-induction_P Parameter: Light Value: Far-red vs. White
  misc_feature: MA Experiment 20001451 PARAMETER Experiment Name: At_Far-red-induction_P Parameter: Organism Value: A. thaliana
  misc_feature: MA Experiment 20001451 PARAMETER Experiment Name: At_Far-red-induction_P Parameter: Plant Line Value: Columbia
  misc_feature: MA Experiment 20001451 PARAMETER Experiment Name: At_Far-red-induction_P Parameter: Timepoint (hr) Value: 24
  misc_feature: MA Experiment 20001451 PARAMETER Experiment Name: At_Far-red-induction_P Parameter: Tissue Value: Whole Plant
  misc_feature: MA Experiment ID: 20001503 Result: Up-regulated in Transcription
  misc_feature: MA Experiment 20001503 PARAMETER Experiment Name: At_Far-red-enriched_P Parameter: Age (day) Value: 7
  misc_feature: MA Experiment 20001503 PARAMETER Experiment Name: At_Far-red-enriched_P Parameter: Light Value: Far-red enriched vs. White
  misc_feature: MA Experiment 20001503 PARAMETER Experiment Name: At_Far-red-enriched_P Parameter: Organism Value: A. thaliana
  misc_feature: MA Experiment 20001503 PARAMETER Experiment Name: At_Far-red-enriched_P Parameter: Plant Line Value: Columbia
  misc_feature: MA Experiment 20001503 PARAMETER Experiment Name: At_Far-red-enriched_P Parameter: Timepoint (day) Value: 3
  misc_feature: MA Experiment 20001503 PARAMETER Experiment Name: At_Far-red-enriched_P Parameter: Tissue Value: Whole Plant
  misc_feature: MA Experiment ID: 20001504 Result: Up-regulated in Transcription
  misc_feature: MA Experiment 20001504 PARAMETER Experiment Name: At_Far-red-enriched_P Parameter: Age (day) Value: 10
  misc_feature: MA Experiment 20001504 PARAMETER Experiment Name: At_Far-red-enriched_P Parameter: Light Value: Far-red enriched vs. White
  misc_feature: MA Experiment 20001504 PARAMETER Experiment Name: At_Far-red-enriched_P Parameter: Organism Value: A. thaliana
  misc_feature: MA Experiment 20001504 PARAMETER Experiment Name: At_Far-red-enriched_P Parameter: Plant Line Value: Columbia
  misc_feature: MA Experiment 20001504 PARAMETER Experiment Name: At_Far-red-enriched_P Parameter: Timepoint (day) Value: 6
  misc_feature: MA Experiment 20001504 PARAMETER Experiment Name: At_Far-red-enriched_P Parameter: Tissue Value: Whole Plant
  misc_feature: MA Experiment ID: 20001555 Result: Down-regulated in Transcription
  misc_feature: MA Experiment 20001555 PARAMETER Experiment Name: At_Drought_Soil_Dry_P Parameter: Age (day) Value: 24
  misc_feature: MA Experiment 20001555 PARAMETER Experiment Name: At_Drought_Soil_Dry_P Parameter: Organism Value: A. thaliana
  misc_feature: MA Experiment 20001555 PARAMETER Experiment Name: At_Drought_Soil_Dry_P Parameter: Plant Line Value: WS
  misc_feature: MA Experiment 20001555 PARAMETER Experiment Name: At_Drought_Soil_Dry_P Parameter: Post Timepoint (hr) Value: None
  misc_feature: MA Experiment 20001555 PARAMETER Experiment Name: At_Drought_Soil_Dry_P Parameter: Post-Treatment Value: None
  misc_feature: MA Experiment 20001555 PARAMETER Experiment Name: At_Drought_Soil_Dry_P Parameter: Timepoint (day) Value: 10
  misc_feature: MA Experiment 20001555 PARAMETER Experiment Name: At_Drought_Soil_Dry_P Parameter: Treatment Value: Drought vs. No Drought
  misc_feature: MA Experiment ID: 20001559 Result: Down-regulated in Transcription
  misc_feature: MA Experiment 20001559 PARAMETER Experiment Name: At_Drought_Soil_Dry_P Parameter: Age (day) Value: 28
  misc_feature: MA Experiment 20001559 PARAMETER Experiment Name: At_Drought_Soil_Dry_P Parameter: Organism Value: A. thaliana
  misc_feature: MA Experiment 20001559 PARAMETER Experiment Name: At_Drought_Soil_Dry_P Parameter: Plant Line Value: WS
  misc_feature: MA Experiment 20001559 PARAMETER Experiment Name: At_Drought_Soil_Dry_P Parameter: Post Timepoint (hr) Value: 29
  misc_feature: MA Experiment 20001559 PARAMETER Experiment Name: At_Drought_Soil_Dry_P Parameter: Post-Treatment Value: Re-Water vs. No Drought
  misc_feature: MA Experiment 20001559 PARAMETER Experiment Name: At_Drought_Soil_Dry_P Parameter: Timepoint (day) Value: 14
  misc_feature: MA Experiment 20001559 PARAMETER Experiment Name: At_Drought_Soil_Dry_P Parameter: Treatment Value: Drought vs. No Drought
  misc_feature: MA Experiment ID: 20001905 Result: Down-regulated in Transcription
  misc_feature: MA Experiment 20001905 PARAMETER Experiment Name: At_Drought_Reproduction_P Parameter: Age (day) Value: 40
  misc_feature: MA Experiment 20001905 PARAMETER Experiment Name: At_Drought_Reproduction_P Parameter: Organism Value: A. thaliana
  misc_feature: MA Experiment 20001905 PARAMETER Experiment Name: At_Drought_Reproduction_P Parameter: Plant Line Value: WS
  misc_feature: MA Experiment 20001905 PARAMETER Experiment Name: At_Drought_Reproduction_P Parameter: Timepoint (day) Value: 10
  misc_feature: MA Experiment 20001905 PARAMETER Experiment Name: At_Drought_Reproduction_P Parameter: Tissue Value: Rosettes
  misc_feature: MA Experiment 20001905 PARAMETER Experiment Name: At_Drought_Reproduction_P Parameter: Treatment Value: Drought vs. No Drought
aaaaaaaactatatgttataacattggaatcatcagtctctaagcagtatcacaccaactcaatatggctaccaccactgcagcagcagcctcaggtatttttgggatccggattcaagatcctagacctggaaccggtagggtccaagcccggttcgggttcagtttcggaaaaaagaaaccggctccaccgccaaagaaatcaaggcaggtccaagacgatggagacagactagtttggttccccggcgcaaacccgccggaatggttggacggatcgatgatcggagaccgtggatttgatccgtttggtttaggtaaaaccggctgagtatcttcagtacgatttcgatggacttgaccaaaaccttgccaagaacgtggcgggtgacatcatcgggatcatccaagaatcttcggagatcaaaccgacgccgtttcagccgtacactgaagtctttgggatccaacggttcagagaatgtgagctgatccatggaaggtgggccatgcttggcactctaggcgccatcgccgtagaggctcttacaggaattgcatggcaagacgccggaaaggtggaattggtggaaggatcatcgtatttgggacaaccattgccgttctcgttgacgacgttgatatggatagaggtgctagtggtcggatacattgagttccaacgtaactctgaactggatccagagaaacggatttacccgggtgggtattttgacccgttgggactcgcggctgatccagagaagttggatactttgaagctggctgagataaagcactctcgtctcgctatggtcgcatttctcatctttgctcttcaggcggcctttaccggcaaaggccctgtcagcttccttgccacctttaacaattagttaatgaacctttctatctttattttatcaaaataaaattatacttcaaaaactgtataatgcatgttacgctatacttataaagaagtcttttattttt

SEQ ID NO: 27417 - protein, 128 aa, Arabidopsis thaliana
  peptide (1)..(128): Ceres Seq. ID no. 12421703
  misc_feature (1)..(113): Pfam Name: Chlorophyll A-B binding protein Pfam Description: Chlorophyll A-B binding protein
  misc_feature (1)..(125): Homolog of NCBI NO: 15081739 NR Description: AT5g01530/F7A7_50 [Arabidopsis thaliana]
  misc_feature (1)..(125): Homolog of NCBI NO: 13877547 NR Description: chlorophyll a/b-binding protein CP29 [Arabidopsis
  misc_feature (1)..(125): Homolog of NCBI NO: 15241005 NR Description: light-harvesting chlorophyll a/b binding protein
  misc_feature (1)..(125): Homolog of NCBI NO: 20260162 NR Description: chlorophyll a/b-binding protein CP29 [Arabidopsis
  misc_feature (1)..(128): Homolog of NCBI NO: 7443230 NR Description: probable chlorophyll a/b-binding protein - rice
  misc_feature (1)..(125): Homolog of NCBI NO: 4689382 NR Description: chlorophyll a/b binding protein CP29 [Vigna
  misc_feature (1)..(128): Homolog of NCBI NO: 7443231 NR Description: chlorophyll a/b-binding protein CP29 precursor -
  misc_feature (1)..(128): Homolog of NCBI NO: 445116 NR Description: light-harvesting complex IIa protein;
  misc_feature (1)..(128): Homolog of NCBI NO: 21594018 NR Description: putative chlorophyll a/b binding protein
  misc_feature (1)..(128): Homolog of NCBI NO: 15225630 NR Description: light-harvesting chlorophyll a/b binding protein
MLGTLGAIAVEALTGIAWQDAGKVELVEGSSYLGQPLPFSLTTLIWIEVLVVGYIEFQRNSELDPEKRIYPGGYFDPLGLAADPEKLDTLKLAEIKHSRLAMVAFLIFALQAAFTGKGPVSFLATFNN

SEQ ID NO: 27418 - protein, 88 aa, Arabidopsis thaliana
  peptide (1)..(88): Ceres Seq. ID no. 12421704
  misc_feature (1)..(86): Homolog of NCBI NO: 15241005 NR Description: light-harvesting chlorophyll a/b binding protein
  misc_feature (1)..(86): Homolog of NCBI NO: 20260162 NR Description: chlorophyll a/b-binding protein CP29 [Arabidopsis
  misc_feature (1)..(86): Homolog of NCBI NO: 7443230 NR Description: probable chlorophyll a/b-binding protein - rice
  misc_feature (2)..(86): Homolog of NCBI NO: 4689382 NR Description: chlorophyll a/b binding protein CP29 [Vigna
  misc_feature (1)..(86): Homolog of NCBI NO: 7443231 NR Description: chlorophyll a/b-binding protein CP29 precursor -
  misc_feature (1)..(86): Homolog of NCBI NO: 445116 NR Description: light-harvesting complex IIa protein;
  misc_feature (1)..(86): Homolog of NCBI NO: 21594018 NR Description: putative chlorophyll a/b binding protein
  misc_feature (1)..(86): Homolog of NCBI NO: 15225630 NR Description: light-harvesting chlorophyll a/b binding protein
  misc_feature (1)..(86): Homolog of NCBI NO: 15081739 NR Description: AT5g01530/F7A7_50 [Arabidopsis thaliana]
  misc_feature (1)..(86): Homolog of NCBI NO: 13877547 NR Description: chlorophyll a/b-binding protein CP29 [Arabidopsis
MATTTAAAASGIFGIRIQDPRPGTGRVQARFGFSFGKKKPAPPPKKSRQVQDDGDRLVWFPGANPPEWLDGSMIGDRGFDPFGLGKTG

SEQ ID NO: 27419 - protein, 77 aa, Arabidopsis thaliana
  peptide (1)..(77): Ceres Seq. ID no. 12421705
KKLYVITLESSVSKQYHTNSIWLPPLQQQPQVFLGSGFKILDLEPVGSKPGSGSVSEKRNRLHRQRNQGRSKTMETD

SEQ ID NO: 27420 - DNA, 2019 bp, Arabidopsis thaliana
  misc_feature (1)..(2019): Ceres Seq. ID no. 13491461
  misc_feature: MA Experiment ID: 108573 Result: Up-regulated in Transcription
  misc_feature: MA Experiment 108573 PARAMETER Experiment Name: At_Drought_cDNA_P Parameter: Timepoint (hr) Value: 6
  misc_feature: MA Experiment 108573 PARAMETER Experiment Name: At_Drought_cDNA_P Parameter: Tissue Value: Aerial
  misc_feature: MA Experiment 108573 PARAMETER Experiment Name: At_Drought_cDNA_P Parameter: Treatment Value: Drought vs. No Drought
  misc_feature: MA Experiment ID: 108574 Result: Up-regulated in Transcription
  misc_feature: MA Experiment 108574 PARAMETER Experiment Name: At_Wounding__cDNA_P Parameter: Timepoint (hr) Value: 1
  misc_feature: MA Experiment 108574 PARAMETER Experiment Name: At_Wounding__cDNA_P Parameter: Tissue Value: Aerial
  misc_feature: MA Experiment 108574 PARAMETER Experiment Name: At_Wounding__cDNA_P Parameter: Treatment Value: Wounding vs. No Wounding
  misc_feature: MA Experiment ID: 108576 Result: Down-regulated in Transcription
  misc_feature: MA Experiment 108576 PARAMETER Experiment Name: At_42deg_Heat_cDNA_P Parameter: Temperature (deg C) Value: 42 vs. 22
  misc_feature: MA Experiment 108576 PARAMETER Experiment Name: At_42deg_Heat_cDNA_P Parameter: Timepoint (hr) Value: 1
  misc_feature: MA Experiment 108576 PARAMETER Experiment Name: At_42deg_Heat_cDNA_P Parameter: Tissue Value: Aerial
  misc_feature: MA Experiment ID: 108577 Result: Down-regulated in Transcription
  misc_feature: MA Experiment 108577 PARAMETER Experiment Name: At_42deg_Heat_cDNA_P Parameter: Temperature (deg C) Value: 42 vs. 22
  misc_feature: MA Experiment 108577 PARAMETER Experiment Name: At_42deg_Heat_cDNA_P Parameter: Timepoint (hr) Value: 6
  misc_feature: MA Experiment 108577 PARAMETER Experiment Name: At_42deg_Heat_cDNA_P Parameter: Tissue Value: Aerial
  misc_feature: MA Experiment ID: 108579 Result: Up-regulated in Transcription
  misc_feature: MA Experiment 108579 PARAMETER Experiment Name: At_4deg_Cold_cDNA_P Parameter: Temperature (deg C) Value: 4 vs. 22
  misc_feature: MA Experiment 108579 PARAMETER Experiment Name: At_4deg_Cold_cDNA_P Parameter: Timepoint (hr) Value: 6
  misc_feature: MA Experiment 108579 PARAMETER Experiment Name: At_4deg_Cold_cDNA_P Parameter: Tissue Value: Aerial
  misc_feature: MA Experiment ID: 20000171 Result: Down-regulated in Transcription
  misc_feature: MA Experiment 20000171 PARAMETER Experiment Name: At_42deg_Heat_P Parameter: Age (day) Value: 14
  misc_feature: MA Experiment 20000171 PARAMETER Experiment Name: At_42deg_Heat_P Parameter: Organism Value: A. thaliana
  misc_feature: MA Experiment 20000171 PARAMETER Experiment Name: At_42deg_Heat_P Parameter: Plant Line Value: WS
  misc_feature: MA Experiment 20000171 PARAMETER Experiment Name: At_42deg_Heat_P Parameter: Temperature (deg C) Value: 42 vs. 22
  misc_feature: MA Experiment 20000171 PARAMETER Experiment Name: At_42deg_Heat_P Parameter: Timepoint (hr) Value: 1
  misc_feature: MA Experiment 20000171 PARAMETER Experiment Name: At_42deg_Heat_P Parameter: Tissue Value: Aerial
  misc_feature: MA Experiment ID: 20000173 Result: Down-regulated in Transcription
  misc_feature: MA Experiment 20000173 PARAMETER Experiment Name: At_42deg_Heat_P Parameter: Age (day) Value: 14
  misc_feature: MA Experiment 20000173 PARAMETER Experiment Name: At_42deg_Heat_P Parameter: Organism Value: A. thaliana
  misc_feature: MA Experiment 20000173 PARAMETER Experiment Name: At_42deg_Heat_P Parameter: Plant Line Value: WS
  misc_feature: MA Experiment 20000173 PARAMETER Experiment Name: At_42deg_Heat_P Parameter: Temperature (deg C) Value: 42 vs. 22
  misc_feature: MA Experiment 20000173 PARAMETER Experiment Name: At_42deg_Heat_P Parameter: Timepoint (hr) Value: 6
  misc_feature: MA Experiment 20000173 PARAMETER Experiment Name: At_42deg_Heat_P Parameter: Tissue Value: Aerial
  misc_feature: MA Experiment ID: 20000180 Result: Up-regulated in Transcription
  misc_feature: MA Experiment 20000180 PARAMETER Experiment Name: At_Germinating_Seeds_P Parameter: Age (hr) Value: 24 vs. 0
  misc_feature: MA Experiment 20000180 PARAMETER Experiment Name: At_Germinating_Seeds_P Parameter: Tissue Value: Germinating Seeds
  misc_feature: MA Experiment ID: 20000184 Result: Up-regulated in Transcription
  misc_feature: MA Experiment 20000184 PARAMETER Experiment Name: At_Shoots__P Parameter: Age (day) Value: 7
  misc_feature: MA Experiment 20000184 PARAMETER Experiment Name: At_Shoots__P Parameter: Tissue Value: Shoots vs. Whole Plant
  misc_feature: MA Experiment ID: 20000234 Result: Up-regulated in Transcription
  misc_feature: MA Experiment 20000234 PARAMETER Experiment Name: At_Siliques_P Parameter: Age (day) Value: 21
  misc_feature: MA Experiment 20000234 PARAMETER Experiment Name: At_Siliques_P Parameter: Organism Value: A. thaliana
  misc_feature: MA Experiment 20000234 PARAMETER Experiment Name: At_Siliques_P Parameter: Plant Line Value: WS
  misc_feature: MA Experiment 20000234 PARAMETER Experiment Name: At_Siliques_P Parameter: Tissue Value: Less Than 5mm Siliques vs. Whole Plant
  misc_feature: MA Experiment ID: 20000264 Result: Up-regulated in Transcription
  misc_feature: MA Experiment 20000264 PARAMETER Experiment Name: At_Open_Flower_P Parameter: Age (day) Value: 21
  misc_feature: MA Experiment 20000264 PARAMETER Experiment Name: At_Open_Flower_P Parameter: Plant Line Value: WS
  misc_feature: MA Experiment 20000264 PARAMETER Experiment Name: At_Open_Flower_P Parameter: Tissue Value: Open Flower vs. Whole Plant
  misc_feature: MA Experiment ID: 20000286 Result: Up-regulated in Transcription
  misc_feature: MA Experiment 20000286 PARAMETER Experiment Name: At_Open_Flower_P Parameter: Age (day) Value: 21
  misc_feature: MA Experiment 20000286 PARAMETER Experiment Name: At_Open_Flower_P Parameter: Plant Line Value: WS
  misc_feature: MA Experiment 20000286 PARAMETER Experiment Name: At_Open_Flower_P Parameter: Tissue Value: Half Open vs. Whole Plant
  misc_feature: MA Experiment ID: 20000436 Result: Up-regulated in Transcription
  misc_feature: MA Experiment 20000436 PARAMETER Experiment Name: At_Drought_P Parameter: Age (day) Value: 7
  misc_feature: MA Experiment 20000436 PARAMETER Experiment Name: At_Drought_P Parameter: Organism Value: A. thaliana
  misc_feature: MA Experiment 20000436 PARAMETER Experiment Name: At_Drought_P Parameter: Plant Line Value: WS
  misc_feature: MA Experiment 20000436 PARAMETER Experiment Name: At_Drought_P Parameter: Timepoint (hr) Value: 12
  misc_feature: MA Experiment 20000436 PARAMETER Experiment Name: At_Drought_P Parameter: Tissue Value: Whole Plant
  misc_feature: MA Experiment 20000436 PARAMETER Experiment Name: At_Drought_P Parameter: Treatment Value: Drought vs. No Drought
  misc_feature: MA Experiment ID: 20000437 Result: Up-regulated in Transcription
  misc_feature: MA Experiment 20000437 PARAMETER Experiment Name: At_Drought_P Parameter: Age (day) Value: 8
  misc_feature: MA Experiment 20000437 PARAMETER Experiment Name: At_Drought_P Parameter: Organism Value: A. thaliana
  misc_feature: MA Experiment 20000437 PARAMETER Experiment Name: At_Drought_P Parameter: Plant Line Value: WS
  misc_feature: MA Experiment 20000437 PARAMETER Experiment Name: At_Drought_P Parameter: Timepoint (hr) Value: 24
  misc_feature: MA Experiment 20000437 PARAMETER Experiment Name: At_Drought_P Parameter: Tissue Value: Whole Plant
  misc_feature: MA Experiment 20000437 PARAMETER Experiment Name: At_Drought_P Parameter: Treatment Value: Drought vs. No Drought
  misc_feature: MA Experiment ID: 20001557 Result: Up-regulated in Transcription
  misc_feature: MA Experiment 20001557 PARAMETER Experiment Name: At_Drought_Soil_Dry_P Parameter: Age (day) Value: 27
  misc_feature: MA Experiment 20001557 PARAMETER Experiment Name: At_Drought_Soil_Dry_P Parameter: Organism Value: A. thaliana
  misc_feature: MA Experiment 20001557 PARAMETER Experiment Name: At_Drought_Soil_Dry_P Parameter: Plant Line Value: WS
  misc_feature: MA Experiment 20001557 PARAMETER Experiment Name: At_Drought_Soil_Dry_P Parameter: Post Timepoint (hr) Value: 3
  misc_feature: MA Experiment 20001557 PARAMETER Experiment Name: At_Drought_Soil_Dry_P Parameter: Post-Treatment Value: Re-Water vs. No Drought
  misc_feature: MA Experiment 20001557 PARAMETER Experiment Name: At_Drought_Soil_Dry_P Parameter: Timepoint (day) Value: 13
  misc_feature: MA Experiment 20001557 PARAMETER Experiment Name: At_Drought_Soil_Dry_P Parameter: Treatment Value: Drought vs. No Drought
  misc_feature: MA Experiment ID: 20001558 Result: Up-regulated in Transcription
  misc_feature: MA Experiment 20001558 PARAMETER Experiment Name: At_Drought_Soil_Dry_P Parameter: Age (day) Value: 27
  misc_feature: MA Experiment 20001558 PARAMETER Experiment Name: At_Drought_Soil_Dry_P Parameter: Organism Value: A. thaliana
  misc_feature: MA Experiment 20001558 PARAMETER Experiment Name: At_Drought_Soil_Dry_P Parameter: Plant Line Value: WS
  misc_feature: MA Experiment 20001558 PARAMETER Experiment Name: At_Drought_Soil_Dry_P Parameter: Post Timepoint (hr) Value: 6
  misc_feature: MA Experiment 20001558 PARAMETER Experiment Name: At_Drought_Soil_Dry_P Parameter: Post-Treatment Value: Re-Water vs. No Drought
  misc_feature: MA Experiment 20001558 PARAMETER Experiment Name: At_Drought_Soil_Dry_P Parameter: Timepoint (day) Value: 13
  misc_feature: MA Experiment 20001558 PARAMETER Experiment Name: At_Drought_Soil_Dry_P Parameter: Treatment Value: Drought vs. No Drought
  misc_feature: MA Experiment ID: 20001906 Result: Down-regulated in Transcription
  misc_feature: MA Experiment 20001906 PARAMETER Experiment Name: At_Drought_Reproduction_P Parameter: Age (day) Value: 35
  misc_feature: MA Experiment 20001906 PARAMETER Experiment Name: At_Drought_Reproduction_P Parameter: Organism Value: A. thaliana
  misc_feature: MA Experiment 20001906 PARAMETER Experiment Name: At_Drought_Reproduction_P Parameter: Plant Line Value: WS
  misc_feature: MA Experiment 20001906 PARAMETER Experiment Name: At_Drought_Reproduction_P Parameter: Timepoint (day) Value: 5
  misc_feature: MA Experiment 20001906 PARAMETER Experiment Name: At_Drought_Reproduction_P Parameter: Tissue Value: Siliques
  misc_feature: MA Experiment 20001906 PARAMETER Experiment Name: At_Drought_Reproduction_P Parameter: Treatment Value: Drought vs. No Drought
  misc_feature: MA Experiment ID: 20001908 Result: Down-regulated in Transcription
  misc_feature: MA Experiment 20001908 PARAMETER Experiment Name: At_Drought_Reproduction_P Parameter: Age (day) Value: 40
  misc_feature: MA Experiment 20001908 PARAMETER Experiment Name: At_Drought_Reproduction_P Parameter: Organism Value: A. thaliana
  misc_feature: MA Experiment 20001908 PARAMETER Experiment Name: At_Drought_Reproduction_P Parameter: Plant Line Value: WS
  misc_feature: MA Experiment 20001908 PARAMETER Experiment Name: At_Drought_Reproduction_P Parameter: Timepoint (day) Value: 10
  misc_feature: MA Experiment 20001908 PARAMETER Experiment Name: At_Drought_Reproduction_P Parameter: Tissue Value: Siliques
  misc_feature: MA Experiment 20001908 PARAMETER Experiment Name: At_Drought_Reproduction_P Parameter: Treatment Value: Drought vs. No Drought
  misc_feature: MA Experiment ID: 20001911 Result: Down-regulated in Transcription
  misc_feature: MA Experiment 20001911 PARAMETER Experiment Name: At_Drought_Reproduction_P Parameter: Age (day) Value: 40
  misc_feature: MA Experiment 20001911 PARAMETER Experiment Name: At_Drought_Reproduction_P Parameter: Organism Value: A. thaliana
  misc_feature: MA Experiment 20001911 PARAMETER Experiment Name: At_Drought_Reproduction_P Parameter: Plant Line Value: WS
  misc_feature: MA Experiment 20001911 PARAMETER Experiment Name: At_Drought_Reproduction_P Parameter: Timepoint (day) Value: 10
  misc_feature: MA Experiment 20001911 PARAMETER Experiment Name: At_Drought_Reproduction_P Parameter: Tissue Value: Flowers
  misc_feature: MA Experiment 20001911 PARAMETER Experiment Name: At_Drought_Reproduction_P Parameter: Treatment Value: Drought vs. No Drought
aaaatcaaaagagaactaaaccaagaaacaaaatgggatacgaaaggctcggaccatccggagcaactggttcggtcaccacctccactactacagctccaatccttaaccaagtctccacgtcagagcaaccggagaacaacaaccgaagaagcaaaaagaagcttgtcgtatcatcaatcgtcttagccatctcacttatcctcgccgccgcgatcttcgccggagtcagatcacgtctcaagttaaaccaatcagtcccaggcctagctcgtaaaccgagtcaagcaatctctaaagcttgtgagttaactcgtttccccgagttatgcgttgactcactcatggactttcccggctcactcgccgcttcctcctctaaagatctcatccacgtgactgtgaacatgacgctccaccacttcagccacgctctctactcctctgcttccctctccttcgtcgacatgccgccacgtgctcgctcagcttacgactcttgcgtcgagctacttgacgattccgttgacgcgctatcacgcgctctttcctccgtcgtatcctcctccgctaagccgcaagatgttacaacgtggcttagcgcggctttaacaaaccatgacacgtgtactgaaggattcgacggcgtcgacgacggtggagtgaaggatcatatgacggcggcgttacagaatctttctgagcttgttagtaactgtcttgctatattctcggcgagtcacgacggtgacgatttcgccggagttccaatacagaacaggaggctgctgggagtggaggaacgagaagagaaattcccgagatggatgagaccaaaagaacgcgagatactggaaatgccggtatctcagatacaagctgatattatcgtatcgaaagacggtaacggcacgtgcaaaactatatcggaagctatcaagaaagctcctcagaacagtactcgccggataattatctacgtcaaggccggaagatatgaagagaacaacctcaaggtcggtaggaaaaaaattaatttgatgttcgttggagatggcaagggtaaaactgttatttcgggaggcaaaagtatatttgacaacatcactactttccacacggcgtcatttgctgcgaccggagctggatttattgcaagggacatcacattcgaaaactgggccggtccagcgaagcaccaagccgtggctctccgcatcggagctgaccacgcagtgatctaccgatgcaatataatcggttaccaagacacactctacgtccattcaaaccgccaattctttcgtgaatgcgatatctacggtacagtcgattttatctttggtaacgcagccgtcgtactacaaaactgtagcatctacgcacggaagccaatggattttcagaaaaatacaatcacggctcaaaacagaaaagatccgaaccaaaacaccggaatatcaatacatgcgtctagggttcttgcagcatccgatctccaagcgacaaacggtagtacacagacgtatctaggccgaccttggaagctattctctaggacagtgtatatgatgtcgtatatcggtggtcatgtacacacgagaggttggctcgagtggaacacaacatttgctttagatactttgtattatggagagtatttgaacagtggacctgggtcgggtctcgggcaacgtgtgagctggccgggttatcgggtcatcaattcgacggccgaggcaaaccggttcactgtggcagaatttatatacggttcctcgtggttgccatcgaccggagtttcgttcttggccggattaagcatataggtagagaaaaaattgaaatgcttatttttccgatgaattgtttcattcttacggtccttatattaatggacatatcagtattccaatatatatgagtatattttaacttttaattgtaatgtctccactctccagaggtattatttaataatagatgaacactcgaggataattttcccttgttttcttg

SEQ ID NO: 27421 - protein, 608 aa, Arabidopsis thaliana
  peptide (1)..(608): Ceres Seq. ID no. 13491462
  misc_feature (294)..(593): Pfam Name: Pectinesterase Pfam Description: Pectinesterase
  misc_feature (52)..(606): Homolog of NCBI NO: 6689892 NR Description: pectin methyl esterase [Solanum tuberosum]
  misc_feature (355)..(607): Homolog of NCBI NO: 38566730 NR Description: pectin methylesterase [Cicer arietinum]
  misc_feature (96)..(607): Homolog of NCBI NO: 34393863 NR Description: putative pectinesterase [Oryza sativa (japonica
  misc_feature (47)..(606): Homolog of NCBI NO: 29602797 NR Description: pectin methyl-esterase [Nicotiana benthamiana]
  misc_feature (47)..(606): Homolog of NCBI NO: 8671350 NR Description: pectin methylesterase [Nicotiana tabacum]
  misc_feature (39)..(606): Homolog of NCBI NO: 6174912 NR Description: Pectinesterase 1.1 precursor (Pectin
  misc_feature (39)..(606): Homolog of NCBI NO: 2098711 NR Description: pectinesterase [Citrus sinensis]
  misc_feature (47)..(220): Homolog of NCBI NO: 34904380 NR Description: unnamed protein product [Oryza sativa (japonica
  misc_feature (194)..(608): Homolog of NCBI NO: 34904380 NR Description: unnamed protein product [Oryza sativa (japonica
  misc_feature (11)..(607): Homolog of NCBI NO: 15238729 NR Description: pectinesterase family [Arabidopsis thaliana]
NQKRTKPRNKMGYERLGPSGATGSVTTSTTTAPILNQVSTSEQPENNNRRSKKKLVVSSIVLAISLILAAAIFAGVRSRLKLNQSVPGLARKPSQAISKACELTRFPELCVDSLMDFPGSLAASSSKDLIHVTVNMTLHHFSHALYSSASLSFVDMPPRARSAYDSCVELLDDSVDALSRALSSVVSSSAKPQDVTTWLSAALTNHDTCTEGFDGVDDGGVKDHMTAALQNLSELVSNCLAIFSASHDGDDFAGVPIQNRRLLGVEEREEKFPRWMRPKEREILEMPVSQIQADIIVSKDGNGTCKTISEAIKKAPQNSTRRIIIYVKAGRYEENNLKVGRKKINLMFVGDGKGKTVISGGKSIFDNITTFHTASFAATGAGFIARDITFENWAGPAKHQAVALRIGADHAVIYRCNIIGYQDTLYVHSNRQFFRECDIYGTVDFIFGNAAVVLQNCSIYARKPMDFQKNTITAQNRKDPNQNTGISIHASRVLAASDLQATNGSTQTYLGRPWKLFSRTVYMMSYIGGHVHTRGWLEWNTTFALDTLYYGEYLNSGPGSGLGQRVSWPGYRVINSTAEANRFTVAEFIYGSSWLPSTGVSFLAGLSI

SEQ ID NO: 27422 - protein, 598 aa, Arabidopsis thaliana
  peptide (1)..(598): Ceres Seq. ID no. 13491463
  misc_feature (284)..(583): Pfam Name: Pectinesterase Pfam Description: Pectinesterase
  misc_feature (42)..(596): Homolog of NCBI NO: 6689892 NR Description: pectin methyl esterase [Solanum tuberosum]
  misc_feature (345)..(597): Homolog of NCBI NO: 38566730 NR Description: pectin methylesterase [Cicer arietinum]
  misc_feature (86)..(597): Homolog of NCBI NO: 34393863 NR Description: putative pectinesterase [Oryza sativa (japonica
  misc_feature (37)..(596): Homolog of NCBI NO: 29602797 NR Description: pectin methyl-esterase [Nicotiana benthamiana]
  misc_feature (37)..(596): Homolog of NCBI NO: 8671350 NR Description: pectin methylesterase [Nicotiana tabacum]
  misc_feature (29)..(596): Homolog of NCBI NO: 6174912 NR Description: Pectinesterase 1.1 precursor (Pectin
  misc_feature (29)..(596): Homolog of NCBI NO: 2098711 NR Description: pectinesterase [Citrus sinensis]
  misc_feature (37)..(210): Homolog of NCBI NO: 34904380 NR Description: unnamed protein product [Oryza sativa (japonica
  misc_feature (184)..(598): Homolog of NCBI NO: 34904380 NR Description: unnamed protein product [Oryza sativa (japonica
  misc_feature (1)..(597): Homolog of NCBI NO: 15238729 NR Description: pectinesterase family [Arabidopsis thaliana]
MGYERLGPSGATGSVTTSTTTAPILNQVSTSEQPENNNRRSKKKLVVSSIVLAISLILAAAIFAGVRSRLKLNQSVPGLARKPSQAISKACELTRFPELCVDSLMDFPGSLAASSSKDLIHVTVNMTLHHFSHALYSSASLSFVDMPPRARSAYDSCVELLDDSVDALSRALSSVVSSSAKPQDVTTWLSAALTNHDTCTEGFDGVDDGGVKDHMTAALQNLSELVSNCLAIFSASHDGDDFAGVPIQNRRLLGVEEREEKFPRWMRPKEREILEMPVSQIQADIIVSKDGNGTCKTISEAIKKAPQNSTRRIIIYVKAGRYEENNLKVGRKKINLMFVGDGKGKTVISGGKSIFDNITTFHTASFAATGAGFIARDITFENWAGPAKHQAVALRIGADHAVIYRCNIIGYQDTLYVHSNRQFFRECDIYGTVDFIFGNAAVVLQNCSIYARKPMDFQKNTITAQNRKDPNQNTGISIHASRVLAASDLQATNGSTQTYLGRPWKLFSRTVYMMSYIGGHVHTRGWLEWNTTFALDTLYYGEYLNSGPGSGLGQRVSWPGYRVINSTAEANRFTVAEFIYGSSWLPSTGVSFLAGLSI

SEQ ID NO: 27423 - protein, 494 aa, Arabidopsis thaliana
  peptide (1)..(494): Ceres Seq. ID no. 13491464
  misc_feature (180)..(479): Pfam Name: Pectinesterase Pfam Description: Pectinesterase
  misc_feature (1)..(492): Homolog of NCBI NO: 6689892 NR Description: pectin methyl esterase [Solanum tuberosum]
  misc_feature (241)..(493): Homolog of NCBI NO: 38566730 NR Description: pectin methylesterase [Cicer arietinum]
  misc_feature (1)..(493): Homolog of NCBI NO: 34393863 NR Description: putative pectinesterase [Oryza sativa (japonica
  misc_feature (1)..(492): Homolog of NCBI NO: 29602797 NR Description: pectin methyl-esterase [Nicotiana benthamiana]
  misc_feature (1)..(492): Homolog of NCBI NO: 8671350 NR Description: pectin methylesterase [Nicotiana tabacum]
  misc_feature (1)..(492): Homolog of NCBI NO: 6174912 NR Description: Pectinesterase 1.1 precursor (Pectin
  misc_feature (1)..(492): Homolog of NCBI NO: 2098711 NR Description: pectinesterase [Citrus sinensis]
  misc_feature (1)..(106): Homolog of NCBI NO: 34904380 NR Description: unnamed protein product [Oryza sativa (japonica
  misc_feature (80)..(494): Homolog of NCBI NO: 34904380 NR Description: unnamed protein product [Oryza sativa (japonica
  misc_feature (1)..(493): Homolog of NCBI NO: 15238729 NR Description: pectinesterase family [Arabidopsis thaliana]
MDFPGSLAASSSKDLIHVTVNMTLHHFSHALYSSASLSFVDMPPRARSAYDSCVELLDDSVDALSRALSSVVSSSAKPQDVTTWLSAALTNHDTCTEGFDGVDDGGVKDHMTAALQNLSELVSNCLAIFSASHDGDDFAGVPIQNRRLLGVEEREEKFPRWMRPKEREILEMPVSQIQADIIVSKDGNGTCKTISEAIKKAPQNSTRRIIIYVKAGRYEENNLKVGRKKINLMFVGDGKGKTVISGGKSIFDNITTFHTASFAATGAGFIARDITFENWAGPAKHQAVALRIGADHAVIYRCNIIGYQDTLYVHSNRQFFRECDIYGTVDFIFGNAAVVLQNCSIYARKPMDFQKNTITAQNRKDPNQNTGISIHASRVLAASDLQATNGSTQTYLGRPWKLFSRTVYMMSYIGGHVHTRGWLEWNTTFALDTLYYGEYLNSGPGSGLGQRVSWPGYRVINSTAEANRFTVAEFIYGSSWLPSTGVSFLAGLSI

SEQ ID NO: 27424 - DNA, 1261 bp, Arabidopsis thaliana
  misc_feature (1)..(1261): Ceres Seq. ID no. 13493945
  misc_feature: MA Experiment ID: 108488 Result: Down-regulated in Transcription
  misc_feature: MA Experiment ID: 108595 Result: Down-regulated in Transcription
  misc_feature: MA Experiment 108595 PARAMETER Experiment Name: At_Ler-pi_Ovule_cDNA_P Parameter: Plant Line Value: null
  misc_feature: MA Experiment ID: 20000224 Result: Down-regulated in Transcription
aataacaagaagtgagtctccggtctgaaactaattaaggagacggcaagagaaacaagacatacgtttgctgtcccacgttgatcttgttgtttactctctctctctcctccatcggcgacgaccaccggagatcagcgtcaccgtaccaaaacatcatttaccttcttttagatttgttgttttttaatcagttgaatcggaataaaatatcgcatcagagatgagtaacgagcttctcaccatcgatcctgtcgaccttcaattcccttttgaattgaagaagcagatctcttgttctctctatttgggtaacaagaccgataattatgtcgccttcaaggttaagacgacgaatccaaagaagtactgcgttaggcctaatactggtgttgttcatcccagatcctcttctgaagttttagtgaccatgcaagctcaaaaggaagctcctgctgatctgcagtgtaaagataagttcttgcttcaatgtgtagtcgctagtcccggagccacccccaaggatgttacacatgagatgtttagcaaagaggcagggcatcgagttgaagagactaaattgagagttgtctatgttgctccaccacgaccaccatcaccggttcgagaaggatctgaagagggctcttcaccgagggcttctgtctctgataatgggaatgcttctgattttactgctgctccaagatttagcgcagacagggttgatgctcaggataattcatctgaggcaagagctctggtcacaaaactcaccgaggaaaagaactctgcggttcaactgaacaacaggcttcaacaagaattggaccagttgaggcgcgaaagcaagagaagtaagagtggtggaatccctttcatgtacgttcttctggtcggcctaatcggtttaatcctgggatacattatgaagaggacatgatcagatcccttcaacaaaatactccaaaagtctcaaagtgcttaaaaaagcattgaaaaggaaagaaatcaaattgtgtgaggaggacaatcttctcttctgccttatcgtcgtcatgcacctttggttaaaatctgaacttagtgcgttagaggatttgtattacggtttccataagacttagaattgtcacaaaatctcctttttcctctctcttattacaactttgtgtagtcttaaacacttttgtttcttcgtcttctctcatcttaactttttctctccatctctcatagaataaagggatgaaacatgtcg

SEQ ID NO: 27425 - protein, 239 aa, Arabidopsis thaliana
  peptide (1)..(239): Ceres Seq. ID no. 13493946
  misc_feature (2)..(161): Homolog of NCBI NO: 25405451 NR Description: hypothetical protein F11M15.13 [imported] -
  misc_feature (1)..(156): Homolog of NCBI NO: 25405451 NR Description: hypothetical protein F11M15.13 [imported] -
  misc_feature (1)..(156): Homolog of NCBI NO: 15223792 NR Description: VAMP (vesicle-associated membrane
  misc_feature (2)..(238): Homolog of NCBI NO: 21592874 NR Description: putative proline-rich protein [Arabidopsis
  misc_feature (2)..(238): Homolog of NCBI NO: 18411240 NR Description: VAMP (vesicle-associated membrane
  misc_feature (1)..(239): Homolog of NCBI NO: 11288307 NR Description: 27k vesicle-associated membrane
  misc_feature (1)..(239): Homolog of NCBI NO: 11288305 NR Description: hypothetical protein T4C21.10 - Arabidopsis
  misc_feature (1)..(239): Homolog of NCBI NO: 21554053 NR Description: putative VAMP-associated protein [Arabidopsis
  misc_feature (1)..(239): Homolog of NCBI NO: 18411661 NR Description: VAMP (vesicle-associated membrane
  misc_feature (1)..(239): Homolog of NCBI NO: 15225415 NR Description: VAMP (vesicle-associated membrane
MSNELLTIDPVDLQFPFELKKQISCSLYLGNKTDNYVAFKVKTTNPKKYCVRPNTGVVHPRSSSEVLVTMQAQKEAPADLQCKDKFLLQCVVASPGATPKDVTHEMFSKEAGHRVEETKLRVVYVAPPRPPSPVREGSEEGSSPRASVSDNGNASDFTAAPRFSADRVDAQDNSSEARALVTKLTEEKNSAVQLNNRLQQELDQLRRESKRSKSGGIPFMYVLLVGLIGLILGYIMKRT

SEQ ID NO: 27426 - protein, 170 aa, Arabidopsis thaliana
  peptide (1)..(170): Ceres Seq. ID no. 13493947
  misc_feature (1)..(92): Homolog of NCBI NO: 25405451 NR Description: hypothetical protein F11M15.13 [imported] -
  misc_feature (1)..(87): Homolog of NCBI NO: 25405451 NR Description: hypothetical protein F11M15.13 [imported] -
  misc_feature (1)..(87): Homolog of NCBI NO: 15223792 NR Description: VAMP (vesicle-associated membrane
  misc_feature (1)..(169): Homolog of NCBI NO: 21592874 NR Description: putative proline-rich protein [Arabidopsis
  misc_feature (1)..(169): Homolog of NCBI NO: 18411240 NR Description: VAMP (vesicle-associated membrane
  misc_feature (1)..(170): Homolog of NCBI NO: 11288307 NR Description: 27k vesicle-associated membrane
  misc_feature (1)..(170): Homolog of NCBI NO: 11288305 NR Description: hypothetical protein T4C21.10 - Arabidopsis
  misc_feature (1)..(170): Homolog of NCBI NO: 21554053 NR Description: putative VAMP-associated protein [Arabidopsis
  misc_feature (1)..(170): Homolog of NCBI NO: 18411661 NR Description: VAMP (vesicle-associated membrane
  misc_feature (1)..(170): Homolog of NCBI NO: 15225415 NR Description: VAMP (vesicle-associated membrane
MQAQKEAPADLQCKDKFLLQCVVASPGATPKDVTHEMFSKEAGHRVEETKLRVVYVAPPRPPSPVREGSEEGSSPRASVSDNGNASDFTAAPRFSADRVDAQDNSSEARALVTKLTEEKNSAVQLNNRLQQELDQLRRESKRSKSGGIPFMYVLLVGLIGLILGYIMKRT

SEQ ID NO: 27427 - protein, 134 aa, Arabidopsis thaliana
  peptide (1)..(134): Ceres Seq. ID no. 13493948
  misc_feature (1)..(56): Homolog of NCBI NO: 25405451 NR Description: hypothetical protein F11M15.13 [imported] -
  misc_feature (1)..(51): Homolog of NCBI NO: 25405451 NR Description: hypothetical protein F11M15.13 [imported] -
  misc_feature (1)..(51): Homolog of NCBI NO: 15223792 NR Description: VAMP (vesicle-associated membrane
  misc_feature (1)..(133): Homolog of NCBI NO: 21592874 NR Description: putative proline-rich protein [Arabidopsis
  misc_feature (1)..(133): Homolog of NCBI NO: 18411240 NR Description: VAMP (vesicle-associated membrane
  misc_feature (1)..(134): Homolog of NCBI NO: 11288307 NR Description: 27k vesicle-associated membrane
  misc_feature (1)..(134): Homolog of NCBI NO: 11288305 NR Description: hypothetical protein T4C21.10 - Arabidopsis
  misc_feature (1)..(134): Homolog of NCBI NO: 21554053 NR Description: putative VAMP-associated protein [Arabidopsis
  misc_feature (1)..(134): Homolog of NCBI NO: 18411661 NR Description: VAMP (vesicle-associated membrane
  misc_feature (1)..(134): Homolog of NCBI NO: 15225415 NR Description: VAMP (vesicle-associated membrane
MFSKEAGHRVEETKLRVVYVAPPRPPSPVREGSEEGSSPRASVSDNGNASDFTAAPRFSADRVDAQDNSSEARALVTKLTEEKNSAVQLNNRLQQELDQLRRESKRSKSGGIPFMYVLLVGLIGLILGYIMKRT

SEQ ID NO: 27428 - DNA, 1281 bp, Arabidopsis thaliana
  misc_feature (1)..(1281): Ceres Seq. ID no. 12332527
  misc_feature: MA Experiment ID: 20000227 Result: Up-regulated in Transcription
  misc_feature: MA Experiment 20000227 PARAMETER Experiment Name: At_Root-Tips-vs-Tops_P Parameter: Tissue Value: Root Tips vs. Root Tops
  misc_feature: MA Experiment ID: 20001557 Result: Up-regulated in Transcription
  misc_feature: MA Experiment 20001557 PARAMETER Experiment Name: At_Drought_Soil_Dry_P Parameter: Age (day) Value: 27
  misc_feature: MA Experiment 20001557 PARAMETER Experiment Name: At_Drought_Soil_Dry_P Parameter: Organism Value: A. thaliana
  misc_feature: MA Experiment 20001557 PARAMETER Experiment Name: At_Drought_Soil_Dry_P Parameter: Plant Line Value: WS
  misc_feature: MA Experiment 20001557 PARAMETER Experiment Name: At_Drought_Soil_Dry_P Parameter: Post Timepoint (hr) Value: 3
  misc_feature: MA Experiment 20001557 PARAMETER Experiment Name: At_Drought_Soil_Dry_P Parameter: Post-Treatment Value: Re-Water vs. No Drought
  misc_feature: MA Experiment 20001557 PARAMETER Experiment Name: At_Drought_Soil_Dry_P Parameter: Timepoint (day) Value: 13
  misc_feature: MA Experiment 20001557 PARAMETER Experiment Name: At_Drought_Soil_Dry_P Parameter: Treatment Value: Drought vs. No Drought
  misc_feature: MA Experiment ID: 20001558 Result: Up-regulated in Transcription
  misc_feature: MA Experiment 20001558 PARAMETER Experiment Name: At_Drought_Soil_Dry_P Parameter: Age (day) Value: 27
  misc_feature: MA Experiment 20001558 PARAMETER Experiment Name: At_Drought_Soil_Dry_P Parameter: Organism Value: A. thaliana
  misc_feature: MA Experiment 20001558 PARAMETER Experiment Name: At_Drought_Soil_Dry_P Parameter: Plant Line Value: WS
  misc_feature: MA Experiment 20001558 PARAMETER Experiment Name: At_Drought_Soil_Dry_P Parameter: Post Timepoint (hr) Value: 6
  misc_feature: MA Experiment 20001558 PARAMETER Experiment Name: At_Drought_Soil_Dry_P Parameter: Post-Treatment Value: Re-Water vs. No Drought
  misc_feature: MA Experiment 20001558 PARAMETER Experiment Name: At_Drought_Soil_Dry_P Parameter: Timepoint (day) Value: 13
  misc_feature: MA Experiment 20001558 PARAMETER Experiment Name: At_Drought_Soil_Dry_P Parameter: Treatment Value: Drought vs. No Drought
  misc_feature: MA Experiment ID: 20001560 Result: Up-regulated in Transcription
  misc_feature: MA Experiment 20001560 PARAMETER Experiment Name: At_Drought_Soil_Dry_P Parameter: Age (day) Value: 28
  misc_feature: MA Experiment 20001560 PARAMETER Experiment Name: At_Drought_Soil_Dry_P Parameter: Organism Value: A. thaliana
  misc_feature: MA Experiment 20001560 PARAMETER Experiment Name: At_Drought_Soil_Dry_P Parameter: Plant Line Value: WS
  misc_feature: MA Experiment 20001560 PARAMETER Experiment Name: At_Drought_Soil_Dry_P Parameter: Post Timepoint (hr) Value: None
  misc_feature: MA Experiment 20001560 PARAMETER Experiment Name: At_Drought_Soil_Dry_P Parameter: Post-Treatment Value: None
  misc_feature: MA Experiment 20001560 PARAMETER Experiment Name: At_Drought_Soil_Dry_P Parameter: Timepoint (day) Value: 14
  misc_feature: MA Experiment 20001560 PARAMETER Experiment Name: At_Drought_Soil_Dry_P Parameter: Treatment Value: Drought vs. No Drought
agaatcgtaccaattttgaaaaccctaaatctcaatcctcgacgctctctactaagaaactcaatcttactttctctgtaattcgtagcttccgaaatcttttctcaagaatctcataaccatggcgaatcctgctccgaatctagaatgtcgtatgtacgaatcgagataccctgatgtagacatggcggtgatgattcaggtgaagaccatcgctgacatgggagcttacgtatctctccttgaatacaacaacatcgaaggaatgatcctgttctccgagctctctcgccgtcggattcgtagtatcagtagcttaatcaaggtcggtcgtaccgagcctgttatggtccttcgtgtcgatagagagagaggttacattgatctcagtaaacgtagggttagtgatgaggacaaagaggcttgtgaggagaggtataataagagcaagcttgttcactctatcatgcgtcatgttgctgagactgttggtgtcgatttggaggagctatacgtaaacatcggttggccattgtataagaagcatggacatgcttttgaggctttcaaaattgttgtcactgatcctgattcagttttcgatgctcttacccgagaagttaaagaaactggacctgatggtgtggaggtgaccaaagttgtcccggctgtgtctgaagaattgaaagatgcatttttgaaggacattaggaggagaatgacaccacagccaatgaagattcgtgctgatattgaattgaagtgttttcagtttgatggagttctccacatcaaggaagccatgaagaaggcagaggctgtaggtactgatgattgtccagtcaaaatcaagctcgttgctccaccactttatgtactcacaactcacacccattacaaggaaaaaggaatagtgactctgaataaagcaattgaagcatgcattactgcaattgaggaacacaagggtaaacttgtcgttaaagaaggtgctcgtgcggtgagtgagcgtgatgacaaattgcttgctgagcacatggctaagcttagaatggataatgaagaaatgagtggtgatgagggaagcgaagatgaagaagaagacactggaatgggagaagtcgatatcgatggaggtagcgggataattgaatgaacaaaagcaaaagcattgtaactgctgtttctgctttagatcctacaattttgtttccctttgagcaaaaacagtattttttgtttgaccccaaacatggttagtagtacaagcatctcttattc

SEQ ID NO: 27429 - protein, 344 aa, Arabidopsis thaliana
  peptide (1)..(344): Ceres Seq. ID no. 12332528
  misc_feature (17)..(92): Pfam Name: S1 RNA binding domain Pfam Description: S1 RNA binding domain
  misc_feature (10)..(157): Homolog of NCBI NO: 40744551 NR Description: hypothetical protein AN3156.2 [Aspergillus
  misc_feature (166)..(327): Homolog of NCBI NO: 40744551 NR Description: hypothetical protein AN3156.2 [Aspergillus
  misc_feature (10)..(163): Homolog of NCBI NO: 19114993 NR Description: eukaryotic translation initiation factor 2 alpha
  misc_feature (160)..(326): Homolog of NCBI NO: 19114993 NR Description: eukaryotic translation initiation factor 2 alpha
  misc_feature (1)..(257): Homolog of NCBI NO: 4588003 NR Description: hypothetical EIF-2-Alpha [Arabidopsis thaliana]
  misc_feature (6)..(336): Homolog of NCBI NO: 34898218 NR Description: putative eukaryotic translation initiation factor
  misc_feature (1)..(344): Homolog of NCBI NO: 21537411 NR Description: putative eukaryotic translation initiation factor
  misc_feature (1)..(344): Homolog of NCBI NO: 18405334 NR Description: putative eukaryotic translation initiation factor
  misc_feature (1)..(344): Homolog of NCBI NO: 13549160 NR Description: protein synthesis initiation factor eIF2 alpha
  misc_feature (1)..(344): Homolog of NCBI NO: 15239135 NR Description: eukaryotic translation initiation factor 2 alpha
MANPAPNLECRMYESRYPDVDMAVMIQVKTIADMGAYVSLLEYNNIEGMILFSELSRRRIRSISSLIKVGRTEPVMVLRVDRERGYIDLSKRRVSDEDKEACEERYNKSKLVHSIMRHVAETVGVDLEELYVNIGWPLYKKHGHAFEAFKIVVTDPDSVFDALTREVKETGPDGVEVTKVVPAVSEELKDAFLKDIRRRMTPQPMKIRADIELKCFQFDGVLHIKEAMKKAEAVGTDDCPVKIKLVAPPLYVLTTHTHYKEKGIVTLNKAIEACITAIEEHKGKLVVKEGARAVSERDDKLLAEHMAKLRMDNEEMSGDEGSEDEEEDTGMGEVDIDGGSGIIE

SEQ ID NO: 27430 - protein, 333 aa, Arabidopsis thaliana
  peptide (1)..(333): Ceres Seq. ID no. 12332529
  misc_feature (6)..(81): Pfam Name: S1 RNA binding domain Pfam Description: S1 RNA binding domain
  misc_feature (1)..(146): Homolog of NCBI NO: 40744551 NR Description: hypothetical protein AN3156.2 [Aspergillus
  misc_feature (155)..(316): Homolog of NCBI NO: 40744551 NR Description: hypothetical protein AN3156.2 [Aspergillus
  misc_feature (1)..(152): Homolog of NCBI NO: 19114993 NR Description: eukaryotic translation initiation factor 2 alpha
  misc_feature (149)..(315): Homolog of NCBI NO: 19114993 NR Description: eukaryotic translation initiation factor 2 alpha
  misc_feature (1)..(246): Homolog of NCBI NO: 4588003 NR Description: hypothetical EIF-2-Alpha [Arabidopsis thaliana]
  misc_feature (1)..(325): Homolog of NCBI NO: 34898218 NR Description: putative eukaryotic translation initiation factor
  misc_feature (1)..(333): Homolog of NCBI NO: 21537411 NR Description: putative eukaryotic translation initiation factor
  misc_feature (1)..(333): Homolog of NCBI NO: 18405334 NR Description: putative eukaryotic translation initiation factor
  misc_feature (1)..(333): Homolog of NCBI NO: 13549160 NR Description: protein synthesis initiation factor eIF2 alpha
  misc_feature (1)..(333): Homolog of NCBI NO: 15239135 NR Description: eukaryotic translation initiation factor 2 alpha
MYESRYPDVDMAVMIQVKTIADMGAYVSLLEYNNIEGMILFSELSRRRIRSISSLIKVGRTEPVMVLRVDRERGYIDLSKRRVSDEDKEACEERYNKSKLVHSIMRHVAETVGVDLEELYVNIGWPLYKKHGHAFEAFKIVVTDPDSVFDALTREVKETGPDGVEVTKVVPAVSEELKDAFLKDIRRRMTPQPMKIRADIELKCFQFDGVLHIKEAMKKAEAVGTDDCPVKIKLVAPPLYVLTTHTHYKEKGIVTLNKAIEACITAIEEHKGKLVVKEGARAVSERDDKLLAEHMAKLRMDNEEMSGDEGSEDEEEDTGMGEVDIDGGSGIIE

SEQ ID NO: 27431 - protein, 323 aa, Arabidopsis thaliana
  peptide (1)..(323): Ceres Seq. ID no. 12332530
  misc_feature (1)..(71): Pfam Name: S1 RNA binding domain Pfam Description: S1 RNA binding domain
  misc_feature (1)..(323): Homolog of NCBI NO: 18405334 NR Description: putative eukaryotic translation initiation factor
  misc_feature (1)..(323): Homolog of NCBI NO: 13549160 NR Description: protein synthesis initiation factor eIF2 alpha
  misc_feature (145)..(306): Homolog of NCBI NO: 40744551 NR Description: hypothetical protein AN3156.2 [Aspergillus
  misc_feature (139)..(305): Homolog of NCBI NO: 19114993 NR Description: eukaryotic translation initiation factor 2 alpha
  misc_feature (1)..(315): Homolog of NCBI NO: 34898218 NR Description: putative eukaryotic translation initiation factor
  misc_feature (1)..(323): Homolog of NCBI NO: 21537411 NR Description: putative eukaryotic translation initiation factor
  misc_feature (1)..(236): Homolog of NCBI NO: 4588003 NR Description: hypothetical EIF-2-Alpha [Arabidopsis thaliana]
  misc_feature (1)..(142): Homolog of NCBI NO: 19114993 NR Description: eukaryotic translation initiation factor 2 alpha
  misc_feature (1)..(136): Homolog of NCBI NO: 40744551 NR Description: hypothetical protein AN3156.2 [Aspergillus
  misc_feature (1)..(323): Homolog of NCBI NO: 15239135 NR Description: eukaryotic translation initiation factor 2 alpha
MAVMIQVKTIADMGAYVSLLEYNNIEGMILFSELSRRRIRSISSLIKVGRTEPVMVLRVDRERGYIDLSKRRVSDEDKEACEERYNKSKLVHSIMRHVAETVGVDLEELYVNIGWPLYKKHGHAFEAFKIVVTDPDSVFDALTREVKETGPDGVEVTKVVPAVSEELKDAFLKDIRRRMTPQPMKIRADIELKCFQFDGVLHIKEAMKKAEAVGTDDCPVKIKLVAPPLYVLTTHTHYKEKGIVTLNKAIEACITAIEEHKGKLVVKEGARAVSERDDKLLAEHMAKLRMDNEEMSGDEGSEDEEEDTGMGEVDIDGGSGIIE

SEQ ID NO: 27432 - DNA, 593 bp, Arabidopsis thaliana
  misc_feature (1)..(593): Ceres Seq. ID no. 12331398
  misc_feature: MA Experiment ID: 108434 Result: Up-regulated in Transcription
  misc_feature: MA Experiment 108434 PARAMETER Experiment Name: At_Root_Tips_cDNA_P Parameter: Tissue Value: Root Tips
  misc_feature: MA Experiment ID: 108573 Result: Down-regulated in Transcription
  misc_feature: MA Experiment 108573 PARAMETER Experiment Name: At_Drought_cDNA_P Parameter: Timepoint (hr) Value: 6
  misc_feature: MA Experiment 108573 PARAMETER Experiment Name: At_Drought_cDNA_P Parameter: Tissue Value: Aerial
  misc_feature: MA Experiment 108573 PARAMETER Experiment Name: At_Drought_cDNA_P Parameter: Treatment Value: Drought vs. No Drought
  misc_feature: MA Experiment ID: 20001560 Result: Up-regulated in Transcription
  misc_feature: MA Experiment 20001560 PARAMETER Experiment Name: At_Drought_Soil_Dry_P Parameter: Age (day) Value: 28
  misc_feature: MA Experiment 20001560 PARAMETER Experiment Name: At_Drought_Soil_Dry_P Parameter: Organism Value: A. thaliana
  misc_feature: MA Experiment 20001560 PARAMETER Experiment Name: At_Drought_Soil_Dry_P Parameter: Plant Line Value: WS
  misc_feature: MA Experiment 20001560 PARAMETER Experiment Name: At_Drought_Soil_Dry_P Parameter: Post Timepoint (hr) Value: None
  misc_feature: MA Experiment 20001560 PARAMETER Experiment Name: At_Drought_Soil_Dry_P Parameter: Post-Treatment Value: None
  misc_feature: MA Experiment 20001560 PARAMETER Experiment Name: At_Drought_Soil_Dry_P Parameter: Timepoint (day) Value: 14
  misc_feature: MA Experiment 20001560 PARAMETER Experiment Name: At_Drought_Soil_Dry_P Parameter: Treatment Value: Drought vs. No Drought
cgaaaaaatcacgaagacgacgagtgaagaagaagaagaagcaatggggagaaagaagggattaccggagttcgaagagtcggcgccggatggctttgatccggaaaatccatacaaggatccggtggcgatggttgaaatgagagagcacatcgttcgagagaaatggatccaaatcgagaaggctaagatcttgcgtgagaaggtcaaatggtgttaccgcgtcgaaggagtcaatcactatcagaaatgtcgtcatcttgttcagcagtatctcgattccactcgcggcgtcggttggggaaaggatcatcgtcctatttcgctccacggtcccaaaccggaggctgttgaagctgaataatgttgtgtgcctcattgagatgtctgaggttttgatatgggacatagaatggaatcatttcacaagctaatggctccctgatatcttccaaactctgtagatttctcttgttcttagaaacttgtcggtctttggaccaacggattcatgtaattgagctttgagtattgttacactccacagtatcagtttctgatgatcaaataagtcccattttcattctcctgtc

SEQ ID NO: 27433 - protein, 120 aa, Arabidopsis thaliana
  peptide (1)..(120): Ceres Seq. ID no. 12331399
  misc_feature (27)..(92): Homolog of NCBI NO: 400649 NR Description: NADH-ubiquinone oxidoreductase 12 kDa subunit,
  misc_feature (18)..(120): Homolog of NCBI NO: 37537116 NR Description: unknown protein [Oryza sativa (japonica
  misc_feature (15)..(111): Homolog of NCBI NO: 11994104 NR Description: gene_id:MYF24.13~similar to unknown
  misc_feature (15)..(118): Homolog of NCBI NO: 18402495 NR Description: expressed protein
  misc_feature (15)..(120): Homolog of NCBI NO: 18401879 NR Description: expressed protein
EKITKTTSEEEEEAMGRKKGLPEFEESAPDGFDPENPYKDPVAMVEMREHIVREKWIQIEKAKILREKVKWCYRVEGVNHYQKCRHLVQQYLDSTRGVGWGKDHRPISLHGPKPEAVEAE

SEQ ID NO: 27434 - protein, 106 aa, Arabidopsis thaliana
  peptide (1)..(106): Ceres Seq. ID no. 12331400
  misc_feature (13)..(78): Homolog of NCBI NO: 400649 NR Description: NADH-ubiquinone oxidoreductase 12 kDa subunit,
  misc_feature (4)..(106): Homolog of NCBI NO: 37537116 NR Description: unknown protein [Oryza sativa (japonica
  misc_feature (1)..(97): Homolog of NCBI NO: 11994104 NR Description: gene_id:MYF24.13~similar to unknown
  misc_feature (1)..(104): Homolog of NCBI NO: 18402495 NR Description: expressed protein
  misc_feature (1)..(106): Homolog of NCBI NO: 18401879 NR Description: expressed protein
MGRKKGLPEFEESAPDGFDPENPYKDPVAMVEMREHIVREKWIQIEKAKILREKVKWCYRVEGVNHYQKCRHLVQQYLDSTRGVGWGKDHRPISLHGPKPEAVEAE

SEQ ID NO: 27435 - protein, 77 aa, Arabidopsis thaliana
  peptide (1)..(77): Ceres Seq. ID no. 12331401
  misc_feature (1)..(49): Homolog of NCBI NO: 400649 NR Description: NADH-ubiquinone oxidoreductase 12 kDa subunit,
  misc_feature (1)..(77): Homolog of NCBI NO: 37537116 NR Description: unknown protein [Oryza sativa (japonica
  misc_feature (1)..(68): Homolog of NCBI NO: 11994104 NR Description: gene_id:MYF24.13~similar to unknown
  misc_feature (1)..(75): Homolog of NCBI NO: 18402495 NR Description: expressed protein
  misc_feature (1)..(77): Homolog of NCBI NO: 18401879 NR Description: expressed protein
MVEMREHIVREKWIQIEKAKILREKVKWCYRVEGVNHYQKCRHLVQQYLDSTRGVGWGKDHRPISLHGPKPEAVEAE

SEQ ID NO: 27436 - DNA, 1289 bp, Arabidopsis thaliana
  misc_feature (1)..(1289): Ceres Seq. ID no. 13491726
  misc_feature: MA Experiment ID: 108569 Result: Down-regulated in Transcription
  misc_feature: MA Experiment 108569 PARAMETER Experiment Name: At_0.001%_MeJA__cDNA_P Parameter: Timepoint (hr) Value: 6
  misc_feature: MA Experiment 108569 PARAMETER Experiment Name: At_0.001%_MeJA__cDNA_P Parameter: Tissue Value: Aerial
  misc_feature: MA Experiment 108569 PARAMETER Experiment Name: At_0.001%_MeJA__cDNA_P Parameter: Treatment Value: 0.001% MeJA vs. No Treatment
  misc_feature: MA Experiment ID: 108605 Result: Up-regulated in Transcription
  misc_feature: MA Experiment 108605 PARAMETER Experiment Name: At_100uM_ABA_cDNA_P Parameter: Timepoint (hr) Value: 6
  misc_feature: MA Experiment 108605 PARAMETER Experiment Name: At_100uM_ABA_cDNA_P Parameter: Tissue Value: Aerial
  misc_feature: MA Experiment 108605 PARAMETER Experiment Name: At_100uM_ABA_cDNA_P Parameter: Treatment Value: 100uM ABA vs. No Treatment
  misc_feature: MA Experiment ID: 108609 Result: Up-regulated in Transcription
  misc_feature: MA Experiment 108609 PARAMETER Experiment Name: At_100uM_ABA_cDNA_P Parameter: Timepoint (hr) Value: 24
  misc_feature: MA Experiment 108609 PARAMETER Experiment Name: At_100uM_ABA_cDNA_P Parameter: Tissue Value: Aerial
  misc_feature: MA Experiment 108609 PARAMETER Experiment Name: At_100uM_ABA_cDNA_P Parameter: Treatment Value: 100uM ABA vs. No Treatment
  misc_feature: MA Experiment ID: 20000185 Result: Down-regulated in Transcription
  misc_feature: MA Experiment 20000185 PARAMETER Experiment Name: At_Roots__P Parameter: Age (day) Value: 7 vs. 21
  misc_feature: MA Experiment 20000185 PARAMETER Experiment Name: At_Roots__P Parameter: Organism Value: A. thaliana
  misc_feature: MA Experiment 20000185 PARAMETER Experiment Name: At_Roots__P Parameter: Tissue Value: Roots vs. Whole Plant
  misc_feature: MA Experiment ID: 20000234 Result: Down-regulated in Transcription
  misc_feature: MA Experiment 20000234 PARAMETER Experiment Name: At_Siliques_P Parameter: Age (day) Value: 21
  misc_feature: MA Experiment 20000234 PARAMETER Experiment Name: At_Siliques_P Parameter: Organism Value: A. thaliana
  misc_feature: MA Experiment 20000234 PARAMETER Experiment Name: At_Siliques_P Parameter: Plant Line Value: WS
  misc_feature: MA Experiment 20000234 PARAMETER Experiment Name: At_Siliques_P Parameter: Tissue Value: Less Than 5mm Siliques vs. Whole Plant
  misc_feature: MA Experiment ID: 20000265 Result: Down-regulated in Transcription
  misc_feature: MA Experiment 20000265 PARAMETER Experiment Name: At_Open_Flower_P Parameter: Age (day) Value: 21
  misc_feature: MA Experiment 20000265 PARAMETER Experiment Name: At_Open_Flower_P Parameter: Plant Line Value: WS
  misc_feature: MA Experiment 20000265 PARAMETER Experiment Name: At_Open_Flower_P Parameter: Tissue Value: Closed Flower vs. Whole Plant
  misc_feature: MA Experiment ID: 20000456 Result: Up-regulated in Transcription
  misc_feature: MA Experiment 20000456 PARAMETER Experiment Name: At_100uM_BA_P Parameter: Age (day) Value: 14
  misc_feature: MA Experiment 20000456 PARAMETER Experiment Name: At_100uM_BA_P Parameter: Organism Value: A. thaliana
  misc_feature: MA Experiment 20000456 PARAMETER Experiment Name: At_100uM_BA_P Parameter: Plant Line Value: WS
  misc_feature: MA Experiment 20000456 PARAMETER Experiment Name: At_100uM_BA_P Parameter: Timepoint (hr) Value: 6
  misc_feature: MA Experiment 20000456 PARAMETER Experiment Name: At_100uM_BA_P Parameter: Tissue Value: Aerial
  misc_feature: MA Experiment 20000456 PARAMETER Experiment Name: At_100uM_BA_P Parameter: Treatment Value: 100uM BA vs. No Treatment
  misc_feature: MA Experiment ID: 20000709 Result: Down-regulated in Transcription
  misc_feature: MA Experiment 20000709 PARAMETER Experiment Name: At_15mM_NH4NO3_L-to-H_P Parameter: Age (hr) Value: 14
  misc_feature: MA Experiment 20000709 PARAMETER Experiment Name: At_15mM_NH4NO3_L-to-H_P Parameter: Organism Value: A. thaliana
  misc_feature: MA Experiment 20000709 PARAMETER Experiment Name: At_15mM_NH4NO3_L-to-H_P Parameter: Plant Line Value: WS
  misc_feature: MA Experiment 20000709 PARAMETER Experiment Name: At_15mM_NH4NO3_L-to-H_P Parameter: Timepoint (hr) Value: 4
  misc_feature: MA Experiment 20000709 PARAMETER Experiment Name: At_15mM_NH4NO3_L-to-H_P Parameter: Tissue Value: Aerial
  misc_feature: MA Experiment 20000709 PARAMETER Experiment Name: At_15mM_NH4NO3_L-to-H_P Parameter: Treatment Value: 15mM NH4NO3 vs. 30mM Mannitol
atgcaaaaataaacatagtaacaatactttaaactatttacaccactttaatcttattctccactctttgaacgtaatggagaagaaccatagtagtggagagtgggagaagatgaagaacgagatcaacgagctaatgatagaaggaagagactatgcacaccagtttggatcagcttcatctcaagaaacacgtgaacatttagccaaaaagattcttcaatcttaccacaagtctctcaccatcatgaactactccggcgaacttgaccaagtttctcagggtggaggaagccccaagagcgatgattccgatcaagaaccacttgtcatcaagagttcgaagaagtcaatgccaaggtggagttcaaaagtcagaattgcccctggagctggtgttgatagaacgctggacgatggattcagttggagaaagtacggccagaaggatattctcggagccaaatttccaagaggatactatagatgcacgtatagaaagtctcaaggatgtgaagccactaaacaagtccaaagatctgatgaaaatcagatgctccttgagatcagttaccgaggaatacattcttgctctcaagctgcaaatgtcggtacaacaatgccgatacaaaacctcgaaccgaaccagacccaagaacacggaaatcttgacatggtaaaggaaagtgtagacaactacaatcaccaagcacatttgcatcacaaccttcactatccattgtcatctaccccaaatctagagaataacaatgcctatatgcttcaaatgcgagatcaaaacatcgaatattttggatctacgagcttctctagtgatctaggaactagtatcaactacaattttccagcatctggctcggcttctcactcagcatcaaactctccgtccaccgtccctttggaatccccgtttgaaagctatgatccaaatcatccatatggaggatttggtgggttctattcttagttatctacttaagggagggacggaactttttacatgacctcttgattaaagagagagttttcataatagctaatcaatttcctattcaaatatccgagttttttttctaatcatgtttatcaattgtcttattacagaaggcttattttcaggtctatgttgaaataaatggatttgtactcgtaggtatgatccttgttatctagcttatagtccatggtttttactttttgccttatgttgttgtaacacattcgagttcttatattgcaaatttgagtcttcttttagctatacaatt

SEQ ID NO: 27437 - protein, 328 aa, Arabidopsis thaliana
  peptide (1)..(328): Ceres Seq. ID no. 13491727
  misc_feature (137)..(199): Pfam Name: WRKY DNA -binding domain Pfam Description: WRKY DNA -binding domain
  misc_feature (39)..(198): Homolog of NCBI NO: 7406995 NR Description: DNA-binding protein 3 [Nicotiana tabacum]
  misc_feature (42)..(314): Homolog of NCBI NO: 15225975 NR Description: WRKY family transcription factor [Arabidopsis
  misc_feature (26)..(231): Homolog of NCBI NO: 11358951 NR Description: DNA-binding protein 4 [imported] - common tobacco
  misc_feature (115)..(198): Homolog of NCBI NO: 34911952 NR Description: P0694A04.6 [Oryza sativa (japonica
  misc_feature (97)..(199): Homolog of NCBI NO: 30681651 NR Description: WRKY family transcription factor [Arabidopsis
  misc_feature (97)..(199): Homolog of NCBI NO: 15237039 NR Description: WRKY family transcription factor [Arabidopsis
  misc_feature (115)..(326): Homolog of NCBI NO: 34898262 NR Description: WRKY family transcription factor-like protein
  misc_feature (98)..(201): Homolog of NCBI NO: 40253471 NR Description: putative transcription factor WRKY5
  misc_feature (75)..(216): Homolog of NCBI NO: 15236622 NR Description: WRKY family transcription factor [Arabidopsis
  misc_feature (26)..(328): Homolog of NCBI NO: 18420751 NR Description: WRKY family transcription factor [Arabidopsis
CKNKHSNNTLNYLHHFNLILHSLNVMEKNHSSGEWEKMKNEINELMIEGRDYAHQFGSASSQETREHLAKKILQSYHKSLTIMNYSGELDQVSQGGGSPKSDDSDQEPLVIKSSKKSMPRWSSKVRIAPGAGVDRTLDDGFSWRKYGQKDILGAKFPRGYYRCTYRKSQGCEATKQVQRSDENQMLLEISYRGIHSCSQAANVGTTMPIQNLEPNQTQEHGNLDMVKESVDNYNHQAHLHHNLHYPLSSTPNLENNNAYMLQMRDQNIEYFGSTSFSSDLGTSINYNFPASGSASHSASNSPSTVPLESPFESYDPNHPYGGFGGFYS

SEQ ID NO: 27438 - protein, 303 aa, Arabidopsis thaliana
  peptide (1)..(303): Ceres Seq. ID no. 13491728
  misc_feature (112)..(174): Pfam Name: WRKY DNA -binding domain Pfam Description: WRKY DNA -binding domain
  misc_feature (14)..(173): Homolog of NCBI NO: 7406995 NR Description: DNA-binding protein 3 [Nicotiana tabacum]
  misc_feature (17)..(289): Homolog of NCBI NO: 15225975 NR Description: WRKY family transcription factor [Arabidopsis
  misc_feature (1)..(206): Homolog of NCBI NO: 11358951 NR Description: DNA-binding protein 4 [imported] - common tobacco
  misc_feature (90)..(173): Homolog of NCBI NO: 34911952 NR Description: P0694A04.6 [Oryza sativa (japonica
  misc_feature (72)..(174): Homolog of NCBI NO: 30681651 NR Description: WRKY family transcription factor [Arabidopsis
  misc_feature (72)..(174): Homolog of NCBI NO: 15237039 NR Description: WRKY family transcription factor [Arabidopsis
  misc_feature (90)..(301): Homolog of NCBI NO: 34898262 NR Description: WRKY family transcription factor-like protein
  misc_feature (73)..(176): Homolog of NCBI NO: 40253471 NR Description: putative transcription factor WRKY5
  misc_feature (50)..(191): Homolog of NCBI NO: 15236622 NR Description: WRKY family transcription factor [Arabidopsis
  misc_feature (1)..(303): Homolog of NCBI NO: 18420751 NR Description: WRKY family transcription factor [Arabidopsis
MEKNHSSGEWEKMKNEINELMIEGRDYAHQFGSASSQETREHLAKKILQSYHKSLTIMNYSGELDQVSQGGGSPKSDDSDQEPLVIKSSKKSMPRWSSKVRIAPGAGVDRTLDDGFSWRKYGQKDILGAKFPRGYYRCTYRKSQGCEATKQVQRSDENQMLLEISYRGIHSCSQAANVGTTMPIQNLEPNQTQEHGNLDMVKESVDNYNHQAHLHHNLHYPLSSTPNLENNNAYMLQMRDQNIEYFGSTSFSSDLGTSINYNFPASGSASHSASNSPSTVPLESPFESYDPNHPYGGFGGFYS

SEQ ID NO: 27439 - protein, 291 aa, Arabidopsis thaliana
  peptide (1)..(291): Ceres Seq. ID no. 13491729
  misc_feature (100)..(162): Pfam Name: WRKY DNA -binding domain Pfam Description: WRKY DNA -binding domain
  misc_feature (2)..(161): Homolog of NCBI NO: 7406995 NR Description: DNA-binding protein 3 [Nicotiana tabacum]
  misc_feature (5)..(277): Homolog of NCBI NO: 15225975 NR Description: WRKY family transcription factor [Arabidopsis
  misc_feature (1)..(194): Homolog of NCBI NO: 11358951 NR Description: DNA-binding protein 4 [imported] - common tobacco
  misc_feature (78)..(161): Homolog of NCBI NO: 34911952 NR Description: P0694A04.6 [Oryza sativa (japonica
  misc_feature (60)..(162): Homolog of NCBI NO: 30681651 NR Description: WRKY family transcription factor [Arabidopsis
  misc_feature (60)..(162): Homolog of NCBI NO: 15237039 NR Description: WRKY family transcription factor [Arabidopsis
  misc_feature (78)..(289): Homolog of NCBI NO: 34898262 NR Description: WRKY family transcription factor-like protein
  misc_feature (61)..(164): Homolog of NCBI NO: 40253471 NR Description: putative transcription factor WRKY5
  misc_feature (38)..(179): Homolog of NCBI NO: 15236622 NR Description: WRKY family transcription factor [Arabidopsis
  misc_feature (1)..(291): Homolog of NCBI NO: 18420751 NR Description: WRKY family transcription factor [Arabidopsis
MKNEINELMIEGRDYAHQFGSASSQETREHLAKKILQSYHKSLTIMNYSGELDQVSQGGGSPKSDDSDQEPLVIKSSKKSMPRWSSKVRIAPGAGVDRTLDDGFSWRKYGQKDILGAKFPRGYYRCTYRKSQGCEATKQVQRSDENQMLLEISYRGIHSCSQAANVGTTMPIQNLEPNQTQEHGNLDMVKESVDNYNHQAHLHHNLHYPLSSTPNLENNNAYMLQMRDQNIEYFGSTSFSSDLGTSINYNFPASGSASHSASNSPSTVPLESPFESYDPNHPYGGFGGFYS

SEQ ID NO: 27440 - DNA, 1306 bp, Arabidopsis thaliana; identical to SEQ ID NO: 25284
  misc_feature (1)..(1306): Ceres Seq. ID no. 12335581
  misc_feature: MA Experiment ID: 108433 Result: Down-regulated in Transcription
  misc_feature: MA Experiment 108433 PARAMETER Experiment Name: At_rhl_Mutant2_cDNA_P Parameter: Age (day) Value: 7
  misc_feature: MA Experiment 108433 PARAMETER Experiment Name: At_rhl_Mutant2_cDNA_P Parameter: Organism Value: A. thaliana
  misc_feature: MA Experiment 108433 PARAMETER Experiment Name: At_rhl_Mutant2_cDNA_P Parameter: Plant Line Value: rhl Mutant vs. wt landsburg
  misc_feature: MA Experiment 108433 PARAMETER Experiment Name: At_rhl_Mutant2_cDNA_P Parameter: Tissue Value: Roots
  misc_feature: MA Experiment ID: 108435 Result: Up-regulated in Transcription
  misc_feature: MA Experiment 108435 PARAMETER Experiment Name: At_stm_Mutants_cDNA_P Parameter: Plant Line Value: wt Landsburg vs stm
  misc_feature: MA Experiment 108435 PARAMETER Experiment Name: At_stm_Mutants_cDNA_P Parameter: Tissue Value: Shoot Apical Meristem Region
  misc_feature: MA Experiment ID: 108461 Result: Up-regulated in Transcription
  misc_feature: MA Experiment 108461 PARAMETER Experiment Name: At_Germinating_Seeds_cDNA_P Parameter: Age (day) Value: 1 vs. 0
  misc_feature: MA Experiment 108461 PARAMETER Experiment Name: At_Germinating_Seeds_cDNA_P Parameter: Tissue Value: Germinating Seeds
  misc_feature: MA Experiment ID: 108464 Result: Up-regulated in Transcription
  misc_feature: MA Experiment 108464 PARAMETER Experiment Name: At_Germinating_Seeds_cDNA_P Parameter: Age (day) Value: 4 vs. 0
  misc_feature: MA Experiment 108464 PARAMETER Experiment Name: At_Germinating_Seeds_cDNA_P Parameter: Tissue Value: Germinating Seeds
  misc_feature: MA Experiment ID: 20000087 Result: Up-regulated in Transcription
  misc_feature: MA Experiment 20000087 PARAMETER Experiment Name: At_100uM_ABA_Mutants_cDNA_P Parameter: Plant Line Value: WS
  misc_feature: MA Experiment 20000087 PARAMETER Experiment Name: At_100uM_ABA_Mutants_cDNA_P Parameter: Timepoint (hr) Value: 6
  misc_feature: MA Experiment 20000087 PARAMETER Experiment Name: At_100uM_ABA_Mutants_cDNA_P Parameter: Tissue Value: Aerial
  misc_feature: MA Experiment 20000087 PARAMETER Experiment Name: At_100uM_ABA_Mutants_cDNA_P Parameter: Treatment Value: 100uM ABA vs. No Treatment
  misc_feature: MA Experiment ID: 20000117 Result: Up-regulated in Transcription
  misc_feature: MA Experiment 20000117 PARAMETER Experiment Name: At_100uM_ABA_Mutants_cDNA_P Parameter: Plant Line Value: Columbia
  misc_feature: MA Experiment 20000117 PARAMETER Experiment Name: At_100uM_ABA_Mutants_cDNA_P Parameter: Timepoint (hr) Value: 6
  misc_feature: MA Experiment 20000117 PARAMETER Experiment Name: At_100uM_ABA_Mutants_cDNA_P Parameter: Tissue Value: Aerial
  misc_feature: MA Experiment 20000117 PARAMETER Experiment Name: At_100uM_ABA_Mutants_cDNA_P Parameter: Treatment Value: 100uM ABA vs. No Treatment
  misc_feature: MA Experiment ID: 20000179 Result: Up-regulated in Transcription
  misc_feature: MA Experiment 20000179 PARAMETER Experiment Name: At_Germinating_Seeds_P Parameter: Age (hr) Value: 6 vs. 0
  misc_feature: MA Experiment 20000179 PARAMETER Experiment Name: At_Germinating_Seeds_P Parameter: Tissue Value: Germinating Seeds
  misc_feature: MA Experiment ID: 20000180 Result: Up-regulated in Transcription
  misc_feature: MA Experiment 20000180 PARAMETER Experiment Name: At_Germinating_Seeds_P Parameter: Age (hr) Value: 24 vs. 0
  misc_feature: MA Experiment 20000180 PARAMETER Experiment Name: At_Germinating_Seeds_P Parameter: Tissue Value: Germinating Seeds
  misc_feature: MA Experiment ID: 20000184 Result: Down-regulated in Transcription
  misc_feature: MA Experiment 20000184 PARAMETER Experiment Name: At_Shoots__P Parameter: Age (day) Value: 7
  misc_feature: MA Experiment 20000184 PARAMETER Experiment Name: At_Shoots__P Parameter: Tissue Value: Shoots vs. Whole Plant
  misc_feature: MA Experiment ID: 20000224 Result: Up-regulated in Transcription
  misc_feature: MA Experiment ID: 20000234 Result: Up-regulated in Transcription
  misc_feature: MA Experiment 20000234 PARAMETER Experiment Name: At_Siliques_P Parameter: Age (day) Value: 21
  misc_feature: MA Experiment 20000234 PARAMETER Experiment Name: At_Siliques_P Parameter: Organism Value: A. thaliana
  misc_feature: MA Experiment 20000234 PARAMETER Experiment Name: At_Siliques_P Parameter: Plant Line Value: WS
  misc_feature: MA Experiment 20000234 PARAMETER Experiment Name: At_Siliques_P Parameter: Tissue Value: Less Than 5mm Siliques vs. Whole Plant
  misc_feature: MA Experiment ID: 20000235 Result: Up-regulated in Transcription
  misc_feature: MA Experiment 20000235 PARAMETER Experiment Name: At_Siliques_P Parameter: Age (day) Value: 21
  misc_feature: MA Experiment 20000235 PARAMETER Experiment Name: At_Siliques_P Parameter: Organism Value: A. thaliana
  misc_feature: MA Experiment 20000235 PARAMETER Experiment Name: At_Siliques_P Parameter: Plant Line Value: WS
  misc_feature: MA Experiment 20000235 PARAMETER Experiment Name: At_Siliques_P Parameter: Tissue Value: 5-10mm Siliques vs. Whole Plant
  misc_feature: MA Experiment ID: 20000264 Result: Up-regulated in Transcription
  misc_feature: MA Experiment 20000264 PARAMETER Experiment Name: At_Open_Flower_P Parameter: Age (day) Value: 21
  misc_feature: MA Experiment 20000264 PARAMETER Experiment Name: At_Open_Flower_P Parameter: Plant Line Value: WS
  misc_feature: MA Experiment 20000264 PARAMETER Experiment Name: At_Open_Flower_P Parameter: Tissue Value: Open Flower vs. Whole Plant
  misc_feature: MA Experiment ID: 20000265 Result: Up-regulated in Transcription
  misc_feature: MA Experiment 20000265 PARAMETER Experiment Name: At_Open_Flower_P Parameter: Age (day) Value: 21
  misc_feature: MA Experiment 20000265 PARAMETER Experiment Name: At_Open_Flower_P Parameter: Plant Line Value: WS
  misc_feature: MA Experiment 20000265 PARAMETER Experiment Name: At_Open_Flower_P Parameter: Tissue Value: Closed Flower vs. Whole Plant
  misc_feature: MA Experiment ID: 20000286 Result: Up-regulated in Transcription
  misc_feature: MA Experiment 20000286 PARAMETER Experiment Name: At_Open_Flower_P Parameter: Age (day) Value: 21
  misc_feature: MA Experiment 20000286 PARAMETER Experiment Name: At_Open_Flower_P Parameter: Plant Line Value: WS
  misc_feature: MA Experiment 20000286 PARAMETER Experiment Name: At_Open_Flower_P Parameter: Tissue Value: Half Open vs. Whole Plant
  misc_feature: MA Experiment ID: 20000437 Result: Up-regulated in Transcription
  misc_feature: MA Experiment 20000437 PARAMETER Experiment Name: At_Drought_P Parameter: Age (day) Value: 8
  misc_feature: MA Experiment 20000437 PARAMETER Experiment Name: At_Drought_P Parameter: Organism Value: A. thaliana
  misc_feature: MA Experiment 20000437 PARAMETER Experiment Name: At_Drought_P Parameter: Plant Line Value: WS
  misc_feature: MA Experiment 20000437 PARAMETER Experiment Name: At_Drought_P Parameter: Timepoint (hr) Value: 24
  misc_feature: MA Experiment 20000437 PARAMETER Experiment Name: At_Drought_P Parameter: Tissue Value: Whole Plant
  misc_feature: MA Experiment 20000437 PARAMETER Experiment Name: At_Drought_P Parameter: Treatment Value: Drought vs. No Drought
  misc_feature: MA Experiment ID: 20000438 Result: Down-regulated in Transcription
  misc_feature: MA Experiment 20000438 PARAMETER Experiment Name: At_Shoots__P Parameter: Age (day) Value: 14
  misc_feature: MA Experiment 20000438 PARAMETER Experiment Name: At_Shoots__P Parameter: Tissue Value: Shoots vs. Whole Plant
  misc_feature: MA Experiment ID: 20000456 Result: Up-regulated in Transcription
  misc_feature: MA Experiment 20000456 PARAMETER Experiment Name: At_100uM_BA_P Parameter: Age (day) Value: 14
  misc_feature: MA Experiment 20000456 PARAMETER Experiment Name: At_100uM_BA_P Parameter: Organism Value: A. thaliana
  misc_feature: MA Experiment 20000456 PARAMETER Experiment Name: At_100uM_BA_P Parameter: Plant Line Value: WS
  misc_feature: MA Experiment 20000456 PARAMETER Experiment Name: At_100uM_BA_P Parameter: Timepoint (hr) Value: 6
  misc_feature: MA Experiment 20000456 PARAMETER Experiment Name: At_100uM_BA_P Parameter: Tissue Value: Aerial
  misc_feature: MA Experiment 20000456 PARAMETER Experiment Name: At_100uM_BA_P Parameter: Treatment Value: 100uM BA vs. No Treatment
  misc_feature: MA Experiment ID: 20000573 Result: Down-regulated in Transcription
  misc_feature: MA Experiment 20000573 PARAMETER Experiment Name: At_100uM_ABA_Mutants__P Parameter: Organism Value: A. thaliana
  misc_feature: MA Experiment 20000573 PARAMETER Experiment Name: At_100uM_ABA_Mutants__P Parameter: Plant Line Value: CS22 vs. Ler wt
  misc_feature: MA Experiment 20000573 PARAMETER Experiment Name: At_100uM_ABA_Mutants__P Parameter: Timepoint (hr) Value: N/A
  misc_feature: MA Experiment 20000573 PARAMETER Experiment Name: At_100uM_ABA_Mutants__P Parameter: Tissue Value: Whole Plant
  misc_feature: MA Experiment 20000573 PARAMETER Experiment Name: At_100uM_ABA_Mutants__P Parameter: Treatment Value: None
  misc_feature: MA Experiment ID: 20001247 Result: Down-regulated in Transcription
  misc_feature: MA Experiment 20001247 PARAMETER Experiment Name: At_Far-red-induction_P Parameter: Age (day) Value: 7
  misc_feature: MA Experiment 20001247 PARAMETER Experiment Name: At_Far-red-induction_P Parameter: Light Value: Far-red vs. White
  misc_feature: MA Experiment 20001247 PARAMETER Experiment Name: At_Far-red-induction_P Parameter: Organism Value: A. thaliana
  misc_feature: MA Experiment 20001247 PARAMETER Experiment Name: At_Far-red-induction_P Parameter: Plant Line Value: Columbia
  misc_feature: MA Experiment 20001247 PARAMETER Experiment Name: At_Far-red-induction_P Parameter: Timepoint (hr) Value: 1
  misc_feature: MA Experiment 20001247 PARAMETER Experiment Name: At_Far-red-induction_P Parameter: Tissue Value: Whole Plant
  misc_feature: MA Experiment ID: 20001248 Result: Down-regulated in Transcription
  misc_feature: MA Experiment 20001248 PARAMETER Experiment Name: At_Far-red-induction_P Parameter: Age (day) Value: 7
  misc_feature: MA Experiment 20001248 PARAMETER Experiment Name: At_Far-red-induction_P Parameter: Light Value: Far-red vs. White
  misc_feature: MA Experiment 20001248 PARAMETER Experiment Name: At_Far-red-induction_P Parameter: Organism Value: A. thaliana
  misc_feature: MA Experiment 20001248 PARAMETER Experiment Name: At_Far-red-induction_P Parameter: Plant Line Value: Columbia
  misc_feature: MA Experiment 20001248 PARAMETER Experiment Name: At_Far-red-induction_P Parameter: Timepoint (hr) Value: 4
  misc_feature: MA Experiment 20001248 PARAMETER Experiment Name: At_Far-red-induction_P Parameter: Tissue Value: Whole Plant
  misc_feature: MA Experiment ID: 20001450 Result: Down-regulated in Transcription
  misc_feature: MA Experiment 20001450 PARAMETER Experiment Name: At_Far-red-induction_P Parameter: Age (day) Value: 7
  misc_feature: MA Experiment 20001450 PARAMETER Experiment Name: At_Far-red-induction_P Parameter: Light Value: Far-red vs. White
  misc_feature: MA Experiment 20001450 PARAMETER Experiment Name: At_Far-red-induction_P Parameter: Organism Value: A. thaliana
  misc_feature: MA Experiment 20001450 PARAMETER Experiment Name: At_Far-red-induction_P Parameter: Plant Line Value: Columbia
  misc_feature: MA Experiment 20001450 PARAMETER Experiment Name: At_Far-red-induction_P Parameter: Timepoint (hr) Value: 8
  misc_feature: MA Experiment 20001450 PARAMETER Experiment Name: At_Far-red-induction_P Parameter: Tissue Value: Whole Plant
  misc_feature: MA Experiment ID: 20001451 Result: Down-regulated in Transcription
  misc_feature: MA Experiment 20001451 PARAMETER Experiment Name: At_Far-red-induction_P Parameter: Age (day) Value: 7
  misc_feature: MA Experiment 20001451 PARAMETER Experiment Name: At_Far-red-induction_P Parameter: Light Value: Far-red vs. White
  misc_feature: MA Experiment 20001451 PARAMETER Experiment Name: At_Far-red-induction_P Parameter: Organism Value: A. thaliana
  misc_feature: MA Experiment 20001451 PARAMETER Experiment Name: At_Far-red-induction_P Parameter: Plant Line Value: Columbia
  misc_feature: MA Experiment 20001451 PARAMETER Experiment Name: At_Far-red-induction_P Parameter: Timepoint (hr) Value: 24
  misc_feature: MA Experiment 20001451 PARAMETER Experiment Name: At_Far-red-induction_P Parameter: Tissue Value: Whole Plant
  misc_feature: MA Experiment ID: 20001555 Result: Up-regulated in Transcription
  misc_feature: MA Experiment 20001555 PARAMETER Experiment Name: At_Drought_Soil_Dry_P Parameter: Age (day) Value: 24
  misc_feature: MA Experiment 20001555 PARAMETER Experiment Name: At_Drought_Soil_Dry_P Parameter: Organism Value: A. thaliana
  misc_feature: MA Experiment 20001555 PARAMETER Experiment Name: At_Drought_Soil_Dry_P Parameter: Plant Line Value: WS
  misc_feature: MA Experiment 20001555 PARAMETER Experiment Name: At_Drought_Soil_Dry_P Parameter: Post Timepoint (hr) Value: None
  misc_feature: MA Experiment 20001555 PARAMETER Experiment Name: At_Drought_Soil_Dry_P Parameter: Post-Treatment Value: None
  misc_feature: MA Experiment 20001555 PARAMETER Experiment Name: At_Drought_Soil_Dry_P Parameter: Timepoint (day) Value: 10
  misc_feature: MA Experiment 20001555 PARAMETER Experiment Name: At_Drought_Soil_Dry_P Parameter: Treatment Value: Drought vs. No Drought
  misc_feature: MA Experiment ID: 20001556 Result: Up-regulated in Transcription
  misc_feature: MA Experiment 20001556 PARAMETER Experiment Name: At_Drought_Soil_Dry_P Parameter: Age (day) Value: 26
  misc_feature: MA Experiment 20001556 PARAMETER Experiment Name: At_Drought_Soil_Dry_P Parameter: Organism Value: A. thaliana
  misc_feature: MA Experiment 20001556 PARAMETER Experiment Name: At_Drought_Soil_Dry_P Parameter: Plant Line Value: WS
  misc_feature: MA Experiment 20001556 PARAMETER Experiment Name: At_Drought_Soil_Dry_P Parameter: Post Timepoint (hr) Value: None
  misc_feature: MA Experiment 20001556 PARAMETER Experiment Name: At_Drought_Soil_Dry_P Parameter: Post-Treatment Value: None
  misc_feature: MA Experiment 20001556 PARAMETER Experiment Name: At_Drought_Soil_Dry_P Parameter: Timepoint (day) Value: 12
  misc_feature: MA Experiment 20001556 PARAMETER Experiment Name: At_Drought_Soil_Dry_P Parameter: Treatment Value: Drought vs. No Drought
  misc_feature: MA Experiment ID: 20001557 Result: Up-regulated in Transcription
  misc_feature: MA Experiment 20001557 PARAMETER Experiment Name: At_Drought_Soil_Dry_P Parameter: Age (day) Value: 27
  misc_feature: MA Experiment 20001557 PARAMETER Experiment Name: At_Drought_Soil_Dry_P Parameter: Organism Value: A. thaliana
  misc_feature: MA Experiment 20001557 PARAMETER Experiment Name: At_Drought_Soil_Dry_P Parameter: Plant Line Value: WS
  misc_feature: MA Experiment 20001557 PARAMETER Experiment Name: At_Drought_Soil_Dry_P Parameter: Post Timepoint (hr) Value: 3
  misc_feature: MA Experiment 20001557 PARAMETER Experiment Name: At_Drought_Soil_Dry_P Parameter: Post-Treatment Value: Re-Water vs. No Drought
  misc_feature: MA Experiment 20001557 PARAMETER Experiment Name: At_Drought_Soil_Dry_P Parameter: Timepoint (day) Value: 13
  misc_feature: MA Experiment 20001557 PARAMETER Experiment Name: At_Drought_Soil_Dry_P Parameter: Treatment Value: Drought vs. No Drought
  misc_feature: MA Experiment ID: 20001558 Result: Up-regulated in Transcription
  misc_feature: MA Experiment 20001558 PARAMETER Experiment Name: At_Drought_Soil_Dry_P Parameter: Age (day) Value: 27
  misc_feature: MA Experiment 20001558 PARAMETER Experiment Name: At_Drought_Soil_Dry_P Parameter: Organism Value: A. thaliana
  misc_feature: MA Experiment 20001558 PARAMETER Experiment Name: At_Drought_Soil_Dry_P Parameter: Plant Line Value: WS
  misc_feature: MA Experiment 20001558 PARAMETER Experiment Name: At_Drought_Soil_Dry_P Parameter: Post Timepoint (hr) Value: 6
  misc_feature: MA Experiment 20001558 PARAMETER Experiment Name: At_Drought_Soil_Dry_P Parameter: Post-Treatment Value: Re-Water vs. No Drought
  misc_feature: MA Experiment 20001558 PARAMETER Experiment Name: At_Drought_Soil_Dry_P Parameter: Timepoint (day) Value: 13
  misc_feature: MA Experiment 20001558 PARAMETER Experiment Name: At_Drought_Soil_Dry_P Parameter: Treatment Value: Drought vs. No Drought
  misc_feature: MA Experiment ID: 20001560 Result: Up-regulated in Transcription
  misc_feature: MA Experiment 20001560 PARAMETER Experiment Name: At_Drought_Soil_Dry_P Parameter: Age (day) Value: 28
  misc_feature: MA Experiment 20001560 PARAMETER Experiment Name: At_Drought_Soil_Dry_P Parameter: Organism Value: A. thaliana
  misc_feature: MA Experiment 20001560 PARAMETER Experiment Name: At_Drought_Soil_Dry_P Parameter: Plant Line Value: WS
  misc_feature: MA Experiment 20001560 PARAMETER Experiment Name: At_Drought_Soil_Dry_P Parameter: Post Timepoint (hr) Value: None
  misc_feature: MA Experiment 20001560 PARAMETER Experiment Name: At_Drought_Soil_Dry_P Parameter: Post-Treatment Value: None
  misc_feature: MA Experiment 20001560 PARAMETER Experiment Name: At_Drought_Soil_Dry_P Parameter: Timepoint (day) Value: 14
  misc_feature: MA Experiment 20001560 PARAMETER Experiment Name: At_Drought_Soil_Dry_P Parameter: Treatment Value: Drought vs. No Drought
  misc_feature: MA Experiment ID: 20001904 Result: Up-regulated in Transcription
  misc_feature: MA Experiment 20001904 PARAMETER Experiment Name: At_Drought_Reproduction_P Parameter: Age (day) Value: 37
  misc_feature: MA Experiment 20001904 PARAMETER Experiment Name: At_Drought_Reproduction_P Parameter: Organism Value: A. thaliana
  misc_feature: MA Experiment 20001904 PARAMETER Experiment Name: At_Drought_Reproduction_P Parameter: Plant Line Value: WS
  misc_feature: MA Experiment 20001904 PARAMETER Experiment Name: At_Drought_Reproduction_P Parameter: Timepoint (day) Value: 7
  misc_feature: MA Experiment 20001904 PARAMETER Experiment Name: At_Drought_Reproduction_P Parameter: Tissue Value: Rosettes
  misc_feature: MA Experiment 20001904 PARAMETER Experiment Name: At_Drought_Reproduction_P Parameter: Treatment Value: Drought vs. No Drought
  misc_feature: MA Experiment ID: 20001905 Result: Up-regulated in Transcription
  misc_feature: MA Experiment 20001905 PARAMETER Experiment Name: At_Drought_Reproduction_P Parameter: Age (day) Value: 40
  misc_feature: MA Experiment 20001905 PARAMETER Experiment Name: At_Drought_Reproduction_P Parameter: Organism Value: A. thaliana
  misc_feature: MA Experiment 20001905 PARAMETER Experiment Name: At_Drought_Reproduction_P Parameter: Plant Line Value: WS
  misc_feature: MA Experiment 20001905 PARAMETER Experiment Name: At_Drought_Reproduction_P Parameter: Timepoint (day) Value: 10
  misc_feature: MA Experiment 20001905 PARAMETER Experiment Name: At_Drought_Reproduction_P Parameter: Tissue Value: Rosettes
  misc_feature: MA Experiment 20001905 PARAMETER Experiment Name: At_Drought_Reproduction_P Parameter: Treatment Value: Drought vs. No Drought

SEQ ID NO: 27441 - protein, 159 aa, Arabidopsis thaliana; identical to SEQ ID NO: 25285
  peptide (1)..(159): Ceres Seq. ID no. 12335582
  misc_feature (23)..(87): Pfam Name: bZIP transcription factor Pfam Description: bZIP transcription factor
  misc_feature (23)..(87): Pfam Name: bZIP transcription factor Pfam Description: bZIP transcription factor
  misc_feature (3)..(159): Homolog of NCBI NO: 16580130 NR Description: bZIP transcription factor BZI-2 [Nicotiana
  misc_feature (3)..(159): Homolog of NCBI NO: 4457221 NR Description: putative bZIP DNA-binding protein [Capsicum
  misc_feature (3)..(159): Homolog of NCBI NO: 24460973 NR Description: bZIP transcription factor [Capsicum chinense]
  misc_feature (3)..(159): Homolog of NCBI NO: 4457221 NR Description: putative bZIP DNA-binding protein [Capsicum
  misc_feature (1)..(159): Homolog of NCBI NO: 1769891 NR Description: bZIP transcription factor [Arabidopsis thaliana]
  misc_feature (1)..(159): Homolog of NCBI NO: 15236153 NR Description: bZIP family transcription factor; protein id:
  misc_feature (3)..(159): Homolog of NCBI NO: 24460973 NR Description: bZIP transcription factor [Capsicum chinense]
  misc_feature (3)..(159): Homolog of NCBI NO: 16580130 NR Description: bZIP transcription factor BZI-2 [Nicotiana
  misc_feature (1)..(159): Homolog of NCBI NO: 1769891 NR Description: bZIP transcription factor [Arabidopsis thaliana]
  misc_feature (1)..(159): Homolog of NCBI NO: 15236153 NR Description: bZIP family transcription factor; protein id:

SEQ ID NO: 27442 - protein, 136 aa, Arabidopsis thaliana; identical to SEQ ID NO: 25286
  peptide (1)..(136): Ceres Seq. ID no. 12335583
  misc_feature (1)..(64): Pfam Name: bZIP transcription factor Pfam Description: bZIP transcription factor
  misc_feature (1)..(64): Pfam Name: bZIP transcription factor Pfam Description: bZIP transcription factor
  misc_feature (1)..(136): Homolog of NCBI NO: 16580130 NR Description: bZIP transcription factor BZI-2 [Nicotiana
  misc_feature (1)..(136): Homolog of NCBI NO: 4457221 NR Description: putative bZIP DNA-binding protein [Capsicum
  misc_feature (1)..(136): Homolog of NCBI NO: 24460973 NR Description: bZIP transcription factor [Capsicum chinense]
  misc_feature (1)..(136): Homolog of NCBI NO: 4457221 NR Description: putative bZIP DNA-binding protein [Capsicum
  misc_feature (1)..(136): Homolog of NCBI NO: 1769891 NR Description: bZIP transcription factor [Arabidopsis thaliana]
  misc_feature (1)..(136): Homolog of NCBI NO: 15236153 NR Description: bZIP family transcription factor; protein id:
  misc_feature (1)..(136): Homolog of NCBI NO: 24460973 NR Description: bZIP transcription factor [Capsicum chinense]
  misc_feature (1)..(136): Homolog of NCBI NO: 16580130 NR Description: bZIP transcription factor BZI-2 [Nicotiana
  misc_feature (1)..(136): Homolog of NCBI NO: 1769891 NR Description: bZIP transcription factor [Arabidopsis thaliana]
  misc_feature (1)..(136): Homolog of NCBI NO: 15236153 NR Description: bZIP family transcription factor; protein id:

SEQ ID NO: 27443 - protein, 128 aa, Arabidopsis thaliana; identical to SEQ ID NO: 25287
  peptide (1)..(128): Ceres Seq. ID no. 12335584
  misc_feature (1)..(56): Pfam Name: bZIP transcription factor Pfam Description: bZIP transcription factor
  misc_feature (1)..(56): Pfam Name: bZIP transcription factor Pfam Description: bZIP transcription factor
  misc_feature (1)..(128): Homolog of NCBI NO: 16580130 NR Description: bZIP transcription factor BZI-2 [Nicotiana
  misc_feature (1)..(128): Homolog of NCBI NO: 4457221 NR Description: putative bZIP DNA-binding protein [Capsicum
  misc_feature (1)..(128): Homolog of NCBI NO: 24460973 NR Description: bZIP transcription factor [Capsicum chinense]
  misc_feature (1)..(128): Homolog of NCBI NO: 4457221 NR Description: putative bZIP DNA-binding protein [Capsicum
  misc_feature (1)..(128): Homolog of NCBI NO: 1769891 NR Description: bZIP transcription factor [Arabidopsis thaliana]
  misc_feature (1)..(128): Homolog of NCBI NO: 15236153 NR Description: bZIP family transcription factor; protein id:
  misc_feature (1)..(128): Homolog of NCBI NO: 24460973 NR Description: bZIP transcription factor [Capsicum chinense]
  misc_feature (1)..(128): Homolog of NCBI NO: 16580130 NR Description: bZIP transcription factor BZI-2 [Nicotiana
  misc_feature (1)..(128): Homolog of NCBI NO: 1769891 NR Description: bZIP transcription factor [Arabidopsis thaliana]
  misc_feature (1)..(128): Homolog of NCBI NO: 15236153 NR Description: bZIP family transcription factor; protein id:

SEQ ID NO: 27444 - DNA, 749 bp, Arabidopsis thaliana
  misc_feature (1)..(749): Ceres Seq. ID no. 13487365
  misc_feature: MA Experiment ID: 108434 Result: Up-regulated in Transcription
  misc_feature: MA Experiment 108434 PARAMETER Experiment Name: At_Root_Tips_cDNA_P Parameter: Tissue Value: Root Tips
  misc_feature: MA Experiment ID: 108461 Result: Up-regulated in Transcription
  misc_feature: MA Experiment 108461 PARAMETER Experiment Name: At_Germinating_Seeds_cDNA_P Parameter: Age (day) Value: 1 vs. 0
  misc_feature: MA Experiment 108461 PARAMETER Experiment Name: At_Germinating_Seeds_cDNA_P Parameter: Tissue Value: Germinating Seeds
  misc_feature: MA Experiment ID: 108462 Result: Up-regulated in Transcription
  misc_feature: MA Experiment 108462 PARAMETER Experiment Name: At_Germinating_Seeds_cDNA_P Parameter: Age (day) Value: 2 vs. 0
  misc_feature: MA Experiment 108462 PARAMETER Experiment Name: At_Germinating_Seeds_cDNA_P Parameter: Tissue Value: Germinating Seeds
  misc_feature: MA Experiment ID: 108464 Result: Up-regulated in Transcription
  misc_feature: MA Experiment 108464 PARAMETER Experiment Name: At_Germinating_Seeds_cDNA_P Parameter: Age (day) Value: 4 vs. 0
  misc_feature: MA Experiment 108464 PARAMETER Experiment Name: At_Germinating_Seeds_cDNA_P Parameter: Tissue Value: Germinating Seeds
  misc_feature: MA Experiment ID: 108473 Result: Down-regulated in Transcription
  misc_feature: MA Experiment 108473 PARAMETER Experiment Name: At_Drought_Flowers_cDNA_P Parameter: Timepoint (hr) Value: 7 d
  misc_feature: MA Experiment 108473 PARAMETER Experiment Name: At_Drought_Flowers_cDNA_P Parameter: Tissue Value: Flower
  misc_feature: MA Experiment 108473 PARAMETER Experiment Name: At_Drought_Flowers_cDNA_P Parameter: Treatment Value: Drought vs. No Drought
  misc_feature: MA Experiment ID: 108561 Result: Down-regulated in Transcription
  misc_feature: MA Experiment 108561 PARAMETER Experiment Name: At_100uM_ABA_cDNA_P Parameter: Timepoint (hr) Value: 6
  misc_feature: MA Experiment 108561 PARAMETER Experiment Name: At_100uM_ABA_cDNA_P Parameter: Tissue Value: Aerial
  misc_feature: MA Experiment 108561 PARAMETER Experiment Name: At_100uM_ABA_cDNA_P Parameter: Treatment Value: 100uM ABA vs. No Treatment
  misc_feature: MA Experiment ID: 108569 Result: Up-regulated in Transcription
  misc_feature: MA Experiment 108569 PARAMETER Experiment Name: At_0.001%_MeJA__cDNA_P Parameter: Timepoint (hr) Value: 6
  misc_feature: MA Experiment 108569 PARAMETER Experiment Name: At_0.001%_MeJA__cDNA_P Parameter: Tissue Value: Aerial
  misc_feature: MA Experiment 108569 PARAMETER Experiment Name: At_0.001%_MeJA__cDNA_P Parameter: Treatment Value: 0.001% MeJA vs. No Treatment
  misc_feature: MA Experiment ID: 108577 Result: Down-regulated in Transcription
  misc_feature: MA Experiment 108577 PARAMETER Experiment Name: At_42deg_Heat_cDNA_P Parameter: Temperature (deg C) Value: 42 vs. 22
  misc_feature: MA Experiment 108577 PARAMETER Experiment Name: At_42deg_Heat_cDNA_P Parameter: Timepoint (hr) Value: 6
  misc_feature: MA Experiment 108577 PARAMETER Experiment Name: At_42deg_Heat_cDNA_P Parameter: Tissue Value: Aerial
  misc_feature: MA Experiment ID: 108579 Result: Up-regulated in Transcription
  misc_feature: MA Experiment 108579 PARAMETER Experiment Name: At_4deg_Cold_cDNA_P Parameter: Temperature (deg C) Value: 4 vs. 22
  misc_feature: MA Experiment 108579 PARAMETER Experiment Name: At_4deg_Cold_cDNA_P Parameter: Timepoint (hr) Value: 6
  misc_feature: MA Experiment 108579 PARAMETER Experiment Name: At_4deg_Cold_cDNA_P Parameter: Tissue Value: Aerial
  misc_feature: MA Experiment ID: 108595 Result: Up-regulated in Transcription
  misc_feature: MA Experiment 108595 PARAMETER Experiment Name: At_Ler-pi_Ovule_cDNA_P Parameter: Plant Line Value: null
  misc_feature: MA Experiment ID: 20000093 Result: Down-regulated in Transcription
  misc_feature: MA Experiment 20000093 PARAMETER Experiment Name: At_42deg_Heat_cDNA_P Parameter: Temperature (deg C) Value: 42 vs. 22
  misc_feature: MA Experiment 20000093 PARAMETER Experiment Name: At_42deg_Heat_cDNA_P Parameter: Timepoint (hr) Value: 0.5
  misc_feature: MA Experiment 20000093 PARAMETER Experiment Name: At_42deg_Heat_cDNA_P Parameter: Tissue Value: Aerial
  misc_feature: MA Experiment ID: 20000117 Result: Down-regulated in Transcription
  misc_feature: MA Experiment 20000117 PARAMETER Experiment Name: At_100uM_ABA_Mutants_cDNA_P Parameter: Plant Line Value: Columbia
  misc_feature: MA Experiment 20000117 PARAMETER Experiment Name: At_100uM_ABA_Mutants_cDNA_P Parameter: Timepoint (hr) Value: 6
  misc_feature: MA Experiment 20000117 PARAMETER Experiment Name: At_100uM_ABA_Mutants_cDNA_P Parameter: Tissue Value: Aerial
  misc_feature: MA Experiment 20000117 PARAMETER Experiment Name: At_100uM_ABA_Mutants_cDNA_P Parameter: Treatment Value: 100uM ABA vs. No Treatment
  misc_feature: MA Experiment ID: 20000180 Result: Up-regulated in Transcription
  misc_feature: MA Experiment 20000180 PARAMETER Experiment Name: At_Germinating_Seeds_P Parameter: Age (hr) Value: 24 vs. 0
  misc_feature: MA Experiment 20000180 PARAMETER Experiment Name: At_Germinating_Seeds_P Parameter: Tissue Value: Germinating Seeds
  misc_feature: MA Experiment ID: 20000185 Result: Up-regulated in Transcription
  misc_feature: MA Experiment 20000185 PARAMETER Experiment Name: At_Roots__P Parameter: Age (day) Value: 7 vs. 21
  misc_feature: MA Experiment 20000185 PARAMETER Experiment Name: At_Roots__P Parameter: Organism Value: A. thaliana
  misc_feature: MA Experiment 20000185 PARAMETER Experiment Name: At_Roots__P Parameter: Tissue Value: Roots vs. Whole Plant
  misc_feature: MA Experiment ID: 20000224 Result: Up-regulated in Transcription
  misc_feature: MA Experiment ID: 20000234 Result: Up-regulated in Transcription
  misc_feature: MA Experiment 20000234 PARAMETER Experiment Name: At_Siliques_P Parameter: Age (day) Value: 21
  misc_feature: MA Experiment 20000234 PARAMETER Experiment Name: At_Siliques_P Parameter: Organism Value: A. thaliana
  misc_feature: MA Experiment 20000234 PARAMETER Experiment Name: At_Siliques_P Parameter: Plant Line Value: WS
  misc_feature: MA Experiment 20000234 PARAMETER Experiment Name: At_Siliques_P Parameter: Tissue Value: Less Than 5mm Siliques vs. Whole Plant
  misc_feature: MA Experiment ID: 20000264 Result: Up-regulated in Transcription
  misc_feature: MA Experiment 20000264 PARAMETER Experiment Name: At_Open_Flower_P Parameter: Age (day) Value: 21
  misc_feature: MA Experiment 20000264 PARAMETER Experiment Name: At_Open_Flower_P Parameter: Plant Line Value: WS
  misc_feature: MA Experiment 20000264 PARAMETER Experiment Name: At_Open_Flower_P Parameter: Tissue Value: Open Flower vs. Whole Plant
  misc_feature: MA Experiment ID: 20000265 Result: Up-regulated in Transcription
  misc_feature: MA Experiment 20000265 PARAMETER Experiment Name: At_Open_Flower_P Parameter: Age (day) Value: 21
  misc_feature: MA Experiment 20000265 PARAMETER Experiment Name: At_Open_Flower_P Parameter: Plant Line Value: WS
  misc_feature: MA Experiment 20000265 PARAMETER Experiment Name: At_Open_Flower_P Parameter: Tissue Value: Closed Flower vs. Whole Plant
  misc_feature: MA Experiment ID: 20000438 Result: Down-regulated in Transcription
  misc_feature: MA Experiment 20000438 PARAMETER Experiment Name: At_Shoots__P Parameter: Age (day) Value: 14
  misc_feature: MA Experiment 20000438 PARAMETER Experiment Name: At_Shoots__P Parameter: Tissue Value: Shoots vs. Whole Plant
  misc_feature: MA Experiment ID: 20000439 Result: Up-regulated in Transcription
  misc_feature: MA Experiment 20000439 PARAMETER Experiment Name: At_Roots__P Parameter: Age (day) Value: 14 vs. 21
  misc_feature: MA Experiment 20000439 PARAMETER Experiment Name: At_Roots__P Parameter: Organism Value: A. thaliana
  misc_feature: MA Experiment 20000439 PARAMETER Experiment Name: At_Roots__P Parameter: Tissue Value: Roots vs. Whole Plant
  misc_feature: MA Experiment ID: 20000441 Result: Down-regulated in Transcription
  misc_feature: MA Experiment 20000441 PARAMETER Experiment Name: At_1uM_BR-BRZ__P Parameter: Tissue Value: Shoot Apices
  misc_feature: MA Experiment 20000441 PARAMETER Experiment Name: At_1uM_BR-BRZ__P Parameter: Treatment Value: 1uM BR vs. No Treatment
  misc_feature: MA Experiment ID: 20000443 Result: Down-regulated in Transcription
  misc_feature: MA Experiment 20000443 PARAMETER Experiment Name: At_1uM_BR-BRZ__P Parameter: Tissue Value: Shoot Apices
  misc_feature: MA Experiment 20000443 PARAMETER Experiment Name: At_1uM_BR-BRZ__P Parameter: Treatment Value: 1uM BRZ vs. No Treatment
  misc_feature: MA Experiment ID: 20000495 Result: Up-regulated in Transcription
  misc_feature: MA Experiment 20000495 PARAMETER Experiment Name: At_Guard_Cells_P Parameter: Harvest Date Value: 8/2/2002
  misc_feature: MA Experiment 20000495 PARAMETER Experiment Name: At_Guard_Cells_P Parameter: Organism Value: A. thaliana
  misc_feature: MA Experiment 20000495 PARAMETER Experiment Name: At_Guard_Cells_P Parameter: Tissue Value: Guard Cells vs. Leaves
  misc_feature: MA Experiment ID: 20000527 Result: Down-regulated in Transcription
  misc_feature: MA Experiment 20000527 PARAMETER Experiment Name: At_10percent_PEG_P Parameter: Age (day) Value: 20
  misc_feature: MA Experiment 20000527 PARAMETER Experiment Name: At_10percent_PEG_P Parameter: Organism Value: A. thaliana
  misc_feature: MA Experiment 20000527 PARAMETER Experiment Name: At_10percent_PEG_P Parameter: Plant Line Value: WS
  misc_feature: MA Experiment 20000527 PARAMETER Experiment Name: At_10percent_PEG_P Parameter: Timepoint (day) Value: 20
  misc_feature: MA Experiment 20000527 PARAMETER Experiment Name: At_10percent_PEG_P Parameter: Tissue Value: Whole Plant
  misc_feature: MA Experiment 20000527 PARAMETER Experiment Name: At_10percent_PEG_P Parameter: Treatment Value: 10percent PEG vs. No Treatment
  misc_feature: MA Experiment ID: 20000794 Result: Down-regulated in Transcription
  misc_feature: MA Experiment 20000794 PARAMETER Experiment Name: At_Petals_P Parameter: Age (day) Value: 23-25 days
  misc_feature: MA Experiment 20000794 PARAMETER Experiment Name: At_Petals_P Parameter: Plant Line Value: WS
  misc_feature: MA Experiment 20000794 PARAMETER Experiment Name: At_Petals_P Parameter: Tissue Value: Petals vs. Whole plant
  misc_feature: MA Experiment ID: 20001248 Result: Down-regulated in Transcription
  misc_feature: MA Experiment 20001248 PARAMETER Experiment Name: At_Far-red-induction_P Parameter: Age (day) Value: 7
  misc_feature: MA Experiment 20001248 PARAMETER Experiment Name: At_Far-red-induction_P Parameter: Light Value: Far-red vs. White
  misc_feature: MA Experiment 20001248 PARAMETER Experiment Name: At_Far-red-induction_P Parameter: Organism Value: A. thaliana
  misc_feature: MA Experiment 20001248 PARAMETER Experiment Name: At_Far-red-induction_P Parameter: Plant Line Value: Columbia
  misc_feature: MA Experiment 20001248 PARAMETER Experiment Name: At_Far-red-induction_P Parameter: Timepoint (hr) Value: 4
  misc_feature: MA Experiment 20001248 PARAMETER Experiment Name: At_Far-red-induction_P Parameter: Tissue Value: Whole Plant
  misc_feature: MA Experiment ID: 20001450 Result: Down-regulated in Transcription
  misc_feature: MA Experiment 20001450 PARAMETER Experiment Name: At_Far-red-induction_P Parameter: Age (day) Value: 7
  misc_feature: MA Experiment 20001450 PARAMETER Experiment Name: At_Far-red-induction_P Parameter: Light Value: Far-red vs. White
  misc_feature: MA Experiment 20001450 PARAMETER Experiment Name: At_Far-red-induction_P Parameter: Organism Value: A. thaliana
  misc_feature: MA Experiment 20001450 PARAMETER Experiment Name: At_Far-red-induction_P Parameter: Plant Line Value: Columbia
  misc_feature: MA Experiment 20001450 PARAMETER Experiment Name: At_Far-red-induction_P Parameter: Timepoint (hr) Value: 8
  misc_feature: MA Experiment 20001450 PARAMETER Experiment Name: At_Far-red-induction_P Parameter: Tissue Value: Whole Plant
  misc_feature: MA Experiment ID: 20001451 Result: Down-regulated in Transcription
  misc_feature: MA Experiment 20001451 PARAMETER Experiment Name: At_Far-red-induction_P Parameter: Age (day) Value: 7
  misc_feature: MA Experiment 20001451 PARAMETER Experiment Name: At_Far-red-induction_P Parameter: Light Value: Far-red vs. White
  misc_feature: MA Experiment 20001451 PARAMETER Experiment Name: At_Far-red-induction_P Parameter: Organism Value: A. thaliana
  misc_feature: MA Experiment 20001451 PARAMETER Experiment Name: At_Far-red-induction_P Parameter: Plant Line Value: Columbia
  misc_feature: MA Experiment 20001451 PARAMETER Experiment Name: At_Far-red-induction_P Parameter: Timepoint (hr) Value: 24
  misc_feature: MA Experiment 20001451 PARAMETER Experiment Name: At_Far-red-induction_P Parameter: Tissue Value: Whole Plant
  misc_feature: MA Experiment ID: 20001911 Result: Down-regulated in Transcription
  misc_feature: MA Experiment 20001911 PARAMETER Experiment Name: At_Drought_Reproduction_P Parameter: Age (day) Value: 40
  misc_feature: MA Experiment 20001911 PARAMETER Experiment Name: At_Drought_Reproduction_P Parameter: Organism Value: A. thaliana
  misc_feature: MA Experiment 20001911 PARAMETER Experiment Name: At_Drought_Reproduction_P Parameter: Plant Line Value: WS
  misc_feature: MA Experiment 20001911 PARAMETER Experiment Name: At_Drought_Reproduction_P Parameter: Timepoint (day) Value: 10
  misc_feature: MA Experiment 20001911 PARAMETER Experiment Name: At_Drought_Reproduction_P Parameter: Tissue Value: Flowers
  misc_feature: MA Experiment 20001911 PARAMETER Experiment Name: At_Drought_Reproduction_P Parameter: Treatment Value: Drought vs. No Drought
actctcctttctcaattaatataagccaatcaccatcaaaatatcatttgagaactccagaaacctgcttcaatggcgatcgacaagcttccacttcttctctttctctccatactcctctgcctaaatcgccctgttcttagcgacaccgatgaagaggacattcttctcacaggaatcaacagctacagaacaacacagaatctaacaatcttaagcaagaacgaaaacgcagaatgcctagctgacgaaatcgcagaccaattcaagaacaaaccttgtaccaacgacactggctcagccacagtacctggaactgagccacagttcgcaaactaccctcagattctagcaaaatgccacttgaacgtctcagacacgagagacggctcgattatgcctgcatgtgttcctcgtttagaatcaaacctcgtcctcacaaacttcaccaagtcacaatactcaatgagtttgaacgattccaagtttacagggattggtattggtaaagaagatgattggatcgttgtagtcctcactaccaacacaccagaaggaagctattctacagctactcctacaaaacaagagtctaatggcttcacctttggtgttggtctcgttagttatttagtcattttcatgtactcttccttttgtttctttctcttttgagatatcaaatgttttgatgagttatcaaacactctttcctttagactatcaagaataaattttgttaaagattg

SEQ ID NO: 27445 - protein, 200 aa, Arabidopsis thaliana
  peptide (1)..(200): Ceres Seq. ID no. 13487366
  misc_feature (5)..(169): Homolog of NCBI NO: 34904816 NR Description: contains ESTs
  misc_feature (1)..(200): Homolog of NCBI NO: 15239685 NR Description: expressed protein [Arabidopsis thaliana]
  misc_feature (1)..(192): Homolog of NCBI NO: 15239686 NR Description: expressed protein [Arabidopsis thaliana]
  misc_feature (1)..(192): Homolog of NCBI NO: 34395876 NR Description: Putative GPI-anchored protein At5g19240 precursor
  misc_feature (1)..(200): Homolog of NCBI NO: 24417436 NR Description: unknown [Arabidopsis thaliana]
  misc_feature (1)..(106): Homolog of NCBI NO: 24417290 NR Description: unknown [Arabidopsis thaliana]
  misc_feature (1)..(200): Homolog of NCBI NO: 15239687 NR Description: expressed protein [Arabidopsis thaliana]
  misc_feature (1)..(200): Homolog of NCBI NO: 18397452 NR Description: expressed protein [Arabidopsis thaliana]
  misc_feature (1)..(200): Homolog of NCBI NO: 21594024 NR Description: unknown [Arabidopsis thaliana]
  misc_feature (1)..(187): Homolog of NCBI NO: 18405086 NR Description: expressed protein [Arabidopsis thaliana]
MAIDKLPLLLFLSILLCLNRPVLSDTDEEDILLTGINSYRTTQNLTILSKNENAECLADEIADQFKNKPCTNDTGSATVPGTEPQFANYPQILAKCHLNVSDTRDGSIMPACVPRLESNLVLTNFTKSQYSMSLNDSKFTGIGIGKEDDWIVVVLTTNTPEGSYSTATPTKQESNGFTFGVGLVSYLVIFMYSSFCFFLF

SEQ ID NO: 27446 - DNA, 1303 bp, Arabidopsis thaliana
  misc_feature (1)..(1303): Ceres Seq. ID no. 12338064
  misc_feature: MA Experiment ID: 108434 Result: Down-regulated in Transcription
  misc_feature: MA Experiment 108434 PARAMETER Experiment Name: At_Root_Tips_cDNA_P Parameter: Tissue Value: Root Tips
  misc_feature: MA Experiment ID: 108462 Result: Up-regulated in Transcription
  misc_feature: MA Experiment 108462 PARAMETER Experiment Name: At_Germinating_Seeds_cDNA_P Parameter: Age (day) Value: 2 vs. 0
  misc_feature: MA Experiment 108462 PARAMETER Experiment Name: At_Germinating_Seeds_cDNA_P Parameter: Tissue Value: Germinating Seeds
  misc_feature: MA Experiment ID: 108463 Result: Up-regulated in Transcription
  misc_feature: MA Experiment 108463 PARAMETER Experiment Name: At_Germinating_Seeds_cDNA_P Parameter: Age (day) Value: 3 vs. 0
  misc_feature: MA Experiment 108463 PARAMETER Experiment Name: At_Germinating_Seeds_cDNA_P Parameter: Tissue Value: Germinating Seeds
  misc_feature: MA Experiment ID: 108464 Result: Up-regulated in Transcription
  misc_feature: MA Experiment 108464 PARAMETER Experiment Name: At_Germinating_Seeds_cDNA_P Parameter: Age (day) Value: 4 vs. 0
  misc_feature: MA Experiment 108464 PARAMETER Experiment Name: At_Germinating_Seeds_cDNA_P Parameter: Tissue Value: Germinating Seeds
  misc_feature: MA Experiment ID: 108579 Result: Down-regulated in Transcription
  misc_feature: MA Experiment 108579 PARAMETER Experiment Name: At_4deg_Cold_cDNA_P Parameter: Temperature (deg C) Value: 4 vs. 22
  misc_feature: MA Experiment 108579 PARAMETER Experiment Name: At_4deg_Cold_cDNA_P Parameter: Timepoint (hr) Value: 6
  misc_feature: MA Experiment 108579 PARAMETER Experiment Name: At_4deg_Cold_cDNA_P Parameter: Tissue Value: Aerial
  misc_feature: MA Experiment ID: 108585 Result: Up-regulated in Transcription
  misc_feature: MA Experiment 108585 PARAMETER Experiment Name: At_5mM_NaNP_cDNA_P Parameter: Timepoint (hr) Value: 6
  misc_feature: MA Experiment 108585 PARAMETER Experiment Name: At_5mM_NaNP_cDNA_P Parameter: Tissue Value: Aerial
  misc_feature: MA Experiment 108585 PARAMETER Experiment Name: At_5mM_NaNP_cDNA_P Parameter: Treatment Value: null
  misc_feature: MA Experiment ID: 108595 Result: Down-regulated in Transcription
  misc_feature: MA Experiment 108595 PARAMETER Experiment Name: At_Ler-pi_Ovule_cDNA_P Parameter: Plant Line Value: null
  misc_feature: MA Experiment ID: 20000184 Result: Down-regulated in Transcription
  misc_feature: MA Experiment 20000184 PARAMETER Experiment Name: At_Shoots__P Parameter: Age (day) Value: 7
  misc_feature: MA Experiment 20000184 PARAMETER Experiment Name: At_Shoots__P Parameter: Tissue Value: Shoots vs. Whole Plant
  misc_feature: MA Experiment ID: 20000185 Result: Down-regulated in Transcription
  misc_feature: MA Experiment 20000185 PARAMETER Experiment Name: At_Roots__P Parameter: Age (day) Value: 7 vs. 21
  misc_feature: MA Experiment 20000185 PARAMETER Experiment Name: At_Roots__P Parameter: Organism Value: A. thaliana
  misc_feature: MA Experiment 20000185 PARAMETER Experiment Name: At_Roots__P Parameter: Tissue Value: Roots vs. Whole Plant
  misc_feature: MA Experiment ID: 20000235 Result: Down-regulated in Transcription
  misc_feature: MA Experiment 20000235 PARAMETER Experiment Name: At_Siliques_P Parameter: Age (day) Value: 21
  misc_feature: MA Experiment 20000235 PARAMETER Experiment Name: At_Siliques_P Parameter: Organism Value: A. thaliana
  misc_feature: MA Experiment 20000235 PARAMETER Experiment Name: At_Siliques_P Parameter: Plant Line Value: WS
  misc_feature: MA Experiment 20000235 PARAMETER Experiment Name: At_Siliques_P Parameter: Tissue Value: 5-10mm Siliques vs. Whole Plant
  misc_feature: MA Experiment ID: 20000439 Result: Down-regulated in Transcription
  misc_feature: MA Experiment 20000439 PARAMETER Experiment Name: At_Roots__P Parameter: Age (day) Value: 14 vs. 21
  misc_feature: MA Experiment 20000439 PARAMETER Experiment Name: At_Roots__P Parameter: Organism Value: A. thaliana
  misc_feature: MA Experiment 20000439 PARAMETER Experiment Name: At_Roots__P Parameter: Tissue Value: Roots vs. Whole Plant
  misc_feature: MA Experiment ID: 20000573 Result: Down-regulated in Transcription
  misc_feature: MA Experiment 20000573 PARAMETER Experiment Name: At_100uM_ABA_Mutants__P Parameter: Organism Value: A. thaliana
  misc_feature: MA Experiment 20000573 PARAMETER Experiment Name: At_100uM_ABA_Mutants__P Parameter: Plant Line Value: CS22 vs. Ler wt
  misc_feature: MA Experiment 20000573 PARAMETER Experiment Name: At_100uM_ABA_Mutants__P Parameter: Timepoint (hr) Value: N/A
  misc_feature: MA Experiment 20000573 PARAMETER Experiment Name: At_100uM_ABA_Mutants__P Parameter: Tissue Value: Whole Plant
  misc_feature: MA Experiment 20000573 PARAMETER Experiment Name: At_100uM_ABA_Mutants__P Parameter: Treatment Value: None
  misc_feature: MA Experiment ID: 20000574 Result: Down-regulated in Transcription
  misc_feature: MA Experiment 20000574 PARAMETER Experiment Name: At_100uM_ABA_Mutants__P Parameter: Organism Value: A. thaliana
  misc_feature: MA Experiment 20000574 PARAMETER Experiment Name: At_100uM_ABA_Mutants__P Parameter: Plant Line Value: CS23 vs. Ler wt
  misc_feature: MA Experiment 20000574 PARAMETER Experiment Name: At_100uM_ABA_Mutants__P Parameter: Timepoint (hr) Value: N/A
  misc_feature: MA Experiment 20000574 PARAMETER Experiment Name: At_100uM_ABA_Mutants__P Parameter: Tissue Value: Whole Plant
  misc_feature: MA Experiment 20000574 PARAMETER Experiment Name: At_100uM_ABA_Mutants__P Parameter: Treatment Value: None
  misc_feature: MA Experiment ID: 20001451 Result: Up-regulated in Transcription
  misc_feature: MA Experiment 20001451 PARAMETER Experiment Name: At_Far-red-induction_P Parameter: Age (day) Value: 7
  misc_feature: MA Experiment 20001451 PARAMETER Experiment Name: At_Far-red-induction_P Parameter: Light Value: Far-red vs. White
  misc_feature: MA Experiment 20001451 PARAMETER Experiment Name: At_Far-red-induction_P Parameter: Organism Value: A. thaliana
  misc_feature: MA Experiment 20001451 PARAMETER Experiment Name: At_Far-red-induction_P Parameter: Plant Line Value: Columbia
  misc_feature: MA Experiment 20001451 PARAMETER Experiment Name: At_Far-red-induction_P Parameter: Timepoint (hr) Value: 24
  misc_feature: MA Experiment 20001451 PARAMETER Experiment Name: At_Far-red-induction_P Parameter: Tissue Value: Whole Plant
  misc_feature: MA Experiment ID: 20001905 Result: Up-regulated in Transcription
  misc_feature: MA Experiment 20001905 PARAMETER Experiment Name: At_Drought_Reproduction_P Parameter: Age (day) Value: 40
  misc_feature: MA Experiment 20001905 PARAMETER Experiment Name: At_Drought_Reproduction_P Parameter: Organism Value: A. thaliana
  misc_feature: MA Experiment 20001905 PARAMETER Experiment Name: At_Drought_Reproduction_P Parameter: Plant Line Value: WS
  misc_feature: MA Experiment 20001905 PARAMETER Experiment Name: At_Drought_Reproduction_P Parameter: Timepoint (day) Value: 10
  misc_feature: MA Experiment 20001905 PARAMETER Experiment Name: At_Drought_Reproduction_P Parameter: Tissue Value: Rosettes
  misc_feature: MA Experiment 20001905 PARAMETER Experiment Name: At_Drought_Reproduction_P Parameter: Treatment Value: Drought vs. No Drought
aaaagtcccacttaatcacctctctagcttctcattccatttctatctctctcttttgttttctaagttgcttcaagagttttggatagtgtagcagagagattttaaaactaatgggttaagaaaaatttgttcttttgcgtgaagaagttgtcaacttctagacagattttctttttgaagtgttttcttgtcgaaattcttcttcttttggtcaaagaacgcaagattcttctgtagttcctctaaaaaaaatcctaatggagggttattcaagaaacggtgaaatttctccgaagctgcttgacttgatgattccacaagagagaagaaattcgtttcacgatgagaaaaactctgttttcaaaacagaggagaagaagcttgagctaaagcttggaccacctggtgaagaagatgatgatgaatcgataataagacacatgaagaaagagccaaaagacaaatctatcctctctctcgctggcaaacacttctctccttcttccaccaaaaccacatcccataaaagaactgctcctggtccagtggtgggatggcctccggttcgatccttcaggaagaatttagctagtggaagttcttcaaagcttggaaatgactcaaccacctccaatggtgttaccctcaagaaccaaaagtgtgatgatgctgctaagacaacagaaccaaagagacaaggaggcatgtttgtgaagatcaacatgtatggtgttcccattggtcgtaaagttgatctcagtgctcataatagctatgagcagttatctttcacagttgacaagctcttcagaggtcttcttgcagctcaaagagactttccatcatccatagaagatgaaaaaccaatcactggattattagatgggaatggagaatatactcttacatatgaagacaatgaaggagacaagatgcttgtaggagatgttccatggcaaatgtttgtgtcttcggtgaagaggctgcgtgtgattaaaacttctgagatttcttcagcattaacatatggaaatggtaagcaagagaaaatgagaagatgaagaaaaagatcttttacagcttttaaagaagtagagagatgttattaattgcattttgcctttaaactttgatgagtttttggtcttggaaaagtttctgatataagtctgatgtacattctggtttgttacatcttcttttggcttttgagatatcatagagttttgttggaactcaaagaccaaacagtgcaatgatgattttggggtcttgagtaaatttacaaacccttttaggc

SEQ ID NO: 27447 - protein, 267 aa, Arabidopsis thaliana
  peptide (1)..(267): Ceres Seq. ID no. 12338065
  misc_feature (40)..(261): Pfam Name: AUX/IAA family Pfam Description: AUX/IAA family
  misc_feature (209)..(262): Homolog of NCBI NO: 18420964 NR Description: putative protein
  misc_feature (38)..(112): Homolog of NCBI NO: 18420964 NR Description: putative protein
  misc_feature (76)..(255): Homolog of NCBI NO: 34909384 NR Description: putative phytochrome-associated protein
  misc_feature (24)..(251): Homolog of NCBI NO: 34906394 NR Description: P0710E05.9 [Oryza sativa (japonica
  misc_feature (1)..(265): Homolog of NCBI NO: 4093155 NR Description: phytochrome-associated protein 1 [Arabidopsis
  misc_feature (1)..(265): Homolog of NCBI NO: 21593333 NR Description: phytochrome-associated protein 1 (PAP1)
  misc_feature (1)..(265): Homolog of NCBI NO: 15228226 NR Description: phytochrome-associated protein 1 (PAP1)
  misc_feature (31)..(267): Homolog of NCBI NO: 25296228 NR Description: auxin-induced protein IAA18
  misc_feature (1)..(267): Homolog of NCBI NO: 15218080 NR Description: auxin regulated protein IAA18, putative
  misc_feature (1)..(267): Homolog of NCBI NO: 21594025 NR Description: auxin regulated protein IAA18, putative
MEGYSRNGEISPKLLDLMIPQERRNSFHDEKNSVFKTEEKKLELKLGPPGEEDDDESIIRHMKKEPKDKSILSLAGKHFSPSSTKTTSHKRTAPGPVVGWPPVRSFRKNLASGSSSKLGNDSTTSNGVTLKNQKCDDAAKTTEPKRQGGMFVKINMYGVPIGRKVDLSAHNSYEQLSFTVDKLFRGLLAAQRDFPSSIEDEKPITGLLDGNGEYTLTYEDNEGDKMLVGDVPWQMFVSSVKRLRVIKTSEISSALTYGNGKQEKMRR

SEQ ID NO: 27448 - protein, 250 aa, Arabidopsis thaliana
  peptide (1)..(250): Ceres Seq. ID no. 12338066
  misc_feature (23)..(244): Pfam Name: AUX/IAA family Pfam Description: AUX/IAA family
  misc_feature (192)..(245): Homolog of NCBI NO: 18420964 NR Description: putative protein
  misc_feature (21)..(95): Homolog of NCBI NO: 18420964 NR Description: putative protein
  misc_feature (59)..(238): Homolog of NCBI NO: 34909384 NR Description: putative phytochrome-associated protein
  misc_feature (7)..(234): Homolog of NCBI NO: 34906394 NR Description: P0710E05.9 [Oryza sativa (japonica
  misc_feature (1)..(248): Homolog of NCBI NO: 4093155 NR Description: phytochrome-associated protein 1 [Arabidopsis
  misc_feature (1)..(248): Homolog of NCBI NO: 21593333 NR Description: phytochrome-associated protein 1 (PAP1)
  misc_feature (1)..(248): Homolog of NCBI NO: 15228226 NR Description: phytochrome-associated protein 1 (PAP1)
  misc_feature (14)..(250): Homolog of NCBI NO: 25296228 NR Description: auxin-induced protein IAA18
  misc_feature (1)..(250): Homolog of NCBI NO: 15218080 NR Description: auxin regulated protein IAA18, putative
  misc_feature (1)..(250): Homolog of NCBI NO: 21594025 NR Description: auxin regulated protein IAA18, putative
MIPQERRNSFHDEKNSVFKTEEKKLELKLGPPGEEDDDESIIRHMKKEPKDKSILSLAGKHFSPSSTKTTSHKRTAPGPVVGWPPVRSFRKNLASGSSSKLGNDSTTSNGVTLKNQKCDDAAKTTEPKRQGGMFVKINMYGVPIGRKVDLSAHNSYEQLSFTVDKLFRGLLAAQRDFPSSIEDEKPITGLLDGNGEYTLTYEDNEGDKMLVGDVPWQMFVSSVKRLRVIKTSEISSALTYGNGKQEKMRR

SEQ ID NO: 27449 - protein, 206 aa, Arabidopsis thaliana
  peptide (1)..(206): Ceres Seq. ID no. 12338067
  misc_feature (1)..(200): Pfam Name: AUX/IAA family Pfam Description: AUX/IAA family
  misc_feature (148)..(201): Homolog of NCBI NO: 18420964 NR Description: putative protein
  misc_feature (1)..(51): Homolog of NCBI NO: 18420964 NR Description: putative protein
  misc_feature (15)..(194): Homolog of NCBI NO: 34909384 NR Description: putative phytochrome-associated protein
  misc_feature (1)..(190): Homolog of NCBI NO: 34906394 NR Description: P0710E05.9 [Oryza sativa (japonica
  misc_feature (1)..(204): Homolog of NCBI NO: 4093155 NR Description: phytochrome-associated protein 1 [Arabidopsis
  misc_feature (1)..(204): Homolog of NCBI NO: 21593333 NR Description: phytochrome-associated protein 1 (PAP1)
  misc_feature (1)..(204): Homolog of NCBI NO: 15228226 NR Description: phytochrome-associated protein 1 (PAP1)
  misc_feature (1)..(206): Homolog of NCBI NO: 25296228 NR Description: auxin-induced protein IAA18
  misc_feature (1)..(206): Homolog of NCBI NO: 15218080 NR Description: auxin regulated protein IAA18, putative
  misc_feature (1)..(206): Homolog of NCBI NO: 21594025 NR Description: auxin regulated protein IAA18, putative
MKKEPKDKSILSLAGKHFSPSSTKTTSHKRTAPGPVVGWPPVRSFRKNLASGSSSKLGNDSTTSNGVTLKNQKCDDAAKTTEPKRQGGMFVKINMYGVPIGRKVDLSAHNSYEQLSFTVDKLFRGLLAAQRDFPSSIEDEKPITGLLDGNGEYTLTYEDNEGDKMLVGDVPWQMFVSSVKRLRVIKTSEISSALTYGNGKQEKMRR

SEQ ID NO: 27450 - DNA, 1120 bp, Arabidopsis thaliana
  misc_feature (1)..(1120): Ceres Seq. ID no. 12332925
  misc_feature: MA Experiment ID: 108434 Result: Down-regulated in Transcription
  misc_feature: MA Experiment 108434 PARAMETER Experiment Name: At_Root_Tips_cDNA_P Parameter: Tissue Value: Root Tips
  misc_feature: MA Experiment ID: 108462 Result: Down-regulated in Transcription
  misc_feature: MA Experiment 108462 PARAMETER Experiment Name: At_Germinating_Seeds_cDNA_P Parameter: Age (day) Value: 2 vs. 0
  misc_feature: MA Experiment 108462 PARAMETER Experiment Name: At_Germinating_Seeds_cDNA_P Parameter: Tissue Value: Germinating Seeds
  misc_feature: MA Experiment ID: 108463 Result: Down-regulated in Transcription
  misc_feature: MA Experiment 108463 PARAMETER Experiment Name: At_Germinating_Seeds_cDNA_P Parameter: Age (day) Value: 3 vs. 0
  misc_feature: MA Experiment 108463 PARAMETER Experiment Name: At_Germinating_Seeds_cDNA_P Parameter: Tissue Value: Germinating Seeds
  misc_feature: MA Experiment ID: 108464 Result: Down-regulated in Transcription
  misc_feature: MA Experiment 108464 PARAMETER Experiment Name: At_Germinating_Seeds_cDNA_P Parameter: Age (day) Value: 4 vs. 0
  misc_feature: MA Experiment 108464 PARAMETER Experiment Name: At_Germinating_Seeds_cDNA_P Parameter: Tissue Value: Germinating Seeds
  misc_feature: MA Experiment ID: 20000437 Result: Up-regulated in Transcription
  misc_feature: MA Experiment 20000437 PARAMETER Experiment Name: At_Drought_P Parameter: Age (day) Value: 8
  misc_feature: MA Experiment 20000437 PARAMETER Experiment Name: At_Drought_P Parameter: Organism Value: A. thaliana
  misc_feature: MA Experiment 20000437 PARAMETER Experiment Name: At_Drought_P Parameter: Plant Line Value: WS
  misc_feature: MA Experiment 20000437 PARAMETER Experiment Name: At_Drought_P Parameter: Timepoint (hr) Value: 24
  misc_feature: MA Experiment 20000437 PARAMETER Experiment Name: At_Drought_P Parameter: Tissue Value: Whole Plant
  misc_feature: MA Experiment 20000437 PARAMETER Experiment Name: At_Drought_P Parameter: Treatment Value: Drought vs. No Drought
  misc_feature: MA Experiment ID: 20001248 Result: Up-regulated in Transcription
  misc_feature: MA Experiment 20001248 PARAMETER Experiment Name: At_Far-red-induction_P Parameter: Age (day) Value: 7
  misc_feature: MA Experiment 20001248 PARAMETER Experiment Name: At_Far-red-induction_P Parameter: Light Value: Far-red vs. White
  misc_feature: MA Experiment 20001248 PARAMETER Experiment Name: At_Far-red-induction_P Parameter: Organism Value: A. thaliana
  misc_feature: MA Experiment 20001248 PARAMETER Experiment Name: At_Far-red-induction_P Parameter: Plant Line Value: Columbia
  misc_feature: MA Experiment 20001248 PARAMETER Experiment Name: At_Far-red-induction_P Parameter: Timepoint (hr) Value: 4
  misc_feature: MA Experiment 20001248 PARAMETER Experiment Name: At_Far-red-induction_P Parameter: Tissue Value: Whole Plant
aacgttacgagttcttcagtttctcagttctccaaacgacaacttcgagccaaaacaatggcggctactacattgtacaattcctgtcttcttcaaccgaagtatggcttcaccactcgccgcctaaaccagtctctcgttaaccctcttacgaatccaacaagagtttcggttttgtggaagagtcgtagagatgttattgcgaaagcttcgattgaaatggcggaatcgaattcgatatcttccgttgttgtcaattcctctggtcctatcatcgtgattgataattacgacagcttcacttacaatctctgccagtatatgggagagctagggtgccattttgaagtttaccgcaatgatgaacttacagttgaggagctgaaaagaaaaaagccaagaggattgttgatttctcctggacctggtacccctcaagactctgggatttccttgcaaactgttttggaactcggaccacttgttcctttatttggagtatgtatgggtttgcagtgtataggagaagcatttggaggaaagattgtgcggtcaccatttggtgttatgcatgggaaaagctcaatggttcactatgatgagaaaggagaagaaggcttgttctctggattatccaaccctttccttgtaggtagatatcacagtctcgtgatcgaaaaagattcatttcctagtgatgaactcgaggttacagcatggacagaagatggtctggttatggctgcccgtcacagaaagtacaagcatatacagggagttcaatttcatccggagagtattataacaaccgaaggcaagacaattgttcgcaatttcatcaaactcgtagagaaaaaggaatctgagaagctggcataggcttagcctgaatgagaaaatcagctgtgttcgattagtgcttccctgtaataatgtctgccaatgcaaaatgttccttggcatcttaccattgtttctacccggaatgtgtctagttctttcagttcaggacgaatctggaaaggctcgatagtattcagtgctgttggaacataacagtacatgagataagatctaatcagatctcactttcttattgtcatactggctttccttggtc

SEQ ID NO: 27451 - protein, 292 aa, Arabidopsis thaliana
  peptide (1)..(292): Ceres Seq. ID no. 12332926
  misc_feature (92)..(282): Pfam Name: Glutamine amidotransferase class-I Pfam Description: Glutamine amidotransferase class-I
  misc_feature (91)..(280): Homolog of NCBI NO: 11467408 NR Description: anthranilate synthase component II [Cyanophora
  misc_feature (91)..(281): Homolog of NCBI NO: 37520452 NR Description: anthranilate synthase component II [Gloeobacter
  misc_feature (90)..(290): Homolog of NCBI NO: 21741992 NR Description: OSJNBa0060P14.13 [Oryza sativa (japonica
  misc_feature (63)..(288): Homolog of NCBI NO: 28301926 NR Description: putative anthranilate synthase beta subunit
  misc_feature (74)..(291): Homolog of NCBI NO: 15221810 NR Description: F5A9.17; protein id: At1g24807.1 [Arabidopsis
  misc_feature (74)..(291): Homolog of NCBI NO: 15221840 NR Description: F5A9.7; protein id: At1g25083.1 [Arabidopsis
  misc_feature (59)..(291): Homolog of NCBI NO: 25403004 NR Description: probable anthranilate synthase beta subunit
  misc_feature (20)..(291): Homolog of NCBI NO: 15222532 NR Description: anthranilate synthase beta subunit
  misc_feature (20)..(292): Homolog of NCBI NO: 15242893 NR Description: anthranilate synthase beta chain
  misc_feature (20)..(292): Homolog of NCBI NO: 21594026 NR Description: anthranilate synthase beta chain [Arabidopsis
NVTSSSVSQFSKRQLRAKTMAATTLYNSCLLQPKYGFTTRRLNQSLVNPLTNPTRVSVLWKSRRDVIAKASIEMAESNSISSVVVNSSGPIIVIDNYDSFTYNLCQYMGELGCHFEVYRNDELTVEELKRKKPRGLLISPGPGTPQDSGISLQTVLELGPLVPLFGVCMGLQCIGEAFGGKIVRSPFGVMHGKSSMVHYDEKGEEGLFSGLSNPFLVGRYHSLVIEKDSFPSDELEVTAWTEDGLVMAARHRKYKHIQGVQFHPESIITTEGKTIVRNFIKLVEKKESEKLA

SEQ ID NO: 27452 - protein, 273 aa, Arabidopsis thaliana
  peptide (1)..(273): Ceres Seq. ID no. 12332927
  misc_feature (73)..(263): Pfam Name: Glutamine amidotransferase class-I Pfam Description: Glutamine amidotransferase class-I
  misc_feature (72)..(261): Homolog of NCBI NO: 11467408 NR Description: anthranilate synthase component II [Cyanophora
  misc_feature (72)..(262): Homolog of NCBI NO: 37520452 NR Description: anthranilate synthase component II [Gloeobacter
  misc_feature (71)..(271): Homolog of NCBI NO: 21741992 NR Description: OSJNBa0060P14.13 [Oryza sativa (japonica
  misc_feature (44)..(269): Homolog of NCBI NO: 28301926 NR Description: putative anthranilate synthase beta subunit
  misc_feature (55)..(272): Homolog of NCBI NO: 15221810 NR Description: F5A9.17; protein id: At1g24807.1 [Arabidopsis
  misc_feature (55)..(272): Homolog of NCBI NO: 15221840 NR Description: F5A9.7; protein id: At1g25083.1 [Arabidopsis
  misc_feature (40)..(272): Homolog of NCBI NO: 25403004 NR Description: probable anthranilate synthase beta subunit
  misc_feature (1)..(272): Homolog of NCBI NO: 15222532 NR Description: anthranilate synthase beta subunit
  misc_feature (1)..(273): Homolog of NCBI NO: 15242893 NR Description: anthranilate synthase beta chain
  misc_feature (1)..(273): Homolog of NCBI NO: 21594026 NR Description: anthranilate synthase beta chain [Arabidopsis
MAATTLYNSCLLQPKYGFTTRRLNQSLVNPLTNPTRVSVLWKSRRDVIAKASIEMAESNSISSVVVNSSGPIIVIDNYDSFTYNLCQYMGELGCHFEVYRNDELTVEELKRKKPRGLLISPGPGTPQDSGISLQTVLELGPLVPLFGVCMGLQCIGEAFGGKIVRSPFGVMHGKSSMVHYDEKGEEGLFSGLSNPFLVGRYHSLVIEKDSFPSDELEVTAWTEDGLVMAARHRKYKHIQGVQFHPESIITTEGKTIVRNFIKLVEKKESEKLA

SEQ ID NO: 27453 - protein, 219 aa, Arabidopsis thaliana
  peptide (1)..(219): Ceres Seq. ID no. 12332928
  misc_feature (19)..(209): Pfam Name: Glutamine amidotransferase class-I Pfam Description: Glutamine amidotransferase class-I
  misc_feature (18)..(207): Homolog of NCBI NO: 11467408 NR Description: anthranilate synthase component II [Cyanophora
  misc_feature (18)..(208): Homolog of NCBI NO: 37520452 NR Description: anthranilate synthase component II [Gloeobacter
  misc_feature (17)..(217): Homolog of NCBI NO: 21741992 NR Description: OSJNBa0060P14.13 [Oryza sativa (japonica
  misc_feature (1)..(215): Homolog of NCBI NO: 28301926 NR Description: putative anthranilate synthase beta subunit
  misc_feature (1)..(218): Homolog of NCBI NO: 15221810 NR Description: F5A9.17; protein id: At1g24807.1 [Arabidopsis
  misc_feature (1)..(218): Homolog of NCBI NO: 15221840 NR Description: F5A9.7; protein id: At1g25083.1 [Arabidopsis
  misc_feature (1)..(218): Homolog of NCBI NO: 25403004 NR Description: probable anthranilate synthase beta subunit
  misc_feature (1)..(218): Homolog of NCBI NO: 15222532 NR Description: anthranilate synthase beta subunit
  misc_feature (1)..(219): Homolog of NCBI NO: 15242893 NR Description: anthranilate synthase beta chain
  misc_feature (1)..(219): Homolog of NCBI NO: 21594026 NR Description: anthranilate synthase beta chain [Arabidopsis
MAESNSISSVVVNSSGPIIVIDNYDSFTYNLCQYMGELGCHFEVYRNDELTVEELKRKKPRGLLISPGPGTPQDSGISLQTVLELGPLVPLFGVCMGLQCIGEAFGGKIVRSPFGVMHGKSSMVHYDEKGEEGLFSGLSNPFLVGRYHSLVIEKDSFPSDELEVTAWTEDGLVMAARHRKYKHIQGVQFHPESIITTEGKTIVRNFIKLVEKKESEKLA

SEQ ID NO: 27454 - DNA, 914 bp, Arabidopsis thaliana
  misc_feature (1)..(914): Ceres Seq. ID no. 12483437
  misc_feature: MA Experiment ID: 108473 Result: Down-regulated in Transcription
  misc_feature: MA Experiment 108473 PARAMETER Experiment Name: At_Drought_Flowers_cDNA_P Parameter: Timepoint (hr) Value: 7 d
  misc_feature: MA Experiment 108473 PARAMETER Experiment Name: At_Drought_Flowers_cDNA_P Parameter: Tissue Value: Flower
  misc_feature: MA Experiment 108473 PARAMETER Experiment Name: At_Drought_Flowers_cDNA_P Parameter: Treatment Value: Drought vs. No Drought
  misc_feature: MA Experiment ID: 108501 Result: Down-regulated in Transcription
  misc_feature: MA Experiment 108501 PARAMETER Experiment Name: At_ap2_floral_buds_cDNA_P Parameter: Plant Line Value: ap2 (Ler.)
  misc_feature: MA Experiment 108501 PARAMETER Experiment Name: At_ap2_floral_buds_cDNA_P Parameter: Tissue Value: Closed Flower
  misc_feature: MA Experiment ID: 108595 Result: Up-regulated in Transcription
  misc_feature: MA Experiment 108595 PARAMETER Experiment Name: At_Ler-pi_Ovule_cDNA_P Parameter: Plant Line Value: null
  misc_feature: MA Experiment ID: 20000171 Result: Down-regulated in Transcription
  misc_feature: MA Experiment 20000171 PARAMETER Experiment Name: At_42deg_Heat_P Parameter: Age (day) Value: 14
  misc_feature: MA Experiment 20000171 PARAMETER Experiment Name: At_42deg_Heat_P Parameter: Organism Value: A. thaliana
  misc_feature: MA Experiment 20000171 PARAMETER Experiment Name: At_42deg_Heat_P Parameter: Plant Line Value: WS
  misc_feature: MA Experiment 20000171 PARAMETER Experiment Name: At_42deg_Heat_P Parameter: Temperature (deg C) Value: 42 vs. 22
  misc_feature: MA Experiment 20000171 PARAMETER Experiment Name: At_42deg_Heat_P Parameter: Timepoint (hr) Value: 1
  misc_feature: MA Experiment 20000171 PARAMETER Experiment Name: At_42deg_Heat_P Parameter: Tissue Value: Aerial
  misc_feature: MA Experiment ID: 20000173 Result: Down-regulated in Transcription
  misc_feature: MA Experiment 20000173 PARAMETER Experiment Name: At_42deg_Heat_P Parameter: Age (day) Value: 14
  misc_feature: MA Experiment 20000173 PARAMETER Experiment Name: At_42deg_Heat_P Parameter: Organism Value: A. thaliana
  misc_feature: MA Experiment 20000173 PARAMETER Experiment Name: At_42deg_Heat_P Parameter: Plant Line Value: WS
  misc_feature: MA Experiment 20000173 PARAMETER Experiment Name: At_42deg_Heat_P Parameter: Temperature (deg C) Value: 42 vs. 22
  misc_feature: MA Experiment 20000173 PARAMETER Experiment Name: At_42deg_Heat_P Parameter: Timepoint (hr) Value: 6
  misc_feature: MA Experiment 20000173 PARAMETER Experiment Name: At_42deg_Heat_P Parameter: Tissue Value: Aerial
  misc_feature: MA Experiment ID: 20000184 Result: Down-regulated in Transcription
  misc_feature: MA Experiment 20000184 PARAMETER Experiment Name: At_Shoots__P Parameter: Age (day) Value: 7
  misc_feature: MA Experiment 20000184 PARAMETER Experiment Name: At_Shoots__P Parameter: Tissue Value: Shoots vs. Whole Plant
  misc_feature: MA Experiment ID: 20000235 Result: Down-regulated in Transcription
  misc_feature: MA Experiment 20000235 PARAMETER Experiment Name: At_Siliques_P Parameter: Age (day) Value: 21
  misc_feature: MA Experiment 20000235 PARAMETER Experiment Name: At_Siliques_P Parameter: Organism Value: A. thaliana
  misc_feature: MA Experiment 20000235 PARAMETER Experiment Name: At_Siliques_P Parameter: Plant Line Value: WS
  misc_feature: MA Experiment 20000235 PARAMETER Experiment Name: At_Siliques_P Parameter: Tissue Value: 5-10mm Siliques vs. Whole Plant
  misc_feature: MA Experiment ID: 20000264 Result: Down-regulated in Transcription
  misc_feature: MA Experiment 20000264 PARAMETER Experiment Name: At_Open_Flower_P Parameter: Age (day) Value: 21
  misc_feature: MA Experiment 20000264 PARAMETER Experiment Name: At_Open_Flower_P Parameter: Plant Line Value: WS
  misc_feature: MA Experiment 20000264 PARAMETER Experiment Name: At_Open_Flower_P Parameter: Tissue Value: Open Flower vs. Whole Plant
  misc_feature: MA Experiment ID: 20000265 Result: Up-regulated in Transcription
  misc_feature: MA Experiment 20000265 PARAMETER Experiment Name: At_Open_Flower_P Parameter: Age (day) Value: 21
  misc_feature: MA Experiment 20000265 PARAMETER Experiment Name: At_Open_Flower_P Parameter: Plant Line Value: WS
  misc_feature: MA Experiment 20000265 PARAMETER Experiment Name: At_Open_Flower_P Parameter: Tissue Value: Closed Flower vs. Whole Plant
  misc_feature: MA Experiment ID: 20000286 Result: Up-regulated in Transcription
  misc_feature: MA Experiment 20000286 PARAMETER Experiment Name: At_Open_Flower_P Parameter: Age (day) Value: 21
  misc_feature: MA Experiment 20000286 PARAMETER Experiment Name: At_Open_Flower_P Parameter: Plant Line Value: WS
  misc_feature: MA Experiment 20000286 PARAMETER Experiment Name: At_Open_Flower_P Parameter: Tissue Value: Half Open vs. Whole Plant
  misc_feature: MA Experiment ID: 20000438 Result: Down-regulated in Transcription
  misc_feature: MA Experiment 20000438 PARAMETER Experiment Name: At_Shoots__P Parameter: Age (day) Value: 14
  misc_feature: MA Experiment 20000438 PARAMETER Experiment Name: At_Shoots__P Parameter: Tissue Value: Shoots vs. Whole Plant
  misc_feature: MA Experiment ID: 20000439 Result: Down-regulated in Transcription
  misc_feature: MA Experiment 20000439 PARAMETER Experiment Name: At_Roots__P Parameter: Age (day) Value: 14 vs. 21
  misc_feature: MA Experiment 20000439 PARAMETER Experiment Name: At_Roots__P Parameter: Organism Value: A. thaliana
  misc_feature: MA Experiment 20000439 PARAMETER Experiment Name: At_Roots__P Parameter: Tissue Value: Roots vs. Whole Plant
  misc_feature: MA Experiment ID: 20000794 Result: Down-regulated in Transcription
  misc_feature: MA Experiment 20000794 PARAMETER Experiment Name: At_Petals_P Parameter: Age (day) Value: 23-25 days
  misc_feature: MA Experiment 20000794 PARAMETER Experiment Name: At_Petals_P Parameter: Plant Line Value: WS
  misc_feature: MA Experiment 20000794 PARAMETER Experiment Name: At_Petals_P Parameter: Tissue Value: Petals vs. Whole plant
  misc_feature: MA Experiment ID: 20001555 Result: Down-regulated in Transcription
  misc_feature: MA Experiment 20001555 PARAMETER Experiment Name: At_Drought_Soil_Dry_P Parameter: Age (day) Value: 24
  misc_feature: MA Experiment 20001555 PARAMETER Experiment Name: At_Drought_Soil_Dry_P Parameter: Organism Value: A. thaliana
  misc_feature: MA Experiment 20001555 PARAMETER Experiment Name: At_Drought_Soil_Dry_P Parameter: Plant Line Value: WS
  misc_feature: MA Experiment 20001555 PARAMETER Experiment Name: At_Drought_Soil_Dry_P Parameter: Post Timepoint (hr) Value: None
  misc_feature: MA Experiment 20001555 PARAMETER Experiment Name: At_Drought_Soil_Dry_P Parameter: Post-Treatment Value: None
  misc_feature: MA Experiment 20001555 PARAMETER Experiment Name: At_Drought_Soil_Dry_P Parameter: Timepoint (day) Value: 10
  misc_feature: MA Experiment 20001555 PARAMETER Experiment Name: At_Drought_Soil_Dry_P Parameter: Treatment Value: Drought vs. No Drought
  misc_feature: MA Experiment ID: 20001556 Result: Down-regulated in Transcription
  misc_feature: MA Experiment 20001556 PARAMETER Experiment Name: At_Drought_Soil_Dry_P Parameter: Age (day) Value: 26
  misc_feature: MA Experiment 20001556 PARAMETER Experiment Name: At_Drought_Soil_Dry_P Parameter: Organism Value: A. thaliana
  misc_feature: MA Experiment 20001556 PARAMETER Experiment Name: At_Drought_Soil_Dry_P Parameter: Plant Line Value: WS
  misc_feature: MA Experiment 20001556 PARAMETER Experiment Name: At_Drought_Soil_Dry_P Parameter: Post Timepoint (hr) Value: None
  misc_feature: MA Experiment 20001556 PARAMETER Experiment Name: At_Drought_Soil_Dry_P Parameter: Post-Treatment Value: None
  misc_feature: MA Experiment 20001556 PARAMETER Experiment Name: At_Drought_Soil_Dry_P Parameter: Timepoint (day) Value: 12
  misc_feature: MA Experiment 20001556 PARAMETER Experiment Name: At_Drought_Soil_Dry_P Parameter: Treatment Value: Drought vs. No Drought
  misc_feature: MA Experiment ID: 20001557 Result: Down-regulated in Transcription
  misc_feature: MA Experiment 20001557 PARAMETER Experiment Name: At_Drought_Soil_Dry_P Parameter: Age (day) Value: 27
  misc_feature: MA Experiment 20001557 PARAMETER Experiment Name: At_Drought_Soil_Dry_P Parameter: Organism Value: A. thaliana
  misc_feature: MA Experiment 20001557 PARAMETER Experiment Name: At_Drought_Soil_Dry_P Parameter: Plant Line Value: WS
  misc_feature: MA Experiment 20001557 PARAMETER Experiment Name: At_Drought_Soil_Dry_P Parameter: Post Timepoint (hr) Value: 3
  misc_feature: MA Experiment 20001557 PARAMETER Experiment Name: At_Drought_Soil_Dry_P Parameter: Post-Treatment Value: Re-Water vs. No Drought
  misc_feature: MA Experiment 20001557 PARAMETER Experiment Name: At_Drought_Soil_Dry_P Parameter: Timepoint (day) Value: 13
  misc_feature: MA Experiment 20001557 PARAMETER Experiment Name: At_Drought_Soil_Dry_P Parameter: Treatment Value: Drought vs. No Drought
  misc_feature: MA Experiment ID: 20001560 Result: Up-regulated in Transcription
  misc_feature: MA Experiment 20001560 PARAMETER Experiment Name: At_Drought_Soil_Dry_P Parameter: Age (day) Value: 28
  misc_feature: MA Experiment 20001560 PARAMETER Experiment Name: At_Drought_Soil_Dry_P Parameter: Organism Value: A. thaliana
  misc_feature: MA Experiment 20001560 PARAMETER Experiment Name: At_Drought_Soil_Dry_P Parameter: Plant Line Value: WS
  misc_feature: MA Experiment 20001560 PARAMETER Experiment Name: At_Drought_Soil_Dry_P Parameter: Post Timepoint (hr) Value: None
  misc_feature: MA Experiment 20001560 PARAMETER Experiment Name: At_Drought_Soil_Dry_P Parameter: Post-Treatment Value: None
  misc_feature: MA Experiment 20001560 PARAMETER Experiment Name: At_Drought_Soil_Dry_P Parameter: Timepoint (day) Value: 14
  misc_feature: MA Experiment 20001560 PARAMETER Experiment Name: At_Drought_Soil_Dry_P Parameter: Treatment Value: Drought vs. No Drought
  misc_feature: MA Experiment ID: 20001761 Result: Up-regulated in Transcription
  misc_feature: MA Experiment 20001761 PARAMETER Experiment Name: At_50mM_NH4NO3_L-to-H_P Parameter: Timepoint (hr) Value: 4
  misc_feature: MA Experiment 20001761 PARAMETER Experiment Name: At_50mM_NH4NO3_L-to-H_P Parameter: Tissue Value: Siliques
  misc_feature: MA Experiment 20001761 PARAMETER Experiment Name: At_50mM_NH4NO3_L-to-H_P Parameter: Treatment Value: 50mM NH4NO3 vs 100mM Mannitol
  misc_feature: MA Experiment ID: 20001762 Result: Down-regulated in Transcription
  misc_feature: MA Experiment 20001762 PARAMETER Experiment Name: At_50mM_NH4NO3_L-to-H_P Parameter: Timepoint (hr) Value: 6
  misc_feature: MA Experiment 20001762 PARAMETER Experiment Name: At_50mM_NH4NO3_L-to-H_P Parameter: Tissue Value: Siliques
  misc_feature: MA Experiment 20001762 PARAMETER Experiment Name: At_50mM_NH4NO3_L-to-H_P Parameter: Treatment Value: 50mM NH4NO3 vs 100mM Mannitol
  misc_feature: MA Experiment ID: 20001771 Result: Up-regulated in Transcription
  misc_feature: MA Experiment 20001771 PARAMETER Experiment Name: At_Far-red-enriched-adult_P Parameter: Age (day) Value: 28
  misc_feature: MA Experiment 20001771 PARAMETER Experiment Name: At_Far-red-enriched-adult_P Parameter: Light Value: Far-red enriched vs. White
  misc_feature: MA Experiment 20001771 PARAMETER Experiment Name: At_Far-red-enriched-adult_P Parameter: Organism Value: A. thaliana
  misc_feature: MA Experiment 20001771 PARAMETER Experiment Name: At_Far-red-enriched-adult_P Parameter: Plant Line Value: Columbia
  misc_feature: MA Experiment 20001771 PARAMETER Experiment Name: At_Far-red-enriched-adult_P Parameter: Timepoint (hr) Value: 16
  misc_feature: MA Experiment 20001771 PARAMETER Experiment Name: At_Far-red-enriched-adult_P Parameter: Tissue Value: Aerial
  misc_feature: MA Experiment ID: 20001773 Result: Up-regulated in Transcription
  misc_feature: MA Experiment 20001773 PARAMETER Experiment Name: At_Far-red-enriched-adult_P Parameter: Age (day) Value: 30
  misc_feature: MA Experiment 20001773 PARAMETER Experiment Name: At_Far-red-enriched-adult_P Parameter: Light Value: Far-red enriched vs. White
  misc_feature: MA Experiment 20001773 PARAMETER Experiment Name: At_Far-red-enriched-adult_P Parameter: Organism Value: A. thaliana
  misc_feature: MA Experiment 20001773 PARAMETER Experiment Name: At_Far-red-enriched-adult_P Parameter: Plant Line Value: Columbia
  misc_feature: MA Experiment 20001773 PARAMETER Experiment Name: At_Far-red-enriched-adult_P Parameter: Timepoint (hr) Value: 48
  misc_feature: MA Experiment 20001773 PARAMETER Experiment Name: At_Far-red-enriched-adult_P Parameter: Tissue Value: Aerial
  misc_feature: MA Experiment ID: 20001904 Result: Down-regulated in Transcription
  misc_feature: MA Experiment 20001904 PARAMETER Experiment Name: At_Drought_Reproduction_P Parameter: Age (day) Value: 37
  misc_feature: MA Experiment 20001904 PARAMETER Experiment Name: At_Drought_Reproduction_P Parameter: Organism Value: A. thaliana
  misc_feature: MA Experiment 20001904 PARAMETER Experiment Name: At_Drought_Reproduction_P Parameter: Plant Line Value: WS
  misc_feature: MA Experiment 20001904 PARAMETER Experiment Name: At_Drought_Reproduction_P Parameter: Timepoint (day) Value: 7
  misc_feature: MA Experiment 20001904 PARAMETER Experiment Name: At_Drought_Reproduction_P Parameter: Tissue Value: Rosettes
  misc_feature: MA Experiment 20001904 PARAMETER Experiment Name: At_Drought_Reproduction_P Parameter: Treatment Value: Drought vs. No Drought
  misc_feature: MA Experiment ID: 20001911 Result: Down-regulated in Transcription
  misc_feature: MA Experiment 20001911 PARAMETER Experiment Name: At_Drought_Reproduction_P Parameter: Age (day) Value: 40
  misc_feature: MA Experiment 20001911 PARAMETER Experiment Name: At_Drought_Reproduction_P Parameter: Organism Value: A. thaliana
  misc_feature: MA Experiment 20001911 PARAMETER Experiment Name: At_Drought_Reproduction_P Parameter: Plant Line Value: WS
  misc_feature: MA Experiment 20001911 PARAMETER Experiment Name: At_Drought_Reproduction_P Parameter: Timepoint (day) Value: 10
  misc_feature: MA Experiment 20001911 PARAMETER Experiment Name: At_Drought_Reproduction_P Parameter: Tissue Value: Flowers
  misc_feature: MA Experiment 20001911 PARAMETER Experiment Name: At_Drought_Reproduction_P Parameter: Treatment Value: Drought vs. No Drought
atttttggttcctttaataatcatttctttcttttatataaacctaagatacgttccccatatttcactcactcaagaagacatcaagccatcaaaaatatatccatagaagcttcatcgaaatggcgaatcaagcagctgctgcagcattcttccttttcgctttagccgtcttctccaacttggagctctcagcttcttcacttgtcagtggcaagatctcttgccttgactgccaccacgatttcgacttctcaggcattaaggtcctccttaaatgcgacggagagaagaaacaaataaccgcgatggcagctgcagacggatctttccggtcagtgcttccaacggctgacaaaaaaggctccataaattgtcttgcaaagctcttgggaggccctgagcaactctatgctcacaaacacaacttggtctctgaattggtcaagtctaaacacgattccaaagttttaactacctcaaacccacttgccttctctctctcctgccccaaaccatcccgagatgatatcggaagtatgatcggagattccaagactattaattttccgggggcaggaggttttggattcccacctgccagcttctttcccttcttaccaatcattggtatcccatgatttaaataagtgttacttttaagtccttaaagacatatgtatacatatgttttgttgtttacgtgaatgaagccagccaagacaagacacaaatatttagcaaattacattactttgtttagtgagatataaggtttgtttatgtgctaagaaaatgttatttattggctttatgtagtttaaatcagttgcttttgtatcaagtttgtaataagaaggttgggttaatccaacaacatacgctttattgtgaacattcatgcttctatgatc

SEQ ID NO: 27455 - protein, 172 aa, Arabidopsis thaliana
  peptide (1)..(172): Ceres Seq. ID no. 12483438
  misc_feature (1)..(172): Homolog of NCBI NO: 30683502 NR Description: expressed protein [Arabidopsis thaliana]
  misc_feature (1)..(172): Homolog of NCBI NO: 18420486 NR Description: expressed protein
  misc_feature (1)..(172): Homolog of NCBI NO: 21594030 NR Description: unknown [Arabidopsis thaliana]
MANQAAAAAFFLFALAVFSNLELSASSLVSGKISCLDCHHDFDFSGIKVLLKCDGEKKQITAMAAADGSFRSVLPTADKKGSINCLAKLLGGPEQLYAHKHNLVSELVKSKHDSKVLTTSNPLAFSLSCPKPSRDDIGSMIGDSKTINFPGAGGFGFPPASFFPFLPIIGIP

SEQ ID NO: 27456 - protein, 110 aa, Arabidopsis thaliana
  peptide (1)..(110): Ceres Seq. ID no. 12483439
  misc_feature (1)..(110): Homolog of NCBI NO: 30683502 NR Description: expressed protein [Arabidopsis thaliana]
  misc_feature (1)..(110): Homolog of NCBI NO: 18420486 NR Description: expressed protein
  misc_feature (1)..(110): Homolog of NCBI NO: 21594030 NR Description: unknown [Arabidopsis thaliana]
MAAADGSFRSVLPTADKKGSINCLAKLLGGPEQLYAHKHNLVSELVKSKHDSKVLTTSNPLAFSLSCPKPSRDDIGSMIGDSKTINFPGAGGFGFPPASFFPFLPIIGIP

SEQ ID NO: 27457 - DNA, 1115 bp, Arabidopsis thaliana
  misc_feature (1)..(1115): Ceres Seq. ID no. 12421232
  misc_feature: MA Experiment ID: 20001451 Result: Down-regulated in Transcription
  misc_feature: MA Experiment 20001451 PARAMETER Experiment Name: At_Far-red-induction_P Parameter: Age (day) Value: 7
  misc_feature: MA Experiment 20001451 PARAMETER Experiment Name: At_Far-red-induction_P Parameter: Light Value: Far-red vs. White
  misc_feature: MA Experiment 20001451 PARAMETER Experiment Name: At_Far-red-induction_P Parameter: Organism Value: A. thaliana
  misc_feature: MA Experiment 20001451 PARAMETER Experiment Name: At_Far-red-induction_P Parameter: Plant Line Value: Columbia
  misc_feature: MA Experiment 20001451 PARAMETER Experiment Name: At_Far-red-induction_P Parameter: Timepoint (hr) Value: 24
  misc_feature: MA Experiment 20001451 PARAMETER Experiment Name: At_Far-red-induction_P Parameter: Tissue Value: Whole Plant
  misc_feature: MA Experiment ID: 20001558 Result: Up-regulated in Transcription
  misc_feature: MA Experiment 20001558 PARAMETER Experiment Name: At_Drought_Soil_Dry_P Parameter: Age (day) Value: 27
  misc_feature: MA Experiment 20001558 PARAMETER Experiment Name: At_Drought_Soil_Dry_P Parameter: Organism Value: A. thaliana
  misc_feature: MA Experiment 20001558 PARAMETER Experiment Name: At_Drought_Soil_Dry_P Parameter: Plant Line Value: WS
  misc_feature: MA Experiment 20001558 PARAMETER Experiment Name: At_Drought_Soil_Dry_P Parameter: Post Timepoint (hr) Value: 6
  misc_feature: MA Experiment 20001558 PARAMETER Experiment Name: At_Drought_Soil_Dry_P Parameter: Post-Treatment Value: Re-Water vs. No Drought
  misc_feature: MA Experiment 20001558 PARAMETER Experiment Name: At_Drought_Soil_Dry_P Parameter: Timepoint (day) Value: 13
  misc_feature: MA Experiment 20001558 PARAMETER Experiment Name: At_Drought_Soil_Dry_P Parameter: Treatment Value: Drought vs. No Drought
aaacccatttgctcacttcgtcgtcgtctctctctctcactggtaaaaagcaaacaatgttgctccgtcgtgcaaaaacactacccaaaaccctacaaaacctccggttattctctccggcggcgaacgcagctctatccctagatcatatccaagaaacccaattaacttacctccctggattccctcgacccgatccaaaacacgcagagacgatcttagccgttccaaggtctgtctccggcaagagcatatcagcgaaagagcgtaaagcgggtcgggttccttcgatcatattcgaacaagaggatggacaacacggaggaaacaagaggcttatttcagttcagacgaatcagatcaggaagcttgtgaatcatttgggttactcttttttcctctctaggctctttgatgttgaggttcgagctgagattggttctgatgaggttattgagaaagtcagagccttgcctagagcgattcatttgcactctgggactgatgctccactgaatgtgacattcataagagcgcctccaggtgctttgttgaaagttgatatccctcttgtgttcattggagatgatgtttctcctggattgaagaaaggagcatctctgaatacgattaaaagaacagtaaagttcctatgcccagcagagattatcccaccatatatagaagtagatctaagccaattggatatcggacaaaagctagtaatgggagacctcaaggttcatccggctttaaagcttataaagtccaaagacgaacccattgttaaggtcgccggaggacgtgtcactgacacgcaaaagaaatcgtctgacacgcaaaagaaataacaccggtgagtcatattaactgcgattatccggtgcaatctccaaatgttgaccaaaaatgaatggatcgatcttcttagaactctaaaggtcctttcggatggaggtttctttatgtgttattattagtgttgccagaagatgaaatatttcctatcttttgattctacaatgcatttattttctattcacaatcaactacttttatttacagacctctaataagcgtagaaagggaaacaaaatttaatctcttttagattt

SEQ ID NO: 27458 - protein, 282 aa, Arabidopsis thaliana
  peptide (1)..(282): Ceres Seq. ID no. 12421233
  misc_feature (71)..(265): Homolog of NCBI NO: 22965584 NR Description: hypothetical protein [Rhodospirillum rubrum]
  misc_feature (72)..(277): Homolog of NCBI NO: 17545113 NR Description: PUTATIVE 50S RIBOSOMAL SUBUNIT PROTEIN L25
  misc_feature (74)..(266): Homolog of NCBI NO: 13472406 NR Description: 50S ribosomal protein L25 [Mesorhizobium loti]
  misc_feature (69)..(279): Homolog of NCBI NO: 16124740 NR Description: ribosomal 5S rRNA E-loop binding protein
  misc_feature (74)..(281): Homolog of NCBI NO: 23106991 NR Description: hypothetical protein [Novosphingobium
  misc_feature (74)..(264): Homolog of NCBI NO: 27382552 NR Description: 50S ribosomal protein L25 [Bradyrhizobium
  misc_feature (74)..(264): Homolog of NCBI NO: 22961530 NR Description: hypothetical protein [Rhodopseudomonas palustris]
  misc_feature (70)..(264): Homolog of NCBI NO: 15240108 NR Description: putative protein
  misc_feature (19)..(247): Homolog of NCBI NO: 34912284 NR Description: P0451D05.2 [Oryza sativa (japonica
  misc_feature (19)..(282): Homolog of NCBI NO: 15236554 NR Description: putative protein
THLLTSSSSLSLTGKKQTMLLRRAKTLPKTLQNLRLFSPAANAALSLDHIQETQLTYLPGFPRPDPKHAETILAVPRSVSGKSISAKERKAGRVPSIIFEQEDGQHGGNKRLISVQTNQIRKLVNHLGYSFFLSRLFDVEVRAEIGSDEVIEKVRALPRAIHLHSGTDAPLNVTFIRAPPGALLKVDIPLVFIGDDVSPGLKKGASLNTIKRTVKFLCPAEIIPPYIEVDLSQLDIGQKLVMGDLKVHPALKLIKSKDEPIVKVAGGRVTDTQKKSSDTQKK

SEQ ID NO: 27459 - protein, 264 aa, Arabidopsis thaliana
  peptide (1)..(264): Ceres Seq. ID no. 12421234
  misc_feature (1)..(264): Homolog of NCBI NO: 15236554 NR Description: putative protein
  misc_feature (53)..(247): Homolog of NCBI NO: 22965584 NR Description: hypothetical protein [Rhodospirillum rubrum]
  misc_feature (54)..(259): Homolog of NCBI NO: 17545113 NR Description: PUTATIVE 50S RIBOSOMAL SUBUNIT PROTEIN L25
  misc_feature (56)..(248): Homolog of NCBI NO: 13472406 NR Description: 50S ribosomal protein L25 [Mesorhizobium loti]
  misc_feature (51)..(261): Homolog of NCBI NO: 16124740 NR Description: ribosomal 5S rRNA E-loop binding protein
  misc_feature (56)..(263): Homolog of NCBI NO: 23106991 NR Description: hypothetical protein [Novosphingobium
  misc_feature (56)..(246): Homolog of NCBI NO: 27382552 NR Description: 50S ribosomal protein L25 [Bradyrhizobium
  misc_feature (56)..(246): Homolog of NCBI NO: 22961530 NR Description: hypothetical protein [Rhodopseudomonas palustris]
  misc_feature (52)..(246): Homolog of NCBI NO: 15240108 NR Description: putative protein
  misc_feature (1)..(229): Homolog of NCBI NO: 34912284 NR Description: P0451D05.2 [Oryza sativa (japonica
MLLRRAKTLPKTLQNLRLFSPAANAALSLDHIQETQLTYLPGFPRPDPKHAETILAVPRSVSGKSISAKERKAGRVPSIIFEQEDGQHGGNKRLISVQTNQIRKLVNHLGYSFFLSRLFDVEVRAEIGSDEVIEKVRALPRAIHLHSGTDAPLNVTFIRAPPGALLKVDIPLVFIGDDVSPGLKKGASLNTIKRTVKFLCPAEIIPPYIEVDLSQLDIGQKLVMGDLKVHPALKLIKSKDEPIVKVAGGRVTDTQKKSSDTQKK

SEQ ID NO: 27460 - DNA, 917 bp, Arabidopsis thaliana
  misc_feature (1)..(917): Ceres Seq. ID no. 12734710
  misc_feature: MA Experiment ID: 108434 Result: Down-regulated in Transcription
  misc_feature: MA Experiment 108434 PARAMETER Experiment Name: At_Root_Tips_cDNA_P Parameter: Tissue Value: Root Tips
  misc_feature: MA Experiment ID: 108462 Result: Up-regulated in Transcription
  misc_feature: MA Experiment 108462 PARAMETER Experiment Name: At_Germinating_Seeds_cDNA_P Parameter: Age (day) Value: 2 vs. 0
  misc_feature: MA Experiment 108462 PARAMETER Experiment Name: At_Germinating_Seeds_cDNA_P Parameter: Tissue Value: Germinating Seeds
  misc_feature: MA Experiment ID: 108464 Result: Up-regulated in Transcription
  misc_feature: MA Experiment 108464 PARAMETER Experiment Name: At_Germinating_Seeds_cDNA_P Parameter: Age (day) Value: 4 vs. 0
  misc_feature: MA Experiment 108464 PARAMETER Experiment Name: At_Germinating_Seeds_cDNA_P Parameter: Tissue Value: Germinating Seeds
  misc_feature: MA Experiment ID: 108574 Result: Up-regulated in Transcription
  misc_feature: MA Experiment 108574 PARAMETER Experiment Name: At_Wounding__cDNA_P Parameter: Timepoint (hr) Value: 1
  misc_feature: MA Experiment 108574 PARAMETER Experiment Name: At_Wounding__cDNA_P Parameter: Tissue Value: Aerial
  misc_feature: MA Experiment 108574 PARAMETER Experiment Name: At_Wounding__cDNA_P Parameter: Treatment Value: Wounding vs. No Wounding
  misc_feature: MA Experiment ID: 108576 Result: Up-regulated in Transcription
  misc_feature: MA Experiment 108576 PARAMETER Experiment Name: At_42deg_Heat_cDNA_P Parameter: Temperature (deg C) Value: 42 vs. 22
  misc_feature: MA Experiment 108576 PARAMETER Experiment Name: At_42deg_Heat_cDNA_P Parameter: Timepoint (hr) Value: 1
  misc_feature: MA Experiment 108576 PARAMETER Experiment Name: At_42deg_Heat_cDNA_P Parameter: Tissue Value: Aerial
  misc_feature: MA Experiment ID: 108577 Result: Up-regulated in Transcription
  misc_feature: MA Experiment 108577 PARAMETER Experiment Name: At_42deg_Heat_cDNA_P Parameter: Temperature (deg C) Value: 42 vs. 22
  misc_feature: MA Experiment 108577 PARAMETER Experiment Name: At_42deg_Heat_cDNA_P Parameter: Timepoint (hr) Value: 6
  misc_feature: MA Experiment 108577 PARAMETER Experiment Name: At_42deg_Heat_cDNA_P Parameter: Tissue Value: Aerial
  misc_feature: MA Experiment ID: 108607 Result: Up-regulated in Transcription
  misc_feature: MA Experiment 108607 PARAMETER Experiment Name: At_100uM_ABA_cDNA_P Parameter: Timepoint (hr) Value: 4
  misc_feature: MA Experiment 108607 PARAMETER Experiment Name: At_100uM_ABA_cDNA_P Parameter: Tissue Value: Aerial
  misc_feature: MA Experiment 108607 PARAMETER Experiment Name: At_100uM_ABA_cDNA_P Parameter: Treatment Value: 100uM ABA vs. No Treatment
  misc_feature: MA Experiment ID: 108608 Result: Up-regulated in Transcription
  misc_feature: MA Experiment 108608 PARAMETER Experiment Name: At_100uM_ABA_cDNA_P Parameter: Timepoint (hr) Value: 1
  misc_feature: MA Experiment 108608 PARAMETER Experiment Name: At_100uM_ABA_cDNA_P Parameter: Tissue Value: Aerial
  misc_feature: MA Experiment 108608 PARAMETER Experiment Name: At_100uM_ABA_cDNA_P Parameter: Treatment Value: 100uM ABA vs. No Treatment
  misc_feature: MA Experiment ID: 20000068 Result: Down-regulated in Transcription
  misc_feature: MA Experiment ID: 20000111 Result: Up-regulated in Transcription
  misc_feature: MA Experiment 20000111 PARAMETER Experiment Name: At_42deg_Heat_cDNA_P Parameter: Temperature (deg C) Value: 42 vs. 22
  misc_feature: MA Experiment 20000111 PARAMETER Experiment Name: At_42deg_Heat_cDNA_P Parameter: Timepoint (hr) Value: 6
  misc_feature: MA Experiment 20000111 PARAMETER Experiment Name: At_42deg_Heat_cDNA_P Parameter: Tissue Value: Aerial
  misc_feature: MA Experiment ID: 20000112 Result: Up-regulated in Transcription
  misc_feature: MA Experiment 20000112 PARAMETER Experiment Name: At_42deg_Heat_cDNA_P Parameter: Temperature (deg C) Value: 42 vs. 22
  misc_feature: MA Experiment 20000112 PARAMETER Experiment Name: At_42deg_Heat_cDNA_P Parameter: Timepoint (hr) Value: 2
  misc_feature: MA Experiment 20000112 PARAMETER Experiment Name: At_42deg_Heat_cDNA_P Parameter: Tissue Value: Aerial
  misc_feature: MA Experiment ID: 20000113 Result: Up-regulated in Transcription
  misc_feature: MA Experiment 20000113 PARAMETER Experiment Name: At_42deg_Heat_cDNA_P Parameter: Temperature (deg C) Value: 42 vs. 22
  misc_feature: MA Experiment 20000113 PARAMETER Experiment Name: At_42deg_Heat_cDNA_P Parameter: Timepoint (hr) Value: 8
  misc_feature: MA Experiment 20000113 PARAMETER Experiment Name: At_42deg_Heat_cDNA_P Parameter: Tissue Value: Aerial
  misc_feature: MA Experiment ID: 20000144 Result: Up-regulated in Transcription
  misc_feature: MA Experiment 20000144 PARAMETER Experiment Name: At_42deg_Heat_cDNA_P Parameter: Temperature (deg C) Value: 42 vs. 22
  misc_feature: MA Experiment 20000144 PARAMETER Experiment Name: At_42deg_Heat_cDNA_P Parameter: Timepoint (hr) Value: 1
  misc_feature: MA Experiment 20000144 PARAMETER Experiment Name: At_42deg_Heat_cDNA_P Parameter: Tissue Value: Aerial
  misc_feature: MA Experiment ID: 20000166 Result: Up-regulated in Transcription
  misc_feature: MA Experiment 20000166 PARAMETER Experiment Name: At_100uM_ABA_P Parameter: Age (day) Value: 14
  misc_feature: MA Experiment 20000166 PARAMETER Experiment Name: At_100uM_ABA_P Parameter: Organism Value: A. thaliana
  misc_feature: MA Experiment 20000166 PARAMETER Experiment Name: At_100uM_ABA_P Parameter: Plant Line Value: WS
  misc_feature: MA Experiment 20000166 PARAMETER Experiment Name: At_100uM_ABA_P Parameter: Timepoint (hr) Value: 1
  misc_feature: MA Experiment 20000166 PARAMETER Experiment Name: At_100uM_ABA_P Parameter: Tissue Value: Aerial
  misc_feature: MA Experiment 20000166 PARAMETER Experiment Name: At_100uM_ABA_P Parameter: Treatment Value: 100uM ABA vs. No Treatment
  misc_feature: MA Experiment ID: 20000171 Result: Up-regulated in Transcription
  misc_feature: MA Experiment 20000171 PARAMETER Experiment Name: At_42deg_Heat_P Parameter: Age (day) Value: 14
  misc_feature: MA Experiment 20000171 PARAMETER Experiment Name: At_42deg_Heat_P Parameter: Organism Value: A. thaliana
  misc_feature: MA Experiment 20000171 PARAMETER Experiment Name: At_42deg_Heat_P Parameter: Plant Line Value: WS
  misc_feature: MA Experiment 20000171 PARAMETER Experiment Name: At_42deg_Heat_P Parameter: Temperature (deg C) Value: 42 vs. 22
  misc_feature: MA Experiment 20000171 PARAMETER Experiment Name: At_42deg_Heat_P Parameter: Timepoint (hr) Value: 1
  misc_feature: MA Experiment 20000171 PARAMETER Experiment Name: At_42deg_Heat_P Parameter: Tissue Value: Aerial
  misc_feature: MA Experiment ID: 20000173 Result: Up-regulated in Transcription
  misc_feature: MA Experiment 20000173 PARAMETER Experiment Name: At_42deg_Heat_P Parameter: Age (day) Value: 14
  misc_feature: MA Experiment 20000173 PARAMETER Experiment Name: At_42deg_Heat_P Parameter: Organism Value: A. thaliana
  misc_feature: MA Experiment 20000173 PARAMETER Experiment Name: At_42deg_Heat_P Parameter: Plant Line Value: WS
  misc_feature: MA Experiment 20000173 PARAMETER Experiment Name: At_42deg_Heat_P Parameter: Temperature (deg C) Value: 42 vs. 22
  misc_feature: MA Experiment 20000173 PARAMETER Experiment Name: At_42deg_Heat_P Parameter: Timepoint (hr) Value: 6
  misc_feature: MA Experiment 20000173 PARAMETER Experiment Name: At_42deg_Heat_P Parameter: Tissue Value: Aerial
  misc_feature: MA Experiment ID: 20000185 Result: Down-regulated in Transcription
  misc_feature: MA Experiment 20000185 PARAMETER Experiment Name: At_Roots__P Parameter: Age (day) Value: 7 vs. 21
  misc_feature: MA Experiment 20000185 PARAMETER Experiment Name: At_Roots__P Parameter: Organism Value: A. thaliana
  misc_feature: MA Experiment 20000185 PARAMETER Experiment Name: At_Roots__P Parameter: Tissue Value: Roots vs. Whole Plant
  misc_feature: MA Experiment ID: 20000211 Result: Up-regulated in Transcription
  misc_feature: MA Experiment 20000211 PARAMETER Experiment Name: At_0.001percent_MeJA__P Parameter: Age (day) Value: 14
  misc_feature: MA Experiment 20000211 PARAMETER Experiment Name: At_0.001percent_MeJA__P Parameter: Organism Value: A. thaliana
  misc_feature: MA Experiment 20000211 PARAMETER Experiment Name: At_0.001percent_MeJA__P Parameter: Plant Line Value: WS
  misc_feature: MA Experiment 20000211 PARAMETER Experiment Name: At_0.001percent_MeJA__P Parameter: Timepoint (hr) Value: 1
  misc_feature: MA Experiment 20000211 PARAMETER Experiment Name: At_0.001percent_MeJA__P Parameter: Tissue Value: Aerial
  misc_feature: MA Experiment 20000211 PARAMETER Experiment Name: At_0.001percent_MeJA__P Parameter: Treatment Value: 0.001percent MeJA vs. No Treatment
  misc_feature: MA Experiment ID: 20000437 Result: Up-regulated in Transcription
  misc_feature: MA Experiment 20000437 PARAMETER Experiment Name: At_Drought_P Parameter: Age (day) Value: 8
  misc_feature: MA Experiment 20000437 PARAMETER Experiment Name: At_Drought_P Parameter: Organism Value: A. thaliana
  misc_feature: MA Experiment 20000437 PARAMETER Experiment Name: At_Drought_P Parameter: Plant Line Value: WS
  misc_feature: MA Experiment 20000437 PARAMETER Experiment Name: At_Drought_P Parameter: Timepoint (hr) Value: 24
  misc_feature: MA Experiment 20000437 PARAMETER Experiment Name: At_Drought_P Parameter: Tissue Value: Whole Plant
  misc_feature: MA Experiment 20000437 PARAMETER Experiment Name: At_Drought_P Parameter: Treatment Value: Drought vs. No Drought
  misc_feature: MA Experiment ID: 20000439 Result: Down-regulated in Transcription
  misc_feature: MA Experiment 20000439 PARAMETER Experiment Name: At_Roots__P Parameter: Age (day) Value: 14 vs. 21
  misc_feature: MA Experiment 20000439 PARAMETER Experiment Name: At_Roots__P Parameter: Organism Value: A. thaliana
  misc_feature: MA Experiment 20000439 PARAMETER Experiment Name: At_Roots__P Parameter: Tissue Value: Roots vs. Whole Plant
  misc_feature: MA Experiment ID: 20000495 Result: Down-regulated in Transcription
  misc_feature: MA Experiment 20000495 PARAMETER Experiment Name: At_Guard_Cells_P Parameter: Harvest Date Value: 8/2/2002
  misc_feature: MA Experiment 20000495 PARAMETER Experiment Name: At_Guard_Cells_P Parameter: Organism Value: A. thaliana
  misc_feature: MA Experiment 20000495 PARAMETER Experiment Name: At_Guard_Cells_P Parameter: Tissue Value: Guard Cells vs. Leaves
  misc_feature: MA Experiment ID: 20000573 Result: Down-regulated in Transcription
  misc_feature: MA Experiment 20000573 PARAMETER Experiment Name: At_100uM_ABA_Mutants__P Parameter: Organism Value: A. thaliana
  misc_feature: MA Experiment 20000573 PARAMETER Experiment Name: At_100uM_ABA_Mutants__P Parameter: Plant Line Value: CS22 vs. Ler wt
  misc_feature: MA Experiment 20000573 PARAMETER Experiment Name: At_100uM_ABA_Mutants__P Parameter: Timepoint (hr) Value: N/A
  misc_feature: MA Experiment 20000573 PARAMETER Experiment Name: At_100uM_ABA_Mutants__P Parameter: Tissue Value: Whole Plant
  misc_feature: MA Experiment 20000573 PARAMETER Experiment Name: At_100uM_ABA_Mutants__P Parameter: Treatment Value: None
  misc_feature: MA Experiment ID: 20000709 Result: Up-regulated in Transcription
  misc_feature: MA Experiment 20000709 PARAMETER Experiment Name: At_15mM_NH4NO3_L-to-H_P Parameter: Age (hr) Value: 14
  misc_feature: MA Experiment 20000709 PARAMETER Experiment Name: At_15mM_NH4NO3_L-to-H_P Parameter: Organism Value: A. thaliana
  misc_feature: MA Experiment 20000709 PARAMETER Experiment Name: At_15mM_NH4NO3_L-to-H_P Parameter: Plant Line Value: WS
  misc_feature: MA Experiment 20000709 PARAMETER Experiment Name: At_15mM_NH4NO3_L-to-H_P Parameter: Timepoint (hr) Value: 4
  misc_feature: MA Experiment 20000709 PARAMETER Experiment Name: At_15mM_NH4NO3_L-to-H_P Parameter: Tissue Value: Aerial
  misc_feature: MA Experiment 20000709 PARAMETER Experiment Name: At_15mM_NH4NO3_L-to-H_P Parameter: Treatment Value: 15mM NH4NO3 vs. 30mM Mannitol
  misc_feature: MA Experiment ID: 20001248 Result: Down-regulated in Transcription
  misc_feature: MA Experiment 20001248 PARAMETER Experiment Name: At_Far-red-induction_P Parameter: Age (day) Value: 7
  misc_feature: MA Experiment 20001248 PARAMETER Experiment Name: At_Far-red-induction_P Parameter: Light Value: Far-red vs. White
  misc_feature: MA Experiment 20001248 PARAMETER Experiment Name: At_Far-red-induction_P Parameter: Organism Value: A. thaliana
  misc_feature: MA Experiment 20001248 PARAMETER Experiment Name: At_Far-red-induction_P Parameter: Plant Line Value: Columbia
  misc_feature: MA Experiment 20001248 PARAMETER Experiment Name: At_Far-red-induction_P Parameter: Timepoint (hr) Value: 4
  misc_feature: MA Experiment 20001248 PARAMETER Experiment Name: At_Far-red-induction_P Parameter: Tissue Value: Whole Plant
  misc_feature: MA Experiment ID: 20001450 Result: Down-regulated in Transcription
  misc_feature: MA Experiment 20001450 PARAMETER Experiment Name: At_Far-red-induction_P Parameter: Age (day) Value: 7
  misc_feature: MA Experiment 20001450 PARAMETER Experiment Name: At_Far-red-induction_P Parameter: Light Value: Far-red vs. White
  misc_feature: MA Experiment 20001450 PARAMETER Experiment Name: At_Far-red-induction_P Parameter: Organism Value: A. thaliana
  misc_feature: MA Experiment 20001450 PARAMETER Experiment Name: At_Far-red-induction_P Parameter: Plant Line Value: Columbia
  misc_feature: MA Experiment 20001450 PARAMETER Experiment Name: At_Far-red-induction_P Parameter: Timepoint (hr) Value: 8
  misc_feature: MA Experiment 20001450 PARAMETER Experiment Name: At_Far-red-induction_P Parameter: Tissue Value: Whole Plant
  misc_feature: MA Experiment ID: 20001451 Result: Down-regulated in Transcription
  misc_feature: MA Experiment 20001451 PARAMETER Experiment Name: At_Far-red-induction_P Parameter: Age (day) Value: 7
  misc_feature: MA Experiment 20001451 PARAMETER Experiment Name: At_Far-red-induction_P Parameter: Light Value: Far-red vs. White
  misc_feature: MA Experiment 20001451 PARAMETER Experiment Name: At_Far-red-induction_P Parameter: Organism Value: A. thaliana
  misc_feature: MA Experiment 20001451 PARAMETER Experiment Name: At_Far-red-induction_P Parameter: Plant Line Value: Columbia
  misc_feature: MA Experiment 20001451 PARAMETER Experiment Name: At_Far-red-induction_P Parameter: Timepoint (hr) Value: 24
  misc_feature: MA Experiment 20001451 PARAMETER Experiment Name: At_Far-red-induction_P Parameter: Tissue Value: Whole Plant
  misc_feature: MA Experiment ID: 20001560 Result: Up-regulated in Transcription
  misc_feature: MA Experiment 20001560 PARAMETER Experiment Name: At_Drought_Soil_Dry_P Parameter: Age (day) Value: 28
  misc_feature: MA Experiment 20001560 PARAMETER Experiment Name: At_Drought_Soil_Dry_P Parameter: Organism Value: A. thaliana
  misc_feature: MA Experiment 20001560 PARAMETER Experiment Name: At_Drought_Soil_Dry_P Parameter: Plant Line Value: WS
  misc_feature: MA Experiment 20001560 PARAMETER Experiment Name: At_Drought_Soil_Dry_P Parameter: Post Timepoint (hr) Value: None
  misc_feature: MA Experiment 20001560 PARAMETER Experiment Name: At_Drought_Soil_Dry_P Parameter: Post-Treatment Value: None
  misc_feature: MA Experiment 20001560 PARAMETER Experiment Name: At_Drought_Soil_Dry_P Parameter: Timepoint (day) Value: 14
  misc_feature: MA Experiment 20001560 PARAMETER Experiment Name: At_Drought_Soil_Dry_P Parameter: Treatment Value: Drought vs. No Drought
  misc_feature: MA Experiment ID: 20001905 Result: Up-regulated in Transcription
  misc_feature: MA Experiment 20001905 PARAMETER Experiment Name: At_Drought_Reproduction_P Parameter: Age (day) Value: 40
  misc_feature: MA Experiment 20001905 PARAMETER Experiment Name: At_Drought_Reproduction_P Parameter: Organism Value: A. thaliana
  misc_feature: MA Experiment 20001905 PARAMETER Experiment Name: At_Drought_Reproduction_P Parameter: Plant Line Value: WS
  misc_feature: MA Experiment 20001905 PARAMETER Experiment Name: At_Drought_Reproduction_P Parameter: Timepoint (day) Value: 10
  misc_feature: MA Experiment 20001905 PARAMETER Experiment Name: At_Drought_Reproduction_P Parameter: Tissue Value: Rosettes
  misc_feature: MA Experiment 20001905 PARAMETER Experiment Name: At_Drought_Reproduction_P Parameter: Treatment Value: Drought vs. No Drought
  misc_feature: MA Experiment ID: 20001911 Result: Up-regulated in Transcription
  misc_feature: MA Experiment 20001911 PARAMETER Experiment Name: At_Drought_Reproduction_P Parameter: Age (day) Value: 40
  misc_feature: MA Experiment 20001911 PARAMETER Experiment Name: At_Drought_Reproduction_P Parameter: Organism Value: A. thaliana
  misc_feature: MA Experiment 20001911 PARAMETER Experiment Name: At_Drought_Reproduction_P Parameter: Plant Line Value: WS
  misc_feature: MA Experiment 20001911 PARAMETER Experiment Name: At_Drought_Reproduction_P Parameter: Timepoint (day) Value: 10
  misc_feature: MA Experiment 20001911 PARAMETER Experiment Name: At_Drought_Reproduction_P Parameter: Tissue Value: Flowers
  misc_feature: MA Experiment 20001911 PARAMETER Experiment Name: At_Drought_Reproduction_P Parameter: Treatment Value: Drought vs. No Drought
cacaaaaccagaaaaaactacatttctaacatatagaagaaacagagaaaaagagagagagacccctaatggctgagaaagaagaagtgaagcttttggggatatgggcgagcccttttagccgtcgggtcgagatggctctcaaactcaaaggcataccgtacgagtacgtggaagagatactggagaacaaaagccctttgcttcttgctcttaaccctattcacaagaaagtccctgttcttgtccacaatggtaaaaccattctcgagtctcatgtgattcttgaatacatcgatgagacttggccacaaaatccaattctccctcaagatccttatgaaagatccaaagctcgtttctttgctaaactcgtcgatgaacagattatgaacgtggggtttatatcaatggcaagagcagacgagaaaggaagagaagttttagccgagcaggtaagagaactgattatgtatctcgagaaagaacttgtcggaaaagattacttcggaggcaagactgtcggattcttggactttgtcgccggaagtttaattccgttttgtttggagagaggttgggaaggaataggattggaagtgattacagaggagaagtttccagagttcaagagatgggttaggaatttggagaaggttgagattgttaaagattgtgttccaccaagagaggaacatgtagaacacatgaactatatggcagagagagtgagatcttcttaagaaaacaaatcatgtttagttcttgatcatgcaatgtttgtatggttatgttgttgtttattttattgaatatctttgtatgttgtgtggttgagaagtgaggttttatcatcatctctcacgttatcttatttggtcccagccactatttagaattaatggtaaagctttggc

SEQ ID NO: 27461 - protein, 224 aa, Arabidopsis thaliana
  peptide (1)..(224): Ceres Seq. ID no. 12734711
  misc_feature (86)..(198): Pfam Name: Glutathione S-transferase, C-terminal domain Pfam Description: Glutathione S-transferase, C-terminal domain
  misc_feature (7)..(217): Homolog of NCBI NO: 7595790 NR Description: glutathione S-transferase [Euphorbia esula]
  misc_feature (1)..(224): Homolog of NCBI NO: 15232628 NR Description: glutathione transferase, putative
  misc_feature (1)..(221): Homolog of NCBI NO: 15227082 NR Description: glutathione transferase, putative
  misc_feature (1)..(223): Homolog of NCBI NO: 15227087 NR Description: glutathione transferase, putative
  misc_feature (1)..(224): Homolog of NCBI NO: 15227550 NR Description: glutathione transferase, putative
  misc_feature (1)..(224): Homolog of NCBI NO: 14423534 NR Description: putative glutathione S-transferase [Arabidopsis
  misc_feature (1)..(224): Homolog of NCBI NO: 15227086 NR Description: glutathione transferase, putative
  misc_feature (1)..(224): Homolog of NCBI NO: 15227551 NR Description: glutathione transferase, putative
  misc_feature (1)..(224): Homolog of NCBI NO: 15227084 NR Description: glutathione transferase, putative
  misc_feature (1)..(224): Homolog of NCBI NO: 15227085 NR Description: glutathione transferase (103-1A)
MAEKEEVKLLGIWASPFSRRVEMALKLKGIPYEYVEEILENKSPLLLALNPIHKKVPVLVHNGKTILESHVILEYIDETWPQNPILPQDPYERSKARFFAKLVDEQIMNVGFISMARADEKGREVLAEQVRELIMYLEKELVGKDYFGGKTVGFLDFVAGSLIPFCLERGWEGIGLEVITEEKFPEFKRWVRNLEKVEIVKDCVPPREEHVEHMNYMAERVRSS

SEQ ID NO: 27462 - protein, 202 aa, Arabidopsis thaliana
  peptide (1)..(202): Ceres Seq. ID no. 12734712
  misc_feature (64)..(176): Pfam Name: Glutathione S-transferase, C-terminal domain Pfam Description: Glutathione S-transferase, C-terminal domain
  misc_feature (1)..(195): Homolog of NCBI NO: 7595790 NR Description: glutathione S-transferase [Euphorbia esula]
  misc_feature (1)..(202): Homolog of NCBI NO: 15232628 NR Description: glutathione transferase, putative
  misc_feature (1)..(199): Homolog of NCBI NO: 15227082 NR Description: glutathione transferase, putative
  misc_feature (1)..(201): Homolog of NCBI NO: 15227087 NR Description: glutathione transferase, putative
  misc_feature (1)..(202): Homolog of NCBI NO: 15227550 NR Description: glutathione transferase, putative
  misc_feature (1)..(202): Homolog of NCBI NO: 14423534 NR Description: putative glutathione S-transferase [Arabidopsis
  misc_feature (1)..(202): Homolog of NCBI NO: 15227086 NR Description: glutathione transferase, putative
  misc_feature (1)..(202): Homolog of NCBI NO: 15227551 NR Description: glutathione transferase, putative
  misc_feature (1)..(202): Homolog of NCBI NO: 15227084 NR Description: glutathione transferase, putative
  misc_feature (1)..(202): Homolog of NCBI NO: 15227085 NR Description: glutathione transferase (103-1A)
MALKLKGIPYEYVEEILENKSPLLLALNPIHKKVPVLVHNGKTILESHVILEYIDETWPQNPILPQDPYERSKARFFAKLVDEQIMNVGFISMARADEKGREVLAEQVRELIMYLEKELVGKDYFGGKTVGFLDFVAGSLIPFCLERGWEGIGLEVITEEKFPEFKRWVRNLEKVEIVKDCVPPREEHVEHMNYMAERVRSS

SEQ ID NO: 27463 - protein, 117 aa, Arabidopsis thaliana
  peptide (1)..(117): Ceres Seq. ID no. 12734713
  misc_feature (1)..(91): Pfam Name: Glutathione S-transferase, C-terminal domain Pfam Description: Glutathione S-transferase, C-terminal domain
  misc_feature (1)..(110): Homolog of NCBI NO: 7595790 NR Description: glutathione S-transferase [Euphorbia esula]
  misc_feature (1)..(117): Homolog of NCBI NO: 15232628 NR Description: glutathione transferase, putative
  misc_feature (1)..(114): Homolog of NCBI NO: 15227082 NR Description: glutathione transferase, putative
  misc_feature (1)..(116): Homolog of NCBI NO: 15227087 NR Description: glutathione transferase, putative
  misc_feature (1)..(117): Homolog of NCBI NO: 15227550 NR Description: glutathione transferase, putative
  misc_feature (1)..(117): Homolog of NCBI NO: 14423534 NR Description: putative glutathione S-transferase [Arabidopsis
  misc_feature (1)..(117): Homolog of NCBI NO: 15227086 NR Description: glutathione transferase, putative
  misc_feature (1)..(117): Homolog of NCBI NO: 15227551 NR Description: glutathione transferase, putative
  misc_feature (1)..(117): Homolog of NCBI NO: 15227084 NR Description: glutathione transferase, putative
  misc_feature (1)..(117): Homolog of NCBI NO: 15227085 NR Description: glutathione transferase (103-1A)
MNVGFISMARADEKGREVLAEQVRELIMYLEKELVGKDYFGGKTVGFLDFVAGSLIPFCLERGWEGIGLEVITEEKFPEFKRWVRNLEKVEIVKDCVPPREEHVEHMNYMAERVRSS

SEQ ID NO: 27464 - DNA, 1169 bp, Arabidopsis thaliana
  misc_feature (1)..(1169): Ceres Seq. ID no. 13490688
  misc_feature: MA Experiment ID: 108434 Result: Down-regulated in Transcription
  misc_feature: MA Experiment 108434 PARAMETER Experiment Name: At_Root_Tips_cDNA_P Parameter: Tissue Value: Root Tips
  misc_feature: MA Experiment ID: 108461 Result: Down-regulated in Transcription
  misc_feature: MA Experiment 108461 PARAMETER Experiment Name: At_Germinating_Seeds_cDNA_P Parameter: Age (day) Value: 1 vs. 0
  misc_feature: MA Experiment 108461 PARAMETER Experiment Name: At_Germinating_Seeds_cDNA_P Parameter: Tissue Value: Germinating Seeds
  misc_feature: MA Experiment ID: 108469 Result: Up-regulated in Transcription
  misc_feature: MA Experiment ID: 108585 Result: Up-regulated in Transcription
  misc_feature: MA Experiment 108585 PARAMETER Experiment Name: At_5mM_NaNP_cDNA_P Parameter: Timepoint (hr) Value: 6
  misc_feature: MA Experiment 108585 PARAMETER Experiment Name: At_5mM_NaNP_cDNA_P Parameter: Tissue Value: Aerial
  misc_feature: MA Experiment 108585 PARAMETER Experiment Name: At_5mM_NaNP_cDNA_P Parameter: Treatment Value: null
  misc_feature: MA Experiment ID: 108595 Result: Up-regulated in Transcription
  misc_feature: MA Experiment 108595 PARAMETER Experiment Name: At_Ler-pi_Ovule_cDNA_P Parameter: Plant Line Value: null
  misc_feature: MA Experiment ID: 108667 Result: Up-regulated in Transcription
  misc_feature: MA Experiment 108667 PARAMETER Experiment Name: At_2mM_SA_cDNA_P Parameter: Plant Line Value: WS
  misc_feature: MA Experiment 108667 PARAMETER Experiment Name: At_2mM_SA_cDNA_P Parameter: Timepoint (hr) Value: 1
  misc_feature: MA Experiment 108667 PARAMETER Experiment Name: At_2mM_SA_cDNA_P Parameter: Treatment Value: 2mM SA vs. No Treatment
  misc_feature: MA Experiment ID: 108668 Result: Up-regulated in Transcription
  misc_feature: MA Experiment 108668 PARAMETER Experiment Name: At_2mM_SA_cDNA_P Parameter: Plant Line Value: WS
  misc_feature: MA Experiment 108668 PARAMETER Experiment Name: At_2mM_SA_cDNA_P Parameter: Timepoint (hr) Value: 6
  misc_feature: MA Experiment 108668 PARAMETER Experiment Name: At_2mM_SA_cDNA_P Parameter: Treatment Value: 2mM SA vs. No Treatment
  misc_feature: MA Experiment ID: 20000090 Result: Up-regulated in Transcription
  misc_feature: MA Experiment ID: 20000179 Result: Down-regulated in Transcription
  misc_feature: MA Experiment 20000179 PARAMETER Experiment Name: At_Germinating_Seeds_P Parameter: Age (hr) Value: 6 vs. 0
  misc_feature: MA Experiment 20000179 PARAMETER Experiment Name: At_Germinating_Seeds_P Parameter: Tissue Value: Germinating Seeds
  misc_feature: MA Experiment ID: 20000180 Result: Down-regulated in Transcription
  misc_feature: MA Experiment 20000180 PARAMETER Experiment Name: At_Germinating_Seeds_P Parameter: Age (hr) Value: 24 vs. 0
  misc_feature: MA Experiment 20000180 PARAMETER Experiment Name: At_Germinating_Seeds_P Parameter: Tissue Value: Germinating Seeds
  misc_feature: MA Experiment ID: 20000182 Result: Up-regulated in Transcription
  misc_feature: MA Experiment 20000182 PARAMETER Experiment Name: At_2mM_SA_P Parameter: Age (day) Value: 14
  misc_feature: MA Experiment 20000182 PARAMETER Experiment Name: At_2mM_SA_P Parameter: Organism Value: A. thaliana
  misc_feature: MA Experiment 20000182 PARAMETER Experiment Name: At_2mM_SA_P Parameter: Plant Line Value: WS
  misc_feature: MA Experiment 20000182 PARAMETER Experiment Name: At_2mM_SA_P Parameter: Timepoint (hr) Value: 6
  misc_feature: MA Experiment 20000182 PARAMETER Experiment Name: At_2mM_SA_P Parameter: Tissue Value: Aerial
  misc_feature: MA Experiment 20000182 PARAMETER Experiment Name: At_2mM_SA_P Parameter: Treatment Value: 2mM SA vs. No Treatment
  misc_feature: MA Experiment ID: 20000184 Result: Down-regulated in Transcription
  misc_feature: MA Experiment 20000184 PARAMETER Experiment Name: At_Shoots__P Parameter: Age (day) Value: 7
  misc_feature: MA Experiment 20000184 PARAMETER Experiment Name: At_Shoots__P Parameter: Tissue Value: Shoots vs. Whole Plant
  misc_feature: MA Experiment ID: 20000185 Result: Down-regulated in Transcription
  misc_feature: MA Experiment 20000185 PARAMETER Experiment Name: At_Roots__P Parameter: Age (day) Value: 7 vs. 21
  misc_feature: MA Experiment 20000185 PARAMETER Experiment Name: At_Roots__P Parameter: Organism Value: A. thaliana
  misc_feature: MA Experiment 20000185 PARAMETER Experiment Name: At_Roots__P Parameter: Tissue Value: Roots vs. Whole Plant
  misc_feature: MA Experiment ID: 20000234 Result: Down-regulated in Transcription
  misc_feature: MA Experiment 20000234 PARAMETER Experiment Name: At_Siliques_P Parameter: Age (day) Value: 21
  misc_feature: MA Experiment 20000234 PARAMETER Experiment Name: At_Siliques_P Parameter: Organism Value: A. thaliana
  misc_feature: MA Experiment 20000234 PARAMETER Experiment Name: At_Siliques_P Parameter: Plant Line Value: WS
  misc_feature: MA Experiment 20000234 PARAMETER Experiment Name: At_Siliques_P Parameter: Tissue Value: Less Than 5mm Siliques vs. Whole Plant
  misc_feature: MA Experiment ID: 20000235 Result: Down-regulated in Transcription
  misc_feature: MA Experiment 20000235 PARAMETER Experiment Name: At_Siliques_P Parameter: Age (day) Value: 21
  misc_feature: MA Experiment 20000235 PARAMETER Experiment Name: At_Siliques_P Parameter: Organism Value: A. thaliana
  misc_feature: MA Experiment 20000235 PARAMETER Experiment Name: At_Siliques_P Parameter: Plant Line Value: WS
  misc_feature: MA Experiment 20000235 PARAMETER Experiment Name: At_Siliques_P Parameter: Tissue Value: 5-10mm Siliques vs. Whole Plant
  misc_feature: MA Experiment ID: 20000438 Result: Down-regulated in Transcription
  misc_feature: MA Experiment 20000438 PARAMETER Experiment Name: At_Shoots__P Parameter: Age (day) Value: 14
  misc_feature: MA Experiment 20000438 PARAMETER Experiment Name: At_Shoots__P Parameter: Tissue Value: Shoots vs. Whole Plant
  misc_feature: MA Experiment ID: 20000439 Result: Down-regulated in Transcription
  misc_feature: MA Experiment 20000439 PARAMETER Experiment Name: At_Roots__P Parameter: Age (day) Value: 14 vs. 21
  misc_feature: MA Experiment 20000439 PARAMETER Experiment Name: At_Roots__P Parameter: Organism Value: A. thaliana
  misc_feature: MA Experiment 20000439 PARAMETER Experiment Name: At_Roots__P Parameter: Tissue Value: Roots vs. Whole Plant
  misc_feature: MA Experiment ID: 20000451 Result: Up-regulated in Transcription
  misc_feature: MA Experiment 20000451 PARAMETER Experiment Name: At_CS6879_Shoots-Roots_P Parameter: Age (day) Value: 14
  misc_feature: MA Experiment 20000451 PARAMETER Experiment Name: At_CS6879_Shoots-Roots_P Parameter: Organism Value: A. thaliana
  misc_feature: MA Experiment 20000451 PARAMETER Experiment Name: At_CS6879_Shoots-Roots_P Parameter: Plant Line Value: CS6879 vs. WS
  misc_feature: MA Experiment 20000451 PARAMETER Experiment Name: At_CS6879_Shoots-Roots_P Parameter: Tissue Value: Roots
  misc_feature: MA Experiment ID: 20000456 Result: Up-regulated in Transcription
  misc_feature: MA Experiment 20000456 PARAMETER Experiment Name: At_100uM_BA_P Parameter: Age (day) Value: 14
  misc_feature: MA Experiment 20000456 PARAMETER Experiment Name: At_100uM_BA_P Parameter: Organism Value: A. thaliana
  misc_feature: MA Experiment 20000456 PARAMETER Experiment Name: At_100uM_BA_P Parameter: Plant Line Value: WS
  misc_feature: MA Experiment 20000456 PARAMETER Experiment Name: At_100uM_BA_P Parameter: Timepoint (hr) Value: 6
  misc_feature: MA Experiment 20000456 PARAMETER Experiment Name: At_100uM_BA_P Parameter: Tissue Value: Aerial
  misc_feature: MA Experiment 20000456 PARAMETER Experiment Name: At_100uM_BA_P Parameter: Treatment Value: 100uM BA vs. No Treatment
  misc_feature: MA Experiment ID: 20000527 Result: Down-regulated in Transcription
  misc_feature: MA Experiment 20000527 PARAMETER Experiment Name: At_10percent_PEG_P Parameter: Age (day) Value: 20
  misc_feature: MA Experiment 20000527 PARAMETER Experiment Name: At_10percent_PEG_P Parameter: Organism Value: A. thaliana
  misc_feature: MA Experiment 20000527 PARAMETER Experiment Name: At_10percent_PEG_P Parameter: Plant Line Value: WS
  misc_feature: MA Experiment 20000527 PARAMETER Experiment Name: At_10percent_PEG_P Parameter: Timepoint (day) Value: 20
  misc_feature: MA Experiment 20000527 PARAMETER Experiment Name: At_10percent_PEG_P Parameter: Tissue Value: Whole Plant
  misc_feature: MA Experiment 20000527 PARAMETER Experiment Name: At_10percent_PEG_P Parameter: Treatment Value: 10percent PEG vs. No Treatment
  misc_feature: MA Experiment ID: 20000573 Result: Up-regulated in Transcription
  misc_feature: MA Experiment 20000573 PARAMETER Experiment Name: At_100uM_ABA_Mutants__P Parameter: Organism Value: A. thaliana
  misc_feature: MA Experiment 20000573 PARAMETER Experiment Name: At_100uM_ABA_Mutants__P Parameter: Plant Line Value: CS22 vs. Ler wt
  misc_feature: MA Experiment 20000573 PARAMETER Experiment Name: At_100uM_ABA_Mutants__P Parameter: Timepoint (hr) Value: N/A
  misc_feature: MA Experiment 20000573 PARAMETER Experiment Name: At_100uM_ABA_Mutants__P Parameter: Tissue Value: Whole Plant
  misc_feature: MA Experiment 20000573 PARAMETER Experiment Name: At_100uM_ABA_Mutants__P Parameter: Treatment Value: None
  misc_feature: MA Experiment ID: 20000574 Result: Up-regulated in Transcription
  misc_feature: MA Experiment 20000574 PARAMETER Experiment Name: At_100uM_ABA_Mutants__P Parameter: Organism Value: A. thaliana
  misc_feature: MA Experiment 20000574 PARAMETER Experiment Name: At_100uM_ABA_Mutants__P Parameter: Plant Line Value: CS23 vs. Ler wt
  misc_feature: MA Experiment 20000574 PARAMETER Experiment Name: At_100uM_ABA_Mutants__P Parameter: Timepoint (hr) Value: N/A
  misc_feature: MA Experiment 20000574 PARAMETER Experiment Name: At_100uM_ABA_Mutants__P Parameter: Tissue Value: Whole Plant
  misc_feature: MA Experiment 20000574 PARAMETER Experiment Name: At_100uM_ABA_Mutants__P Parameter: Treatment Value: None
  misc_feature: MA Experiment ID: 20000606 Result: Up-regulated in Transcription
  misc_feature: MA Experiment 20000606 PARAMETER Experiment Name: At_CS8548_Mutant_P Parameter: Age (day) Value: 14
  misc_feature: MA Experiment 20000606 PARAMETER Experiment Name: At_CS8548_Mutant_P Parameter: Plant Line Value: CS8548 vs. wt
  misc_feature: MA Experiment 20000606 PARAMETER Experiment Name: At_CS8548_Mutant_P Parameter: Tissue Value: Whole Plant
  misc_feature: MA Experiment ID: 20000709 Result: Up-regulated in Transcription
  misc_feature: MA Experiment 20000709 PARAMETER Experiment Name: At_15mM_NH4NO3_L-to-H_P Parameter: Age (hr) Value: 14
  misc_feature: MA Experiment 20000709 PARAMETER Experiment Name: At_15mM_NH4NO3_L-to-H_P Parameter: Organism Value: A. thaliana
  misc_feature: MA Experiment 20000709 PARAMETER Experiment Name: At_15mM_NH4NO3_L-to-H_P Parameter: Plant Line Value: WS
  misc_feature: MA Experiment 20000709 PARAMETER Experiment Name: At_15mM_NH4NO3_L-to-H_P Parameter: Timepoint (hr) Value: 4
  misc_feature: MA Experiment 20000709 PARAMETER Experiment Name: At_15mM_NH4NO3_L-to-H_P Parameter: Tissue Value: Aerial
  misc_feature: MA Experiment 20000709 PARAMETER Experiment Name: At_15mM_NH4NO3_L-to-H_P Parameter: Treatment Value: 15mM NH4NO3 vs. 30mM Mannitol
  misc_feature: MA Experiment ID: 20000794 Result: Down-regulated in Transcription
  misc_feature: MA Experiment 20000794 PARAMETER Experiment Name: At_Petals_P Parameter: Age (day) Value: 23-25 days
  misc_feature: MA Experiment 20000794 PARAMETER Experiment Name: At_Petals_P Parameter: Plant Line Value: WS
  misc_feature: MA Experiment 20000794 PARAMETER Experiment Name: At_Petals_P Parameter: Tissue Value: Petals vs. Whole plant
  misc_feature: MA Experiment ID: 20001557 Result: Up-regulated in Transcription
  misc_feature: MA Experiment 20001557 PARAMETER Experiment Name: At_Drought_Soil_Dry_P Parameter: Age (day) Value: 27
  misc_feature: MA Experiment 20001557 PARAMETER Experiment Name: At_Drought_Soil_Dry_P Parameter: Organism Value: A. thaliana
  misc_feature: MA Experiment 20001557 PARAMETER Experiment Name: At_Drought_Soil_Dry_P Parameter: Plant Line Value: WS
  misc_feature: MA Experiment 20001557 PARAMETER Experiment Name: At_Drought_Soil_Dry_P Parameter: Post Timepoint (hr) Value: 3
  misc_feature: MA Experiment 20001557 PARAMETER Experiment Name: At_Drought_Soil_Dry_P Parameter: Post-Treatment Value: Re-Water vs. No Drought
  misc_feature: MA Experiment 20001557 PARAMETER Experiment Name: At_Drought_Soil_Dry_P Parameter: Timepoint (day) Value: 13
  misc_feature: MA Experiment 20001557 PARAMETER Experiment Name: At_Drought_Soil_Dry_P Parameter: Treatment Value: Drought vs. No Drought
  misc_feature: MA Experiment ID: 20001904 Result: Down-regulated in Transcription
  misc_feature: MA Experiment 20001904 PARAMETER Experiment Name: At_Drought_Reproduction_P Parameter: Age (day) Value: 37
  misc_feature: MA Experiment 20001904 PARAMETER Experiment Name: At_Drought_Reproduction_P Parameter: Organism Value: A. thaliana
  misc_feature: MA Experiment 20001904 PARAMETER Experiment Name: At_Drought_Reproduction_P Parameter: Plant Line Value: WS
  misc_feature: MA Experiment 20001904 PARAMETER Experiment Name: At_Drought_Reproduction_P Parameter: Timepoint (day) Value: 7
  misc_feature: MA Experiment 20001904 PARAMETER Experiment Name: At_Drought_Reproduction_P Parameter: Tissue Value: Rosettes
  misc_feature: MA Experiment 20001904 PARAMETER Experiment Name: At_Drought_Reproduction_P Parameter: Treatment Value: Drought vs. No Drought
aaaccaaggaaagaaaacgagagaggtacgtagaagaaaatggctgccttatcagagaaagaggctgaagcttatctcgacgcaaggcctagatatccgatcgattggtttaagaaaattgccgcacggacacaggaccacaaatttgcttgggatgttggaactggtaatgggcaggctgctattgggcttgtggagcattacgagaatgtagtggctaccgatataaacgaagcacaacttcaacgagcaatcaaacactcaagaatcagttaccatcacactccaacaacgatatcagaagatgagatggtggatctactcgggggagaaaactccgtggatctcatagttgctgctcaagctgtccatttcttcgacctcaacgtattttacaatgttgcaaaacgtgttcttcgtaaagaaggaggcctaatcgccgtttgggtatacaacgatatcattatctcgcatgagatcgatcccataatgaagcgccttgtcgactctactctaccttttagaactcctattatgaatttagcatttgacggttacaagacattgacatttccttttgagaccatagggatgggttccgaaggaaagcctattactctagacattccgcataaactttcgcttaaagggtttatagggttcttgagatcgtggcagcccgcgatgaaggctaaggaaaaaggagtagagcttataaatgaagatctaataaccaaatttgaggaggcttggggtgatgaaacccaagtgaaagatgttttctacaaggctcacatgattgttggaaaaattccggaagaaaaattcgaatctgatcaagtactgtctaacaaaggtcgtctcttgcttgaaacggaggttgggagaaaccagaaaagaccacaaccatccgatgaaggagacagacaaagtaagaaacaaaatacaagtgaagatgacgcatgcaaagataaaccatcgtcagtttttagtactcattacaggttttaaccaaaaatagatattaaaccatttgagaaagcaataactcttatttggatatcagttcattattccgtattaaagccgttggtttttgtacaactgagtaataaagttcatgttgagtatgtcaattattggatttgggagttccaaagaaaattttg

SEQ ID NO: 27465 - protein, 323 aa, Arabidopsis thaliana
  peptide (1)..(323): Ceres Seq. ID no. 13490689
  misc_feature (1)..(257): Homolog of NCBI NO: 34910604 NR Description: putative embryonic abundant protein-like
  misc_feature (171)..(258): Homolog of NCBI NO: 34912212 NR Description: P0415C01.8 [Oryza sativa (japonica
  misc_feature (1)..(161): Homolog of NCBI NO: 34912212 NR Description: P0415C01.8 [Oryza sativa (japonica
  misc_feature (26)..(259): Homolog of NCBI NO: 20258825 NR Description: unknown protein [Arabidopsis thaliana]
  misc_feature (1)..(259): Homolog of NCBI NO: 15235684 NR Description: expressed protein [Arabidopsis thaliana]
  misc_feature (1)..(258): Homolog of NCBI NO: 15238280 NR Description: embryonic abundant protein -related [Arabidopsis
  misc_feature (1)..(258): Homolog of NCBI NO: 15233061 NR Description: expressed protein [Arabidopsis thaliana]
  misc_feature (1)..(264): Homolog of NCBI NO: 18405387 NR Description: expressed protein [Arabidopsis thaliana]
  misc_feature (1)..(323): Homolog of NCBI NO: 21594033 NR Description: embryonic abundant protein-like [Arabidopsis
  misc_feature (1)..(323): Homolog of NCBI NO: 15232436 NR Description: embryonic abundant protein -related [Arabidopsis
MAALSEKEAEAYLDARPRYPIDWFKKIAARTQDHKFAWDVGTGNGQAAIGLVEHYENVVATDINEAQLQRAIKHSRISYHHTPTTISEDEMVDLLGGENSVDLIVAAQAVHFFDLNVFYNVAKRVLRKEGGLIAVWVYNDIIISHEIDPIMKRLVDSTLPFRTPIMNLAFDGYKTLTFPFETIGMGSEGKPITLDIPHKLSLKGFIGFLRSWQPAMKAKEKGVELINEDLITKFEEAWGDETQVKDVFYKAHMIVGKIPEEKFESDQVLSNKGRLLLETEVGRNQKRPQPSDEGDRQSKKQNTSEDDACKDKPSSVFSTHYRF

SEQ ID NO: 27466 - protein, 233 aa, Arabidopsis thaliana
  peptide (1)..(233): Ceres Seq. ID no. 13490690
  misc_feature (1)..(167): Homolog of NCBI NO: 34910604 NR Description: putative embryonic abundant protein-like
  misc_feature (81)..(168): Homolog of NCBI NO: 34912212 NR Description: P0415C01.8 [Oryza sativa (japonica
  misc_feature (1)..(71): Homolog of NCBI NO: 34912212 NR Description: P0415C01.8 [Oryza sativa (japonica
  misc_feature (1)..(169): Homolog of NCBI NO: 20258825 NR Description: unknown protein [Arabidopsis thaliana]
  misc_feature (1)..(169): Homolog of NCBI NO: 15235684 NR Description: expressed protein [Arabidopsis thaliana]
  misc_feature (1)..(168): Homolog of NCBI NO: 15238280 NR Description: embryonic abundant protein -related [Arabidopsis
  misc_feature (1)..(168): Homolog of NCBI NO: 15233061 NR Description: expressed protein [Arabidopsis thaliana]
  misc_feature (1)..(174): Homolog of NCBI NO: 18405387 NR Description: expressed protein [Arabidopsis thaliana]
  misc_feature (1)..(233): Homolog of NCBI NO: 21594033 NR Description: embryonic abundant protein-like [Arabidopsis
  misc_feature (1)..(233): Homolog of NCBI NO: 15232436 NR Description: embryonic abundant protein -related [Arabidopsis
MVDLLGGENSVDLIVAAQAVHFFDLNVFYNVAKRVLRKEGGLIAVWVYNDIIISHEIDPIMKRLVDSTLPFRTPIMNLAFDGYKTLTFPFETIGMGSEGKPITLDIPHKLSLKGFIGFLRSWQPAMKAKEKGVELINEDLITKFEEAWGDETQVKDVFYKAHMIVGKIPEEKFESDQVLSNKGRLLLETEVGRNQKRPQPSDEGDRQSKKQNTSEDDACKDKPSSVFSTHYRF

SEQ ID NO: 27467 - protein, 173 aa, Arabidopsis thaliana
  peptide (1)..(173): Ceres Seq. ID no. 13490691
  misc_feature (1)..(108): Homolog of NCBI NO: 15238280 NR Description: embryonic abundant protein -related [Arabidopsis
  misc_feature (1)..(108): Homolog of NCBI NO: 15233061 NR Description: expressed protein [Arabidopsis thaliana]
  misc_feature (1)..(114): Homolog of NCBI NO: 18405387 NR Description: expressed protein [Arabidopsis thaliana]
  misc_feature (1)..(173): Homolog of NCBI NO: 21594033 NR Description: embryonic abundant protein-like [Arabidopsis
  misc_feature (1)..(173): Homolog of NCBI NO: 15232436 NR Description: embryonic abundant protein -related [Arabidopsis
  misc_feature (1)..(107): Homolog of NCBI NO: 34910604 NR Description: putative embryonic abundant protein-like
  misc_feature (21)..(108): Homolog of NCBI NO: 34912212 NR Description: P0415C01.8 [Oryza sativa (japonica
  misc_feature (1)..(11): Homolog of NCBI NO: 34912212 NR Description: P0415C01.8 [Oryza sativa (japonica
  misc_feature (1)..(109): Homolog of NCBI NO: 20258825 NR Description: unknown protein [Arabidopsis thaliana]
  misc_feature (1)..(109): Homolog of NCBI NO: 15235684 NR Description: expressed protein [Arabidopsis thaliana]
MKRLVDSTLPFRTPIMNLAFDGYKTLTFPFETIGMGSEGKPITLDIPHKLSLKGFIGFLRSWQPAMKAKEKGVELINEDLITKFEEAWGDETQVKDVFYKAHMIVGKIPEEKFESDQVLSNKGRLLLETEVGRNQKRPQPSDEGDRQSKKQNTSEDDACKDKPSSVFSTHYRF

SEQ ID NO: 27468 - DNA, 1399 bp, Arabidopsis thaliana
  misc_feature (1)..(1399): Ceres Seq. ID no. 12335133
  misc_feature: MA Experiment ID: 20000171 Result: Down-regulated in Transcription
  misc_feature: MA Experiment 20000171 PARAMETER Experiment Name: At_42deg_Heat_P Parameter: Age (day) Value: 14
  misc_feature: MA Experiment 20000171 PARAMETER Experiment Name: At_42deg_Heat_P Parameter: Organism Value: A. thaliana
  misc_feature: MA Experiment 20000171 PARAMETER Experiment Name: At_42deg_Heat_P Parameter: Plant Line Value: WS
  misc_feature: MA Experiment 20000171 PARAMETER Experiment Name: At_42deg_Heat_P Parameter: Temperature (deg C) Value: 42 vs. 22
  misc_feature: MA Experiment 20000171 PARAMETER Experiment Name: At_42deg_Heat_P Parameter: Timepoint (hr) Value: 1
  misc_feature: MA Experiment 20000171 PARAMETER Experiment Name: At_42deg_Heat_P Parameter: Tissue Value: Aerial
  misc_feature: MA Experiment ID: 20000173 Result: Down-regulated in Transcription
  misc_feature: MA Experiment 20000173 PARAMETER Experiment Name: At_42deg_Heat_P Parameter: Age (day) Value: 14
  misc_feature: MA Experiment 20000173 PARAMETER Experiment Name: At_42deg_Heat_P Parameter: Organism Value: A. thaliana
  misc_feature: MA Experiment 20000173 PARAMETER Experiment Name: At_42deg_Heat_P Parameter: Plant Line Value: WS
  misc_feature: MA Experiment 20000173 PARAMETER Experiment Name: At_42deg_Heat_P Parameter: Temperature (deg C) Value: 42 vs. 22
  misc_feature: MA Experiment 20000173 PARAMETER Experiment Name: At_42deg_Heat_P Parameter: Timepoint (hr) Value: 6
  misc_feature: MA Experiment 20000173 PARAMETER Experiment Name: At_42deg_Heat_P Parameter: Tissue Value: Aerial
  misc_feature: MA Experiment ID: 20000227 Result: Down-regulated in Transcription
  misc_feature: MA Experiment 20000227 PARAMETER Experiment Name: At_Root-Tips-vs-Tops_P Parameter: Tissue Value: Root Tips vs. Root Tops
  misc_feature: MA Experiment ID: 20000264 Result: Up-regulated in Transcription
  misc_feature: MA Experiment 20000264 PARAMETER Experiment Name: At_Open_Flower_P Parameter: Age (day) Value: 21
  misc_feature: MA Experiment 20000264 PARAMETER Experiment Name: At_Open_Flower_P Parameter: Plant Line Value: WS
  misc_feature: MA Experiment 20000264 PARAMETER Experiment Name: At_Open_Flower_P Parameter: Tissue Value: Open Flower vs. Whole Plant
  misc_feature: MA Experiment ID: 20000286 Result: Up-regulated in Transcription
  misc_feature: MA Experiment 20000286 PARAMETER Experiment Name: At_Open_Flower_P Parameter: Age (day) Value: 21
  misc_feature: MA Experiment 20000286 PARAMETER Experiment Name: At_Open_Flower_P Parameter: Plant Line Value: WS
  misc_feature: MA Experiment 20000286 PARAMETER Experiment Name: At_Open_Flower_P Parameter: Tissue Value: Half Open vs. Whole Plant
  misc_feature: MA Experiment ID: 20000794 Result: Up-regulated in Transcription
  misc_feature: MA Experiment 20000794 PARAMETER Experiment Name: At_Petals_P Parameter: Age (day) Value: 23-25 days
  misc_feature: MA Experiment 20000794 PARAMETER Experiment Name: At_Petals_P Parameter: Plant Line Value: WS
  misc_feature: MA Experiment 20000794 PARAMETER Experiment Name: At_Petals_P Parameter: Tissue Value: Petals vs. Whole plant
  misc_feature: MA Experiment ID: 20001248 Result: Down-regulated in Transcription
  misc_feature: MA Experiment 20001248 PARAMETER Experiment Name: At_Far-red-induction_P Parameter: Age (day) Value: 7
  misc_feature: MA Experiment 20001248 PARAMETER Experiment Name: At_Far-red-induction_P Parameter: Light Value: Far-red vs. White
  misc_feature: MA Experiment 20001248 PARAMETER Experiment Name: At_Far-red-induction_P Parameter: Organism Value: A. thaliana
  misc_feature: MA Experiment 20001248 PARAMETER Experiment Name: At_Far-red-induction_P Parameter: Plant Line Value: Columbia
  misc_feature: MA Experiment 20001248 PARAMETER Experiment Name: At_Far-red-induction_P Parameter: Timepoint (hr) Value: 4
  misc_feature: MA Experiment 20001248 PARAMETER Experiment Name: At_Far-red-induction_P Parameter: Tissue Value: Whole Plant
  misc_feature: MA Experiment ID: 20001911 Result: Down-regulated in Transcription
  misc_feature: MA Experiment 20001911 PARAMETER Experiment Name: At_Drought_Reproduction_P Parameter: Age (day) Value: 40
  misc_feature: MA Experiment 20001911 PARAMETER Experiment Name: At_Drought_Reproduction_P Parameter: Organism Value: A. thaliana
  misc_feature: MA Experiment 20001911 PARAMETER Experiment Name: At_Drought_Reproduction_P Parameter: Plant Line Value: WS
  misc_feature: MA Experiment 20001911 PARAMETER Experiment Name: At_Drought_Reproduction_P Parameter: Timepoint (day) Value: 10
  misc_feature: MA Experiment 20001911 PARAMETER Experiment Name: At_Drought_Reproduction_P Parameter: Tissue Value: Flowers
  misc_feature: MA Experiment 20001911 PARAMETER Experiment Name: At_Drought_Reproduction_P Parameter: Treatment Value: Drought vs. No Drought
aacatttcctgaaaatctaactttcacccactcaccatcttttcttctctctttccccataaaaaaaaacaaaaacaaaacacaactctgtttctctcatcttaaaattcatgtaaaaaaaatctacaaatcaaagagagaaacagagtaaagagaaagagaagaagatggcgcggaaatactttcagagagaagttttgccggtaacggctttggtaataatggaatgtgcaaacgttggtttaaacactctgtttaaagcagcaactttgaaaggcatgagctttcatgtcttcatcgtttactcttatggtctcgctgctctgcttcttcttccttctctgttttgctctttcagatcaagaactcttccaccgatgaatttctctattctctacaaaatcgtgctcttagggattattggatgctgttcaaacataatgggatacacagggataaattatagttctccaacacttgcttctgcaatcagcaacctcactcctgctttcaccttcttgcttgcagtcgttttcaggatggatagtgtgtcttttaagagaacaagtagtgtggctaaaatgttaggaaccgttgtttctattggaggtgcatttatagtgactctttataatggtcctgttgtgattgctaaatcgccaccgtctgtttctttgcgatcgcaatcgactaaccctaattggatacttggtgcgggtttccttgcggtcgagtatttctgtgttccattgtggtacattgttcagactcaaatcatgagagagtatccggccgagtttaccgttatttgcttttatagcattggtgttatcttttggaccgcgctagtcacattgttcactgaagggaatgacttgggtgcatggaagataaaaccgaatatagctttagtgtcgatcgtttgctcgggattgtttggatcttgcataaacaatactatccacacgtgggcattgcggatcaaggggcctttatttgttgcaatgttcaagccattgtctattgcaattgctgttgcaatgggagttatcttcctgcgagattctctctacatcggcagcttgatcggggcaacggtaataacaatcgggttttacacggtaatgtggggaaaagccaaggaagtggccttggtcgaagatgataacaaggctaaccacgaggaggccaatgaagctgaccttgattctccatcgggttcacaggaggctcctctcttggaaagttacaagaacgatgaacatgtatgagtatcatcaactagtgaagatcacgctatatatatatgtgtgaaaaaattcttatgtgaattgtctttgtaatttatttgatgagacaaatgtgatctttaattttaggatccaagtgtttgctaatc

SEQ ID NO: 27469 - protein, 367 aa, Arabidopsis thaliana
  peptide (1)..(367): Ceres Seq. ID no. 12335134
  misc_feature (22)..(154): Pfam Name: Integral membrane protein DUF6 Pfam Description: Integral membrane protein DUF6
  misc_feature (6)..(326): Homolog of NCBI NO: 22331380 NR Description: unknown protein
  misc_feature (16)..(326): Homolog of NCBI NO: 10177510 NR Description: nodulin-like protein [Arabidopsis thaliana]
  misc_feature (6)..(365): Homolog of NCBI NO: 21618226 NR Description: contains similarity to integral membrane protein
  misc_feature (6)..(365): Homolog of NCBI NO: 18405642 NR Description: expressed protein
  misc_feature (1)..(326): Homolog of NCBI NO: 11994130 NR Description: contains similarity to integral membrane protein
  misc_feature (1)..(326): Homolog of NCBI NO: 15242612 NR Description: putative protein; protein id: At5g40230.1
  misc_feature (1)..(326): Homolog of NCBI NO: 10177511 NR Description: nodulin-like protein [Arabidopsis thaliana]
  misc_feature (63)..(367): Homolog of NCBI NO: 11994125 NR Description: nodulin MtN21-like protein [Arabidopsis thaliana]
  misc_feature (1)..(367): Homolog of NCBI NO: 18405635 NR Description: expressed protein
  misc_feature (1)..(367): Homolog of NCBI NO: 21594034 NR Description: nodulin MtN21-like protein [Arabidopsis thaliana]
MARKYFQREVLPVTALVIMECANVGLNTLFKAATLKGMSFHVFIVYSYGLAALLLLPSLFCSFRSRTLPPMNFSILYKIVLLGIIGCCSNIMGYTGINYSSPTLASAISNLTPAFTFLLAVVFRMDSVSFKRTSSVAKMLGTVVSIGGAFIVTLYNGPVVIAKSPPSVSLRSQSTNPNWILGAGFLAVEYFCVPLWYIVQTQIMREYPAEFTVICFYSIGVIFWTALVTLFTEGNDLGAWKIKPNIALVSIVCSGLFGSCINNTIHTWALRIKGPLFVAMFKPLSIAIAVAMGVIFLRDSLYIGSLIGATVITIGFYTVMWGKAKEVALVEDDNKANHEEANEADLDSPSGSQEAPLLESYKNDEHV

SEQ ID NO: 27470 - protein, 349 aa, Arabidopsis thaliana
  peptide (1)..(349): Ceres Seq. ID no. 12335135
  misc_feature (4)..(136): Pfam Name: Integral membrane protein DUF6 Pfam Description: Integral membrane protein DUF6
  misc_feature (1)..(308): Homolog of NCBI NO: 22331380 NR Description: unknown protein
  misc_feature (1)..(308): Homolog of NCBI NO: 10177510 NR Description: nodulin-like protein [Arabidopsis thaliana]
  misc_feature (1)..(347): Homolog of NCBI NO: 21618226 NR Description: contains similarity to integral membrane protein
  misc_feature (1)..(347): Homolog of NCBI NO: 18405642 NR Description: expressed protein
  misc_feature (1)..(308): Homolog of NCBI NO: 11994130 NR Description: contains similarity to integral membrane protein
  misc_feature (1)..(308): Homolog of NCBI NO: 15242612 NR Description: putative protein; protein id: At5g40230.1
  misc_feature (1)..(308): Homolog of NCBI NO: 10177511 NR Description: nodulin-like protein [Arabidopsis thaliana]
  misc_feature (45)..(349): Homolog of NCBI NO: 11994125 NR Description: nodulin MtN21-like protein [Arabidopsis thaliana]
  misc_feature (1)..(349): Homolog of NCBI NO: 18405635 NR Description: expressed protein
  misc_feature (1)..(349): Homolog of NCBI NO: 21594034 NR Description: nodulin MtN21-like protein [Arabidopsis thaliana]
MECANVGLNTLFKAATLKGMSFHVFIVYSYGLAALLLLPSLFCSFRSRTLPPMNFSILYKIVLLGIIGCCSNIMGYTGINYSSPTLASAISNLTPAFTFLLAVVFRMDSVSFKRTSSVAKMLGTVVSIGGAFIVTLYNGPVVIAKSPPSVSLRSQSTNPNWILGAGFLAVEYFCVPLWYIVQTQIMREYPAEFTVICFYSIGVIFWTALVTLFTEGNDLGAWKIKPNIALVSIVCSGLFGSCINNTIHTWALRIKGPLFVAMFKPLSIAIAVAMGVIFLRDSLYIGSLIGATVITIGFYTVMWGKAKEVALVEDDNKANHEEANEADLDSPSGSQEAPLLESYKNDEHV

SEQ ID NO: 27471 - protein, 330 aa, Arabidopsis thaliana
  peptide (1)..(330): Ceres Seq. ID no. 12335136
  misc_feature (1)..(117): Pfam Name: Integral membrane protein DUF6 Pfam Description: Integral membrane protein DUF6
  misc_feature (1)..(289): Homolog of NCBI NO: 22331380 NR Description: unknown protein
  misc_feature (1)..(289): Homolog of NCBI NO: 10177510 NR Description: nodulin-like protein [Arabidopsis thaliana]
  misc_feature (1)..(328): Homolog of NCBI NO: 21618226 NR Description: contains similarity to integral membrane protein
  misc_feature (1)..(328): Homolog of NCBI NO: 18405642 NR Description: expressed protein
  misc_feature (1)..(289): Homolog of NCBI NO: 11994130 NR Description: contains similarity to integral membrane protein
  misc_feature (1)..(289): Homolog of NCBI NO: 15242612 NR Description: putative protein; protein id: At5g40230.1
  misc_feature (1)..(289): Homolog of NCBI NO: 10177511 NR Description: nodulin-like protein [Arabidopsis thaliana]
  misc_feature (26)..(330): Homolog of NCBI NO: 11994125 NR Description: nodulin MtN21-like protein [Arabidopsis thaliana]
  misc_feature (1)..(330): Homolog of NCBI NO: 18405635 NR Description: expressed protein
  misc_feature (1)..(330): Homolog of NCBI NO: 21594034 NR Description: nodulin MtN21-like protein [Arabidopsis thaliana]
MSFHVFIVYSYGLAALLLLPSLFCSFRSRTLPPMNFSILYKIVLLGIIGCCSNIMGYTGINYSSPTLASAISNLTPAFTFLLAVVFRMDSVSFKRTSSVAKMLGTVVSIGGAFIVTLYNGPVVIAKSPPSVSLRSQSTNPNWILGAGFLAVEYFCVPLWYIVQTQIMREYPAEFTVICFYSIGVIFWTALVTLFTEGNDLGAWKIKPNIALVSIVCSGLFGSCINNTIHTWALRIKGPLFVAMFKPLSIAIAVAMGVIFLRDSLYIGSLIGATVITIGFYTVMWGKAKEVALVEDDNKANHEEANEADLDSPSGSQEAPLLESYKNDEHV

SEQ ID NO: 27472 - DNA, 1653 bp, Arabidopsis thaliana
  misc_feature (1)..(1653): Ceres Seq. ID no. 12738253
  misc_feature: MA Experiment ID: 108488 Result: Up-regulated in Transcription
  misc_feature: MA Experiment ID: 20000069 Result: Down-regulated in Transcription
  misc_feature: MA Experiment 20000069 PARAMETER Experiment Name: At_100uM_ABA_Mutants_cDNA_P Parameter: Plant Line Value: CS23
  misc_feature: MA Experiment 20000069 PARAMETER Experiment Name: At_100uM_ABA_Mutants_cDNA_P Parameter: Timepoint (hr) Value: 6
  misc_feature: MA Experiment 20000069 PARAMETER Experiment Name: At_100uM_ABA_Mutants_cDNA_P Parameter: Tissue Value: Aerial
  misc_feature: MA Experiment 20000069 PARAMETER Experiment Name: At_100uM_ABA_Mutants_cDNA_P Parameter: Treatment Value: 100uM ABA vs. No Treatment
  misc_feature: MA Experiment ID: 20000072 Result: Down-regulated in Transcription
  misc_feature: MA Experiment 20000072 PARAMETER Experiment Name: At_100uM_ABA_Mutants_cDNA_P Parameter: Plant Line Value: CS8105
  misc_feature: MA Experiment 20000072 PARAMETER Experiment Name: At_100uM_ABA_Mutants_cDNA_P Parameter: Timepoint (hr) Value: 6
  misc_feature: MA Experiment 20000072 PARAMETER Experiment Name: At_100uM_ABA_Mutants_cDNA_P Parameter: Tissue Value: Aerial
  misc_feature: MA Experiment 20000072 PARAMETER Experiment Name: At_100uM_ABA_Mutants_cDNA_P Parameter: Treatment Value: 100uM ABA vs. No Treatment
  misc_feature: MA Experiment ID: 20000087 Result: Down-regulated in Transcription
  misc_feature: MA Experiment 20000087 PARAMETER Experiment Name: At_100uM_ABA_Mutants_cDNA_P Parameter: Plant Line Value: WS
  misc_feature: MA Experiment 20000087 PARAMETER Experiment Name: At_100uM_ABA_Mutants_cDNA_P Parameter: Timepoint (hr) Value: 6
  misc_feature: MA Experiment 20000087 PARAMETER Experiment Name: At_100uM_ABA_Mutants_cDNA_P Parameter: Tissue Value: Aerial
  misc_feature: MA Experiment 20000087 PARAMETER Experiment Name: At_100uM_ABA_Mutants_cDNA_P Parameter: Treatment Value: 100uM ABA vs. No Treatment
  misc_feature: MA Experiment ID: 20000089 Result: Down-regulated in Transcription
  misc_feature: MA Experiment ID: 20000090 Result: Down-regulated in Transcription
  misc_feature: MA Experiment ID: 20000185 Result: Up-regulated in Transcription
  misc_feature: MA Experiment 20000185 PARAMETER Experiment Name: At_Roots__P Parameter: Age (day) Value: 7 vs. 21
  misc_feature: MA Experiment 20000185 PARAMETER Experiment Name: At_Roots__P Parameter: Organism Value: A. thaliana
  misc_feature: MA Experiment 20000185 PARAMETER Experiment Name: At_Roots__P Parameter: Tissue Value: Roots vs. Whole Plant
  misc_feature: MA Experiment ID: 20000234 Result: Up-regulated in Transcription
  misc_feature: MA Experiment 20000234 PARAMETER Experiment Name: At_Siliques_P Parameter: Age (day) Value: 21
  misc_feature: MA Experiment 20000234 PARAMETER Experiment Name: At_Siliques_P Parameter: Organism Value: A. thaliana
  misc_feature: MA Experiment 20000234 PARAMETER Experiment Name: At_Siliques_P Parameter: Plant Line Value: WS
  misc_feature: MA Experiment 20000234 PARAMETER Experiment Name: At_Siliques_P Parameter: Tissue Value: Less Than 5mm Siliques vs. Whole Plant
  misc_feature: MA Experiment ID: 20000235 Result: Up-regulated in Transcription
  misc_feature: MA Experiment 20000235 PARAMETER Experiment Name: At_Siliques_P Parameter: Age (day) Value: 21
  misc_feature: MA Experiment 20000235 PARAMETER Experiment Name: At_Siliques_P Parameter: Organism Value: A. thaliana
  misc_feature: MA Experiment 20000235 PARAMETER Experiment Name: At_Siliques_P Parameter: Plant Line Value: WS
  misc_feature: MA Experiment 20000235 PARAMETER Experiment Name: At_Siliques_P Parameter: Tissue Value: 5-10mm Siliques vs. Whole Plant
  misc_feature: MA Experiment ID: 20000265 Result: Up-regulated in Transcription
  misc_feature: MA Experiment 20000265 PARAMETER Experiment Name: At_Open_Flower_P Parameter: Age (day) Value: 21
  misc_feature: MA Experiment 20000265 PARAMETER Experiment Name: At_Open_Flower_P Parameter: Plant Line Value: WS
  misc_feature: MA Experiment 20000265 PARAMETER Experiment Name: At_Open_Flower_P Parameter: Tissue Value: Closed Flower vs. Whole Plant
  misc_feature: MA Experiment ID: 20000437 Result: Down-regulated in Transcription
  misc_feature: MA Experiment 20000437 PARAMETER Experiment Name: At_Drought_P Parameter: Age (day) Value: 8
  misc_feature: MA Experiment 20000437 PARAMETER Experiment Name: At_Drought_P Parameter: Organism Value: A. thaliana
  misc_feature: MA Experiment 20000437 PARAMETER Experiment Name: At_Drought_P Parameter: Plant Line Value: WS
  misc_feature: MA Experiment 20000437 PARAMETER Experiment Name: At_Drought_P Parameter: Timepoint (hr) Value: 24
  misc_feature: MA Experiment 20000437 PARAMETER Experiment Name: At_Drought_P Parameter: Tissue Value: Whole Plant
  misc_feature: MA Experiment 20000437 PARAMETER Experiment Name: At_Drought_P Parameter: Treatment Value: Drought vs. No Drought
  misc_feature: MA Experiment ID: 20000573 Result: Down-regulated in Transcription
  misc_feature: MA Experiment 20000573 PARAMETER Experiment Name: At_100uM_ABA_Mutants__P Parameter: Organism Value: A. thaliana
  misc_feature: MA Experiment 20000573 PARAMETER Experiment Name: At_100uM_ABA_Mutants__P Parameter: Plant Line Value: CS22 vs. Ler wt
  misc_feature: MA Experiment 20000573 PARAMETER Experiment Name: At_100uM_ABA_Mutants__P Parameter: Timepoint (hr) Value: N/A
  misc_feature: MA Experiment 20000573 PARAMETER Experiment Name: At_100uM_ABA_Mutants__P Parameter: Tissue Value: Whole Plant
  misc_feature: MA Experiment 20000573 PARAMETER Experiment Name: At_100uM_ABA_Mutants__P Parameter: Treatment Value: None
  misc_feature: MA Experiment ID: 20000794 Result: Down-regulated in Transcription
  misc_feature: MA Experiment 20000794 PARAMETER Experiment Name: At_Petals_P Parameter: Age (day) Value: 23-25 days
  misc_feature: MA Experiment 20000794 PARAMETER Experiment Name: At_Petals_P Parameter: Plant Line Value: WS
  misc_feature: MA Experiment 20000794 PARAMETER Experiment Name: At_Petals_P Parameter: Tissue Value: Petals vs. Whole plant
  misc_feature: MA Experiment ID: 20001557 Result: Up-regulated in Transcription
  misc_feature: MA Experiment 20001557 PARAMETER Experiment Name: At_Drought_Soil_Dry_P Parameter: Age (day) Value: 27
  misc_feature: MA Experiment 20001557 PARAMETER Experiment Name: At_Drought_Soil_Dry_P Parameter: Organism Value: A. thaliana
  misc_feature: MA Experiment 20001557 PARAMETER Experiment Name: At_Drought_Soil_Dry_P Parameter: Plant Line Value: WS
  misc_feature: MA Experiment 20001557 PARAMETER Experiment Name: At_Drought_Soil_Dry_P Parameter: Post Timepoint (hr) Value: 3
  misc_feature: MA Experiment 20001557 PARAMETER Experiment Name: At_Drought_Soil_Dry_P Parameter: Post-Treatment Value: Re-Water vs. No Drought
  misc_feature: MA Experiment 20001557 PARAMETER Experiment Name: At_Drought_Soil_Dry_P Parameter: Timepoint (day) Value: 13
  misc_feature: MA Experiment 20001557 PARAMETER Experiment Name: At_Drought_Soil_Dry_P Parameter: Treatment Value: Drought vs. No Drought
  misc_feature: MA Experiment ID: 20001558 Result: Up-regulated in Transcription
  misc_feature: MA Experiment 20001558 PARAMETER Experiment Name: At_Drought_Soil_Dry_P Parameter: Age (day) Value: 27
  misc_feature: MA Experiment 20001558 PARAMETER Experiment Name: At_Drought_Soil_Dry_P Parameter: Organism Value: A. thaliana
  misc_feature: MA Experiment 20001558 PARAMETER Experiment Name: At_Drought_Soil_Dry_P Parameter: Plant Line Value: WS
  misc_feature: MA Experiment 20001558 PARAMETER Experiment Name: At_Drought_Soil_Dry_P Parameter: Post Timepoint (hr) Value: 6
  misc_feature: MA Experiment 20001558 PARAMETER Experiment Name: At_Drought_Soil_Dry_P Parameter: Post-Treatment Value: Re-Water vs. No Drought
  misc_feature: MA Experiment 20001558 PARAMETER Experiment Name: At_Drought_Soil_Dry_P Parameter: Timepoint (day) Value: 13
  misc_feature: MA Experiment 20001558 PARAMETER Experiment Name: At_Drought_Soil_Dry_P Parameter: Treatment Value: Drought vs. No Drought
  misc_feature: MA Experiment ID: 20001560 Result: Up-regulated in Transcription
  misc_feature: MA Experiment 20001560 PARAMETER Experiment Name: At_Drought_Soil_Dry_P Parameter: Age (day) Value: 28
  misc_feature: MA Experiment 20001560 PARAMETER Experiment Name: At_Drought_Soil_Dry_P Parameter: Organism Value: A. thaliana
  misc_feature: MA Experiment 20001560 PARAMETER Experiment Name: At_Drought_Soil_Dry_P Parameter: Plant Line Value: WS
  misc_feature: MA Experiment 20001560 PARAMETER Experiment Name: At_Drought_Soil_Dry_P Parameter: Post Timepoint (hr) Value: None
  misc_feature: MA Experiment 20001560 PARAMETER Experiment Name: At_Drought_Soil_Dry_P Parameter: Post-Treatment Value: None
  misc_feature: MA Experiment 20001560 PARAMETER Experiment Name: At_Drought_Soil_Dry_P Parameter: Timepoint (day) Value: 14
  misc_feature: MA Experiment 20001560 PARAMETER Experiment Name: At_Drought_Soil_Dry_P Parameter: Treatment Value: Drought vs. No Drought
  misc_feature: MA Experiment ID: 20001905 Result: Down-regulated in Transcription
  misc_feature: MA Experiment 20001905 PARAMETER Experiment Name: At_Drought_Reproduction_P Parameter: Age (day) Value: 40
  misc_feature: MA Experiment 20001905 PARAMETER Experiment Name: At_Drought_Reproduction_P Parameter: Organism Value: A. thaliana
  misc_feature: MA Experiment 20001905 PARAMETER Experiment Name: At_Drought_Reproduction_P Parameter: Plant Line Value: WS
  misc_feature: MA Experiment 20001905 PARAMETER Experiment Name: At_Drought_Reproduction_P Parameter: Timepoint (day) Value: 10
  misc_feature: MA Experiment 20001905 PARAMETER Experiment Name: At_Drought_Reproduction_P Parameter: Tissue Value: Rosettes
  misc_feature: MA Experiment 20001905 PARAMETER Experiment Name: At_Drought_Reproduction_P Parameter: Treatment Value: Drought vs. No Drought
  misc_feature: MA Experiment ID: 20001911 Result: Down-regulated in Transcription
  misc_feature: MA Experiment 20001911 PARAMETER Experiment Name: At_Drought_Reproduction_P Parameter: Age (day) Value: 40
  misc_feature: MA Experiment 20001911 PARAMETER Experiment Name: At_Drought_Reproduction_P Parameter: Organism Value: A. thaliana
  misc_feature: MA Experiment 20001911 PARAMETER Experiment Name: At_Drought_Reproduction_P Parameter: Plant Line Value: WS
  misc_feature: MA Experiment 20001911 PARAMETER Experiment Name: At_Drought_Reproduction_P Parameter: Timepoint (day) Value: 10
  misc_feature: MA Experiment 20001911 PARAMETER Experiment Name: At_Drought_Reproduction_P Parameter: Tissue Value: Flowers
  misc_feature: MA Experiment 20001911 PARAMETER Experiment Name: At_Drought_Reproduction_P Parameter: Treatment Value: Drought vs. No Drought
tctgctggtaatagtggtcctactagagcttctgttgctaatgttgctccttgggttatgactgttggtgctggtactttagatagagattttccggcttttgcgaatctcggtaacgggaaacgacttaccggtgtttcgctgtatagcggtgtgggaatggggacgaagccgcttgaattggtttataataaagggaatagtagttcgagtaatctttgtttacctggttcgcttgattcgagtattgttcgtgggaagattgttgtttgtgatagaggtgttaatgctagagttgagaaaggagctgtggttagagatgctggtggtttagggatgataatggcgaatactgctgcgagtggagaggagcttgtggcggatagtcatttgcttcccgcgatcgctgtagggaagaagactggtgatttacttagggagtatgttaagtcagattctaatccaactgctcttcttgtttttaaaggaacggttcttgacgttaagccgtctcctgtggttgctgcttttagctcgagaggtcctaatactgttactcctgaaatcttgaagcctgatgttattggtcctggagtgaacattttggctggttggtctgacgctattggtcctactggtcttgacaaggactctaggaggactcagttcaacatcatgtcaggtacgtcaatgtcatgcccacacatcagtggtttagcgggtcttttgaaagcagctcaccctgagtggagtccgagtgctatcaaatcagctctcatgactacagcttacgttcttgacaacaccaacgctcctctccatgatgctgcagacaacagcctatctaacccatatgctcatggctcgggccatgtagatccccaaaaggctctctcaccaggtcttgtctacgacatctcaaccgaggaatacatcaggtttttgtgctctctagactacacagtcgatcacattgttgcgattgtgaagcgacctagcgttaactgctcgaagaagttctcagatcctggtcagctcaactacccaagtttctcggttttgtttgggggtaaaagagttgtgcggtacactcgggaagtaacaaatgttggtgcagcaagctcggtttacaaagtgacggttaatggagctcctagtgtcggaatctctgttaaaccatcgaaactttcgtttaaaagcgtgggagagaagaagaggtacacagtcacgtttgttagcaagaaaggagtgagtatgacgaacaaggctgagtttggttccatcacttggagcaatccgcagcacgaagtgagaagtcccgttgcattctcttggaaccggttttgataaaaaatctaacatccctagtgatgatgttttctatttaagttatcttgattgggtttaggctaaaccaaagcccatcatgagccataagtagtgggaagtgttcttgtgtggttaggtttgagtcattgagtgtgtaggtgaaagcatcccaaaaaaagttagggatgataaaagaaaatgttgtcaggaaaagaacgttgatgtcgtcatatgtagtgcttcaagtttcttcattttaaccatcatactgatgtaatagtatctttcaaataagcaacaaaagtaatgtgacataatgtcatc

SEQ ID NO: 27473 - protein, 448 aa, Arabidopsis thaliana
  peptide (1)..(448): Ceres Seq. ID no. 12738254
  misc_feature (155)..(288): Pfam Name: Subtilase family Pfam Description: Subtilase family
  misc_feature (1)..(445): Homolog of NCBI NO: 29786399 NR Description: putative serine protease [Populus euramericana]
  misc_feature (1)..(445): Homolog of NCBI NO: 14488360 NR Description: putative serine protease [Oryza sativa (japonica
  misc_feature (1)..(447): Homolog of NCBI NO: 22331076 NR Description: subtilisin-like serine protease, putative
  misc_feature (1)..(445): Homolog of NCBI NO: 7435657 NR Description: subtilisin-like proteinase (EC 3.4.21.-) 1 -
  misc_feature (1)..(445): Homolog of NCBI NO: 40538972 NR Description: putaive subtilisin-like proteinase
  misc_feature (1)..(445): Homolog of NCBI NO: 20147211 NR Description: AT5g67360/K8K14_8 [Arabidopsis thaliana]
  misc_feature (1)..(445): Homolog of NCBI NO: 18425181 NR Description: subtilisin-like serine protease ARA12
  misc_feature (1)..(445): Homolog of NCBI NO: 1076414 NR Description: subtilisin-like proteinase (EC 3.4.21.-),
  misc_feature (1)..(445): Homolog of NCBI NO: 37533990 NR Description: putative cucumisin-like serine protease
  misc_feature (1)..(448): Homolog of NCBI NO: 18396193 NR Description: subtilisin-like serine protease, putative
SAGNSGPTRASVANVAPWVMTVGAGTLDRDFPAFANLGNGKRLTGVSLYSGVGMGTKPLELVYNKGNSSSSNLCLPGSLDSSIVRGKIVVCDRGVNARVEKGAVVRDAGGLGMIMANTAASGEELVADSHLLPAIAVGKKTGDLLREYVKSDSNPTALLVFKGTVLDVKPSPVVAAFSSRGPNTVTPEILKPDVIGPGVNILAGWSDAIGPTGLDKDSRRTQFNIMSGTSMSCPHISGLAGLLKAAHPEWSPSAIKSALMTTAYVLDNTNAPLHDAADNSLSNPYAHGSGHVDPQKALSPGLVYDISTEEYIRFLCSLDYTVDHIVAIVKRPSVNCSKKFSDPGQLNYPSFSVLFGGKRVVRYTREVTNVGAASSVYKVTVNGAPSVGISVKPSKLSFKSVGEKKRYTVTFVSKKGVSMTNKAEFGSITWSNPQHEVRSPVAFSWNRF

SEQ ID NO: 27474 - protein, 429 aa, Arabidopsis thaliana
  peptide (1)..(429): Ceres Seq. ID no. 12738255
  misc_feature (136)..(269): Pfam Name: Subtilase family Pfam Description: Subtilase family
  misc_feature (1)..(426): Homolog of NCBI NO: 29786399 NR Description: putative serine protease [Populus euramericana]
  misc_feature (1)..(426): Homolog of NCBI NO: 14488360 NR Description: putative serine protease [Oryza sativa (japonica
  misc_feature (1)..(428): Homolog of NCBI NO: 22331076 NR Description: subtilisin-like serine protease, putative
  misc_feature (1)..(426): Homolog of NCBI NO: 7435657 NR Description: subtilisin-like proteinase (EC 3.4.21.-) 1 -
  misc_feature (1)..(426): Homolog of NCBI NO: 40538972 NR Description: putaive subtilisin-like proteinase
  misc_feature (1)..(426): Homolog of NCBI NO: 20147211 NR Description: AT5g67360/K8K14_8 [Arabidopsis thaliana]
  misc_feature (1)..(426): Homolog of NCBI NO: 18425181 NR Description: subtilisin-like serine protease ARA12
  misc_feature (1)..(426): Homolog of NCBI NO: 1076414 NR Description: subtilisin-like proteinase (EC 3.4.21.-),
  misc_feature (1)..(426): Homolog of NCBI NO: 37533990 NR Description: putative cucumisin-like serine protease
  misc_feature (1)..(429): Homolog of NCBI NO: 18396193 NR Description: subtilisin-like serine protease, putative
MTVGAGTLDRDFPAFANLGNGKRLTGVSLYSGVGMGTKPLELVYNKGNSSSSNLCLPGSLDSSIVRGKIVVCDRGVNARVEKGAVVRDAGGLGMIMANTAASGEELVADSHLLPAIAVGKKTGDLLREYVKSDSNPTALLVFKGTVLDVKPSPVVAAFSSRGPNTVTPEILKPDVIGPGVNILAGWSDAIGPTGLDKDSRRTQFNIMSGTSMSCPHISGLAGLLKAAHPEWSPSAIKSALMTTAYVLDNTNAPLHDAADNSLSNPYAHGSGHVDPQKALSPGLVYDISTEEYIRFLCSLDYTVDHIVAIVKRPSVNCSKKFSDPGQLNYPSFSVLFGGKRVVRYTREVTNVGAASSVYKVTVNGAPSVGISVKPSKLSFKSVGEKKRYTVTFVSKKGVSMTNKAEFGSITWSNPQHEVRSPVAFSWNRF

SEQ ID NO: 27475 - protein, 395 aa, Arabidopsis thaliana
  peptide (1)..(395): Ceres Seq. ID no. 12738256
  misc_feature (102)..(235): Pfam Name: Subtilase family Pfam Description: Subtilase family
  misc_feature (1)..(392): Homolog of NCBI NO: 29786399 NR Description: putative serine protease [Populus euramericana]
  misc_feature (1)..(392): Homolog of NCBI NO: 14488360 NR Description: putative serine protease [Oryza sativa (japonica
  misc_feature (1)..(394): Homolog of NCBI NO: 22331076 NR Description: subtilisin-like serine protease, putative
  misc_feature (1)..(392): Homolog of NCBI NO: 7435657 NR Description: subtilisin-like proteinase (EC 3.4.21.-) 1 -
  misc_feature (1)..(392): Homolog of NCBI NO: 40538972 NR Description: putaive subtilisin-like proteinase
  misc_feature (1)..(392): Homolog of NCBI NO: 20147211 NR Description: AT5g67360/K8K14_8 [Arabidopsis thaliana]
  misc_feature (1)..(392): Homolog of NCBI NO: 18425181 NR Description: subtilisin-like serine protease ARA12
  misc_feature (1)..(392): Homolog of NCBI NO: 1076414 NR Description: subtilisin-like proteinase (EC 3.4.21.-),
  misc_feature (1)..(392): Homolog of NCBI NO: 37533990 NR Description: putative cucumisin-like serine protease
  misc_feature (1)..(395): Homolog of NCBI NO: 18396193 NR Description: subtilisin-like serine protease, putative
MGTKPLELVYNKGNSSSSNLCLPGSLDSSIVRGKIVVCDRGVNARVEKGAVVRDAGGLGMIMANTAASGEELVADSHLLPAIAVGKKTGDLLREYVKSDSNPTALLVFKGTVLDVKPSPVVAAFSSRGPNTVTPEILKPDVIGPGVNILAGWSDAIGPTGLDKDSRRTQFNIMSGTSMSCPHISGLAGLLKAAHPEWSPSAIKSALMTTAYVLDNTNAPLHDAADNSLSNPYAHGSGHVDPQKALSPGLVYDISTEEYIRFLCSLDYTVDHIVAIVKRPSVNCSKKFSDPGQLNYPSFSVLFGGKRVVRYTREVTNVGAASSVYKVTVNGAPSVGISVKPSKLSFKSVGEKKRYTVTFVSKKGVSMTNKAEFGSITWSNPQHEVRSPVAFSWNRF

SEQ ID NO: 27476 - DNA, 584 bp, Arabidopsis thaliana
  misc_feature (1)..(584): Ceres Seq. ID no. 13493868
  misc_feature: MA Experiment ID: 20000184 Result: Up-regulated in Transcription
  misc_feature: MA Experiment 20000184 PARAMETER Experiment Name: At_Shoots__P Parameter: Age (day) Value: 7
  misc_feature: MA Experiment 20000184 PARAMETER Experiment Name: At_Shoots__P Parameter: Tissue Value: Shoots vs. Whole Plant
  misc_feature: MA Experiment ID: 20000234 Result: Up-regulated in Transcription
  misc_feature: MA Experiment 20000234 PARAMETER Experiment Name: At_Siliques_P Parameter: Age (day) Value: 21
  misc_feature: MA Experiment 20000234 PARAMETER Experiment Name: At_Siliques_P Parameter: Organism Value: A. thaliana
  misc_feature: MA Experiment 20000234 PARAMETER Experiment Name: At_Siliques_P Parameter: Plant Line Value: WS
  misc_feature: MA Experiment 20000234 PARAMETER Experiment Name: At_Siliques_P Parameter: Tissue Value: Less Than 5mm Siliques vs. Whole Plant
  misc_feature: MA Experiment ID: 20000265 Result: Up-regulated in Transcription
  misc_feature: MA Experiment 20000265 PARAMETER Experiment Name: At_Open_Flower_P Parameter: Age (day) Value: 21
  misc_feature: MA Experiment 20000265 PARAMETER Experiment Name: At_Open_Flower_P Parameter: Plant Line Value: WS
  misc_feature: MA Experiment 20000265 PARAMETER Experiment Name: At_Open_Flower_P Parameter: Tissue Value: Closed Flower vs. Whole Plant
  misc_feature: MA Experiment ID: 20000794 Result: Down-regulated in Transcription
  misc_feature: MA Experiment 20000794 PARAMETER Experiment Name: At_Petals_P Parameter: Age (day) Value: 23-25 days
  misc_feature: MA Experiment 20000794 PARAMETER Experiment Name: At_Petals_P Parameter: Plant Line Value: WS
  misc_feature: MA Experiment 20000794 PARAMETER Experiment Name: At_Petals_P Parameter: Tissue Value: Petals vs. Whole plant
  misc_feature: MA Experiment ID: 20001557 Result: Up-regulated in Transcription
  misc_feature: MA Experiment 20001557 PARAMETER Experiment Name: At_Drought_Soil_Dry_P Parameter: Age (day) Value: 27
  misc_feature: MA Experiment 20001557 PARAMETER Experiment Name: At_Drought_Soil_Dry_P Parameter: Organism Value: A. thaliana
  misc_feature: MA Experiment 20001557 PARAMETER Experiment Name: At_Drought_Soil_Dry_P Parameter: Plant Line Value: WS
  misc_feature: MA Experiment 20001557 PARAMETER Experiment Name: At_Drought_Soil_Dry_P Parameter: Post Timepoint (hr) Value: 3
  misc_feature: MA Experiment 20001557 PARAMETER Experiment Name: At_Drought_Soil_Dry_P Parameter: Post-Treatment Value: Re-Water vs. No Drought
  misc_feature: MA Experiment 20001557 PARAMETER Experiment Name: At_Drought_Soil_Dry_P Parameter: Timepoint (day) Value: 13
  misc_feature: MA Experiment 20001557 PARAMETER Experiment Name: At_Drought_Soil_Dry_P Parameter: Treatment Value: Drought vs. No Drought
  misc_feature: MA Experiment ID: 20001558 Result: Up-regulated in Transcription
  misc_feature: MA Experiment 20001558 PARAMETER Experiment Name: At_Drought_Soil_Dry_P Parameter: Age (day) Value: 27
  misc_feature: MA Experiment 20001558 PARAMETER Experiment Name: At_Drought_Soil_Dry_P Parameter: Organism Value: A. thaliana
  misc_feature: MA Experiment 20001558 PARAMETER Experiment Name: At_Drought_Soil_Dry_P Parameter: Plant Line Value: WS
  misc_feature: MA Experiment 20001558 PARAMETER Experiment Name: At_Drought_Soil_Dry_P Parameter: Post Timepoint (hr) Value: 6
  misc_feature: MA Experiment 20001558 PARAMETER Experiment Name: At_Drought_Soil_Dry_P Parameter: Post-Treatment Value: Re-Water vs. No Drought
  misc_feature: MA Experiment 20001558 PARAMETER Experiment Name: At_Drought_Soil_Dry_P Parameter: Timepoint (day) Value: 13
  misc_feature: MA Experiment 20001558 PARAMETER Experiment Name: At_Drought_Soil_Dry_P Parameter: Treatment Value: Drought vs. No Drought
  misc_feature: MA Experiment ID: 20001560 Result: Up-regulated in Transcription
  misc_feature: MA Experiment 20001560 PARAMETER Experiment Name: At_Drought_Soil_Dry_P Parameter: Age (day) Value: 28
  misc_feature: MA Experiment 20001560 PARAMETER Experiment Name: At_Drought_Soil_Dry_P Parameter: Organism Value: A. thaliana
  misc_feature: MA Experiment 20001560 PARAMETER Experiment Name: At_Drought_Soil_Dry_P Parameter: Plant Line Value: WS
  misc_feature: MA Experiment 20001560 PARAMETER Experiment Name: At_Drought_Soil_Dry_P Parameter: Post Timepoint (hr) Value: None
  misc_feature: MA Experiment 20001560 PARAMETER Experiment Name: At_Drought_Soil_Dry_P Parameter: Post-Treatment Value: None
  misc_feature: MA Experiment 20001560 PARAMETER Experiment Name: At_Drought_Soil_Dry_P Parameter: Timepoint (day) Value: 14
  misc_feature: MA Experiment 20001560 PARAMETER Experiment Name: At_Drought_Soil_Dry_P Parameter: Treatment Value: Drought vs. No Drought
  misc_feature: MA Experiment ID: 20001757 Result: Up-regulated in Transcription
  misc_feature: MA Experiment 20001757 PARAMETER Experiment Name: At_50mM_NH4NO3_L-to-H_P Parameter: Timepoint (hr) Value: 6
  misc_feature: MA Experiment 20001757 PARAMETER Experiment Name: At_50mM_NH4NO3_L-to-H_P Parameter: Tissue Value: Leaf
  misc_feature: MA Experiment 20001757 PARAMETER Experiment Name: At_50mM_NH4NO3_L-to-H_P Parameter: Treatment Value: 50mM NH4NO3 vs 100mM Mannitol
aagtgattaagcttatgcagagtttcaaatccaaggagtatgttagggagacaattgcctggatgcattactattggtttttgaccaatgaagggatcgagttcttgagaacttatcttaatcttccatctgatgttgttcctgctactttgaagaagtcagctaagcctggtggtcgtccatttggtggcccacctggtgatcgctcaagaggacctcgccatgaaggaggagaccgtcccaggtttggtgaccgtgatgggtaccgtgcaggtcctcgagctggtggtgagtttggaggtgaaaagggtggagctcctgcagattaccagccatctttccaaggaagtgggcgtggttttggccgtggtgctggtggctacagcgcagctgcaccatctggttcaggtttgccttgaaaaagaaatgtctttaggtgacagtaagaccatggaggagttttcagctttaaattttgcttttgtaattcagattccggaatccttcataatctctatctgagtttagttttgttgttgaatcaaacatccgatttaaagttatgttcattccatcttctcttc

SEQ ID NO: 27477 - protein, 138 aa, Arabidopsis thaliana
  peptide (1)..(138): Ceres Seq. ID no. 15222907
  misc_feature (1)..(57): Pfam Name: Plectin/S10 domain Pfam Description: Plectin/S10 domain
  misc_feature (1)..(132): Homolog of NCBI NO: 40642980 NR Description: ribosomal protein S10 [Crassostrea gigas]
  misc_feature (1)..(125): Homolog of NCBI NO: 28200289 NR Description: ribosomal protein S10 [Branchiostoma belcheri
  misc_feature (1)..(125): Homolog of NCBI NO: 24266976 NR Description: ribosomal protein S10 [Branchiostoma belcheri]
  misc_feature (1)..(138): Homolog of NCBI NO: 15238099 NR Description: expressed protein [Arabidopsis thaliana]
  misc_feature (1)..(137): Homolog of NCBI NO: 20140213 NR Description: 40S ribosomal protein S10
  misc_feature (1)..(133): Homolog of NCBI NO: 34905824 NR Description: putative ribosomal protein S10
  misc_feature (1)..(137): Homolog of NCBI NO: 34897532 NR Description: OSJNBa0042L16.3 [Oryza sativa (japonica
  misc_feature (1)..(138): Homolog of NCBI NO: 15235985 NR Description: 40S ribosomal protein S10 (RPS10A) [Arabidopsis
  misc_feature (1)..(138): Homolog of NCBI NO: 20139798 NR Description: 40S ribosomal protein S10-3
  misc_feature (1)..(138): Homolog of NCBI NO: 15237217 NR Description: 40S ribosomal protein S10 (RPS10C) [Arabidopsis
VIKLMQSFKSKEYVRETIAWMHYYWFLTNEGIEFLRTYLNLPSDVVPATLKKSAKPGGRPFGGPPGDRSRGPRHEGGDRPRFGDRDGYRAGPRAGGEFGGEKGGAPADYQPSFQGSGRGFGRGAGGYSAAAPSGSGLP

SEQ ID NO: 27478 - protein, 134 aa, Arabidopsis thaliana
  peptide (1)..(134): Ceres Seq. ID no. 15222908
  misc_feature (1)..(53): Pfam Name: Plectin/S10 domain Pfam Description: Plectin/S10 domain
  misc_feature (1)..(121): Homolog of NCBI NO: 28200289 NR Description: ribosomal protein S10 [Branchiostoma belcheri
  misc_feature (1)..(121): Homolog of NCBI NO: 24266976 NR Description: ribosomal protein S10 [Branchiostoma belcheri]
  misc_feature (1)..(134): Homolog of NCBI NO: 15238099 NR Description: expressed protein [Arabidopsis thaliana]
  misc_feature (1)..(133): Homolog of NCBI NO: 20140213 NR Description: 40S ribosomal protein S10
  misc_feature (1)..(129): Homolog of NCBI NO: 34905824 NR Description: putative ribosomal protein S10
  misc_feature (1)..(128): Homolog of NCBI NO: 40642980 NR Description: ribosomal protein S10 [Crassostrea gigas]
  misc_feature (1)..(133): Homolog of NCBI NO: 34897532 NR Description: OSJNBa0042L16.3 [Oryza sativa (japonica
  misc_feature (1)..(134): Homolog of NCBI NO: 15235985 NR Description: 40S ribosomal protein S10 (RPS10A) [Arabidopsis
  misc_feature (1)..(134): Homolog of NCBI NO: 20139798 NR Description: 40S ribosomal protein S10-3
  misc_feature (1)..(134): Homolog of NCBI NO: 15237217 NR Description: 40S ribosomal protein S10 (RPS10C) [Arabidopsis
MQSFKSKEYVRETIAWMHYYWFLTNEGIEFLRTYLNLPSDVVPATLKKSAKPGGRPFGGPPGDRSRGPRHEGGDRPRFGDRDGYRAGPRAGGEFGGEKGGAPADYQPSFQGSGRGFGRGAGGYSAAAPSGSGLP

SEQ ID NO: 27479 - protein, 118 aa, Arabidopsis thaliana
  peptide (1)..(118): Ceres Seq. ID no. 15222909
  misc_feature (1)..(112): Homolog of NCBI NO: 40642980 NR Description: ribosomal protein S10 [Crassostrea gigas]
  misc_feature (1)..(105): Homolog of NCBI NO: 28200289 NR Description: ribosomal protein S10 [Branchiostoma belcheri
  misc_feature (1)..(105): Homolog of NCBI NO: 24266976 NR Description: ribosomal protein S10 [Branchiostoma belcheri]
  misc_feature (1)..(118): Homolog of NCBI NO: 15238099 NR Description: expressed protein [Arabidopsis thaliana]
  misc_feature (1)..(117): Homolog of NCBI NO: 20140213 NR Description: 40S ribosomal protein S10
  misc_feature (1)..(113): Homolog of NCBI NO: 34905824 NR Description: putative ribosomal protein S10
  misc_feature (1)..(117): Homolog of NCBI NO: 34897532 NR Description: OSJNBa0042L16.3 [Oryza sativa (japonica
  misc_feature (1)..(118): Homolog of NCBI NO: 15235985 NR Description: 40S ribosomal protein S10 (RPS10A) [Arabidopsis
  misc_feature (1)..(118): Homolog of NCBI NO: 20139798 NR Description: 40S ribosomal protein S10-3
  misc_feature (1)..(118): Homolog of NCBI NO: 15237217 NR Description: 40S ribosomal protein S10 (RPS10C) [Arabidopsis
MHYYWFLTNEGIEFLRTYLNLPSDVVPATLKKSAKPGGRPFGGPPGDRSRGPRHEGGDRPRFGDRDGYRAGPRAGGEFGGEKGGAPADYQPSFQGSGRGFGRGAGGYSAAAPSGSGLP

SEQ ID NO: 27480 - DNA, 1376 bp, Arabidopsis thaliana
  misc_feature (1)..(1376): Ceres Seq. ID no. 13575406
  misc_feature: MA Experiment ID: 20000180 Result: Up-regulated in Transcription
  misc_feature: MA Experiment 20000180 PARAMETER Experiment Name: At_Germinating_Seeds_P Parameter: Age (hr) Value: 24 vs. 0
  misc_feature: MA Experiment 20000180 PARAMETER Experiment Name: At_Germinating_Seeds_P Parameter: Tissue Value: Germinating Seeds
  misc_feature: MA Experiment ID: 20000224 Result: Up-regulated in Transcription
aaaacgaatttttttaaagaaaataaaaatcaagtctttctcttcgtctatctctctctctgctcagactctctggtgttgaagactaatcactgaagcagatctattatacggaggacgaagaagatgtatgagcagcagcaacatttcatggatttgcaaagcgattctgggtttggggacgatagctcctggctcgccggcgatgacgatcttcgtctctctcctcaccaatctgccgccggtacgaactccggcaatgagaatctagatcgtcgtctcttaaaagatctcgtcgagatggttccccttatcgagcattacatggaacataaagaaaggagttcgtttaagcggcgtggttccatgatctacactaagatgccttcaaaagaatccttgtcccgaaggggaagaaatgcttctcaaacagtcccaggaagaaagaagagagaccaagagggaaatgacgatgttatgaacaattctagggaagatgatgaaaacgcaaaggctttggctggtgcagaaaaggaagaaatgagtagactaagagagcaagtgaatgacttgcagacaaaattatcggagaaagaagaggttttaaagtcaatggagatgtcaaagaatcaggtaaacgagatacaagaaaagcttgaagcaacaaatcgattggttgctgagaaggatatgttgatcaagtctatgcagttacaattatcggacacaaagatcaaacttgctgacaagcaagcagcccttgagaagactcaatgggaagcaaagacaacaggaacaagagcaatcaagcttcaagaacagctagatgctgttgaaggagacatctctacattcacacgggtgttcgaaactttggcaaaaactgattccaagaaacccgatagggattatgatgcagtcccatatgaatttgatcatcttccatatttagacgatgtagatgaaactgacctgaggaaaatggaagaagcaagattagcttatgtagcagcagtgaataccgcaaaggaacgagaagatgaagaatctctggtcatggctgctcaagctcgagcttacctgcaatcactagcctttacatattaatcatcttcaggtacttacttctttataggatatttctctccttgggttgttttaggagtatgtagatttgtaccatgaagaaattggagaagaaaagcttatgtgagaaacataaagttatggttttcccctaaaccaatgaacgcaactctgagtttttgtttcttcatttgagcatgtatgtatctatatgatcttctacattattgggaacataaaatcagattgtataatgcatctgttcaatagtttactttagatatactctt

SEQ ID NO: 27481 - protein, 326 aa, Arabidopsis thaliana
  peptide (1)..(326): Ceres Seq. ID no. 13575407
  misc_feature (1)..(318): Pfam Name: Myosin tail Pfam Description: Myosin tail
  misc_feature (1)..(318): Pfam Name: Myosin tail Pfam Description: Myosin tail
  misc_feature (9)..(322): Homolog of NCBI NO: 19716176 NR Description: TMV-MP30 binding protein 2C [Nicotiana tabacum]
  misc_feature (118)..(326): Homolog of NCBI NO: 1732515 NR Description: myosin heavy chain-like protein [Arabidopsis
  misc_feature (118)..(326): Homolog of NCBI NO: 1732515 NR Description: myosin heavy chain-like protein [Arabidopsis
  misc_feature (1)..(326): Homolog of NCBI NO: 15241531 NR Description: myosin heavy chain-related protein [Arabidopsis
  misc_feature (9)..(322): Homolog of NCBI NO: 19716176 NR Description: TMV-MP30 binding protein 2C [Nicotiana tabacum]
  misc_feature (1)..(326): Homolog of NCBI NO: 15241531 NR Description: myosin heavy chain-related protein [Arabidopsis
MYEQQQHFMDLQSDSGFGDDSSWLAGDDDLRLSPHQSAAGTNSGNENLDRRLLKDLVEMVPLIEHYMEHKERSSFKRRGSMIYTKMPSKESLSRRGRNASQTVPGRKKRDQEGNDDVMNNSREDDENAKALAGAEKEEMSRLREQVNDLQTKLSEKEEVLKSMEMSKNQVNEIQEKLEATNRLVAEKDMLIKSMQLQLSDTKIKLADKQAALEKTQWEAKTTGTRAIKLQEQLDAVEGDISTFTRVFETLAKTDSKKPDRDYDAVPYEFDHLPYLDDVDETDLRKMEEARLAYVAAVNTAKEREDEESLVMAAQARAYLQSLAFTY

SEQ ID NO: 27482 - protein, 318 aa, Arabidopsis thaliana
  peptide (1)..(318): Ceres Seq. ID no. 13575408
  misc_feature (1)..(310): Pfam Name: Myosin tail Pfam Description: Myosin tail
  misc_feature (1)..(310): Pfam Name: Myosin tail Pfam Description: Myosin tail
  misc_feature (1)..(314): Homolog of NCBI NO: 19716176 NR Description: TMV-MP30 binding protein 2C [Nicotiana tabacum]
  misc_feature (110)..(318): Homolog of NCBI NO: 1732515 NR Description: myosin heavy chain-like protein [Arabidopsis
  misc_feature (110)..(318): Homolog of NCBI NO: 1732515 NR Description: myosin heavy chain-like protein [Arabidopsis
  misc_feature (1)..(318): Homolog of NCBI NO: 15241531 NR Description: myosin heavy chain-related protein [Arabidopsis
  misc_feature (1)..(314): Homolog of NCBI NO: 19716176 NR Description: TMV-MP30 binding protein 2C [Nicotiana tabacum]
  misc_feature (1)..(318): Homolog of NCBI NO: 15241531 NR Description: myosin heavy chain-related protein [Arabidopsis
MDLQSDSGFGDDSSWLAGDDDLRLSPHQSAAGTNSGNENLDRRLLKDLVEMVPLIEHYMEHKERSSFKRRGSMIYTKMPSKESLSRRGRNASQTVPGRKKRDQEGNDDVMNNSREDDENAKALAGAEKEEMSRLREQVNDLQTKLSEKEEVLKSMEMSKNQVNEIQEKLEATNRLVAEKDMLIKSMQLQLSDTKIKLADKQAALEKTQWEAKTTGTRAIKLQEQLDAVEGDISTFTRVFETLAKTDSKKPDRDYDAVPYEFDHLPYLDDVDETDLRKMEEARLAYVAAVNTAKEREDEESLVMAAQARAYLQSLAFTY

SEQ ID NO: 27483 - protein, 268 aa, Arabidopsis thaliana
  peptide (1)..(268): Ceres Seq. ID no. 13575409
  misc_feature (1)..(260): Pfam Name: Myosin tail Pfam Description: Myosin tail
  misc_feature (1)..(260): Pfam Name: Myosin tail Pfam Description: Myosin tail
  misc_feature (1)..(264): Homolog of NCBI NO: 19716176 NR Description: TMV-MP30 binding protein 2C [Nicotiana tabacum]
  misc_feature (60)..(268): Homolog of NCBI NO: 1732515 NR Description: myosin heavy chain-like protein [Arabidopsis
  misc_feature (60)..(268): Homolog of NCBI NO: 1732515 NR Description: myosin heavy chain-like protein [Arabidopsis
  misc_feature (1)..(268): Homolog of NCBI NO: 15241531 NR Description: myosin heavy chain-related protein [Arabidopsis
  misc_feature (1)..(264): Homolog of NCBI NO: 19716176 NR Description: TMV-MP30 binding protein 2C [Nicotiana tabacum]
  misc_feature (1)..(268): Homolog of NCBI NO: 15241531 NR Description: myosin heavy chain-related protein [Arabidopsis
MVPLIEHYMEHKERSSFKRRGSMIYTKMPSKESLSRRGRNASQTVPGRKKRDQEGNDDVMNNSREDDENAKALAGAEKEEMSRLREQVNDLQTKLSEKEEVLKSMEMSKNQVNEIQEKLEATNRLVAEKDMLIKSMQLQLSDTKIKLADKQAALEKTQWEAKTTGTRAIKLQEQLDAVEGDISTFTRVFETLAKTDSKKPDRDYDAVPYEFDHLPYLDDVDETDLRKMEEARLAYVAAVNTAKEREDEESLVMAAQARAYLQSLAFTY

SEQ ID NO: 27484 - DNA, 1433 bp, Arabidopsis thaliana
  misc_feature (1)..(1433): Ceres Seq. ID no. 12324155
  misc_feature: MA Experiment ID: 108462 Result: Up-regulated in Transcription
  misc_feature: MA Experiment 108462 PARAMETER Experiment Name: At_Germinating_Seeds_cDNA_P Parameter: Age (day) Value: 2 vs. 0
  misc_feature: MA Experiment 108462 PARAMETER Experiment Name: At_Germinating_Seeds_cDNA_P Parameter: Tissue Value: Germinating Seeds
  misc_feature: MA Experiment ID: 108463 Result: Up-regulated in Transcription
  misc_feature: MA Experiment 108463 PARAMETER Experiment Name: At_Germinating_Seeds_cDNA_P Parameter: Age (day) Value: 3 vs. 0
  misc_feature: MA Experiment 108463 PARAMETER Experiment Name: At_Germinating_Seeds_cDNA_P Parameter: Tissue Value: Germinating Seeds
  misc_feature: MA Experiment ID: 108464 Result: Up-regulated in Transcription
  misc_feature: MA Experiment 108464 PARAMETER Experiment Name: At_Germinating_Seeds_cDNA_P Parameter: Age (day) Value: 4 vs. 0
  misc_feature: MA Experiment 108464 PARAMETER Experiment Name: At_Germinating_Seeds_cDNA_P Parameter: Tissue Value: Germinating Seeds
  misc_feature: MA Experiment ID: 108488 Result: Down-regulated in Transcription
  misc_feature: MA Experiment ID: 20000184 Result: Down-regulated in Transcription
  misc_feature: MA Experiment 20000184 PARAMETER Experiment Name: At_Shoots__P Parameter: Age (day) Value: 7
  misc_feature: MA Experiment 20000184 PARAMETER Experiment Name: At_Shoots__P Parameter: Tissue Value: Shoots vs. Whole Plant
  misc_feature: MA Experiment ID: 20000185 Result: Up-regulated in Transcription
  misc_feature: MA Experiment 20000185 PARAMETER Experiment Name: At_Roots__P Parameter: Age (day) Value: 7 vs. 21
  misc_feature: MA Experiment 20000185 PARAMETER Experiment Name: At_Roots__P Parameter: Organism Value: A. thaliana
  misc_feature: MA Experiment 20000185 PARAMETER Experiment Name: At_Roots__P Parameter: Tissue Value: Roots vs. Whole Plant
  misc_feature: MA Experiment ID: 20000224 Result: Up-regulated in Transcription
  misc_feature: MA Experiment ID: 20000794 Result: Up-regulated in Transcription
  misc_feature: MA Experiment 20000794 PARAMETER Experiment Name: At_Petals_P Parameter: Age (day) Value: 23-25 days
  misc_feature: MA Experiment 20000794 PARAMETER Experiment Name: At_Petals_P Parameter: Plant Line Value: WS
  misc_feature: MA Experiment 20000794 PARAMETER Experiment Name: At_Petals_P Parameter: Tissue Value: Petals vs. Whole plant
  misc_feature: MA Experiment ID: 20001451 Result: Down-regulated in Transcription
  misc_feature: MA Experiment 20001451 PARAMETER Experiment Name: At_Far-red-induction_P Parameter: Age (day) Value: 7
  misc_feature: MA Experiment 20001451 PARAMETER Experiment Name: At_Far-red-induction_P Parameter: Light Value: Far-red vs. White
  misc_feature: MA Experiment 20001451 PARAMETER Experiment Name: At_Far-red-induction_P Parameter: Organism Value: A. thaliana
  misc_feature: MA Experiment 20001451 PARAMETER Experiment Name: At_Far-red-induction_P Parameter: Plant Line Value: Columbia
  misc_feature: MA Experiment 20001451 PARAMETER Experiment Name: At_Far-red-induction_P Parameter: Timepoint (hr) Value: 24
  misc_feature: MA Experiment 20001451 PARAMETER Experiment Name: At_Far-red-induction_P Parameter: Tissue Value: Whole Plant
  misc_feature: MA Experiment ID: 20001558 Result: Down-regulated in Transcription
  misc_feature: MA Experiment 20001558 PARAMETER Experiment Name: At_Drought_Soil_Dry_P Parameter: Age (day) Value: 27
  misc_feature: MA Experiment 20001558 PARAMETER Experiment Name: At_Drought_Soil_Dry_P Parameter: Organism Value: A. thaliana
  misc_feature: MA Experiment 20001558 PARAMETER Experiment Name: At_Drought_Soil_Dry_P Parameter: Plant Line Value: WS
  misc_feature: MA Experiment 20001558 PARAMETER Experiment Name: At_Drought_Soil_Dry_P Parameter: Post Timepoint (hr) Value: 6
  misc_feature: MA Experiment 20001558 PARAMETER Experiment Name: At_Drought_Soil_Dry_P Parameter: Post-Treatment Value: Re-Water vs. No Drought
  misc_feature: MA Experiment 20001558 PARAMETER Experiment Name: At_Drought_Soil_Dry_P Parameter: Timepoint (day) Value: 13
  misc_feature: MA Experiment 20001558 PARAMETER Experiment Name: At_Drought_Soil_Dry_P Parameter: Treatment Value: Drought vs. No Drought
  misc_feature: MA Experiment ID: 20001560 Result: Down-regulated in Transcription
  misc_feature: MA Experiment 20001560 PARAMETER Experiment Name: At_Drought_Soil_Dry_P Parameter: Age (day) Value: 28
  misc_feature: MA Experiment 20001560 PARAMETER Experiment Name: At_Drought_Soil_Dry_P Parameter: Organism Value: A. thaliana
  misc_feature: MA Experiment 20001560 PARAMETER Experiment Name: At_Drought_Soil_Dry_P Parameter: Plant Line Value: WS
  misc_feature: MA Experiment 20001560 PARAMETER Experiment Name: At_Drought_Soil_Dry_P Parameter: Post Timepoint (hr) Value: None
  misc_feature: MA Experiment 20001560 PARAMETER Experiment Name: At_Drought_Soil_Dry_P Parameter: Post-Treatment Value: None
  misc_feature: MA Experiment 20001560 PARAMETER Experiment Name: At_Drought_Soil_Dry_P Parameter: Timepoint (day) Value: 14
  misc_feature: MA Experiment 20001560 PARAMETER Experiment Name: At_Drought_Soil_Dry_P Parameter: Treatment Value: Drought vs. No Drought
gaaaaagagagcgagcgatgaacagtatcttctccattgacgatttctccgatcctttctgggaaactcctccgattcctctcaatcccgactcttctaagcctgttacggcggatgaagttagccagagtcaaccggaatggactttcgagatgtttctcgaagagatttcttcgtcggcggtgagctctgagccacttggtaacaacaacaacgcgatcgtcggtgtttcttcggcgcaatctcttccttctgtttccggacagaatgatttcgaggatgatagtcgatttcgtgatcgcgattcgggaaatttggattgtgctgctcccatgacgacgaagacggtgattgttgattccgatgattatcgtcgtgttcttaagaacaagcttgagactgagtgcgctactgttgtttctcttcgggttgggtctgtgaagcctgaagattcgactagttctccagaaactcaacttcaaccagttcaatccagtcctcttactcaaggagaacttggtgttacttcttccttaccagctgaggtgaaaaaaactggtgtatcaatgaagcaggttactagtggatcgtcgagagaatattctgatgacgaggaccttgatgaagagaatgaaaccaccggttccttgaagccagaggacgttaaaaaatctagaaggatgctgtcaaatcgtgagtcagctaggcgatctagaaggagaaagcaggagcaaacaagtgacctcgaaacacaggttaatgatctaaaaggtgagcattcatcacttcttaaacaactgagcaacatgaatcacaagtatgacgaggctgctgttggcaatagaatactaaaggctgacattgagacattaagagctaaggtgaaaatggcggaagaaaccgtgaagagagtaacaggaatgaatccgatgcttctcggaagatcaagtggacataacaacaacaacagaatgccaataactggtaacaacaggatggattcttctagcattattccagcttatcaaccacactcaaacctaaaccatatgtcaaaccaaaacatcgggatcccaaccattctacctccaagactcggaaacaatttcgctgctcctccatcccaaaccagctctcccttgcagagaattagaaatgggcaaaatcaccatgttactccaagcgccaacccgtatggctggaataccgaacctcagaacgattcagcatggccgaaaaaatgcgtggactgatcaaacaagaagcgggtttcgcactatattaatgtctatgcatctgtaatttgtaagtgttattaagttacgaatcatgagaaaacatcttgtgaaaatacagtctcatggcttatatatatatataagctctgtcttataacattacaagattcttatttgagaatcgtctttctattt

SEQ ID NO: 27485 - protein, 416 aa, Arabidopsis thaliana
  peptide (1)..(416): Ceres Seq. ID no. 12324156
  misc_feature (218)..(282): Pfam Name: bZIP transcription factor Pfam Description: bZIP transcription factor
  misc_feature (6)..(356): Homolog of NCBI NO: 4115746 NR Description: bZIP protein [Oryza sativa (indica
  misc_feature (28)..(373): Homolog of NCBI NO: 16797791 NR Description: bZIP transcription factor [Nicotiana tabacum]
  misc_feature (6)..(336): Homolog of NCBI NO: 542187 NR Description: OHP1 protein - maize
  misc_feature (6)..(356): Homolog of NCBI NO: 542188 NR Description: OHP2 protein - maize
  misc_feature (26)..(383): Homolog of NCBI NO: 2842757 NR Description: Light-inducible protein CPRF-2
  misc_feature (26)..(383): Homolog of NCBI NO: 100163 NR Description: light-induced protein CPRF-2 - parsley
  misc_feature (6)..(357): Homolog of NCBI NO: 30694089 NR Description: bZIP transcription factor-related protein
  misc_feature (13)..(416): Homolog of NCBI NO: 19423919 NR Description: unknown protein [Arabidopsis thaliana]
  misc_feature (6)..(416): Homolog of NCBI NO: 30679226 NR Description: bZIP protein [Arabidopsis thaliana]
  misc_feature (6)..(416): Homolog of NCBI NO: 15235433 NR Description: bZIP protein; protein id: At4g02640.1, supported
KRERAMNSIFSIDDFSDPFWETPPIPLNPDSSKPVTADEVSQSQPEWTFEMFLEEISSSAVSSEPLGNNNNAIVGVSSAQSLPSVSGQNDFEDDSRFRDRDSGNLDCAAPMTTKTVIVDSDDYRRVLKNKLETECATVVSLRVGSVKPEDSTSSPETQLQPVQSSPLTQGELGVTSSLPAEVKKTGVSMKQVTSGSSREYSDDEDLDEENETTGSLKPEDVKKSRRMLSNRESARRSRRRKQEQTSDLETQVNDLKGEHSSLLKQLSNMNHKYDEAAVGNRILKADIETLRAKVKMAEETVKRVTGMNPMLLGRSSGHNNNNRMPITGNNRMDSSSIIPAYQPHSNLNHMSNQNIGIPTILPPRLGNNFAAPPSQTSSPLQRIRNGQNHHVTPSANPYGWNTEPQNDSAWPKKCVD

SEQ ID NO: 27486 - protein, 411 aa, Arabidopsis thaliana
  peptide (1)..(411): Ceres Seq. ID no. 12324157
  misc_feature (213)..(277): Pfam Name: bZIP transcription factor Pfam Description: bZIP transcription factor
  misc_feature (1)..(351): Homolog of NCBI NO: 4115746 NR Description: bZIP protein [Oryza sativa (indica
  misc_feature (23)..(368): Homolog of NCBI NO: 16797791 NR Description: bZIP transcription factor [Nicotiana tabacum]
  misc_feature (1)..(331): Homolog of NCBI NO: 542187 NR Description: OHP1 protein - maize
  misc_feature (1)..(351): Homolog of NCBI NO: 542188 NR Description: OHP2 protein - maize
  misc_feature (21)..(378): Homolog of NCBI NO: 2842757 NR Description: Light-inducible protein CPRF-2
  misc_feature (21)..(378): Homolog of NCBI NO: 100163 NR Description: light-induced protein CPRF-2 - parsley
  misc_feature (1)..(352): Homolog of NCBI NO: 30694089 NR Description: bZIP transcription factor-related protein
  misc_feature (8)..(411): Homolog of NCBI NO: 19423919 NR Description: unknown protein [Arabidopsis thaliana]
  misc_feature (1)..(411): Homolog of NCBI NO: 30679226 NR Description: bZIP protein [Arabidopsis thaliana]
  misc_feature (1)..(411): Homolog of NCBI NO: 15235433 NR Description: bZIP protein; protein id: At4g02640.1, supported
MNSIFSIDDFSDPFWETPPIPLNPDSSKPVTADEVSQSQPEWTFEMFLEEISSSAVSSEPLGNNNNAIVGVSSAQSLPSVSGQNDFEDDSRFRDRDSGNLDCAAPMTTKTVIVDSDDYRRVLKNKLETECATVVSLRVGSVKPEDSTSSPETQLQPVQSSPLTQGELGVTSSLPAEVKKTGVSMKQVTSGSSREYSDDEDLDEENETTGSLKPEDVKKSRRMLSNRESARRSRRRKQEQTSDLETQVNDLKGEHSSLLKQLSNMNHKYDEAAVGNRILKADIETLRAKVKMAEETVKRVTGMNPMLLGRSSGHNNNNRMPITGNNRMDSSSIIPAYQPHSNLNHMSNQNIGIPTILPPRLGNNFAAPPSQTSSPLQRIRNGQNHHVTPSANPYGWNTEPQNDSAWPKKCVD

SEQ ID NO: 27487 - protein, 366 aa, Arabidopsis thaliana
  peptide (1)..(366): Ceres Seq. ID no. 12324158
  misc_feature (168)..(232): Pfam Name: bZIP transcription factor Pfam Description: bZIP transcription factor
  misc_feature (1)..(306): Homolog of NCBI NO: 4115746 NR Description: bZIP protein [Oryza sativa (indica
  misc_feature (1)..(323): Homolog of NCBI NO: 16797791 NR Description: bZIP transcription factor [Nicotiana tabacum]
  misc_feature (1)..(286): Homolog of NCBI NO: 542187 NR Description: OHP1 protein - maize
  misc_feature (1)..(306): Homolog of NCBI NO: 542188 NR Description: OHP2 protein - maize
  misc_feature (1)..(333): Homolog of NCBI NO: 2842757 NR Description: Light-inducible protein CPRF-2
  misc_feature (1)..(333): Homolog of NCBI NO: 100163 NR Description: light-induced protein CPRF-2 - parsley
  misc_feature (1)..(307): Homolog of NCBI NO: 30694089 NR Description: bZIP transcription factor-related protein
  misc_feature (1)..(366): Homolog of NCBI NO: 19423919 NR Description: unknown protein [Arabidopsis thaliana]
  misc_feature (1)..(366): Homolog of NCBI NO: 30679226 NR Description: bZIP protein [Arabidopsis thaliana]
  misc_feature (1)..(366): Homolog of NCBI NO: 15235433 NR Description: bZIP protein; protein id: At4g02640.1, supported
MFLEEISSSAVSSEPLGNNNNAIVGVSSAQSLPSVSGQNDFEDDSRFRDRDSGNLDCAAPMTTKTVIVDSDDYRRVLKNKLETECATVVSLRVGSVKPEDSTSSPETQLQPVQSSPLTQGELGVTSSLPAEVKKTGVSMKQVTSGSSREYSDDEDLDEENETTGSLKPEDVKKSRRMLSNRESARRSRRRKQEQTSDLETQVNDLKGEHSSLLKQLSNMNHKYDEAAVGNRILKADIETLRAKVKMAEETVKRVTGMNPMLLGRSSGHNNNNRMPITGNNRMDSSSIIPAYQPHSNLNHMSNQNIGIPTILPPRLGNNFAAPPSQTSSPLQRIRNGQNHHVTPSANPYGWNTEPQNDSAWPKKCVD

SEQ ID NO: 27488 - DNA, 1411 bp, Arabidopsis thaliana
  misc_feature (1)..(1411): Ceres Seq. ID no. 12338291
  misc_feature: MA Experiment ID: 108434 Result: Up-regulated in Transcription
  misc_feature: MA Experiment 108434 PARAMETER Experiment Name: At_Root_Tips_cDNA_P Parameter: Tissue Value: Root Tips
  misc_feature: MA Experiment ID: 108462 Result: Down-regulated in Transcription
  misc_feature: MA Experiment 108462 PARAMETER Experiment Name: At_Germinating_Seeds_cDNA_P Parameter: Age (day) Value: 2 vs. 0
  misc_feature: MA Experiment 108462 PARAMETER Experiment Name: At_Germinating_Seeds_cDNA_P Parameter: Tissue Value: Germinating Seeds
  misc_feature: MA Experiment ID: 108463 Result: Down-regulated in Transcription
  misc_feature: MA Experiment 108463 PARAMETER Experiment Name: At_Germinating_Seeds_cDNA_P Parameter: Age (day) Value: 3 vs. 0
  misc_feature: MA Experiment 108463 PARAMETER Experiment Name: At_Germinating_Seeds_cDNA_P Parameter: Tissue Value: Germinating Seeds
  misc_feature: MA Experiment ID: 108464 Result: Down-regulated in Transcription
  misc_feature: MA Experiment 108464 PARAMETER Experiment Name: At_Germinating_Seeds_cDNA_P Parameter: Age (day) Value: 4 vs. 0
  misc_feature: MA Experiment 108464 PARAMETER Experiment Name: At_Germinating_Seeds_cDNA_P Parameter: Tissue Value: Germinating Seeds
  misc_feature: MA Experiment ID: 108488 Result: Up-regulated in Transcription
  misc_feature: MA Experiment ID: 108489 Result: Up-regulated in Transcription
  misc_feature: MA Experiment ID: 108561 Result: Down-regulated in Transcription
  misc_feature: MA Experiment 108561 PARAMETER Experiment Name: At_100uM_ABA_cDNA_P Parameter: Timepoint (hr) Value: 6
  misc_feature: MA Experiment 108561 PARAMETER Experiment Name: At_100uM_ABA_cDNA_P Parameter: Tissue Value: Aerial
  misc_feature: MA Experiment 108561 PARAMETER Experiment Name: At_100uM_ABA_cDNA_P Parameter: Treatment Value: 100uM ABA vs. No Treatment
  misc_feature: MA Experiment ID: 108576 Result: Down-regulated in Transcription
  misc_feature: MA Experiment 108576 PARAMETER Experiment Name: At_42deg_Heat_cDNA_P Parameter: Temperature (deg C) Value: 42 vs. 22
  misc_feature: MA Experiment 108576 PARAMETER Experiment Name: At_42deg_Heat_cDNA_P Parameter: Timepoint (hr) Value: 1
  misc_feature: MA Experiment 108576 PARAMETER Experiment Name: At_42deg_Heat_cDNA_P Parameter: Tissue Value: Aerial
  misc_feature: MA Experiment ID: 108595 Result: Down-regulated in Transcription
  misc_feature: MA Experiment 108595 PARAMETER Experiment Name: At_Ler-pi_Ovule_cDNA_P Parameter: Plant Line Value: null
  misc_feature: MA Experiment ID: 108607 Result: Down-regulated in Transcription
  misc_feature: MA Experiment 108607 PARAMETER Experiment Name: At_100uM_ABA_cDNA_P Parameter: Timepoint (hr) Value: 4
  misc_feature: MA Experiment 108607 PARAMETER Experiment Name: At_100uM_ABA_cDNA_P Parameter: Tissue Value: Aerial
  misc_feature: MA Experiment 108607 PARAMETER Experiment Name: At_100uM_ABA_cDNA_P Parameter: Treatment Value: 100uM ABA vs. No Treatment
  misc_feature: MA Experiment ID: 20000180 Result: Down-regulated in Transcription
  misc_feature: MA Experiment 20000180 PARAMETER Experiment Name: At_Germinating_Seeds_P Parameter: Age (hr) Value: 24 vs. 0
  misc_feature: MA Experiment 20000180 PARAMETER Experiment Name: At_Germinating_Seeds_P Parameter: Tissue Value: Germinating Seeds
  misc_feature: MA Experiment ID: 20000437 Result: Down-regulated in Transcription
  misc_feature: MA Experiment 20000437 PARAMETER Experiment Name: At_Drought_P Parameter: Age (day) Value: 8
  misc_feature: MA Experiment 20000437 PARAMETER Experiment Name: At_Drought_P Parameter: Organism Value: A. thaliana
  misc_feature: MA Experiment 20000437 PARAMETER Experiment Name: At_Drought_P Parameter: Plant Line Value: WS
  misc_feature: MA Experiment 20000437 PARAMETER Experiment Name: At_Drought_P Parameter: Timepoint (hr) Value: 24
  misc_feature: MA Experiment 20000437 PARAMETER Experiment Name: At_Drought_P Parameter: Tissue Value: Whole Plant
  misc_feature: MA Experiment 20000437 PARAMETER Experiment Name: At_Drought_P Parameter: Treatment Value: Drought vs. No Drought
  misc_feature: MA Experiment ID: 20001450 Result: Down-regulated in Transcription
  misc_feature: MA Experiment 20001450 PARAMETER Experiment Name: At_Far-red-induction_P Parameter: Age (day) Value: 7
  misc_feature: MA Experiment 20001450 PARAMETER Experiment Name: At_Far-red-induction_P Parameter: Light Value: Far-red vs. White
  misc_feature: MA Experiment 20001450 PARAMETER Experiment Name: At_Far-red-induction_P Parameter: Organism Value: A. thaliana
  misc_feature: MA Experiment 20001450 PARAMETER Experiment Name: At_Far-red-induction_P Parameter: Plant Line Value: Columbia
  misc_feature: MA Experiment 20001450 PARAMETER Experiment Name: At_Far-red-induction_P Parameter: Timepoint (hr) Value: 8
  misc_feature: MA Experiment 20001450 PARAMETER Experiment Name: At_Far-red-induction_P Parameter: Tissue Value: Whole Plant
  misc_feature: MA Experiment ID: 20001557 Result: Up-regulated in Transcription
  misc_feature: MA Experiment 20001557 PARAMETER Experiment Name: At_Drought_Soil_Dry_P Parameter: Age (day) Value: 27
  misc_feature: MA Experiment 20001557 PARAMETER Experiment Name: At_Drought_Soil_Dry_P Parameter: Organism Value: A. thaliana
  misc_feature: MA Experiment 20001557 PARAMETER Experiment Name: At_Drought_Soil_Dry_P Parameter: Plant Line Value: WS
  misc_feature: MA Experiment 20001557 PARAMETER Experiment Name: At_Drought_Soil_Dry_P Parameter: Post Timepoint (hr) Value: 3
  misc_feature: MA Experiment 20001557 PARAMETER Experiment Name: At_Drought_Soil_Dry_P Parameter: Post-Treatment Value: Re-Water vs. No Drought
  misc_feature: MA Experiment 20001557 PARAMETER Experiment Name: At_Drought_Soil_Dry_P Parameter: Timepoint (day) Value: 13
  misc_feature: MA Experiment 20001557 PARAMETER Experiment Name: At_Drought_Soil_Dry_P Parameter: Treatment Value: Drought vs. No Drought
  misc_feature: MA Experiment ID: 20001558 Result: Up-regulated in Transcription
  misc_feature: MA Experiment 20001558 PARAMETER Experiment Name: At_Drought_Soil_Dry_P Parameter: Age (day) Value: 27
  misc_feature: MA Experiment 20001558 PARAMETER Experiment Name: At_Drought_Soil_Dry_P Parameter: Organism Value: A. thaliana
  misc_feature: MA Experiment 20001558 PARAMETER Experiment Name: At_Drought_Soil_Dry_P Parameter: Plant Line Value: WS
  misc_feature: MA Experiment 20001558 PARAMETER Experiment Name: At_Drought_Soil_Dry_P Parameter: Post Timepoint (hr) Value: 6
  misc_feature: MA Experiment 20001558 PARAMETER Experiment Name: At_Drought_Soil_Dry_P Parameter: Post-Treatment Value: Re-Water vs. No Drought
  misc_feature: MA Experiment 20001558 PARAMETER Experiment Name: At_Drought_Soil_Dry_P Parameter: Timepoint (day) Value: 13
  misc_feature: MA Experiment 20001558 PARAMETER Experiment Name: At_Drought_Soil_Dry_P Parameter: Treatment Value: Drought vs. No Drought
  misc_feature: MA Experiment ID: 20001757 Result: Up-regulated in Transcription
  misc_feature: MA Experiment 20001757 PARAMETER Experiment Name: At_50mM_NH4NO3_L-to-H_P Parameter: Timepoint (hr) Value: 6
  misc_feature: MA Experiment 20001757 PARAMETER Experiment Name: At_50mM_NH4NO3_L-to-H_P Parameter: Tissue Value: Leaf
  misc_feature: MA Experiment 20001757 PARAMETER Experiment Name: At_50mM_NH4NO3_L-to-H_P Parameter: Treatment Value: 50mM NH4NO3 vs 100mM Mannitol
aaaaagctaagtaaactactcaagtccctcccttttccggcgtcgctattctcggtctcattctgtctcccccatggaagctcggattttgcagtcttcttcttcctgttattcgtctctttacactgtcaatcgatcccggttctcttctgtgtcatctccgaaacttttctccgtcactttgctcagacgacgagaacaaggactcgtgtattatccatgtcgaagaaagatggtcgcactgataaagatgatgacactgatagtctcaattacaaagattctggtgttgatatcgatgctggtgctgagcttgttaaacgaatcgcaaagatggctcctggaattggtggatttggtggtctctttccattaggtgatagttatcttgtagctggtacggatggtgtagggactaaattgaaattggcatttgaaactggaattcatgacaccattggaatcgacttggttgctatgagtgtgaatgatattattacttctggtgcaaagcctctgtttttccttgattactttgctactagtcgtcttgatgtagaccttgctgaaaaggtcattaaagggattgttgaaggttgtcggcaatcggaatgtgctctcttagggggagagactgcagagatgcctgacttttatgcagagggcgaatacgatctcagtgggtttgcagtaggcatagtaaagaaaacttcagttatcaacggcaaaaacattgtggccggtgatgttcttattggcctcccgtctagtggtgttcattccaatggtttttctctagtaagaagggtattggctcgaagcaatctttcgctgaatgatgcgcttccaggtggatcaagtacccttggtgatgctctaatggcacccactgtcatttacgtgaaacaggtacttgatatgatagaaaaaggaggagtgaaaggtttagctcatatcacaggcggaggtttcacagacaacattccccgagtcttcccggatggtttgggtgctgttattcacaccgatacttgggaacttccaccgttgttcaagtggattcaacagactgggagaatagaagacagtgagatgagaaggacgtttaacctggggatagggatggttatggtggttagtccagaggcagcttcacgaatactagaagaagtcaagaatggagactatgttgcgtatcgcgtaggagaggttgtcaacggtgaaggcgtaagctatcagtagagtgttgtgtgttcttttttcttctgtgtttggtttcccaccgtttttaagaattaatccatttgtctacggttttatgaggttacaaacgagatgaggcagtttttaaaacatcgtgttattatttgatctaattttataaaaacaaccaatttatttggcctggtct

SEQ ID NO: 27489 - protein, 413 aa, Arabidopsis thaliana
  peptide (1)..(413): Ceres Seq. ID no. 12338292
  misc_feature (246)..(413): Pfam Name: AIR synthase related protein, C-terminal domain Pfam Description: AIR synthase related protein, C-terminal domain
  misc_feature (84)..(409): Homolog of NCBI NO: 23029993 NR Description: hypothetical protein [Microbulbifer degradans
  misc_feature (89)..(413): Homolog of NCBI NO: 15677123 NR Description: phosphoribosylformylglycinamidine cyclo-ligase
  misc_feature (90)..(404): Homolog of NCBI NO: 22976704 NR Description: hypothetical protein [Ralstonia metallidurans]
  misc_feature (89)..(413): Homolog of NCBI NO: 15794333 NR Description: putative phosphoribosylformylglycinamidine
  misc_feature (90)..(404): Homolog of NCBI NO: 17547342 NR Description: PROBABLE PHOSPHORIBOSYLFORMYLGLYCINAMIDINE
  misc_feature (86)..(413): Homolog of NCBI NO: 34499070 NR Description: phosphoribosylformylglycinamidine cyclo-ligase
  misc_feature (68)..(412): Homolog of NCBI NO: 34897250 NR Description: putative 5'-phosphoribosyl-5-aminoimidazole
  misc_feature (72)..(412): Homolog of NCBI NO: 1709925 NR Description: Phosphoribosylformylglycinamidine cyclo-ligase, precursor (AIRS) (Phosphoribosyl-aminoimidazole synthetase) (AIR
  misc_feature (61)..(368): Homolog of NCBI NO: 541885 NR Description: phosphoribosylformylglycinamidine cyclo-ligase
  misc_feature (61)..(413): Homolog of NCBI NO: 15233161 NR Description: phosphoribosylformylglycinamidine cyclo-ligase
KKLSKLLKSLPFPASLFSVSFCLPHGSSDFAVFFFLLFVSLHCQSIPVLFCVISETFLRHFAQTTRTRTRVLSMSKKDGRTDKDDDTDSLNYKDSGVDIDAGAELVKRIAKMAPGIGGFGGLFPLGDSYLVAGTDGVGTKLKLAFETGIHDTIGIDLVAMSVNDIITSGAKPLFFLDYFATSRLDVDLAEKVIKGIVEGCRQSECALLGGETAEMPDFYAEGEYDLSGFAVGIVKKTSVINGKNIVAGDVLIGLPSSGVHSNGFSLVRRVLARSNLSLNDALPGGSSTLGDALMAPTVIYVKQVLDMIEKGGVKGLAHITGGGFTDNIPRVFPDGLGAVIHTDTWELPPLFKWIQQTGRIEDSEMRRTFNLGIGMVMVVSPEAASRILEEVKNGDYVAYRVGEVVNGEGVSYQ

SEQ ID NO: 27490 - protein, 340 aa, Arabidopsis thaliana
  peptide (1)..(340): Ceres Seq. ID no. 12338293
  misc_feature (173)..(340): Pfam Name: AIR synthase related protein, C-terminal domain Pfam Description: AIR synthase related protein, C-terminal domain
  misc_feature (11)..(336): Homolog of NCBI NO: 23029993 NR Description: hypothetical protein [Microbulbifer degradans
  misc_feature (16)..(340): Homolog of NCBI NO: 15677123 NR Description: phosphoribosylformylglycinamidine cyclo-ligase
  misc_feature (17)..(331): Homolog of NCBI NO: 22976704 NR Description: hypothetical protein [Ralstonia metallidurans]
  misc_feature (16)..(340): Homolog of NCBI NO: 15794333 NR Description: putative phosphoribosylformylglycinamidine
  misc_feature (17)..(331): Homolog of NCBI NO: 17547342 NR Description: PROBABLE PHOSPHORIBOSYLFORMYLGLYCINAMIDINE
  misc_feature (13)..(340): Homolog of NCBI NO: 34499070 NR Description: phosphoribosylformylglycinamidine cyclo-ligase
  misc_feature (1)..(339): Homolog of NCBI NO: 34897250 NR Description: putative 5'-phosphoribosyl-5-aminoimidazole
  misc_feature (1)..(339): Homolog of NCBI NO: 1709925 NR Description: Phosphoribosylformylglycinamidine cyclo-ligase, precursor (AIRS) (Phosphoribosyl-aminoimidazole synthetase) (AIR
  misc_feature (1)..(295): Homolog of NCBI NO: 541885 NR Description: phosphoribosylformylglycinamidine cyclo-ligase
  misc_feature (1)..(340): Homolog of NCBI NO: 15233161 NR Description: phosphoribosylformylglycinamidine cyclo-ligase
MSKKDGRTDKDDDTDSLNYKDSGVDIDAGAELVKRIAKMAPGIGGFGGLFPLGDSYLVAGTDGVGTKLKLAFETGIHDTIGIDLVAMSVNDIITSGAKPLFFLDYFATSRLDVDLAEKVIKGIVEGCRQSECALLGGETAEMPDFYAEGEYDLSGFAVGIVKKTSVINGKNIVAGDVLIGLPSSGVHSNGFSLVRRVLARSNLSLNDALPGGSSTLGDALMAPTVIYVKQVLDMIEKGGVKGLAHITGGGFTDNIPRVFPDGLGAVIHTDTWELPPLFKWIQQTGRIEDSEMRRTFNLGIGMVMVVSPEAASRILEEVKNGDYVAYRVGEVVNGEGVSYQ

SEQ ID NO: 27491 - protein, 302 aa, Arabidopsis thaliana
  peptide (1)..(302): Ceres Seq. ID no. 12338294
  misc_feature (135)..(302): Pfam Name: AIR synthase related protein, C-terminal domain Pfam Description: AIR synthase related protein, C-terminal domain
  misc_feature (1)..(302): Homolog of NCBI NO: 15677123 NR Description: phosphoribosylformylglycinamidine cyclo-ligase
  misc_feature (1)..(293): Homolog of NCBI NO: 22976704 NR Description: hypothetical protein [Ralstonia metallidurans]
  misc_feature (1)..(302): Homolog of NCBI NO: 15794333 NR Description: putative phosphoribosylformylglycinamidine
  misc_feature (1)..(293): Homolog of NCBI NO: 17547342 NR Description: PROBABLE PHOSPHORIBOSYLFORMYLGLYCINAMIDINE
  misc_feature (1)..(302): Homolog of NCBI NO: 34499070 NR Description: phosphoribosylformylglycinamidine cyclo-ligase
  misc_feature (1)..(298): Homolog of NCBI NO: 23029993 NR Description: hypothetical protein [Microbulbifer degradans
  misc_feature (1)..(301): Homolog of NCBI NO: 34897250 NR Description: putative 5'-phosphoribosyl-5-aminoimidazole
  misc_feature (1)..(301): Homolog of NCBI NO: 1709925 NR Description: Phosphoribosylformylglycinamidine cyclo-ligase, precursor (AIRS) (Phosphoribosyl-aminoimidazole synthetase) (AIR
  misc_feature (1)..(257): Homolog of NCBI NO: 541885 NR Description: phosphoribosylformylglycinamidine cyclo-ligase
  misc_feature (1)..(302): Homolog of NCBI NO: 15233161 NR Description: phosphoribosylformylglycinamidine cyclo-ligase
MAPGIGGFGGLFPLGDSYLVAGTDGVGTKLKLAFETGIHDTIGIDLVAMSVNDIITSGAKPLFFLDYFATSRLDVDLAEKVIKGIVEGCRQSECALLGGETAEMPDFYAEGEYDLSGFAVGIVKKTSVINGKNIVAGDVLIGLPSSGVHSNGFSLVRRVLARSNLSLNDALPGGSSTLGDALMAPTVIYVKQVLDMIEKGGVKGLAHITGGGFTDNIPRVFPDGLGAVIHTDTWELPPLFKWIQQTGRIEDSEMRRTFNLGIGMVMVVSPEAASRILEEVKNGDYVAYRVGEVVNGEGVSYQ

SEQ ID NO: 27492 - DNA, 1157 bp, Arabidopsis thaliana
  misc_feature (1)..(1157): Ceres Seq. ID no. 12715883
  misc_feature: MA Experiment ID: 108434 Result: Up-regulated in Transcription
  misc_feature: MA Experiment 108434 PARAMETER Experiment Name: At_Root_Tips_cDNA_P Parameter: Tissue Value: Root Tips
  misc_feature: MA Experiment ID: 108595 Result: Down-regulated in Transcription
  misc_feature: MA Experiment 108595 PARAMETER Experiment Name: At_Ler-pi_Ovule_cDNA_P Parameter: Plant Line Value: null
  misc_feature: MA Experiment ID: 20000069 Result: Down-regulated in Transcription
  misc_feature: MA Experiment 20000069 PARAMETER Experiment Name: At_100uM_ABA_Mutants_cDNA_P Parameter: Plant Line Value: CS23
  misc_feature: MA Experiment 20000069 PARAMETER Experiment Name: At_100uM_ABA_Mutants_cDNA_P Parameter: Timepoint (hr) Value: 6
  misc_feature: MA Experiment 20000069 PARAMETER Experiment Name: At_100uM_ABA_Mutants_cDNA_P Parameter: Tissue Value: Aerial
  misc_feature: MA Experiment 20000069 PARAMETER Experiment Name: At_100uM_ABA_Mutants_cDNA_P Parameter: Treatment Value: 100uM ABA vs. No Treatment
  misc_feature: MA Experiment ID: 20000090 Result: Down-regulated in Transcription
  misc_feature: MA Experiment ID: 20000117 Result: Down-regulated in Transcription
  misc_feature: MA Experiment 20000117 PARAMETER Experiment Name: At_100uM_ABA_Mutants_cDNA_P Parameter: Plant Line Value: Columbia
  misc_feature: MA Experiment 20000117 PARAMETER Experiment Name: At_100uM_ABA_Mutants_cDNA_P Parameter: Timepoint (hr) Value: 6
  misc_feature: MA Experiment 20000117 PARAMETER Experiment Name: At_100uM_ABA_Mutants_cDNA_P Parameter: Tissue Value: Aerial
  misc_feature: MA Experiment 20000117 PARAMETER Experiment Name: At_100uM_ABA_Mutants_cDNA_P Parameter: Treatment Value: 100uM ABA vs. No Treatment
  misc_feature: MA Experiment ID: 20000438 Result: Up-regulated in Transcription
  misc_feature: MA Experiment 20000438 PARAMETER Experiment Name: At_Shoots__P Parameter: Age (day) Value: 14
  misc_feature: MA Experiment 20000438 PARAMETER Experiment Name: At_Shoots__P Parameter: Tissue Value: Shoots vs. Whole Plant
  misc_feature: MA Experiment ID: 20000573 Result: Down-regulated in Transcription
  misc_feature: MA Experiment 20000573 PARAMETER Experiment Name: At_100uM_ABA_Mutants__P Parameter: Organism Value: A. thaliana
  misc_feature: MA Experiment 20000573 PARAMETER Experiment Name: At_100uM_ABA_Mutants__P Parameter: Plant Line Value: CS22 vs. Ler wt
  misc_feature: MA Experiment 20000573 PARAMETER Experiment Name: At_100uM_ABA_Mutants__P Parameter: Timepoint (hr) Value: N/A
  misc_feature: MA Experiment 20000573 PARAMETER Experiment Name: At_100uM_ABA_Mutants__P Parameter: Tissue Value: Whole Plant
  misc_feature: MA Experiment 20000573 PARAMETER Experiment Name: At_100uM_ABA_Mutants__P Parameter: Treatment Value: None
  misc_feature: MA Experiment ID: 20001911 Result: Down-regulated in Transcription
  misc_feature: MA Experiment 20001911 PARAMETER Experiment Name: At_Drought_Reproduction_P Parameter: Age (day) Value: 40
  misc_feature: MA Experiment 20001911 PARAMETER Experiment Name: At_Drought_Reproduction_P Parameter: Organism Value: A. thaliana
  misc_feature: MA Experiment 20001911 PARAMETER Experiment Name: At_Drought_Reproduction_P Parameter: Plant Line Value: WS
  misc_feature: MA Experiment 20001911 PARAMETER Experiment Name: At_Drought_Reproduction_P Parameter: Timepoint (day) Value: 10
  misc_feature: MA Experiment 20001911 PARAMETER Experiment Name: At_Drought_Reproduction_P Parameter: Tissue Value: Flowers
  misc_feature: MA Experiment 20001911 PARAMETER Experiment Name: At_Drought_Reproduction_P Parameter: Treatment Value: Drought vs. No Drought
cttcttgttttttcagatgaacactcttcagatgccttgtgccttattgatccagattcgaagtacccaactttactctctagacctttttcatggcagccactcccacacacttctctgtctcccatgatcctttttcttccacgtctctccttaatctccaaactcaagcgatctttggtcccaatcacagtttaaagacaacccagttgagaattccagcttctttcagaagaaaagctacaaacttgcaagtgatggcttcaggaaagacacctggactgactcaggaagctaatggggttgcaattgatagacaaaacaacactgatgtatttgacgacatgaaacagcggttcctggccttcaagaagcttaagtacatggatgactttgaacactacaaaaatctggcagatgctcaagctccaaagtttctggtgattgcttgtgcagactctagagtttgtccttctgctgtcctgggattccaaccgggtgacgcattcactgttcgtaacattgcaaatttagtacctccatatgagtctggacctactgaaaccaaagctgctctagagttctctgtgaatactcttaatgtggaaaacatcttagtcattggtcatagccggtgtggaggaattcaagctttaatgaaaatggaagacgaaggagattccagaagtttcatacacaactgggtagttgtgggaaagaaggcaaaggaaagcacaaaagctgttgcttcaaacctccattttgatcatcagtgccaacattgtgaaaaggcatcgataaatcattcattagaaaggctgcttgggtacccgtggatagaagagaaagtgcggcaaggttcactgtctctccatggtggatactataattttgttgattgtacgttcgagaaatggacagtggattatgcagcaagcagaggtaagaagaaggaaggcagtggaatcgctgttaaagaccggtcagtttggtcttgacttacgactatctcaatcttcatagagttttttttcataatttatagagaaacatcaaaccccttttggttgggattatcatgtgtttgttccacttgtgtgttgaagtcattttccttcttctgtcttattgaggcagggactaatgtttgttttatc

SEQ ID NO: 27493 - protein, 301 aa, Arabidopsis thaliana
  peptide (1)..(301): Ceres Seq. ID no. 12715884
  misc_feature (108)..(276): Pfam Name: Carbonic anhydrase Pfam Description: Carbonic anhydrase
  misc_feature (49)..(279): Homolog of NCBI NO: 15220853 NR Description: putative carbonic anhydrase
  misc_feature (53)..(282): Homolog of NCBI NO: 1168738 NR Description: CARBONIC ANHYDRASE 1 (CARBONATE DEHYDRATASE 1)
  misc_feature (56)..(279): Homolog of NCBI NO: 30698715 NR Description: carbonic anhydrase -related [Arabidopsis
  misc_feature (56)..(279): Homolog of NCBI NO: 15223141 NR Description: carbonic anhydrase, putative
  misc_feature (63)..(255): Homolog of NCBI NO: 30696219 NR Description: carbonic anhydrase -related [Arabidopsis thaliana]
  misc_feature (63)..(255): Homolog of NCBI NO: 21539555 NR Description: putative carbonic anhydrase [Arabidopsis
  misc_feature (63)..(301): Homolog of NCBI NO: 25404198 NR Description: probable carbonic anhydrase T18I24.9
  misc_feature (63)..(301): Homolog of NCBI NO: 30696223 NR Description: carbonic anhydrase -related [Arabidopsis
  misc_feature (128)..(301): Homolog of NCBI NO: 7484832 NR Description: carbonate dehydratase homolog T16L1.70 -
  misc_feature (1)..(301): Homolog of NCBI NO: 18418245 NR Description: carbonate dehydratase - like protein
MAATPTHFSVSHDPFSSTSLLNLQTQAIFGPNHSLKTTQLRIPASFRRKATNLQVMASGKTPGLTQEANGVAIDRQNNTDVFDDMKQRFLAFKKLKYMDDFEHYKNLADAQAPKFLVIACADSRVCPSAVLGFQPGDAFTVRNIANLVPPYESGPTETKAALEFSVNTLNVENILVIGHSRCGGIQALMKMEDEGDSRSFIHNWVVVGKKAKESTKAVASNLHFDHQCQHCEKASINHSLERLLGYPWIEEKVRQGSLSLHGGYYNFVDCTFEKWTVDYAASRGKKKEGSGIAVKDRSVWS

SEQ ID NO: 27494 - protein, 246 aa, Arabidopsis thaliana
  peptide (1)..(246): Ceres Seq. ID no. 12715885
  misc_feature (53)..(221): Pfam Name: Carbonic anhydrase Pfam Description: Carbonic anhydrase
  misc_feature (1)..(224): Homolog of NCBI NO: 15220853 NR Description: putative carbonic anhydrase
  misc_feature (1)..(227): Homolog of NCBI NO: 1168738 NR Description: CARBONIC ANHYDRASE 1 (CARBONATE DEHYDRATASE 1)
  misc_feature (1)..(224): Homolog of NCBI NO: 30698715 NR Description: carbonic anhydrase -related [Arabidopsis
  misc_feature (1)..(224): Homolog of NCBI NO: 15223141 NR Description: carbonic anhydrase, putative
  misc_feature (8)..(200): Homolog of NCBI NO: 30696219 NR Description: carbonic anhydrase -related [Arabidopsis thaliana]
  misc_feature (8)..(200): Homolog of NCBI NO: 21539555 NR Description: putative carbonic anhydrase [Arabidopsis
  misc_feature (8)..(246): Homolog of NCBI NO: 25404198 NR Description: probable carbonic anhydrase T18I24.9
  misc_feature (8)..(246): Homolog of NCBI NO: 30696223 NR Description: carbonic anhydrase -related [Arabidopsis
  misc_feature (73)..(246): Homolog of NCBI NO: 7484832 NR Description: carbonate dehydratase homolog T16L1.70 -
  misc_feature (1)..(246): Homolog of NCBI NO: 18418245 NR Description: carbonate dehydratase - like protein
MASGKTPGLTQEANGVAIDRQNNTDVFDDMKQRFLAFKKLKYMDDFEHYKNLADAQAPKFLVIACADSRVCPSAVLGFQPGDAFTVRNIANLVPPYESGPTETKAALEFSVNTLNVENILVIGHSRCGGIQALMKMEDEGDSRSFIHNWVVVGKKAKESTKAVASNLHFDHQCQHCEKASINHSLERLLGYPWIEEKVRQGSLSLHGGYYNFVDCTFEKWTVDYAASRGKKKEGSGIAVKDRSVWS

SEQ ID NO: 27495 - protein, 217 aa, Arabidopsis thaliana
  peptide (1)..(217): Ceres Seq. ID no. 12715886
  misc_feature (24)..(192): Pfam Name: Carbonic anhydrase Pfam Description: Carbonic anhydrase
  misc_feature (1)..(195): Homolog of NCBI NO: 15220853 NR Description: putative carbonic anhydrase
  misc_feature (1)..(198): Homolog of NCBI NO: 1168738 NR Description: CARBONIC ANHYDRASE 1 (CARBONATE DEHYDRATASE 1)
  misc_feature (1)..(195): Homolog of NCBI NO: 30698715 NR Description: carbonic anhydrase -related [Arabidopsis
  misc_feature (1)..(195): Homolog of NCBI NO: 15223141 NR Description: carbonic anhydrase, putative
  misc_feature (1)..(171): Homolog of NCBI NO: 30696219 NR Description: carbonic anhydrase -related [Arabidopsis thaliana]
  misc_feature (1)..(171): Homolog of NCBI NO: 21539555 NR Description: putative carbonic anhydrase [Arabidopsis
  misc_feature (1)..(217): Homolog of NCBI NO: 25404198 NR Description: probable carbonic anhydrase T18I24.9
  misc_feature (1)..(217): Homolog of NCBI NO: 30696223 NR Description: carbonic anhydrase -related [Arabidopsis
  misc_feature (44)..(217): Homolog of NCBI NO: 7484832 NR Description: carbonate dehydratase homolog T16L1.70 -
  misc_feature (1)..(217): Homolog of NCBI NO: 18418245 NR Description: carbonate dehydratase - like protein
MKQRFLAFKKLKYMDDFEHYKNLADAQAPKFLVIACADSRVCPSAVLGFQPGDAFTVRNIANLVPPYESGPTETKAALEFSVNTLNVENILVIGHSRCGGIQALMKMEDEGDSRSFIHNWVVVGKKAKESTKAVASNLHFDHQCQHCEKASINHSLERLLGYPWIEEKVRQGSLSLHGGYYNFVDCTFEKWTVDYAASRGKKKEGSGIAVKDRSVWS

SEQ ID NO: 27496 - DNA, 1454 bp, Arabidopsis thaliana
  misc_feature (1)..(1454): Ceres Seq. ID no. 13489675
  misc_feature: MA Experiment ID: 108576 Result: Down-regulated in Transcription
  misc_feature: MA Experiment 108576 PARAMETER Experiment Name: At_42deg_Heat_cDNA_P Parameter: Temperature (deg C) Value: 42 vs. 22
  misc_feature: MA Experiment 108576 PARAMETER Experiment Name: At_42deg_Heat_cDNA_P Parameter: Timepoint (hr) Value: 1
  misc_feature: MA Experiment 108576 PARAMETER Experiment Name: At_42deg_Heat_cDNA_P Parameter: Tissue Value: Aerial
  misc_feature: MA Experiment ID: 108577 Result: Down-regulated in Transcription
  misc_feature: MA Experiment 108577 PARAMETER Experiment Name: At_42deg_Heat_cDNA_P Parameter: Temperature (deg C) Value: 42 vs. 22
  misc_feature: MA Experiment 108577 PARAMETER Experiment Name: At_42deg_Heat_cDNA_P Parameter: Timepoint (hr) Value: 6
  misc_feature: MA Experiment 108577 PARAMETER Experiment Name: At_42deg_Heat_cDNA_P Parameter: Tissue Value: Aerial
  misc_feature: MA Experiment ID: 20000144 Result: Down-regulated in Transcription
  misc_feature: MA Experiment 20000144 PARAMETER Experiment Name: At_42deg_Heat_cDNA_P Parameter: Temperature (deg C) Value: 42 vs. 22
  misc_feature: MA Experiment 20000144 PARAMETER Experiment Name: At_42deg_Heat_cDNA_P Parameter: Timepoint (hr) Value: 1
  misc_feature: MA Experiment 20000144 PARAMETER Experiment Name: At_42deg_Heat_cDNA_P Parameter: Tissue Value: Aerial
  misc_feature: MA Experiment ID: 20000180 Result: Up-regulated in Transcription
  misc_feature: MA Experiment 20000180 PARAMETER Experiment Name: At_Germinating_Seeds_P Parameter: Age (hr) Value: 24 vs. 0
  misc_feature: MA Experiment 20000180 PARAMETER Experiment Name: At_Germinating_Seeds_P Parameter: Tissue Value: Germinating Seeds
aaaaaaaaaaaaaataaatttttagggaaaaactttttagggaaaaactttttaggtccaaagatcgagagagaagagaagattttgaattttttttgttttataaagtttcgtcttaagcgatcgattttttgtgcgaaagattgaaactttttggtaagataattgtgttgtgtggttggatcgtggaggtgggtcttctttcgaatggcgcaacaagggcagggaagcatggaccctgccgctctcgatgatatcattcgtcgtttgttggattacagaaaccctaagcctggtaccaaacaggctatgctcaacgagtctgagatccgtcagctttgcatcgtctctagagagatttttcttcaacagcctaaccttcttgagctcgaagctcctatcaagatctgcggtgatattcatggacaatactcagatctattgaggctgtttgagtatggaggcttcccacctacagctaactatttattcttaggagattacgtagacaggggcaagcagagtttggagactatttgtcttctgcttgcttacaaaatcaaataccctgagaacttttttcttctaagaggaaaccacgaatgtgcttctattaacagaatctatggattctatgatgaatgtaaacgtcgattcagtgtgagactctggaaagtgtttacagattcttttaactgtctccctgttgctgctgttatagacgataagatattatgtatgcacggtggcctttctcccgatttgaccaacgtggaacagattaagaacattaagcgacctactgatgttcctgactctggtttgctctgtgatctgctttggtctgatccaagcaaagatgtcaaaggttgggggatgaatgaccgtggagtctcttacacgtttggccctgacaaagtcgcggagtttctaataaagaatgatatggatctcatctgccgtgcccaccaggttgtagaggatggatatgagtttttcgccgatagacagcttgttacgatattttctgctcccaactactgtggtgaatttgacaatgctggtgctatgatgagtgttgatgaaagtttaatgtgctctttccaaattcttaagcctgctgatcgaaagccccggttcttatgaagtaaagagttgaaacctcgcgggaaagaagaggaaaaaggcgatacgaaagcgggagagacatttgaagctccctgagactttgtccggaggccttgcaaaggcaaaaaaacataatttacatgttatattatcttatttgaactcttgccatttcttttctcaaaacactttatgttcttatgatcttctcctctgactctatatagacagtaaaaaaagtctgcaaattttcattctttttcaacaaccaatttcctcagtgtacatactaaattgttctgtatccatacacacatatacttggg

SEQ ID NO: 27497 - protein, 312 aa, Arabidopsis thaliana
  peptide (1)..(312): Ceres Seq. ID no. 13489676
  misc_feature (63)..(258): Pfam Name: Calcineurin-like phosphoesterase Pfam Description: Calcineurin-like phosphoesterase
  misc_feature (4)..(312): Homolog of NCBI NO: 7209508 NR Description: type 1 protein phosphatase-1 [Vicia faba]
  misc_feature (4)..(312): Homolog of NCBI NO: 15225576 NR Description: phosphoprotein phosphatase type 1 catalytic
  misc_feature (7)..(312): Homolog of NCBI NO: 1346764 NR Description: SERINE/THREONINE PROTEIN PHOSPHATASE PP1
  misc_feature (3)..(312): Homolog of NCBI NO: 11133831 NR Description: Serine/threonine protein phosphatase PP1 isozyme
  misc_feature (1)..(312): Homolog of NCBI NO: 11133833 NR Description: Serine/threonine protein phosphatase PP1 isozyme
  misc_feature (1)..(312): Homolog of NCBI NO: 5917726 NR Description: serine/threonine protein phosphatase 1; PP1
  misc_feature (9)..(311): Homolog of NCBI NO: 21592807 NR Description: phosphoprotein phosphatase [Arabidopsis thaliana]
  misc_feature (1)..(311): Homolog of NCBI NO: 15232651 NR Description: phosphoprotein phosphatase 1, PP1 [Arabidopsis
  misc_feature (1)..(312): Homolog of NCBI NO: 99751 NR Description: phosphoprotein phosphatase (EC 3.1.3.16) 1A
  misc_feature (1)..(312): Homolog of NCBI NO: 15237829 NR Description: protein phosphatase 1A [Arabidopsis thaliana]
MAQQGQGSMDPAALDDIIRRLLDYRNPKPGTKQAMLNESEIRQLCIVSREIFLQQPNLLELEAPIKICGDIHGQYSDLLRLFEYGGFPPTANYLFLGDYVDRGKQSLETICLLLAYKIKYPENFFLLRGNHECASINRIYGFYDECKRRFSVRLWKVFTDSFNCLPVAAVIDDKILCMHGGLSPDLTNVEQIKNIKRPTDVPDSGLLCDLLWSDPSKDVKGWGMNDRGVSYTFGPDKVAEFLIKNDMDLICRAHQVVEDGYEFFADRQLVTIFSAPNYCGEFDNAGAMMSVDESLMCSFQILKPADRKPRFL

SEQ ID NO: 27498 - protein, 304 aa, Arabidopsis thaliana
  peptide (1)..(304): Ceres Seq. ID no. 13489677
  misc_feature (55)..(250): Pfam Name: Calcineurin-like phosphoesterase Pfam Description: Calcineurin-like phosphoesterase
  misc_feature (1)..(304): Homolog of NCBI NO: 7209508 NR Description: type 1 protein phosphatase-1 [Vicia faba]
  misc_feature (1)..(304): Homolog of NCBI NO: 15225576 NR Description: phosphoprotein phosphatase type 1 catalytic
  misc_feature (1)..(304): Homolog of NCBI NO: 1346764 NR Description: SERINE/THREONINE PROTEIN PHOSPHATASE PP1
  misc_feature (1)..(304): Homolog of NCBI NO: 11133831 NR Description: Serine/threonine protein phosphatase PP1 isozyme
  misc_feature (1)..(304): Homolog of NCBI NO: 11133833 NR Description: Serine/threonine protein phosphatase PP1 isozyme
  misc_feature (1)..(304): Homolog of NCBI NO: 5917726 NR Description: serine/threonine protein phosphatase 1; PP1
  misc_feature (1)..(303): Homolog of NCBI NO: 21592807 NR Description: phosphoprotein phosphatase [Arabidopsis thaliana]
  misc_feature (1)..(303): Homolog of NCBI NO: 15232651 NR Description: phosphoprotein phosphatase 1, PP1 [Arabidopsis
  misc_feature (1)..(304): Homolog of NCBI NO: 99751 NR Description: phosphoprotein phosphatase (EC 3.1.3.16) 1A
  misc_feature (1)..(304): Homolog of NCBI NO: 15237829 NR Description: protein phosphatase 1A [Arabidopsis thaliana]
MDPAALDDIIRRLLDYRNPKPGTKQAMLNESEIRQLCIVSREIFLQQPNLLELEAPIKICGDIHGQYSDLLRLFEYGGFPPTANYLFLGDYVDRGKQSLETICLLLAYKIKYPENFFLLRGNHECASINRIYGFYDECKRRFSVRLWKVFTDSFNCLPVAAVIDDKILCMHGGLSPDLTNVEQIKNIKRPTDVPDSGLLCDLLWSDPSKDVKGWGMNDRGVSYTFGPDKVAEFLIKNDMDLICRAHQVVEDGYEFFADRQLVTIFSAPNYCGEFDNAGAMMSVDESLMCSFQILKPADRKPRFL

SEQ ID NO: 27499 - protein, 278 aa, Arabidopsis thaliana
  peptide (1)..(278): Ceres Seq. ID no. 13489678
  misc_feature (29)..(224): Pfam Name: Calcineurin-like phosphoesterase Pfam Description: Calcineurin-like phosphoesterase
  misc_feature (1)..(278): Homolog of NCBI NO: 7209508 NR Description: type 1 protein phosphatase-1 [Vicia faba]
  misc_feature (1)..(278): Homolog of NCBI NO: 15225576 NR Description: phosphoprotein phosphatase type 1 catalytic
  misc_feature (1)..(278): Homolog of NCBI NO: 1346764 NR Description: SERINE/THREONINE PROTEIN PHOSPHATASE PP1
  misc_feature (1)..(278): Homolog of NCBI NO: 11133831 NR Description: Serine/threonine protein phosphatase PP1 isozyme
  misc_feature (1)..(278): Homolog of NCBI NO: 11133833 NR Description: Serine/threonine protein phosphatase PP1 isozyme
  misc_feature (1)..(278): Homolog of NCBI NO: 5917726 NR Description: serine/threonine protein phosphatase 1; PP1
  misc_feature (1)..(277): Homolog of NCBI NO: 21592807 NR Description: phosphoprotein phosphatase [Arabidopsis thaliana]
  misc_feature (1)..(277): Homolog of NCBI NO: 15232651 NR Description: phosphoprotein phosphatase 1, PP1 [Arabidopsis
  misc_feature (1)..(278): Homolog of NCBI NO: 99751 NR Description: phosphoprotein phosphatase (EC 3.1.3.16) 1A
  misc_feature (1)..(278): Homolog of NCBI NO: 15237829 NR Description: protein phosphatase 1A [Arabidopsis thaliana]
MLNESEIRQLCIVSREIFLQQPNLLELEAPIKICGDIHGQYSDLLRLFEYGGFPPTANYLFLGDYVDRGKQSLETICLLLAYKIKYPENFFLLRGNHECASINRIYGFYDECKRRFSVRLWKVFTDSFNCLPVAAVIDDKILCMHGGLSPDLTNVEQIKNIKRPTDVPDSGLLCDLLWSDPSKDVKGWGMNDRGVSYTFGPDKVAEFLIKNDMDLICRAHQVVEDGYEFFADRQLVTIFSAPNYCGEFDNAGAMMSVDESLMCSFQILKPADRKPRFL

SEQ ID NO: 27500 - DNA, 639 bp, Arabidopsis thaliana; identical to SEQ ID NO: 22252
  misc_feature (1)..(639): Ceres Seq. ID no. 13580410
  misc_feature: MA Experiment ID: 108434 Result: Up-regulated in Transcription
  misc_feature: MA Experiment 108434 PARAMETER Experiment Name: At_Root_Tips_cDNA_P Parameter: Tissue Value: Root Tips
  misc_feature: MA Experiment ID: 108461 Result: Up-regulated in Transcription
  misc_feature: MA Experiment 108461 PARAMETER Experiment Name: At_Germinating_Seeds_cDNA_P Parameter: Age (day) Value: 1 vs. 0
  misc_feature: MA Experiment 108461 PARAMETER Experiment Name: At_Germinating_Seeds_cDNA_P Parameter: Tissue Value: Germinating Seeds
  misc_feature: MA Experiment ID: 108462 Result: Up-regulated in Transcription
  misc_feature: MA Experiment 108462 PARAMETER Experiment Name: At_Germinating_Seeds_cDNA_P Parameter: Age (day) Value: 2 vs. 0
  misc_feature: MA Experiment 108462 PARAMETER Experiment Name: At_Germinating_Seeds_cDNA_P Parameter: Tissue Value: Germinating Seeds
  misc_feature: MA Experiment ID: 108473 Result: Down-regulated in Transcription
  misc_feature: MA Experiment 108473 PARAMETER Experiment Name: At_Drought_Flowers_cDNA_P Parameter: Timepoint (hr) Value: 7 d
  misc_feature: MA Experiment 108473 PARAMETER Experiment Name: At_Drought_Flowers_cDNA_P Parameter: Tissue Value: Flower
  misc_feature: MA Experiment 108473 PARAMETER Experiment Name: At_Drought_Flowers_cDNA_P Parameter: Treatment Value: Drought vs. No Drought
  misc_feature: MA Experiment ID: 20000069 Result: Down-regulated in Transcription
  misc_feature: MA Experiment 20000069 PARAMETER Experiment Name: At_100uM_ABA_Mutants_cDNA_P Parameter: Plant Line Value: CS23
  misc_feature: MA Experiment 20000069 PARAMETER Experiment Name: At_100uM_ABA_Mutants_cDNA_P Parameter: Timepoint (hr) Value: 6
  misc_feature: MA Experiment 20000069 PARAMETER Experiment Name: At_100uM_ABA_Mutants_cDNA_P Parameter: Tissue Value: Aerial
  misc_feature: MA Experiment 20000069 PARAMETER Experiment Name: At_100uM_ABA_Mutants_cDNA_P Parameter: Treatment Value: 100uM ABA vs. No Treatment
  misc_feature: MA Experiment ID: 20000111 Result: Down-regulated in Transcription
  misc_feature: MA Experiment 20000111 PARAMETER Experiment Name: At_42deg_Heat_cDNA_P Parameter: Temperature (deg C) Value: 42 vs. 22
  misc_feature: MA Experiment 20000111 PARAMETER Experiment Name: At_42deg_Heat_cDNA_P Parameter: Timepoint (hr) Value: 6
  misc_feature: MA Experiment 20000111 PARAMETER Experiment Name: At_42deg_Heat_cDNA_P Parameter: Tissue Value: Aerial
  misc_feature: MA Experiment ID: 20000112 Result: Down-regulated in Transcription
  misc_feature: MA Experiment 20000112 PARAMETER Experiment Name: At_42deg_Heat_cDNA_P Parameter: Temperature (deg C) Value: 42 vs. 22
  misc_feature: MA Experiment 20000112 PARAMETER Experiment Name: At_42deg_Heat_cDNA_P Parameter: Timepoint (hr) Value: 2
  misc_feature: MA Experiment 20000112 PARAMETER Experiment Name: At_42deg_Heat_cDNA_P Parameter: Tissue Value: Aerial
  misc_feature: MA Experiment ID: 20000113 Result: Down-regulated in Transcription
  misc_feature: MA Experiment 20000113 PARAMETER Experiment Name: At_42deg_Heat_cDNA_P Parameter: Temperature (deg C) Value: 42 vs. 22
  misc_feature: MA Experiment 20000113 PARAMETER Experiment Name: At_42deg_Heat_cDNA_P Parameter: Timepoint (hr) Value: 8
  misc_feature: MA Experiment 20000113 PARAMETER Experiment Name: At_42deg_Heat_cDNA_P Parameter: Tissue Value: Aerial
  misc_feature: MA Experiment ID: 20000117 Result: Down-regulated in Transcription
  misc_feature: MA Experiment 20000117 PARAMETER Experiment Name: At_100uM_ABA_Mutants_cDNA_P Parameter: Plant Line Value: Columbia
  misc_feature: MA Experiment 20000117 PARAMETER Experiment Name: At_100uM_ABA_Mutants_cDNA_P Parameter: Timepoint (hr) Value: 6
  misc_feature: MA Experiment 20000117 PARAMETER Experiment Name: At_100uM_ABA_Mutants_cDNA_P Parameter: Tissue Value: Aerial
  misc_feature: MA Experiment 20000117 PARAMETER Experiment Name: At_100uM_ABA_Mutants_cDNA_P Parameter: Treatment Value: 100uM ABA vs. No Treatment
  misc_feature: MA Experiment ID: 20000144 Result: Down-regulated in Transcription
  misc_feature: MA Experiment 20000144 PARAMETER Experiment Name: At_42deg_Heat_cDNA_P Parameter: Temperature (deg C) Value: 42 vs. 22
  misc_feature: MA Experiment 20000144 PARAMETER Experiment Name: At_42deg_Heat_cDNA_P Parameter: Timepoint (hr) Value: 1
  misc_feature: MA Experiment 20000144 PARAMETER Experiment Name: At_42deg_Heat_cDNA_P Parameter: Tissue Value: Aerial
  misc_feature: MA Experiment ID: 20000173 Result: Down-regulated in Transcription
  misc_feature: MA Experiment 20000173 PARAMETER Experiment Name: At_42deg_Heat_P Parameter: Age (day) Value: 14
  misc_feature: MA Experiment 20000173 PARAMETER Experiment Name: At_42deg_Heat_P Parameter: Organism Value: A. thaliana
  misc_feature: MA Experiment 20000173 PARAMETER Experiment Name: At_42deg_Heat_P Parameter: Plant Line Value: WS
  misc_feature: MA Experiment 20000173 PARAMETER Experiment Name: At_42deg_Heat_P Parameter: Temperature (deg C) Value: 42 vs. 22
  misc_feature: MA Experiment 20000173 PARAMETER Experiment Name: At_42deg_Heat_P Parameter: Timepoint (hr) Value: 6
  misc_feature: MA Experiment 20000173 PARAMETER Experiment Name: At_42deg_Heat_P Parameter: Tissue Value: Aerial
  misc_feature: MA Experiment ID: 20000179 Result: Up-regulated in Transcription
  misc_feature: MA Experiment 20000179 PARAMETER Experiment Name: At_Germinating_Seeds_P Parameter: Age (hr) Value: 6 vs. 0
  misc_feature: MA Experiment 20000179 PARAMETER Experiment Name: At_Germinating_Seeds_P Parameter: Tissue Value: Germinating Seeds
  misc_feature: MA Experiment ID: 20000180 Result: Up-regulated in Transcription
  misc_feature: MA Experiment 20000180 PARAMETER Experiment Name: At_Germinating_Seeds_P Parameter: Age (hr) Value: 24 vs. 0
  misc_feature: MA Experiment 20000180 PARAMETER Experiment Name: At_Germinating_Seeds_P Parameter: Tissue Value: Germinating Seeds
  misc_feature: MA Experiment ID: 20000227 Result: Up-regulated in Transcription
  misc_feature: MA Experiment 20000227 PARAMETER Experiment Name: At_Root-Tips-vs-Tops_P Parameter: Tissue Value: Root Tips vs. Root Tops
  misc_feature: MA Experiment ID: 20000234 Result: Up-regulated in Transcription
  misc_feature: MA Experiment 20000234 PARAMETER Experiment Name: At_Siliques_P Parameter: Age (day) Value: 21
  misc_feature: MA Experiment 20000234 PARAMETER Experiment Name: At_Siliques_P Parameter: Organism Value: A. thaliana
  misc_feature: MA Experiment 20000234 PARAMETER Experiment Name: At_Siliques_P Parameter: Plant Line Value: WS
  misc_feature: MA Experiment 20000234 PARAMETER Experiment Name: At_Siliques_P Parameter: Tissue Value: Less Than 5mm Siliques vs. Whole Plant
  misc_feature: MA Experiment ID: 20000264 Result: Up-regulated in Transcription
  misc_feature: MA Experiment 20000264 PARAMETER Experiment Name: At_Open_Flower_P Parameter: Age (day) Value: 21
  misc_feature: MA Experiment 20000264 PARAMETER Experiment Name: At_Open_Flower_P Parameter: Plant Line Value: WS
  misc_feature: MA Experiment 20000264 PARAMETER Experiment Name: At_Open_Flower_P Parameter: Tissue Value: Open Flower vs. Whole Plant
  misc_feature: MA Experiment ID: 20000265 Result: Up-regulated in Transcription
  misc_feature: MA Experiment 20000265 PARAMETER Experiment Name: At_Open_Flower_P Parameter: Age (day) Value: 21
  misc_feature: MA Experiment 20000265 PARAMETER Experiment Name: At_Open_Flower_P Parameter: Plant Line Value: WS
  misc_feature: MA Experiment 20000265 PARAMETER Experiment Name: At_Open_Flower_P Parameter: Tissue Value: Closed Flower vs. Whole Plant
  misc_feature: MA Experiment ID: 20000437 Result: Down-regulated in Transcription
  misc_feature: MA Experiment 20000437 PARAMETER Experiment Name: At_Drought_P Parameter: Age (day) Value: 8
  misc_feature: MA Experiment 20000437 PARAMETER Experiment Name: At_Drought_P Parameter: Organism Value: A. thaliana
  misc_feature: MA Experiment 20000437 PARAMETER Experiment Name: At_Drought_P Parameter: Plant Line Value: WS
  misc_feature: MA Experiment 20000437 PARAMETER Experiment Name: At_Drought_P Parameter: Timepoint (hr) Value: 24
  misc_feature: MA Experiment 20000437 PARAMETER Experiment Name: At_Drought_P Parameter: Tissue Value: Whole Plant
  misc_feature: MA Experiment 20000437 PARAMETER Experiment Name: At_Drought_P Parameter: Treatment Value: Drought vs. No Drought
  misc_feature: MA Experiment ID: 20000438 Result: Up-regulated in Transcription
  misc_feature: MA Experiment 20000438 PARAMETER Experiment Name: At_Shoots__P Parameter: Age (day) Value: 14
  misc_feature: MA Experiment 20000438 PARAMETER Experiment Name: At_Shoots__P Parameter: Tissue Value: Shoots vs. Whole Plant
  misc_feature: MA Experiment ID: 20000794 Result: Down-regulated in Transcription
  misc_feature: MA Experiment 20000794 PARAMETER Experiment Name: At_Petals_P Parameter: Age (day) Value: 23-25 days
  misc_feature: MA Experiment 20000794 PARAMETER Experiment Name: At_Petals_P Parameter: Plant Line Value: WS
  misc_feature: MA Experiment 20000794 PARAMETER Experiment Name: At_Petals_P Parameter: Tissue Value: Petals vs. Whole plant
  misc_feature: MA Experiment ID: 20001248 Result: Down-regulated in Transcription
  misc_feature: MA Experiment 20001248 PARAMETER Experiment Name: At_Far-red-induction_P Parameter: Age (day) Value: 7
  misc_feature: MA Experiment 20001248 PARAMETER Experiment Name: At_Far-red-induction_P Parameter: Light Value: Far-red vs. White
  misc_feature: MA Experiment 20001248 PARAMETER Experiment Name: At_Far-red-induction_P Parameter: Organism Value: A. thaliana
  misc_feature: MA Experiment 20001248 PARAMETER Experiment Name: At_Far-red-induction_P Parameter: Plant Line Value: Columbia
  misc_feature: MA Experiment 20001248 PARAMETER Experiment Name: At_Far-red-induction_P Parameter: Timepoint (hr) Value: 4
  misc_feature: MA Experiment 20001248 PARAMETER Experiment Name: At_Far-red-induction_P Parameter: Tissue Value: Whole Plant
  misc_feature: MA Experiment ID: 20001450 Result: Down-regulated in Transcription
  misc_feature: MA Experiment 20001450 PARAMETER Experiment Name: At_Far-red-induction_P Parameter: Age (day) Value: 7
  misc_feature: MA Experiment 20001450 PARAMETER Experiment Name: At_Far-red-induction_P Parameter: Light Value: Far-red vs. White
  misc_feature: MA Experiment 20001450 PARAMETER Experiment Name: At_Far-red-induction_P Parameter: Organism Value: A. thaliana
  misc_feature: MA Experiment 20001450 PARAMETER Experiment Name: At_Far-red-induction_P Parameter: Plant Line Value: Columbia
  misc_feature: MA Experiment 20001450 PARAMETER Experiment Name: At_Far-red-induction_P Parameter: Timepoint (hr) Value: 8
  misc_feature: MA Experiment 20001450 PARAMETER Experiment Name: At_Far-red-induction_P Parameter: Tissue Value: Whole Plant
  misc_feature: MA Experiment ID: 20001554 Result: Down-regulated in Transcription
  misc_feature: MA Experiment 20001554 PARAMETER Experiment Name: At_Drought_Soil_Dry_P Parameter: Age (day) Value: 21
  misc_feature: MA Experiment 20001554 PARAMETER Experiment Name: At_Drought_Soil_Dry_P Parameter: Organism Value: A. thaliana
  misc_feature: MA Experiment 20001554 PARAMETER Experiment Name: At_Drought_Soil_Dry_P Parameter: Plant Line Value: WS
  misc_feature: MA Experiment 20001554 PARAMETER Experiment Name: At_Drought_Soil_Dry_P Parameter: Post Timepoint (hr) Value: None
  misc_feature: MA Experiment 20001554 PARAMETER Experiment Name: At_Drought_Soil_Dry_P Parameter: Post-Treatment Value: None
  misc_feature: MA Experiment 20001554 PARAMETER Experiment Name: At_Drought_Soil_Dry_P Parameter: Timepoint (day) Value: 7
  misc_feature: MA Experiment 20001554 PARAMETER Experiment Name: At_Drought_Soil_Dry_P Parameter: Treatment Value: Drought vs. No Drought
  misc_feature: MA Experiment ID: 20001555 Result: Down-regulated in Transcription
  misc_feature: MA Experiment 20001555 PARAMETER Experiment Name: At_Drought_Soil_Dry_P Parameter: Age (day) Value: 24
  misc_feature: MA Experiment 20001555 PARAMETER Experiment Name: At_Drought_Soil_Dry_P Parameter: Organism Value: A. thaliana
  misc_feature: MA Experiment 20001555 PARAMETER Experiment Name: At_Drought_Soil_Dry_P Parameter: Plant Line Value: WS
  misc_feature: MA Experiment 20001555 PARAMETER Experiment Name: At_Drought_Soil_Dry_P Parameter: Post Timepoint (hr) Value: None
  misc_feature: MA Experiment 20001555 PARAMETER Experiment Name: At_Drought_Soil_Dry_P Parameter: Post-Treatment Value: None
  misc_feature: MA Experiment 20001555 PARAMETER Experiment Name: At_Drought_Soil_Dry_P Parameter: Timepoint (day) Value: 10
  misc_feature: MA Experiment 20001555 PARAMETER Experiment Name: At_Drought_Soil_Dry_P Parameter: Treatment Value: Drought vs. No Drought
  misc_feature: MA Experiment ID: 20001556 Result: Down-regulated in Transcription
  misc_feature: MA Experiment 20001556 PARAMETER Experiment Name: At_Drought_Soil_Dry_P Parameter: Age (day) Value: 26
  misc_feature: MA Experiment 20001556 PARAMETER Experiment Name: At_Drought_Soil_Dry_P Parameter: Organism Value: A. thaliana
  misc_feature: MA Experiment 20001556 PARAMETER Experiment Name: At_Drought_Soil_Dry_P Parameter: Plant Line Value: WS
  misc_feature: MA Experiment 20001556 PARAMETER Experiment Name: At_Drought_Soil_Dry_P Parameter: Post Timepoint (hr) Value: None
  misc_feature: MA Experiment 20001556 PARAMETER Experiment Name: At_Drought_Soil_Dry_P Parameter: Post-Treatment Value: None
  misc_feature: MA Experiment 20001556 PARAMETER Experiment Name: At_Drought_Soil_Dry_P Parameter: Timepoint (day) Value: 12
  misc_feature: MA Experiment 20001556 PARAMETER Experiment Name: At_Drought_Soil_Dry_P Parameter: Treatment Value: Drought vs. No Drought
  misc_feature: MA Experiment ID: 20001557 Result: Down-regulated in Transcription
  misc_feature: MA Experiment 20001557 PARAMETER Experiment Name: At_Drought_Soil_Dry_P Parameter: Age (day) Value: 27
  misc_feature: MA Experiment 20001557 PARAMETER Experiment Name: At_Drought_Soil_Dry_P Parameter: Organism Value: A. thaliana
  misc_feature: MA Experiment 20001557 PARAMETER Experiment Name: At_Drought_Soil_Dry_P Parameter: Plant Line Value: WS
  misc_feature: MA Experiment 20001557 PARAMETER Experiment Name: At_Drought_Soil_Dry_P Parameter: Post Timepoint (hr) Value: 3
  misc_feature: MA Experiment 20001557 PARAMETER Experiment Name: At_Drought_Soil_Dry_P Parameter: Post-Treatment Value: Re-Water vs. No Drought
  misc_feature: MA Experiment 20001557 PARAMETER Experiment Name: At_Drought_Soil_Dry_P Parameter: Timepoint (day) Value: 13
  misc_feature: MA Experiment 20001557 PARAMETER Experiment Name: At_Drought_Soil_Dry_P Parameter: Treatment Value: Drought vs. No Drought
  misc_feature: MA Experiment ID: 20001560 Result: Up-regulated in Transcription
  misc_feature: MA Experiment 20001560 PARAMETER Experiment Name: At_Drought_Soil_Dry_P Parameter: Age (day) Value: 28
  misc_feature: MA Experiment 20001560 PARAMETER Experiment Name: At_Drought_Soil_Dry_P Parameter: Organism Value: A. thaliana
  misc_feature: MA Experiment 20001560 PARAMETER Experiment Name: At_Drought_Soil_Dry_P Parameter: Plant Line Value: WS
  misc_feature: MA Experiment 20001560 PARAMETER Experiment Name: At_Drought_Soil_Dry_P Parameter: Post Timepoint (hr) Value: None
  misc_feature: MA Experiment 20001560 PARAMETER Experiment Name: At_Drought_Soil_Dry_P Parameter: Post-Treatment Value: None
  misc_feature: MA Experiment 20001560 PARAMETER Experiment Name: At_Drought_Soil_Dry_P Parameter: Timepoint (day) Value: 14
  misc_feature: MA Experiment 20001560 PARAMETER Experiment Name: At_Drought_Soil_Dry_P Parameter: Treatment Value: Drought vs. No Drought
  misc_feature: MA Experiment ID: 20001904 Result: Down-regulated in Transcription
  misc_feature: MA Experiment 20001904 PARAMETER Experiment Name: At_Drought_Reproduction_P Parameter: Age (day) Value: 37
  misc_feature: MA Experiment 20001904 PARAMETER Experiment Name: At_Drought_Reproduction_P Parameter: Organism Value: A. thaliana
  misc_feature: MA Experiment 20001904 PARAMETER Experiment Name: At_Drought_Reproduction_P Parameter: Plant Line Value: WS
  misc_feature: MA Experiment 20001904 PARAMETER Experiment Name: At_Drought_Reproduction_P Parameter: Timepoint (day) Value: 7
  misc_feature: MA Experiment 20001904 PARAMETER Experiment Name: At_Drought_Reproduction_P Parameter: Tissue Value: Rosettes
  misc_feature: MA Experiment 20001904 PARAMETER Experiment Name: At_Drought_Reproduction_P Parameter: Treatment Value: Drought vs. No Drought
  misc_feature: MA Experiment ID: 20001905 Result: Down-regulated in Transcription
  misc_feature: MA Experiment 20001905 PARAMETER Experiment Name: At_Drought_Reproduction_P Parameter: Age (day) Value: 40
  misc_feature: MA Experiment 20001905 PARAMETER Experiment Name: At_Drought_Reproduction_P Parameter: Organism Value: A. thaliana
  misc_feature: MA Experiment 20001905 PARAMETER Experiment Name: At_Drought_Reproduction_P Parameter: Plant Line Value: WS
  misc_feature: MA Experiment 20001905 PARAMETER Experiment Name: At_Drought_Reproduction_P Parameter: Timepoint (day) Value: 10
  misc_feature: MA Experiment 20001905 PARAMETER Experiment Name: At_Drought_Reproduction_P Parameter: Tissue Value: Rosettes
  misc_feature: MA Experiment 20001905 PARAMETER Experiment Name: At_Drought_Reproduction_P Parameter: Treatment Value: Drought vs. No Drought
  misc_feature: MA Experiment ID: 20001911 Result: Down-regulated in Transcription
  misc_feature: MA Experiment 20001911 PARAMETER Experiment Name: At_Drought_Reproduction_P Parameter: Age (day) Value: 40
  misc_feature: MA Experiment 20001911 PARAMETER Experiment Name: At_Drought_Reproduction_P Parameter: Organism Value: A. thaliana
  misc_feature: MA Experiment 20001911 PARAMETER Experiment Name: At_Drought_Reproduction_P Parameter: Plant Line Value: WS
  misc_feature: MA Experiment 20001911 PARAMETER Experiment Name: At_Drought_Reproduction_P Parameter: Timepoint (day) Value: 10
  misc_feature: MA Experiment 20001911 PARAMETER Experiment Name: At_Drought_Reproduction_P Parameter: Tissue Value: Flowers
  misc_feature: MA Experiment 20001911 PARAMETER Experiment Name: At_Drought_Reproduction_P Parameter: Treatment Value: Drought vs. No Drought

SEQ ID NO: 27501 - protein, 136 aa, Arabidopsis thaliana; identical to SEQ ID NO: 8709
  peptide (1)..(136): Ceres Seq. ID no. 13580411
  misc_feature (17)..(135): Pfam Name: Core histone H2A/H2B/H3/H4 Pfam Description: Core histone H2A/H2B/H3/H4
  misc_feature (17)..(135): Pfam Name: Core histone H2A/H2B/H3/H4 Pfam Description: Core histone H2A/H2B/H3/H4
  misc_feature (17)..(135): Pfam Name: Core histone H2A/H2B/H3/H4 Pfam Description: Core histone H2A/H2B/H3/H4
  misc_feature (1)..(136): Homolog of NCBI NO: 7305139 NR Description: histone 1, H3f; histone H3; histone gene complex
  misc_feature (1)..(136): Homolog of NCBI NO: 122070 NR Description: Histone H3
  misc_feature (1)..(136): Homolog of NCBI NO: 34876396 NR Description: similar to H3 histone family, member I [Rattus
  misc_feature (1)..(136): Homolog of NCBI NO: 37546835 NR Description: similar to histone protein Hist2h3c1 [Homo
  misc_feature (2)..(136): Homolog of NCBI NO: 122083 NR Description: Histone H3
  misc_feature (1)..(136): Homolog of NCBI NO: 7305139 NR Description: histone 1, H3f; histone H3; histone gene complex
  misc_feature (1)..(136): Homolog of NCBI NO: 34876396 NR Description: similar to H3 histone family, member I [Rattus
  misc_feature (2)..(136): Homolog of NCBI NO: 122083 NR Description: Histone H3
  misc_feature (2)..(136): Homolog of NCBI NO: 70753 NR Description: histone H3 - garden pea (tentative sequence)
  misc_feature (2)..(136): Homolog of NCBI NO: 122083 NR Description: Histone H3
  misc_feature (1)..(136): Homolog of NCBI NO: 37546835 NR Description: similar to histone protein Hist2h3c1 [Homo
  misc_feature (1)..(136): Homolog of NCBI NO: 34876396 NR Description: similar to H3 histone family, member I [Rattus
  misc_feature (1)..(136): Homolog of NCBI NO: 15232146 NR Description: histone H3 [Arabidopsis thaliana]
  misc_feature (1)..(136): Homolog of NCBI NO: 122087 NR Description: Histone H3
  misc_feature (1)..(136): Homolog of NCBI NO: 1362108 NR Description: histone H3 homolog - common tobacco
  misc_feature (1)..(136): Homolog of NCBI NO: 166384 NR Description: histone H3 (H3-1.1)
  misc_feature (2)..(136): Homolog of NCBI NO: 70753 NR Description: histone H3 - garden pea (tentative sequence)
  misc_feature (1)..(136): Homolog of NCBI NO: 122070 NR Description: Histone H3
  misc_feature (1)..(136): Homolog of NCBI NO: 7305139 NR Description: histone 1, H3f; histone H3; histone gene complex
  misc_feature (1)..(136): Homolog of NCBI NO: 15232146 NR Description: histone H3 [Arabidopsis thaliana]
  misc_feature (1)..(136): Homolog of NCBI NO: 122087 NR Description: Histone H3
  misc_feature (1)..(136): Homolog of NCBI NO: 1362108 NR Description: histone H3 homolog - common tobacco
  misc_feature (1)..(136): Homolog of NCBI NO: 166384 NR Description: histone H3 (H3-1.1)
  misc_feature (1)..(136): Homolog of NCBI NO: 37546835 NR Description: similar to histone protein Hist2h3c1 [Homo
  misc_feature (1)..(136): Homolog of NCBI NO: 122070 NR Description: Histone H3
  misc_feature (2)..(136): Homolog of NCBI NO: 70753 NR Description: histone H3 - garden pea (tentative sequence)
  misc_feature (1)..(136): Homolog of NCBI NO: 166384 NR Description: histone H3 (H3-1.1)
  misc_feature (1)..(136): Homolog of NCBI NO: 1362108 NR Description: histone H3 homolog - common tobacco
  misc_feature (1)..(136): Homolog of NCBI NO: 122087 NR Description: Histone H3
  misc_feature (1)..(136): Homolog of NCBI NO: 15232146 NR Description: histone H3 [Arabidopsis thaliana]

SEQ ID NO: 27502 - protein, 83 aa, Arabidopsis thaliana; identical to SEQ ID NO: 22254
  peptide (1)..(83): Ceres Seq. ID no. 13580412

SEQ ID NO: 27503 - DNA, 1383 bp, Arabidopsis thaliana
  misc_feature (1)..(1383): Ceres Seq. ID no. 12324185
  misc_feature: MA Experiment ID: 108434 Result: Down-regulated in Transcription
  misc_feature: MA Experiment 108434 PARAMETER Experiment Name: At_Root_Tips_cDNA_P Parameter: Tissue Value: Root Tips
  misc_feature: MA Experiment ID: 108463 Result: Up-regulated in Transcription
  misc_feature: MA Experiment 108463 PARAMETER Experiment Name: At_Germinating_Seeds_cDNA_P Parameter: Age (day) Value: 3 vs. 0
  misc_feature: MA Experiment 108463 PARAMETER Experiment Name: At_Germinating_Seeds_cDNA_P Parameter: Tissue Value: Germinating Seeds
  misc_feature: MA Experiment ID: 108473 Result: Down-regulated in Transcription
  misc_feature: MA Experiment 108473 PARAMETER Experiment Name: At_Drought_Flowers_cDNA_P Parameter: Timepoint (hr) Value: 7 d
  misc_feature: MA Experiment 108473 PARAMETER Experiment Name: At_Drought_Flowers_cDNA_P Parameter: Tissue Value: Flower
  misc_feature: MA Experiment 108473 PARAMETER Experiment Name: At_Drought_Flowers_cDNA_P Parameter: Treatment Value: Drought vs. No Drought
  misc_feature: MA Experiment ID: 108488 Result: Up-regulated in Transcription
  misc_feature: MA Experiment ID: 108489 Result: Down-regulated in Transcription
  misc_feature: MA Experiment ID: 108574 Result: Up-regulated in Transcription
  misc_feature: MA Experiment 108574 PARAMETER Experiment Name: At_Wounding__cDNA_P Parameter: Timepoint (hr) Value: 1
  misc_feature: MA Experiment 108574 PARAMETER Experiment Name: At_Wounding__cDNA_P Parameter: Tissue Value: Aerial
  misc_feature: MA Experiment 108574 PARAMETER Experiment Name: At_Wounding__cDNA_P Parameter: Treatment Value: Wounding vs. No Wounding
  misc_feature: MA Experiment ID: 108579 Result: Up-regulated in Transcription
  misc_feature: MA Experiment 108579 PARAMETER Experiment Name: At_4deg_Cold_cDNA_P Parameter: Temperature (deg C) Value: 4 vs. 22
  misc_feature: MA Experiment 108579 PARAMETER Experiment Name: At_4deg_Cold_cDNA_P Parameter: Timepoint (hr) Value: 6
  misc_feature: MA Experiment 108579 PARAMETER Experiment Name: At_4deg_Cold_cDNA_P Parameter: Tissue Value: Aerial
  misc_feature: MA Experiment ID: 108585 Result: Down-regulated in Transcription
  misc_feature: MA Experiment 108585 PARAMETER Experiment Name: At_5mM_NaNP_cDNA_P Parameter: Timepoint (hr) Value: 6
  misc_feature: MA Experiment 108585 PARAMETER Experiment Name: At_5mM_NaNP_cDNA_P Parameter: Tissue Value: Aerial
  misc_feature: MA Experiment 108585 PARAMETER Experiment Name: At_5mM_NaNP_cDNA_P Parameter: Treatment Value: null
  misc_feature: MA Experiment ID: 108607 Result: Up-regulated in Transcription
  misc_feature: MA Experiment 108607 PARAMETER Experiment Name: At_100uM_ABA_cDNA_P Parameter: Timepoint (hr) Value: 4
  misc_feature: MA Experiment 108607 PARAMETER Experiment Name: At_100uM_ABA_cDNA_P Parameter: Tissue Value: Aerial
  misc_feature: MA Experiment 108607 PARAMETER Experiment Name: At_100uM_ABA_cDNA_P Parameter: Treatment Value: 100uM ABA vs. No Treatment
  misc_feature: MA Experiment ID: 20000069 Result: Up-regulated in Transcription
  misc_feature: MA Experiment 20000069 PARAMETER Experiment Name: At_100uM_ABA_Mutants_cDNA_P Parameter: Plant Line Value: CS23
  misc_feature: MA Experiment 20000069 PARAMETER Experiment Name: At_100uM_ABA_Mutants_cDNA_P Parameter: Timepoint (hr) Value: 6
  misc_feature: MA Experiment 20000069 PARAMETER Experiment Name: At_100uM_ABA_Mutants_cDNA_P Parameter: Tissue Value: Aerial
  misc_feature: MA Experiment 20000069 PARAMETER Experiment Name: At_100uM_ABA_Mutants_cDNA_P Parameter: Treatment Value: 100uM ABA vs. No Treatment
  misc_feature: MA Experiment ID: 20000070 Result: Up-regulated in Transcription
  misc_feature: MA Experiment 20000070 PARAMETER Experiment Name: At_100uM_ABA_Mutants_cDNA_P Parameter: Plant Line Value: CS24
  misc_feature: MA Experiment 20000070 PARAMETER Experiment Name: At_100uM_ABA_Mutants_cDNA_P Parameter: Timepoint (hr) Value: 6
  misc_feature: MA Experiment 20000070 PARAMETER Experiment Name: At_100uM_ABA_Mutants_cDNA_P Parameter: Tissue Value: Aerial
  misc_feature: MA Experiment 20000070 PARAMETER Experiment Name: At_100uM_ABA_Mutants_cDNA_P Parameter: Treatment Value: 100uM ABA vs. No Treatment
  misc_feature: MA Experiment ID: 20000086 Result: Up-regulated in Transcription
  misc_feature: MA Experiment 20000086 PARAMETER Experiment Name: At_100uM_ABA_Mutants_cDNA_P Parameter: Plant Line Value: CS22
  misc_feature: MA Experiment 20000086 PARAMETER Experiment Name: At_100uM_ABA_Mutants_cDNA_P Parameter: Timepoint (hr) Value: 6
  misc_feature: MA Experiment 20000086 PARAMETER Experiment Name: At_100uM_ABA_Mutants_cDNA_P Parameter: Tissue Value: Aerial
  misc_feature: MA Experiment 20000086 PARAMETER Experiment Name: At_100uM_ABA_Mutants_cDNA_P Parameter: Treatment Value: 100uM ABA vs. No Treatment
  misc_feature: MA Experiment ID: 20000088 Result: Up-regulated in Transcription
  misc_feature: MA Experiment 20000088 PARAMETER Experiment Name: At_100uM_ABA_Mutants_cDNA_P Parameter: Plant Line Value: Landsberg
  misc_feature: MA Experiment 20000088 PARAMETER Experiment Name: At_100uM_ABA_Mutants_cDNA_P Parameter: Timepoint (hr) Value: 6
  misc_feature: MA Experiment 20000088 PARAMETER Experiment Name: At_100uM_ABA_Mutants_cDNA_P Parameter: Tissue Value: Aerial
  misc_feature: MA Experiment 20000088 PARAMETER Experiment Name: At_100uM_ABA_Mutants_cDNA_P Parameter: Treatment Value: 100uM ABA vs. No Treatment
  misc_feature: MA Experiment ID: 20000111 Result: Down-regulated in Transcription
  misc_feature: MA Experiment 20000111 PARAMETER Experiment Name: At_42deg_Heat_cDNA_P Parameter: Temperature (deg C) Value: 42 vs. 22
  misc_feature: MA Experiment 20000111 PARAMETER Experiment Name: At_42deg_Heat_cDNA_P Parameter: Timepoint (hr) Value: 6
  misc_feature: MA Experiment 20000111 PARAMETER Experiment Name: At_42deg_Heat_cDNA_P Parameter: Tissue Value: Aerial
  misc_feature: MA Experiment ID: 20000112 Result: Down-regulated in Transcription
  misc_feature: MA Experiment 20000112 PARAMETER Experiment Name: At_42deg_Heat_cDNA_P Parameter: Temperature (deg C) Value: 42 vs. 22
  misc_feature: MA Experiment 20000112 PARAMETER Experiment Name: At_42deg_Heat_cDNA_P Parameter: Timepoint (hr) Value: 2
  misc_feature: MA Experiment 20000112 PARAMETER Experiment Name: At_42deg_Heat_cDNA_P Parameter: Tissue Value: Aerial
  misc_feature: MA Experiment ID: 20000113 Result: Down-regulated in Transcription
  misc_feature: MA Experiment 20000113 PARAMETER Experiment Name: At_42deg_Heat_cDNA_P Parameter: Temperature (deg C) Value: 42 vs. 22
  misc_feature: MA Experiment 20000113 PARAMETER Experiment Name: At_42deg_Heat_cDNA_P Parameter: Timepoint (hr) Value: 8
  misc_feature: MA Experiment 20000113 PARAMETER Experiment Name: At_42deg_Heat_cDNA_P Parameter: Tissue Value: Aerial
  misc_feature: MA Experiment ID: 20000173 Result: Down-regulated in Transcription
  misc_feature: MA Experiment 20000173 PARAMETER Experiment Name: At_42deg_Heat_P Parameter: Age (day) Value: 14
  misc_feature: MA Experiment 20000173 PARAMETER Experiment Name: At_42deg_Heat_P Parameter: Organism Value: A. thaliana
  misc_feature: MA Experiment 20000173 PARAMETER Experiment Name: At_42deg_Heat_P Parameter: Plant Line Value: WS
  misc_feature: MA Experiment 20000173 PARAMETER Experiment Name: At_42deg_Heat_P Parameter: Temperature (deg C) Value: 42 vs. 22
  misc_feature: MA Experiment 20000173 PARAMETER Experiment Name: At_42deg_Heat_P Parameter: Timepoint (hr) Value: 6
  misc_feature: MA Experiment 20000173 PARAMETER Experiment Name: At_42deg_Heat_P Parameter: Tissue Value: Aerial
  misc_feature: MA Experiment ID: 20000184 Result: Down-regulated in Transcription
  misc_feature: MA Experiment 20000184 PARAMETER Experiment Name: At_Shoots__P Parameter: Age (day) Value: 7
  misc_feature: MA Experiment 20000184 PARAMETER Experiment Name: At_Shoots__P Parameter: Tissue Value: Shoots vs. Whole Plant
  misc_feature: MA Experiment ID: 20000185 Result: Down-regulated in Transcription
  misc_feature: MA Experiment 20000185 PARAMETER Experiment Name: At_Roots__P Parameter: Age (day) Value: 7 vs. 21
  misc_feature: MA Experiment 20000185 PARAMETER Experiment Name: At_Roots__P Parameter: Organism Value: A. thaliana
  misc_feature: MA Experiment 20000185 PARAMETER Experiment Name: At_Roots__P Parameter: Tissue Value: Roots vs. Whole Plant
  misc_feature: MA Experiment ID: 20000211 Result: Up-regulated in Transcription
  misc_feature: MA Experiment 20000211 PARAMETER Experiment Name: At_0.001percent_MeJA__P Parameter: Age (day) Value: 14
  misc_feature: MA Experiment 20000211 PARAMETER Experiment Name: At_0.001percent_MeJA__P Parameter: Organism Value: A. thaliana
  misc_feature: MA Experiment 20000211 PARAMETER Experiment Name: At_0.001percent_MeJA__P Parameter: Plant Line Value: WS
  misc_feature: MA Experiment 20000211 PARAMETER Experiment Name: At_0.001percent_MeJA__P Parameter: Timepoint (hr) Value: 1
  misc_feature: MA Experiment 20000211 PARAMETER Experiment Name: At_0.001percent_MeJA__P Parameter: Tissue Value: Aerial
  misc_feature: MA Experiment 20000211 PARAMETER Experiment Name: At_0.001percent_MeJA__P Parameter: Treatment Value: 0.001percent MeJA vs. No Treatment
  misc_feature: MA Experiment ID: 20000213 Result: Up-regulated in Transcription
  misc_feature: MA Experiment 20000213 PARAMETER Experiment Name: At_4deg_Cold_P Parameter: Timepoint (hr) Value: 2
  misc_feature: MA Experiment ID: 20000224 Result: Up-regulated in Transcription
  misc_feature: MA Experiment ID: 20000286 Result: Up-regulated in Transcription
  misc_feature: MA Experiment 20000286 PARAMETER Experiment Name: At_Open_Flower_P Parameter: Age (day) Value: 21
  misc_feature: MA Experiment 20000286 PARAMETER Experiment Name: At_Open_Flower_P Parameter: Plant Line Value: WS
  misc_feature: MA Experiment 20000286 PARAMETER Experiment Name: At_Open_Flower_P Parameter: Tissue Value: Half Open vs. Whole Plant
  misc_feature: MA Experiment ID: 20000308 Result: Up-regulated in Transcription
  misc_feature: MA Experiment 20000308 PARAMETER Experiment Name: At_100mM_NaCl__P Parameter: Age (day) Value: 17
  misc_feature: MA Experiment 20000308 PARAMETER Experiment Name: At_100mM_NaCl__P Parameter: Organism Value: A. thaliana
  misc_feature: MA Experiment 20000308 PARAMETER Experiment Name: At_100mM_NaCl__P Parameter: Plant Line Value: WS
  misc_feature: MA Experiment 20000308 PARAMETER Experiment Name: At_100mM_NaCl__P Parameter: Timepoint (hr) Value: 72
  misc_feature: MA Experiment 20000308 PARAMETER Experiment Name: At_100mM_NaCl__P Parameter: Tissue Value: Whole Plant
  misc_feature: MA Experiment 20000308 PARAMETER Experiment Name: At_100mM_NaCl__P Parameter: Treatment Value: 100mM NaCl vs. No Treatment
  misc_feature: MA Experiment ID: 20000437 Result: Down-regulated in Transcription
  misc_feature: MA Experiment 20000437 PARAMETER Experiment Name: At_Drought_P Parameter: Age (day) Value: 8
  misc_feature: MA Experiment 20000437 PARAMETER Experiment Name: At_Drought_P Parameter: Organism Value: A. thaliana
  misc_feature: MA Experiment 20000437 PARAMETER Experiment Name: At_Drought_P Parameter: Plant Line Value: WS
  misc_feature: MA Experiment 20000437 PARAMETER Experiment Name: At_Drought_P Parameter: Timepoint (hr) Value: 24
  misc_feature: MA Experiment 20000437 PARAMETER Experiment Name: At_Drought_P Parameter: Tissue Value: Whole Plant
  misc_feature: MA Experiment 20000437 PARAMETER Experiment Name: At_Drought_P Parameter: Treatment Value: Drought vs. No Drought
  misc_feature: MA Experiment ID: 20000439 Result: Down-regulated in Transcription
  misc_feature: MA Experiment 20000439 PARAMETER Experiment Name: At_Roots__P Parameter: Age (day) Value: 14 vs. 21
  misc_feature: MA Experiment 20000439 PARAMETER Experiment Name: At_Roots__P Parameter: Organism Value: A. thaliana
  misc_feature: MA Experiment 20000439 PARAMETER Experiment Name: At_Roots__P Parameter: Tissue Value: Roots vs. Whole Plant
  misc_feature: MA Experiment ID: 20000452 Result: Up-regulated in Transcription
  misc_feature: MA Experiment 20000452 PARAMETER Experiment Name: At_CS6879_Shoots-Roots_P Parameter: Age (day) Value: 14
  misc_feature: MA Experiment 20000452 PARAMETER Experiment Name: At_CS6879_Shoots-Roots_P Parameter: Organism Value: A. thaliana
  misc_feature: MA Experiment 20000452 PARAMETER Experiment Name: At_CS6879_Shoots-Roots_P Parameter: Plant Line Value: CS6879 vs. WS
  misc_feature: MA Experiment 20000452 PARAMETER Experiment Name: At_CS6879_Shoots-Roots_P Parameter: Tissue Value: Shoots
  misc_feature: MA Experiment ID: 20000527 Result: Down-regulated in Transcription
  misc_feature: MA Experiment 20000527 PARAMETER Experiment Name: At_10percent_PEG_P Parameter: Age (day) Value: 20
  misc_feature: MA Experiment 20000527 PARAMETER Experiment Name: At_10percent_PEG_P Parameter: Organism Value: A. thaliana
  misc_feature: MA Experiment 20000527 PARAMETER Experiment Name: At_10percent_PEG_P Parameter: Plant Line Value: WS
  misc_feature: MA Experiment 20000527 PARAMETER Experiment Name: At_10percent_PEG_P Parameter: Timepoint (day) Value: 20
  misc_feature: MA Experiment 20000527 PARAMETER Experiment Name: At_10percent_PEG_P Parameter: Tissue Value: Whole Plant
  misc_feature: MA Experiment 20000527 PARAMETER Experiment Name: At_10percent_PEG_P Parameter: Treatment Value: 10percent PEG vs. No Treatment
  misc_feature: MA Experiment ID: 20000573 Result: Up-regulated in Transcription
  misc_feature: MA Experiment 20000573 PARAMETER Experiment Name: At_100uM_ABA_Mutants__P Parameter: Organism Value: A. thaliana
  misc_feature: MA Experiment 20000573 PARAMETER Experiment Name: At_100uM_ABA_Mutants__P Parameter: Plant Line Value: CS22 vs. Ler wt
  misc_feature: MA Experiment 20000573 PARAMETER Experiment Name: At_100uM_ABA_Mutants__P Parameter: Timepoint (hr) Value: N/A
  misc_feature: MA Experiment 20000573 PARAMETER Experiment Name: At_100uM_ABA_Mutants__P Parameter: Tissue Value: Whole Plant
  misc_feature: MA Experiment 20000573 PARAMETER Experiment Name: At_100uM_ABA_Mutants__P Parameter: Treatment Value: None
  misc_feature: MA Experiment ID: 20001247 Result: Down-regulated in Transcription
  misc_feature: MA Experiment 20001247 PARAMETER Experiment Name: At_Far-red-induction_P Parameter: Age (day) Value: 7
  misc_feature: MA Experiment 20001247 PARAMETER Experiment Name: At_Far-red-induction_P Parameter: Light Value: Far-red vs. White
  misc_feature: MA Experiment 20001247 PARAMETER Experiment Name: At_Far-red-induction_P Parameter: Organism Value: A. thaliana
  misc_feature: MA Experiment 20001247 PARAMETER Experiment Name: At_Far-red-induction_P Parameter: Plant Line Value: Columbia
  misc_feature: MA Experiment 20001247 PARAMETER Experiment Name: At_Far-red-induction_P Parameter: Timepoint (hr) Value: 1
  misc_feature: MA Experiment 20001247 PARAMETER Experiment Name: At_Far-red-induction_P Parameter: Tissue Value: Whole Plant
  misc_feature: MA Experiment ID: 20001248 Result: Down-regulated in Transcription
  misc_feature: MA Experiment 20001248 PARAMETER Experiment Name: At_Far-red-induction_P Parameter: Age (day) Value: 7
  misc_feature: MA Experiment 20001248 PARAMETER Experiment Name: At_Far-red-induction_P Parameter: Light Value: Far-red vs. White
  misc_feature: MA Experiment 20001248 PARAMETER Experiment Name: At_Far-red-induction_P Parameter: Organism Value: A. thaliana
  misc_feature: MA Experiment 20001248 PARAMETER Experiment Name: At_Far-red-induction_P Parameter: Plant Line Value: Columbia
  misc_feature: MA Experiment 20001248 PARAMETER Experiment Name: At_Far-red-induction_P Parameter: Timepoint (hr) Value: 4
  misc_feature: MA Experiment 20001248 PARAMETER Experiment Name: At_Far-red-induction_P Parameter: Tissue Value: Whole Plant
  misc_feature: MA Experiment ID: 20001450 Result: Down-regulated in Transcription
  misc_feature: MA Experiment 20001450 PARAMETER Experiment Name: At_Far-red-induction_P Parameter: Age (day) Value: 7
  misc_feature: MA Experiment 20001450 PARAMETER Experiment Name: At_Far-red-induction_P Parameter: Light Value: Far-red vs. White
  misc_feature: MA Experiment 20001450 PARAMETER Experiment Name: At_Far-red-induction_P Parameter: Organism Value: A. thaliana
  misc_feature: MA Experiment 20001450 PARAMETER Experiment Name: At_Far-red-induction_P Parameter: Plant Line Value: Columbia
  misc_feature: MA Experiment 20001450 PARAMETER Experiment Name: At_Far-red-induction_P Parameter: Timepoint (hr) Value: 8
  misc_feature: MA Experiment 20001450 PARAMETER Experiment Name: At_Far-red-induction_P Parameter: Tissue Value: Whole Plant
  misc_feature: MA Experiment ID: 20001451 Result: Down-regulated in Transcription
  misc_feature: MA Experiment 20001451 PARAMETER Experiment Name: At_Far-red-induction_P Parameter: Age (day) Value: 7
  misc_feature: MA Experiment 20001451 PARAMETER Experiment Name: At_Far-red-induction_P Parameter: Light Value: Far-red vs. White
  misc_feature: MA Experiment 20001451 PARAMETER Experiment Name: At_Far-red-induction_P Parameter: Organism Value: A. thaliana
  misc_feature: MA Experiment 20001451 PARAMETER Experiment Name: At_Far-red-induction_P Parameter: Plant Line Value: Columbia
  misc_feature: MA Experiment 20001451 PARAMETER Experiment Name: At_Far-red-induction_P Parameter: Timepoint (hr) Value: 24
  misc_feature: MA Experiment 20001451 PARAMETER Experiment Name: At_Far-red-induction_P Parameter: Tissue Value: Whole Plant
  misc_feature: MA Experiment ID: 20001555 Result: Down-regulated in Transcription
  misc_feature: MA Experiment 20001555 PARAMETER Experiment Name: At_Drought_Soil_Dry_P Parameter: Age (day) Value: 24
  misc_feature: MA Experiment 20001555 PARAMETER Experiment Name: At_Drought_Soil_Dry_P Parameter: Organism Value: A. thaliana
  misc_feature: MA Experiment 20001555 PARAMETER Experiment Name: At_Drought_Soil_Dry_P Parameter: Plant Line Value: WS
  misc_feature: MA Experiment 20001555 PARAMETER Experiment Name: At_Drought_Soil_Dry_P Parameter: Post Timepoint (hr) Value: None
  misc_feature: MA Experiment 20001555 PARAMETER Experiment Name: At_Drought_Soil_Dry_P Parameter: Post-Treatment Value: None
  misc_feature: MA Experiment 20001555 PARAMETER Experiment Name: At_Drought_Soil_Dry_P Parameter: Timepoint (day) Value: 10
  misc_feature: MA Experiment 20001555 PARAMETER Experiment Name: At_Drought_Soil_Dry_P Parameter: Treatment Value: Drought vs. No Drought
  misc_feature: MA Experiment ID: 20001558 Result: Down-regulated in Transcription
  misc_feature: MA Experiment 20001558 PARAMETER Experiment Name: At_Drought_Soil_Dry_P Parameter: Age (day) Value: 27
  misc_feature: MA Experiment 20001558 PARAMETER Experiment Name: At_Drought_Soil_Dry_P Parameter: Organism Value: A. thaliana
  misc_feature: MA Experiment 20001558 PARAMETER Experiment Name: At_Drought_Soil_Dry_P Parameter: Plant Line Value: WS
  misc_feature: MA Experiment 20001558 PARAMETER Experiment Name: At_Drought_Soil_Dry_P Parameter: Post Timepoint (hr) Value: 6
  misc_feature: MA Experiment 20001558 PARAMETER Experiment Name: At_Drought_Soil_Dry_P Parameter: Post-Treatment Value: Re-Water vs. No Drought
  misc_feature: MA Experiment 20001558 PARAMETER Experiment Name: At_Drought_Soil_Dry_P Parameter: Timepoint (day) Value: 13
  misc_feature: MA Experiment 20001558 PARAMETER Experiment Name: At_Drought_Soil_Dry_P Parameter: Treatment Value: Drought vs. No Drought
  misc_feature: MA Experiment ID: 20001757 Result: Up-regulated in Transcription
  misc_feature: MA Experiment 20001757 PARAMETER Experiment Name: At_50mM_NH4NO3_L-to-H_P Parameter: Timepoint (hr) Value: 6
  misc_feature: MA Experiment 20001757 PARAMETER Experiment Name: At_50mM_NH4NO3_L-to-H_P Parameter: Tissue Value: Leaf
  misc_feature: MA Experiment 20001757 PARAMETER Experiment Name: At_50mM_NH4NO3_L-to-H_P Parameter: Treatment Value: 50mM NH4NO3 vs 100mM Mannitol
  misc_feature: MA Experiment ID: 20001774 Result: Up-regulated in Transcription
  misc_feature: MA Experiment 20001774 PARAMETER Experiment Name: At_Far-red-enriched-adult_P Parameter: Age (day) Value: 31
  misc_feature: MA Experiment 20001774 PARAMETER Experiment Name: At_Far-red-enriched-adult_P Parameter: Light Value: Far-red enriched vs. White
  misc_feature: MA Experiment 20001774 PARAMETER Experiment Name: At_Far-red-enriched-adult_P Parameter: Organism Value: A. thaliana
  misc_feature: MA Experiment 20001774 PARAMETER Experiment Name: At_Far-red-enriched-adult_P Parameter: Plant Line Value: Columbia
  misc_feature: MA Experiment 20001774 PARAMETER Experiment Name: At_Far-red-enriched-adult_P Parameter: Timepoint (hr) Value: 72
  misc_feature: MA Experiment 20001774 PARAMETER Experiment Name: At_Far-red-enriched-adult_P Parameter: Tissue Value: Aerial
  misc_feature: MA Experiment ID: 20001911 Result: Down-regulated in Transcription
  misc_feature: MA Experiment 20001911 PARAMETER Experiment Name: At_Drought_Reproduction_P Parameter: Age (day) Value: 40
  misc_feature: MA Experiment 20001911 PARAMETER Experiment Name: At_Drought_Reproduction_P Parameter: Organism Value: A. thaliana
  misc_feature: MA Experiment 20001911 PARAMETER Experiment Name: At_Drought_Reproduction_P Parameter: Plant Line Value: WS
  misc_feature: MA Experiment 20001911 PARAMETER Experiment Name: At_Drought_Reproduction_P Parameter: Timepoint (day) Value: 10
  misc_feature: MA Experiment 20001911 PARAMETER Experiment Name: At_Drought_Reproduction_P Parameter: Tissue Value: Flowers
  misc_feature: MA Experiment 20001911 PARAMETER Experiment Name: At_Drought_Reproduction_P Parameter: Treatment Value: Drought vs. No Drought
cgatttgcttctaccatatgtgaacaaagtgagagagttggacaataccacattatatgcttctcgaacactattcttcctcagcgatgatagcacattgaggcctgttgccattgagttaacttgtccaccaaatatcaacaagccccaatggaaacaagtcttcacgccaggctatgatgctacttcatgctggctatggaatctggctaagactcatgctatctctcatgacgccggttatcatcaacttatctcccattggttgaggactcatgcatgtacggagccatacataatagcggcaaatagacaactaagtgccatgcatcccatttataggcttttgcatcctcatttccgctacaccatggaaatcaacgctcgtgcacgccaaagtcttgtcaacggaggcggaatcattgagacttgtttctggcccgggaagtatgcattagagctaagttcagccgtctatggtaaactatggaggtttgaccaggaaggcttacccgcggatctcatcaaaagggggttggctgaggaagataagaccgcagaacatggagtacgtctgacgataccagactatccatttgcaaatgatggtctaatattgtgggatgcaattaaagaatgggtgacagactatgtgaaacattactatcctgatgaagaactgatcacatcggacgaggaactccaaggatggtggagtgaagtgcggaacataggccacggagacaagaaagacgaaccttggtggcctgtcctcaaaacacaagatgacttgattggtgtggtaactacgattgcatgggtcacctcaggtcaccatgcagctgtaaactttggacaacggataatggaggatactttcccaaccgaccaacgacaacaaggataagaatgccaaacggaagatccgacagatgaagccttaaaagagttctatgagtcgccagaaaaagtgttgctaagacatacccatcgcagaaacaggcgaccctagtgatggtcacgttggatcttttatcaacacattcacctgacgaagagtacattggagaacaacaagaagcatcttgggccaatgagcctgttatcaatgctgcatttgaaagattcaaaggcaagctccaatatctagaaggagtgatagatgagagaaacgtgaacattactctaaagaatagagctggagctggtgttgttaagtatgagcttttgaagcctacctctgagcatggtgttaccggaatgggtgttccttatagtatttctatttgatctatgcattttctttctcaaaaatgctttcattaattttctgtatctctgtcttcttgataaaatgaataaaacaaatgctcctttgtctcc

SEQ ID NO: 27504 - protein, 301 aa, Arabidopsis thaliana
  peptide (1)..(301): Ceres Seq. ID no. 12324186
  misc_feature (1)..(301): Pfam Name: Lipoxygenase Pfam Description: Lipoxygenase
  misc_feature (1)..(301): Homolog of NCBI NO: 5070257 NR Description: lipoxygenase [Oryza sativa]
  misc_feature (1)..(301): Homolog of NCBI NO: 7433160 NR Description: probable lipoxygenase (EC 1.13.11.12) CPRD46,
  misc_feature (1)..(301): Homolog of NCBI NO: 7433170 NR Description: probable lipoxygenase (EC 1.13.11.12) Lox2 -
  misc_feature (1)..(301): Homolog of NCBI NO: 7433169 NR Description: probable lipoxygenase (EC 1.13.11.12) (clone H1)
  misc_feature (1)..(301): Homolog of NCBI NO: 2826842 NR Description: loxc homologue [Lycopersicon pimpinellifolium]
  misc_feature (1)..(301): Homolog of NCBI NO: 7433168 NR Description: lipoxygenase (EC 1.13.11.12) loxC, chloroplast -
  misc_feature (1)..(301): Homolog of NCBI NO: 18461098 NR Description: lipoxygenase [Citrus jambhiri]
  misc_feature (1)..(301): Homolog of NCBI NO: 27372775 NR Description: lipoxygenase 2 [Brassica napus]
  misc_feature (1)..(301): Homolog of NCBI NO: 17065070 NR Description: lipoxygenase AtLOX2 [Arabidopsis thaliana]
  misc_feature (1)..(301): Homolog of NCBI NO: 18407921 NR Description: lipoxygenase AtLOX2
DLLLPYVNKVRELDNTTLYASRTLFFLSDDSTLRPVAIELTCPPNINKPQWKQVFTPGYDATSCWLWNLAKTHAISHDAGYHQLISHWLRTHACTEPYIIAANRQLSAMHPIYRLLHPHFRYTMEINARARQSLVNGGGIIETCFWPGKYALELSSAVYGKLWRFDQEGLPADLIKRGLAEEDKTAEHGVRLTIPDYPFANDGLILWDAIKEWVTDYVKHYYPDEELITSDEELQGWWSEVRNIGHGDKKDEPWWPVLKTQDDLIGVVTTIAWVTSGHHAAVNFGQRIMEDTFPTDQRQQG

SEQ ID NO: 27505 - protein, 193 aa, Arabidopsis thaliana
  peptide (1)..(193): Ceres Seq. ID no. 12324187
  misc_feature (1)..(193): Pfam Name: Lipoxygenase Pfam Description: Lipoxygenase
  misc_feature (1)..(193): Homolog of NCBI NO: 5070257 NR Description: lipoxygenase [Oryza sativa]
  misc_feature (1)..(193): Homolog of NCBI NO: 7433160 NR Description: probable lipoxygenase (EC 1.13.11.12) CPRD46,
  misc_feature (1)..(193): Homolog of NCBI NO: 7433170 NR Description: probable lipoxygenase (EC 1.13.11.12) Lox2 -
  misc_feature (1)..(193): Homolog of NCBI NO: 7433169 NR Description: probable lipoxygenase (EC 1.13.11.12) (clone H1)
  misc_feature (1)..(193): Homolog of NCBI NO: 2826842 NR Description: loxc homologue [Lycopersicon pimpinellifolium]
  misc_feature (1)..(193): Homolog of NCBI NO: 7433168 NR Description: lipoxygenase (EC 1.13.11.12) loxC, chloroplast -
  misc_feature (1)..(193): Homolog of NCBI NO: 18461098 NR Description: lipoxygenase [Citrus jambhiri]
  misc_feature (1)..(193): Homolog of NCBI NO: 27372775 NR Description: lipoxygenase 2 [Brassica napus]
  misc_feature (1)..(193): Homolog of NCBI NO: 17065070 NR Description: lipoxygenase AtLOX2 [Arabidopsis thaliana]
  misc_feature (1)..(193): Homolog of NCBI NO: 18407921 NR Description: lipoxygenase AtLOX2
MHPIYRLLHPHFRYTMEINARARQSLVNGGGIIETCFWPGKYALELSSAVYGKLWRFDQEGLPADLIKRGLAEEDKTAEHGVRLTIPDYPFANDGLILWDAIKEWVTDYVKHYYPDEELITSDEELQGWWSEVRNIGHGDKKDEPWWPVLKTQDDLIGVVTTIAWVTSGHHAAVNFGQRIMEDTFPTDQRQQG

SEQ ID NO: 27506 - protein, 178 aa, Arabidopsis thaliana
  peptide (1)..(178): Ceres Seq. ID no. 12324188
  misc_feature (1)..(178): Pfam Name: Lipoxygenase Pfam Description: Lipoxygenase
  misc_feature (1)..(178): Homolog of NCBI NO: 5070257 NR Description: lipoxygenase [Oryza sativa]
  misc_feature (1)..(178): Homolog of NCBI NO: 7433160 NR Description: probable lipoxygenase (EC 1.13.11.12) CPRD46,
  misc_feature (1)..(178): Homolog of NCBI NO: 7433170 NR Description: probable lipoxygenase (EC 1.13.11.12) Lox2 -
  misc_feature (1)..(178): Homolog of NCBI NO: 7433169 NR Description: probable lipoxygenase (EC 1.13.11.12) (clone H1)
  misc_feature (1)..(178): Homolog of NCBI NO: 2826842 NR Description: loxc homologue [Lycopersicon pimpinellifolium]
  misc_feature (1)..(178): Homolog of NCBI NO: 7433168 NR Description: lipoxygenase (EC 1.13.11.12) loxC, chloroplast -
  misc_feature (1)..(178): Homolog of NCBI NO: 18461098 NR Description: lipoxygenase [Citrus jambhiri]
  misc_feature (1)..(178): Homolog of NCBI NO: 27372775 NR Description: lipoxygenase 2 [Brassica napus]
  misc_feature (1)..(178): Homolog of NCBI NO: 17065070 NR Description: lipoxygenase AtLOX2 [Arabidopsis thaliana]
  misc_feature (1)..(178): Homolog of NCBI NO: 18407921 NR Description: lipoxygenase AtLOX2
MEINARARQSLVNGGGIIETCFWPGKYALELSSAVYGKLWRFDQEGLPADLIKRGLAEEDKTAEHGVRLTIPDYPFANDGLILWDAIKEWVTDYVKHYYPDEELITSDEELQGWWSEVRNIGHGDKKDEPWWPVLKTQDDLIGVVTTIAWVTSGHHAAVNFGQRIMEDTFPTDQRQQG

SEQ ID NO: 27507 - DNA, 973 bp, Arabidopsis thaliana
  misc_feature (1)..(973): Ceres Seq. ID no. 12333166
  misc_feature: MA Experiment ID: 108462 Result: Down-regulated in Transcription
  misc_feature: MA Experiment 108462 PARAMETER Experiment Name: At_Germinating_Seeds_cDNA_P Parameter: Age (day) Value: 2 vs. 0
  misc_feature: MA Experiment 108462 PARAMETER Experiment Name: At_Germinating_Seeds_cDNA_P Parameter: Tissue Value: Germinating Seeds
  misc_feature: MA Experiment ID: 108463 Result: Down-regulated in Transcription
  misc_feature: MA Experiment 108463 PARAMETER Experiment Name: At_Germinating_Seeds_cDNA_P Parameter: Age (day) Value: 3 vs. 0
  misc_feature: MA Experiment 108463 PARAMETER Experiment Name: At_Germinating_Seeds_cDNA_P Parameter: Tissue Value: Germinating Seeds
  misc_feature: MA Experiment ID: 108464 Result: Down-regulated in Transcription
  misc_feature: MA Experiment 108464 PARAMETER Experiment Name: At_Germinating_Seeds_cDNA_P Parameter: Age (day) Value: 4 vs. 0
  misc_feature: MA Experiment 108464 PARAMETER Experiment Name: At_Germinating_Seeds_cDNA_P Parameter: Tissue Value: Germinating Seeds
  misc_feature: MA Experiment ID: 108574 Result: Up-regulated in Transcription
  misc_feature: MA Experiment 108574 PARAMETER Experiment Name: At_Wounding__cDNA_P Parameter: Timepoint (hr) Value: 1
  misc_feature: MA Experiment 108574 PARAMETER Experiment Name: At_Wounding__cDNA_P Parameter: Tissue Value: Aerial
  misc_feature: MA Experiment 108574 PARAMETER Experiment Name: At_Wounding__cDNA_P Parameter: Treatment Value: Wounding vs. No Wounding
  misc_feature: MA Experiment ID: 108579 Result: Up-regulated in Transcription
  misc_feature: MA Experiment 108579 PARAMETER Experiment Name: At_4deg_Cold_cDNA_P Parameter: Temperature (deg C) Value: 4 vs. 22
  misc_feature: MA Experiment 108579 PARAMETER Experiment Name: At_4deg_Cold_cDNA_P Parameter: Timepoint (hr) Value: 6
  misc_feature: MA Experiment 108579 PARAMETER Experiment Name: At_4deg_Cold_cDNA_P Parameter: Tissue Value: Aerial
  misc_feature: MA Experiment ID: 108585 Result: Up-regulated in Transcription
  misc_feature: MA Experiment 108585 PARAMETER Experiment Name: At_5mM_NaNP_cDNA_P Parameter: Timepoint (hr) Value: 6
  misc_feature: MA Experiment 108585 PARAMETER Experiment Name: At_5mM_NaNP_cDNA_P Parameter: Tissue Value: Aerial
  misc_feature: MA Experiment 108585 PARAMETER Experiment Name: At_5mM_NaNP_cDNA_P Parameter: Treatment Value: null
  misc_feature: MA Experiment ID: 108594 Result: Up-regulated in Transcription
  misc_feature: MA Experiment 108594 PARAMETER Experiment Name: At_Ler-rhl_Root_cDNA_P Parameter: Plant Line Value: null
  misc_feature: MA Experiment ID: 108595 Result: Up-regulated in Transcription
  misc_feature: MA Experiment 108595 PARAMETER Experiment Name: At_Ler-pi_Ovule_cDNA_P Parameter: Plant Line Value: null
  misc_feature: MA Experiment ID: 108667 Result: Up-regulated in Transcription
  misc_feature: MA Experiment 108667 PARAMETER Experiment Name: At_2mM_SA_cDNA_P Parameter: Plant Line Value: WS
  misc_feature: MA Experiment 108667 PARAMETER Experiment Name: At_2mM_SA_cDNA_P Parameter: Timepoint (hr) Value: 1
  misc_feature: MA Experiment 108667 PARAMETER Experiment Name: At_2mM_SA_cDNA_P Parameter: Treatment Value: 2mM SA vs. No Treatment
  misc_feature: MA Experiment ID: 108668 Result: Up-regulated in Transcription
  misc_feature: MA Experiment 108668 PARAMETER Experiment Name: At_2mM_SA_cDNA_P Parameter: Plant Line Value: WS
  misc_feature: MA Experiment 108668 PARAMETER Experiment Name: At_2mM_SA_cDNA_P Parameter: Timepoint (hr) Value: 6
  misc_feature: MA Experiment 108668 PARAMETER Experiment Name: At_2mM_SA_cDNA_P Parameter: Treatment Value: 2mM SA vs. No Treatment
  misc_feature: MA Experiment ID: 20000180 Result: Down-regulated in Transcription
  misc_feature: MA Experiment 20000180 PARAMETER Experiment Name: At_Germinating_Seeds_P Parameter: Age (hr) Value: 24 vs. 0
  misc_feature: MA Experiment 20000180 PARAMETER Experiment Name: At_Germinating_Seeds_P Parameter: Tissue Value: Germinating Seeds
  misc_feature: MA Experiment ID: 20000224 Result: Up-regulated in Transcription
aatttatcttccagaaatagttgcattaattatctctgtgactctgtccccagtctccttcctcacagactgatccctctctctcccaaagttgcattaagttttaaactagtacaaagtctaagcttggagcttccactttgtgttctccttgaaaagtttttaccttttttcaatctctgttgttgatacacctgtaaagctcatattgcacacaaagtgttcgataaaatgcctagccgaaacaaaaattgcatataactgcttctgagaaaacaagtgaaagtatgttacggaacatgatgatgccttggaacagtagcgatcacaatgtagttggaatgttaacaaggcatttcgccacaaaaccaaaacccaagatgaaaccgattgagctgaacacaccaccggagcaaactcagacgataacccgagtgatctttgatattttgaaggatcatggacctctaaccattgctgaaacttgggatcgtgtcaaggaagtgggattaagagggctgacgagcaagcgtcacatgaagataatactaaggtggatgagagagagacagaagctgaagctgatatgtaaccatgttggtcctcacaagcaattcttgtacactacttggttcactaaacacaacccttcttctaaattccccaagttaccaccggaaaatctcacaggaaaatcctctggccaccctcctaaacttccctgagccgactctgttaagttttaaggctttgtttcttgaatcttcctcttacagttattaatgatcaccttagtaaaatcaatagcacatatatgtagcctgcatctgaagattccttgtctagattctcgtgacaattgaatatgaaaagacatgagatgaaagttgatgttgttacagttgaagaatgtgtaaatgatacaactgcataccagttggttaactttatgtatataatcgaaatttcacct

SEQ ID NO: 27508 - protein, 145 aa, Arabidopsis thaliana
  peptide (1)..(145): Ceres Seq. ID no. 12333167
  misc_feature (19)..(115): Homolog of NCBI NO: 27573361 NR Description: unknown protein [Oryza sativa (japonica
  misc_feature (10)..(132): Homolog of NCBI NO: 18410491 NR Description: expressed protein
  misc_feature (22)..(127): Homolog of NCBI NO: 38637563 NR Description: unknown protein [Oryza sativa (japonica
  misc_feature (7)..(145): Homolog of NCBI NO: 21594042 NR Description: unknown [Arabidopsis thaliana]
  misc_feature (1)..(145): Homolog of NCBI NO: 15239880 NR Description: putative protein
MLRNMMMPWNSSDHNVVGMLTRHFATKPKPKMKPIELNTPPEQTQTITRVIFDILKDHGPLTIAETWDRVKEVGLRGLTSKRHMKIILRWMRERQKLKLICNHVGPHKQFLYTTWFTKHNPSSKFPKLPPENLTGKSSGHPPKLP

SEQ ID NO: 27509 - protein, 141 aa, Arabidopsis thaliana
  peptide (1)..(141): Ceres Seq. ID no. 12333168
  misc_feature (15)..(111): Homolog of NCBI NO: 27573361 NR Description: unknown protein [Oryza sativa (japonica
  misc_feature (6)..(128): Homolog of NCBI NO: 18410491 NR Description: expressed protein
  misc_feature (18)..(123): Homolog of NCBI NO: 38637563 NR Description: unknown protein [Oryza sativa (japonica
  misc_feature (3)..(141): Homolog of NCBI NO: 21594042 NR Description: unknown [Arabidopsis thaliana]
  misc_feature (1)..(141): Homolog of NCBI NO: 15239880 NR Description: putative protein
MMMPWNSSDHNVVGMLTRHFATKPKPKMKPIELNTPPEQTQTITRVIFDILKDHGPLTIAETWDRVKEVGLRGLTSKRHMKIILRWMRERQKLKLICNHVGPHKQFLYTTWFTKHNPSSKFPKLPPENLTGKSSGHPPKLP

SEQ ID NO: 27510 - protein, 140 aa, Arabidopsis thaliana
  peptide (1)..(140): Ceres Seq. ID no. 12333169
  misc_feature (14)..(110): Homolog of NCBI NO: 27573361 NR Description: unknown protein [Oryza sativa (japonica
  misc_feature (5)..(127): Homolog of NCBI NO: 18410491 NR Description: expressed protein
  misc_feature (17)..(122): Homolog of NCBI NO: 38637563 NR Description: unknown protein [Oryza sativa (japonica
  misc_feature (2)..(140): Homolog of NCBI NO: 21594042 NR Description: unknown [Arabidopsis thaliana]
  misc_feature (1)..(140): Homolog of NCBI NO: 15239880 NR Description: putative protein
MMPWNSSDHNVVGMLTRHFATKPKPKMKPIELNTPPEQTQTITRVIFDILKDHGPLTIAETWDRVKEVGLRGLTSKRHMKIILRWMRERQKLKLICNHVGPHKQFLYTTWFTKHNPSSKFPKLPPENLTGKSSGHPPKLP

SEQ ID NO: 27511 - DNA, 1468 bp, Arabidopsis thaliana
  misc_feature (1)..(1468): Ceres Seq. ID no. 12385002
  misc_feature: MA Experiment ID: 108462 Result: Up-regulated in Transcription
  misc_feature: MA Experiment 108462 PARAMETER Experiment Name: At_Germinating_Seeds_cDNA_P Parameter: Age (day) Value: 2 vs. 0
  misc_feature: MA Experiment 108462 PARAMETER Experiment Name: At_Germinating_Seeds_cDNA_P Parameter: Tissue Value: Germinating Seeds
  misc_feature: MA Experiment ID: 108576 Result: Up-regulated in Transcription
  misc_feature: MA Experiment 108576 PARAMETER Experiment Name: At_42deg_Heat_cDNA_P Parameter: Temperature (deg C) Value: 42 vs. 22
  misc_feature: MA Experiment 108576 PARAMETER Experiment Name: At_42deg_Heat_cDNA_P Parameter: Timepoint (hr) Value: 1
  misc_feature: MA Experiment 108576 PARAMETER Experiment Name: At_42deg_Heat_cDNA_P Parameter: Tissue Value: Aerial
  misc_feature: MA Experiment ID: 108668 Result: Up-regulated in Transcription
  misc_feature: MA Experiment 108668 PARAMETER Experiment Name: At_2mM_SA_cDNA_P Parameter: Plant Line Value: WS
  misc_feature: MA Experiment 108668 PARAMETER Experiment Name: At_2mM_SA_cDNA_P Parameter: Timepoint (hr) Value: 6
  misc_feature: MA Experiment 108668 PARAMETER Experiment Name: At_2mM_SA_cDNA_P Parameter: Treatment Value: 2mM SA vs. No Treatment
  misc_feature: MA Experiment ID: 20000093 Result: Up-regulated in Transcription
  misc_feature: MA Experiment 20000093 PARAMETER Experiment Name: At_42deg_Heat_cDNA_P Parameter: Temperature (deg C) Value: 42 vs. 22
  misc_feature: MA Experiment 20000093 PARAMETER Experiment Name: At_42deg_Heat_cDNA_P Parameter: Timepoint (hr) Value: 0.5
  misc_feature: MA Experiment 20000093 PARAMETER Experiment Name: At_42deg_Heat_cDNA_P Parameter: Tissue Value: Aerial
  misc_feature: MA Experiment ID: 20000111 Result: Up-regulated in Transcription
  misc_feature: MA Experiment 20000111 PARAMETER Experiment Name: At_42deg_Heat_cDNA_P Parameter: Temperature (deg C) Value: 42 vs. 22
  misc_feature: MA Experiment 20000111 PARAMETER Experiment Name: At_42deg_Heat_cDNA_P Parameter: Timepoint (hr) Value: 6
  misc_feature: MA Experiment 20000111 PARAMETER Experiment Name: At_42deg_Heat_cDNA_P Parameter: Tissue Value: Aerial
  misc_feature: MA Experiment ID: 20000112 Result: Up-regulated in Transcription
  misc_feature: MA Experiment 20000112 PARAMETER Experiment Name: At_42deg_Heat_cDNA_P Parameter: Temperature (deg C) Value: 42 vs. 22
  misc_feature: MA Experiment 20000112 PARAMETER Experiment Name: At_42deg_Heat_cDNA_P Parameter: Timepoint (hr) Value: 2
  misc_feature: MA Experiment 20000112 PARAMETER Experiment Name: At_42deg_Heat_cDNA_P Parameter: Tissue Value: Aerial
  misc_feature: MA Experiment ID: 20000113 Result: Up-regulated in Transcription
  misc_feature: MA Experiment 20000113 PARAMETER Experiment Name: At_42deg_Heat_cDNA_P Parameter: Temperature (deg C) Value: 42 vs. 22
  misc_feature: MA Experiment 20000113 PARAMETER Experiment Name: At_42deg_Heat_cDNA_P Parameter: Timepoint (hr) Value: 8
  misc_feature: MA Experiment 20000113 PARAMETER Experiment Name: At_42deg_Heat_cDNA_P Parameter: Tissue Value: Aerial
  misc_feature: MA Experiment ID: 20000144 Result: Up-regulated in Transcription
  misc_feature: MA Experiment 20000144 PARAMETER Experiment Name: At_42deg_Heat_cDNA_P Parameter: Temperature (deg C) Value: 42 vs. 22
  misc_feature: MA Experiment 20000144 PARAMETER Experiment Name: At_42deg_Heat_cDNA_P Parameter: Timepoint (hr) Value: 1
  misc_feature: MA Experiment 20000144 PARAMETER Experiment Name: At_42deg_Heat_cDNA_P Parameter: Tissue Value: Aerial
  misc_feature: MA Experiment ID: 20000171 Result: Up-regulated in Transcription
  misc_feature: MA Experiment 20000171 PARAMETER Experiment Name: At_42deg_Heat_P Parameter: Age (day) Value: 14
  misc_feature: MA Experiment 20000171 PARAMETER Experiment Name: At_42deg_Heat_P Parameter: Organism Value: A. thaliana
  misc_feature: MA Experiment 20000171 PARAMETER Experiment Name: At_42deg_Heat_P Parameter: Plant Line Value: WS
  misc_feature: MA Experiment 20000171 PARAMETER Experiment Name: At_42deg_Heat_P Parameter: Temperature (deg C) Value: 42 vs. 22
  misc_feature: MA Experiment 20000171 PARAMETER Experiment Name: At_42deg_Heat_P Parameter: Timepoint (hr) Value: 1
  misc_feature: MA Experiment 20000171 PARAMETER Experiment Name: At_42deg_Heat_P Parameter: Tissue Value: Aerial
  misc_feature: MA Experiment ID: 20000173 Result: Up-regulated in Transcription
  misc_feature: MA Experiment 20000173 PARAMETER Experiment Name: At_42deg_Heat_P Parameter: Age (day) Value: 14
  misc_feature: MA Experiment 20000173 PARAMETER Experiment Name: At_42deg_Heat_P Parameter: Organism Value: A. thaliana
  misc_feature: MA Experiment 20000173 PARAMETER Experiment Name: At_42deg_Heat_P Parameter: Plant Line Value: WS
  misc_feature: MA Experiment 20000173 PARAMETER Experiment Name: At_42deg_Heat_P Parameter: Temperature (deg C) Value: 42 vs. 22
  misc_feature: MA Experiment 20000173 PARAMETER Experiment Name: At_42deg_Heat_P Parameter: Timepoint (hr) Value: 6
  misc_feature: MA Experiment 20000173 PARAMETER Experiment Name: At_42deg_Heat_P Parameter: Tissue Value: Aerial
  misc_feature: MA Experiment ID: 20000182 Result: Up-regulated in Transcription
  misc_feature: MA Experiment 20000182 PARAMETER Experiment Name: At_2mM_SA_P Parameter: Age (day) Value: 14
  misc_feature: MA Experiment 20000182 PARAMETER Experiment Name: At_2mM_SA_P Parameter: Organism Value: A. thaliana
  misc_feature: MA Experiment 20000182 PARAMETER Experiment Name: At_2mM_SA_P Parameter: Plant Line Value: WS
  misc_feature: MA Experiment 20000182 PARAMETER Experiment Name: At_2mM_SA_P Parameter: Timepoint (hr) Value: 6
  misc_feature: MA Experiment 20000182 PARAMETER Experiment Name: At_2mM_SA_P Parameter: Tissue Value: Aerial
  misc_feature: MA Experiment 20000182 PARAMETER Experiment Name: At_2mM_SA_P Parameter: Treatment Value: 2mM SA vs. No Treatment
  misc_feature: MA Experiment ID: 20000184 Result: Up-regulated in Transcription
  misc_feature: MA Experiment 20000184 PARAMETER Experiment Name: At_Shoots__P Parameter: Age (day) Value: 7
  misc_feature: MA Experiment 20000184 PARAMETER Experiment Name: At_Shoots__P Parameter: Tissue Value: Shoots vs. Whole Plant
  misc_feature: MA Experiment ID: 20001557 Result: Down-regulated in Transcription
  misc_feature: MA Experiment 20001557 PARAMETER Experiment Name: At_Drought_Soil_Dry_P Parameter: Age (day) Value: 27
  misc_feature: MA Experiment 20001557 PARAMETER Experiment Name: At_Drought_Soil_Dry_P Parameter: Organism Value: A. thaliana
  misc_feature: MA Experiment 20001557 PARAMETER Experiment Name: At_Drought_Soil_Dry_P Parameter: Plant Line Value: WS
  misc_feature: MA Experiment 20001557 PARAMETER Experiment Name: At_Drought_Soil_Dry_P Parameter: Post Timepoint (hr) Value: 3
  misc_feature: MA Experiment 20001557 PARAMETER Experiment Name: At_Drought_Soil_Dry_P Parameter: Post-Treatment Value: Re-Water vs. No Drought
  misc_feature: MA Experiment 20001557 PARAMETER Experiment Name: At_Drought_Soil_Dry_P Parameter: Timepoint (day) Value: 13
  misc_feature: MA Experiment 20001557 PARAMETER Experiment Name: At_Drought_Soil_Dry_P Parameter: Treatment Value: Drought vs. No Drought
gtgcgttcgtagagactgtaataaagacggagagattcttctagagtcagttcttcttcttcatcctcttcttccccccaaatcctctctcgctagggtttctcattccgatccataattctagatgtcgaggtttttaactgagacctgtcaaataagctaaagcttcttctaagagcttcaaggaaagcattgcattgttgtggtcttgtttgtgtccacagaaggaaagaagagtgagaagctcaggatgtcaagcagtcgaaatacccactggtgtcacagatgtcagcgtgctgtccgccttcacggccaagagcctgtatgcttttattgcggaggtggatttgttgaagaacttgatatggctcaagccagcccctttgatatgtttagatcccacaggggtgttgtagaacgtgatcagacttttgatctcatggatgctttctctgtgtttatgaggaaccgcttagctgaaaggagccacgacagagaaatcagaggaagaaccatcagttcaggtcctgaaaactttcctggtctggcccctttgttgatctttggtggtcaagtcccttatagactaactggcgacaatgcagtcgaagccctcttcaatggcggctcccctggcattggcatcacacgtggtaacaccggcgactacttcttcggtcccggccttgaagaattgttcgagcagctttcagctggcactactcgccgaggcccaccacccgcaccgagatcagcaatagacgcattgccaactatcaagatcgcgcagaggcatcttaggtcatcggactcgaattgtcccgtgtgcaaagacgaattcgaactgggatcagaagcgaaacagatgccgtgtaaccacatctatcattctgactgcattgtcccgtggctggttcagcacaactcttgcccggtctgtcgccaagagctaccatcagctagcggaccttcaagcagtcaaaacagaaccacccctaccagaaactacagaagcagtagtagtagtagtagtagtaacagtcgtgagaacgggaatgaaagaaggaatcctttctcttccttctggccattccgttcgtcaggttcaagctcaagctccactcaaaaccgtggaggcacaagaaactcggatacaagcgatgagaaccataactaccatcaacagcaacatcaacaatcatatatgggttacagtggctggccttttgattactaaaagtctaaaagtgagctaaaacaaatctttggtctcactttggtctctttacttaaatatgcttgtgattctgcatatgccttgtgcttcactctctatctctctcactctcttttatcaacataaataatggagaactgtatttgttactgtagattttctttctctgttaaaaacgagttcatcattttctatatgctttgttaaatatgtcattttagttgggttttt

SEQ ID NO: 27512 - protein, 328 aa, Arabidopsis thaliana
  peptide (1)..(328): Ceres Seq. ID no. 12385003
  misc_feature (190)..(230): Pfam Name: Zinc finger, C3HC4 type (RING finger) Pfam Description: Zinc finger, C3HC4 type (RING finger)
  misc_feature (5)..(48): Homolog of NCBI NO: 15228375 NR Description: putative RING zinc finger protein; protein id:
  misc_feature (147)..(235): Homolog of NCBI NO: 15228375 NR Description: putative RING zinc finger protein; protein id:
  misc_feature (9)..(306): Homolog of NCBI NO: 15231003 NR Description: unknown protein
  misc_feature (9)..(306): Homolog of NCBI NO: 11994207 NR Description: gene_id:MPN9.20~unknown protein [Arabidopsis
  misc_feature (5)..(48): Homolog of NCBI NO: 22655083 NR Description: putative RING zinc finger protein [Arabidopsis
  misc_feature (147)..(263): Homolog of NCBI NO: 22655083 NR Description: putative RING zinc finger protein [Arabidopsis
  misc_feature (4)..(328): Homolog of NCBI NO: 34908968 NR Description: P0003D09.21 [Oryza sativa (japonica
  misc_feature (1)..(196): Homolog of NCBI NO: 11358386 NR Description: hypothetical protein T5P19.230 - Arabidopsis
  misc_feature (1)..(328): Homolog of NCBI NO: 18410530 NR Description: Expressed protein
  misc_feature (1)..(328): Homolog of NCBI NO: 18405518 NR Description: expressed protein
MSSSRNTHWCHRCQRAVRLHGQEPVCFYCGGGFVEELDMAQASPFDMFRSHRGVVERDQTFDLMDAFSVFMRNRLAERSHDREIRGRTISSGPENFPGLAPLLIFGGQVPYRLTGDNAVEALFNGGSPGIGITRGNTGDYFFGPGLEELFEQLSAGTTRRGPPPAPRSAIDALPTIKIAQRHLRSSDSNCPVCKDEFELGSEAKQMPCNHIYHSDCIVPWLVQHNSCPVCRQELPSASGPSSSQNRTTPTRNYRSSSSSSSSNSRENGNERRNPFSSFWPFRSSGSSSSSTQNRGGTRNSDTSDENHNYHQQQHQQSYMGYSGWPFDY

SEQ ID NO: 27513 - protein, 290 aa, Arabidopsis thaliana
  peptide (1)..(290): Ceres Seq. ID no. 12385004
  misc_feature (152)..(192): Pfam Name: Zinc finger, C3HC4 type (RING finger) Pfam Description: Zinc finger, C3HC4 type (RING finger)
  misc_feature (1)..(209): Homolog of NCBI NO: 14719329 NR Description: putative RING-H2 finger protein [Oryza sativa]
  misc_feature (26)..(266): Homolog of NCBI NO: 37535546 NR Description: putative zinc finger protein
  misc_feature (109)..(197): Homolog of NCBI NO: 15228375 NR Description: putative RING zinc finger protein; protein id:
  misc_feature (1)..(268): Homolog of NCBI NO: 15231003 NR Description: unknown protein
  misc_feature (1)..(268): Homolog of NCBI NO: 11994207 NR Description: gene_id:MPN9.20~unknown protein [Arabidopsis
  misc_feature (109)..(225): Homolog of NCBI NO: 22655083 NR Description: putative RING zinc finger protein [Arabidopsis
  misc_feature (1)..(290): Homolog of NCBI NO: 34908968 NR Description: P0003D09.21 [Oryza sativa (japonica
  misc_feature (1)..(158): Homolog of NCBI NO: 11358386 NR Description: hypothetical protein T5P19.230 - Arabidopsis
  misc_feature (1)..(290): Homolog of NCBI NO: 18410530 NR Description: Expressed protein
  misc_feature (1)..(290): Homolog of NCBI NO: 18405518 NR Description: expressed protein
MAQASPFDMFRSHRGVVERDQTFDLMDAFSVFMRNRLAERSHDREIRGRTISSGPENFPGLAPLLIFGGQVPYRLTGDNAVEALFNGGSPGIGITRGNTGDYFFGPGLEELFEQLSAGTTRRGPPPAPRSAIDALPTIKIAQRHLRSSDSNCPVCKDEFELGSEAKQMPCNHIYHSDCIVPWLVQHNSCPVCRQELPSASGPSSSQNRTTPTRNYRSSSSSSSSNSRENGNERRNPFSSFWPFRSSGSSSSSTQNRGGTRNSDTSDENHNYHQQQHQQSYMGYSGWPFDY

SEQ ID NO: 27514 - protein, 282 aa, Arabidopsis thaliana
  peptide (1)..(282): Ceres Seq. ID no. 12385005
  misc_feature (144)..(184): Pfam Name: Zinc finger, C3HC4 type (RING finger) Pfam Description: Zinc finger, C3HC4 type (RING finger)
  misc_feature (1)..(201): Homolog of NCBI NO: 14719329 NR Description: putative RING-H2 finger protein [Oryza sativa]
  misc_feature (18)..(258): Homolog of NCBI NO: 37535546 NR Description: putative zinc finger protein
  misc_feature (101)..(189): Homolog of NCBI NO: 15228375 NR Description: putative RING zinc finger protein; protein id:
  misc_feature (1)..(260): Homolog of NCBI NO: 15231003 NR Description: unknown protein
  misc_feature (1)..(260): Homolog of NCBI NO: 11994207 NR Description: gene_id:MPN9.20~unknown protein [Arabidopsis
  misc_feature (101)..(217): Homolog of NCBI NO: 22655083 NR Description: putative RING zinc finger protein [Arabidopsis
  misc_feature (1)..(282): Homolog of NCBI NO: 34908968 NR Description: P0003D09.21 [Oryza sativa (japonica
  misc_feature (1)..(150): Homolog of NCBI NO: 11358386 NR Description: hypothetical protein T5P19.230 - Arabidopsis
  misc_feature (1)..(282): Homolog of NCBI NO: 18410530 NR Description: Expressed protein
  misc_feature (1)..(282): Homolog of NCBI NO: 18405518 NR Description: expressed protein
MFRSHRGVVERDQTFDLMDAFSVFMRNRLAERSHDREIRGRTISSGPENFPGLAPLLIFGGQVPYRLTGDNAVEALFNGGSPGIGITRGNTGDYFFGPGLEELFEQLSAGTTRRGPPPAPRSAIDALPTIKIAQRHLRSSDSNCPVCKDEFELGSEAKQMPCNHIYHSDCIVPWLVQHNSCPVCRQELPSASGPSSSQNRTTPTRNYRSSSSSSSSNSRENGNERRNPFSSFWPFRSSGSSSSSTQNRGGTRNSDTSDENHNYHQQQHQQSYMGYSGWPFDY

SEQ ID NO: 27515 - DNA, 901 bp, Arabidopsis thaliana
  misc_feature (1)..(901): Ceres Seq. ID no. 13490131
  misc_feature: MA Experiment ID: 108434 Result: Up-regulated in Transcription
  misc_feature: MA Experiment 108434 PARAMETER Experiment Name: At_Root_Tips_cDNA_P Parameter: Tissue Value: Root Tips
  misc_feature: MA Experiment ID: 108573 Result: Down-regulated in Transcription
  misc_feature: MA Experiment 108573 PARAMETER Experiment Name: At_Drought_cDNA_P Parameter: Timepoint (hr) Value: 6
  misc_feature: MA Experiment 108573 PARAMETER Experiment Name: At_Drought_cDNA_P Parameter: Tissue Value: Aerial
  misc_feature: MA Experiment 108573 PARAMETER Experiment Name: At_Drought_cDNA_P Parameter: Treatment Value: Drought vs. No Drought
  misc_feature: MA Experiment ID: 108595 Result: Down-regulated in Transcription
  misc_feature: MA Experiment 108595 PARAMETER Experiment Name: At_Ler-pi_Ovule_cDNA_P Parameter: Plant Line Value: null
  misc_feature: MA Experiment ID: 20000111 Result: Down-regulated in Transcription
  misc_feature: MA Experiment 20000111 PARAMETER Experiment Name: At_42deg_Heat_cDNA_P Parameter: Temperature (deg C) Value: 42 vs. 22
  misc_feature: MA Experiment 20000111 PARAMETER Experiment Name: At_42deg_Heat_cDNA_P Parameter: Timepoint (hr) Value: 6
  misc_feature: MA Experiment 20000111 PARAMETER Experiment Name: At_42deg_Heat_cDNA_P Parameter: Tissue Value: Aerial
  misc_feature: MA Experiment ID: 20000179 Result: Up-regulated in Transcription
  misc_feature: MA Experiment 20000179 PARAMETER Experiment Name: At_Germinating_Seeds_P Parameter: Age (hr) Value: 6 vs. 0
  misc_feature: MA Experiment 20000179 PARAMETER Experiment Name: At_Germinating_Seeds_P Parameter: Tissue Value: Germinating Seeds
  misc_feature: MA Experiment ID: 20000180 Result: Up-regulated in Transcription
  misc_feature: MA Experiment 20000180 PARAMETER Experiment Name: At_Germinating_Seeds_P Parameter: Age (hr) Value: 24 vs. 0
  misc_feature: MA Experiment 20000180 PARAMETER Experiment Name: At_Germinating_Seeds_P Parameter: Tissue Value: Germinating Seeds
  misc_feature: MA Experiment ID: 20000227 Result: Up-regulated in Transcription
  misc_feature: MA Experiment 20000227 PARAMETER Experiment Name: At_Root-Tips-vs-Tops_P Parameter: Tissue Value: Root Tips vs. Root Tops
agtcgtcgtcctcatcaacaattcgaatctgaaatctgcaattcacgagaagaagctttttttttttgtaacaatggcaaatccaattcaagagattattgagaaacaagttctgacggtagcgagagctatggaggataagatagacgacgagatagcgtctttggaaaagcttgacgaagatgatttggaagttttgagagagaggagattgaagcagatgacgaaaatggcggagaagaagaaacggtggatgagtattggacatggtgaatactctgagattcattctgagaaagatttcttctccgttgttaaatctagtgaacgcgtcgtttgtcacttctaccgtgagaattggccctgtaaagtgatggataaacacatgagcatattggcaaagcaacacattgagacacgtttcgtgaagatccaagctgagaaaagtccattcttggctgagaggcttaagattgttgttcttcccactcttgccctcattaagaacactaaagtcgatgattatgtggttgggttcaatgaactgggagggaaagatgattttagcacagaagatcttgaagagagaatagccagagcgcaagtggtccattacgagggagaatcatctcttaaacaaaagtctacaacacaagtcagaaggaacgtgaggcagagtgctcgttcagattctgactccgaataaatcccttttcttatcaaaggtttgttcgtttgtatcctcttgttagttgtaatactatgttgcaattcatcgttttgatgatcaaaatcaatgttgatcgttagattgatgaacatgcaatatctagaatactacattgatgttttatatgttacctagtgagagtgttggaatgaccaaagtctttttgagttt

SEQ ID NO: 27516 - protein, 234 aa, Arabidopsis thaliana
  peptide (1)..(234): Ceres Seq. ID no. 13490132
  misc_feature (31)..(234): Homolog of NCBI NO: 2342477 NR Description: ATP binding protein [Homo sapiens]
  misc_feature (24)..(234): Homolog of NCBI NO: 27924448 NR Description: Similar to ATP binding protein associated with
  misc_feature (31)..(234): Homolog of NCBI NO: 25282435 NR Description: ES cell-related protein; ATP binding protein
  misc_feature (31)..(234): Homolog of NCBI NO: 25286717 NR Description: ATP binding protein associated with cell
  misc_feature (29)..(234): Homolog of NCBI NO: 28277604 NR Description: Similar to ATP binding protein associated with
  misc_feature (29)..(234): Homolog of NCBI NO: 40253924 NR Description: putative ATP binding protein associated with cell
  misc_feature (77)..(234): Homolog of NCBI NO: 26452365 NR Description: unknown protein [Arabidopsis thaliana]
  misc_feature (25)..(234): Homolog of NCBI NO: 15224267 NR Description: ATP binding protein -related [Arabidopsis
  misc_feature (25)..(234): Homolog of NCBI NO: 21594045 NR Description: putative ATP binding protein [Arabidopsis
  misc_feature (25)..(234): Homolog of NCBI NO: 18404574 NR Description: expressed protein [Arabidopsis thaliana]
VVVLINNSNLKSAIHEKKLFFFVTMANPIQEIIEKQVLTVARAMEDKIDDEIASLEKLDEDDLEVLRERRLKQMTKMAEKKKRWMSIGHGEYSEIHSEKDFFSVVKSSERVVCHFYRENWPCKVMDKHMSILAKQHIETRFVKIQAEKSPFLAERLKIVVLPTLALIKNTKVDDYVVGFNELGGKDDFSTEDLEERIARAQVVHYEGESSLKQKSTTQVRRNVRQSARSDSDSE

SEQ ID NO: 27517 - protein, 210 aa, Arabidopsis thaliana
  peptide (1)..(210): Ceres Seq. ID no. 13490133
  misc_feature (7)..(210): Homolog of NCBI NO: 2342477 NR Description: ATP binding protein [Homo sapiens]
  misc_feature (1)..(210): Homolog of NCBI NO: 27924448 NR Description: Similar to ATP binding protein associated with
  misc_feature (7)..(210): Homolog of NCBI NO: 25282435 NR Description: ES cell-related protein; ATP binding protein
  misc_feature (7)..(210): Homolog of NCBI NO: 25286717 NR Description: ATP binding protein associated with cell
  misc_feature (5)..(210): Homolog of NCBI NO: 28277604 NR Description: Similar to ATP binding protein associated with
  misc_feature (5)..(210): Homolog of NCBI NO: 40253924 NR Description: putative ATP binding protein associated with cell
  misc_feature (53)..(210): Homolog of NCBI NO: 26452365 NR Description: unknown protein [Arabidopsis thaliana]
  misc_feature (1)..(210): Homolog of NCBI NO: 15224267 NR Description: ATP binding protein -related [Arabidopsis
  misc_feature (1)..(210): Homolog of NCBI NO: 21594045 NR Description: putative ATP binding protein [Arabidopsis
  misc_feature (1)..(210): Homolog of NCBI NO: 18404574 NR Description: expressed protein [Arabidopsis thaliana]
MANPIQEIIEKQVLTVARAMEDKIDDEIASLEKLDEDDLEVLRERRLKQMTKMAEKKKRWMSIGHGEYSEIHSEKDFFSVVKSSERVVCHFYRENWPCKVMDKHMSILAKQHIETRFVKIQAEKSPFLAERLKIVVLPTLALIKNTKVDDYVVGFNELGGKDDFSTEDLEERIARAQVVHYEGESSLKQKSTTQVRRNVRQSARSDSDSE

SEQ ID NO: 27518 - protein, 191 aa, Arabidopsis thaliana
  peptide (1)..(191): Ceres Seq. ID no. 13490134
  misc_feature (1)..(191): Homolog of NCBI NO: 2342477 NR Description: ATP binding protein [Homo sapiens]
  misc_feature (1)..(191): Homolog of NCBI NO: 27924448 NR Description: Similar to ATP binding protein associated with
  misc_feature (1)..(191): Homolog of NCBI NO: 25282435 NR Description: ES cell-related protein; ATP binding protein
  misc_feature (1)..(191): Homolog of NCBI NO: 25286717 NR Description: ATP binding protein associated with cell
  misc_feature (1)..(191): Homolog of NCBI NO: 28277604 NR Description: Similar to ATP binding protein associated with
  misc_feature (1)..(191): Homolog of NCBI NO: 40253924 NR Description: putative ATP binding protein associated with cell
  misc_feature (34)..(191): Homolog of NCBI NO: 26452365 NR Description: unknown protein [Arabidopsis thaliana]
  misc_feature (1)..(191): Homolog of NCBI NO: 15224267 NR Description: ATP binding protein -related [Arabidopsis
  misc_feature (1)..(191): Homolog of NCBI NO: 21594045 NR Description: putative ATP binding protein [Arabidopsis
  misc_feature (1)..(191): Homolog of NCBI NO: 18404574 NR Description: expressed protein [Arabidopsis thaliana]
MEDKIDDEIASLEKLDEDDLEVLRERRLKQMTKMAEKKKRWMSIGHGEYSEIHSEKDFFSVVKSSERVVCHFYRENWPCKVMDKHMSILAKQHIETRFVKIQAEKSPFLAERLKIVVLPTLALIKNTKVDDYVVGFNELGGKDDFSTEDLEERIARAQVVHYEGESSLKQKSTTQVRRNVRQSARSDSDSE

SEQ ID NO: 27519 - DNA, 1100 bp, Arabidopsis thaliana
  misc_feature (1)..(1100): Ceres Seq. ID no. 12333158
  misc_feature: MA Experiment ID: 108461 Result: Down-regulated in Transcription
  misc_feature: MA Experiment 108461 PARAMETER Experiment Name: At_Germinating_Seeds_cDNA_P Parameter: Age (day) Value: 1 vs. 0
  misc_feature: MA Experiment 108461 PARAMETER Experiment Name: At_Germinating_Seeds_cDNA_P Parameter: Tissue Value: Germinating Seeds
  misc_feature: MA Experiment ID: 20000180 Result: Down-regulated in Transcription
  misc_feature: MA Experiment 20000180 PARAMETER Experiment Name: At_Germinating_Seeds_P Parameter: Age (hr) Value: 24 vs. 0
  misc_feature: MA Experiment 20000180 PARAMETER Experiment Name: At_Germinating_Seeds_P Parameter: Tissue Value: Germinating Seeds
  misc_feature: MA Experiment ID: 20000496 Result: Up-regulated in Transcription
  misc_feature: MA Experiment 20000496 PARAMETER Experiment Name: At_Guard_Cells_P Parameter: Harvest Date Value: 7/19/2002
  misc_feature: MA Experiment 20000496 PARAMETER Experiment Name: At_Guard_Cells_P Parameter: Organism Value: Canola
  misc_feature: MA Experiment 20000496 PARAMETER Experiment Name: At_Guard_Cells_P Parameter: Tissue Value: Guard Cells vs. Leaves
  misc_feature: MA Experiment ID: 20001248 Result: Up-regulated in Transcription
  misc_feature: MA Experiment 20001248 PARAMETER Experiment Name: At_Far-red-induction_P Parameter: Age (day) Value: 7
  misc_feature: MA Experiment 20001248 PARAMETER Experiment Name: At_Far-red-induction_P Parameter: Light Value: Far-red vs. White
  misc_feature: MA Experiment 20001248 PARAMETER Experiment Name: At_Far-red-induction_P Parameter: Organism Value: A. thaliana
  misc_feature: MA Experiment 20001248 PARAMETER Experiment Name: At_Far-red-induction_P Parameter: Plant Line Value: Columbia
  misc_feature: MA Experiment 20001248 PARAMETER Experiment Name: At_Far-red-induction_P Parameter: Timepoint (hr) Value: 4
  misc_feature: MA Experiment 20001248 PARAMETER Experiment Name: At_Far-red-induction_P Parameter: Tissue Value: Whole Plant
  misc_feature: MA Experiment ID: 20001450 Result: Up-regulated in Transcription
  misc_feature: MA Experiment 20001450 PARAMETER Experiment Name: At_Far-red-induction_P Parameter: Age (day) Value: 7
  misc_feature: MA Experiment 20001450 PARAMETER Experiment Name: At_Far-red-induction_P Parameter: Light Value: Far-red vs. White
  misc_feature: MA Experiment 20001450 PARAMETER Experiment Name: At_Far-red-induction_P Parameter: Organism Value: A. thaliana
  misc_feature: MA Experiment 20001450 PARAMETER Experiment Name: At_Far-red-induction_P Parameter: Plant Line Value: Columbia
  misc_feature: MA Experiment 20001450 PARAMETER Experiment Name: At_Far-red-induction_P Parameter: Timepoint (hr) Value: 8
  misc_feature: MA Experiment 20001450 PARAMETER Experiment Name: At_Far-red-induction_P Parameter: Tissue Value: Whole Plant
actttcccgggaaaatcggcgaccaaaattggaaaatgtactcagcgattcgctcgcttccactcgatggtggacacgttggtggtgactaccatggacctcttgacggaaccaatcttcccggtgacgcttgtttggttttaacgactgaccctaaacctcgtctccggtggacaactgagcttcatgagagattcgttgacgccgttactcagctcggtggtcctgacaaagcgactcccaaaactattatgagaacaatgggagtgaagggtctcactctctaccacctcaaatcacatcttcagaaattccgcctagggaggcaagctggcaaagaatcaactgagaactctaaagatgcttcttgtgtaggggagagtcaggacacaggttcatcttcgacatcatcaatgagaatggcgcagcaggagcagaacgagggttaccaagtcaccgaagctctacgtgctcagatggaagtccaaagaagactacacgatcaattggaggtgcaacggaggctccagctgaggatagaggcacaaggaaaatacctgcaatcgattcttgaaaaagcttgcaaggcctttgacgagcaagctgctacttttgctggacttgaggctgctagggaagagctatcagagctagccatcaaagtctccaatagctctcaaggaacatcagtcccgtacttcgatgcaacaaagatgatgatgatgccatcgttgtcagagcttgcagtagcaatagacaacaaaaacaacatcacaaccaactgttcagtagaaagctctctgacttccatcacacatgggagctctatatctgctgcatcaatgaagaagcgtcaacgtggagacaatttgggcgtagggtatgaatcaggctggattatgcctagtagcaccattggataaagtttaggagagggaaaaagttcattatgggaaaggtagagataagatttaactcttctttacttgctttgaggggcctgtattattattcgatacaaacttgtcatcacattttcatcttagcctactcatgtatatatatttcaatgttgaagctgaagctttagtgtttccttt

SEQ ID NO: 27520 - protein, 306 aa, Arabidopsis thaliana
  peptide (1)..(306): Ceres Seq. ID no. 12333159
  misc_feature (54)..(105): Pfam Name: Myb-like DNA-binding domain Pfam Description: Myb-like DNA-binding domain
  misc_feature (26)..(222): Homolog of NCBI NO: 14596181 NR Description: transfactor-like protein [Arabidopsis thaliana]
  misc_feature (159)..(306): Homolog of NCBI NO: 19698927 NR Description: putative protein [Arabidopsis thaliana]
  misc_feature (41)..(205): Homolog of NCBI NO: 30699418 NR Description: transfactor -related [Arabidopsis thaliana]
  misc_feature (43)..(224): Homolog of NCBI NO: 29647444 NR Description: P0410E11.32 [Oryza sativa (japonica
  misc_feature (25)..(293): Homolog of NCBI NO: 6223653 NR Description: transfactor-like [Arabidopsis thaliana]
  misc_feature (41)..(205): Homolog of NCBI NO: 25406584 NR Description: hypothetical protein T8K14.15 [imported] -
  misc_feature (12)..(306): Homolog of NCBI NO: 7485694 NR Description: hypothetical protein F18A5.30 - Arabidopsis
  misc_feature (12)..(306): Homolog of NCBI NO: 18414049 NR Description: putative protein
  misc_feature (12)..(306): Homolog of NCBI NO: 11994231 NR Description: contains similarity to transfactor~gene_id:MUJ8.2
  misc_feature (12)..(306): Homolog of NCBI NO: 18404044 NR Description: transfactor, putative
FPGKIGDQNWKMYSAIRSLPLDGGHVGGDYHGPLDGTNLPGDACLVLTTDPKPRLRWTTELHERFVDAVTQLGGPDKATPKTIMRTMGVKGLTLYHLKSHLQKFRLGRQAGKESTENSKDASCVGESQDTGSSSTSSMRMAQQEQNEGYQVTEALRAQMEVQRRLHDQLEVQRRLQLRIEAQGKYLQSILEKACKAFDEQAATFAGLEAAREELSELAIKVSNSSQGTSVPYFDATKMMMMPSLSELAVAIDNKNNITTNCSVESSLTSITHGSSISAASMKKRQRGDNLGVGYESGWIMPSSTIG

SEQ ID NO: 27521 - protein, 295 aa, Arabidopsis thaliana
  peptide (1)..(295): Ceres Seq. ID no. 12333160
  misc_feature (43)..(94): Pfam Name: Myb-like DNA-binding domain Pfam Description: Myb-like DNA-binding domain
  misc_feature (15)..(211): Homolog of NCBI NO: 14596181 NR Description: transfactor-like protein [Arabidopsis thaliana]
  misc_feature (148)..(295): Homolog of NCBI NO: 19698927 NR Description: putative protein [Arabidopsis thaliana]
  misc_feature (30)..(194): Homolog of NCBI NO: 30699418 NR Description: transfactor -related [Arabidopsis thaliana]
  misc_feature (32)..(213): Homolog of NCBI NO: 29647444 NR Description: P0410E11.32 [Oryza sativa (japonica
  misc_feature (14)..(282): Homolog of NCBI NO: 6223653 NR Description: transfactor-like [Arabidopsis thaliana]
  misc_feature (30)..(194): Homolog of NCBI NO: 25406584 NR Description: hypothetical protein T8K14.15 [imported] -
  misc_feature (1)..(295): Homolog of NCBI NO: 7485694 NR Description: hypothetical protein F18A5.30 - Arabidopsis
  misc_feature (1)..(295): Homolog of NCBI NO: 18414049 NR Description: putative protein
  misc_feature (1)..(295): Homolog of NCBI NO: 11994231 NR Description: contains similarity to transfactor~gene_id:MUJ8.2
  misc_feature (1)..(295): Homolog of NCBI NO: 18404044 NR Description: transfactor, putative
MYSAIRSLPLDGGHVGGDYHGPLDGTNLPGDACLVLTTDPKPRLRWTTELHERFVDAVTQLGGPDKATPKTIMRTMGVKGLTLYHLKSHLQKFRLGRQAGKESTENSKDASCVGESQDTGSSSTSSMRMAQQEQNEGYQVTEALRAQMEVQRRLHDQLEVQRRLQLRIEAQGKYLQSILEKACKAFDEQAATFAGLEAAREELSELAIKVSNSSQGTSVPYFDATKMMMMPSLSELAVAIDNKNNITTNCSVESSLTSITHGSSISAASMKKRQRGDNLGVGYESGWIMPSSTIG

SEQ ID NO: 27522 - protein, 223 aa, Arabidopsis thaliana
  peptide (1)..(223): Ceres Seq. ID no. 12333161
  misc_feature (26)..(205): Pfam Name: Myosin tail Pfam Description: Myosin tail
  misc_feature (1)..(139): Homolog of NCBI NO: 14596181 NR Description: transfactor-like protein [Arabidopsis thaliana]
  misc_feature (76)..(223): Homolog of NCBI NO: 19698927 NR Description: putative protein [Arabidopsis thaliana]
  misc_feature (1)..(122): Homolog of NCBI NO: 30699418 NR Description: transfactor -related [Arabidopsis thaliana]
  misc_feature (1)..(141): Homolog of NCBI NO: 29647444 NR Description: P0410E11.32 [Oryza sativa (japonica
  misc_feature (1)..(210): Homolog of NCBI NO: 6223653 NR Description: transfactor-like [Arabidopsis thaliana]
  misc_feature (1)..(122): Homolog of NCBI NO: 25406584 NR Description: hypothetical protein T8K14.15 [imported] -
  misc_feature (1)..(223): Homolog of NCBI NO: 7485694 NR Description: hypothetical protein F18A5.30 - Arabidopsis
  misc_feature (1)..(223): Homolog of NCBI NO: 18414049 NR Description: putative protein
  misc_feature (1)..(223): Homolog of NCBI NO: 11994231 NR Description: contains similarity to transfactor~gene_id:MUJ8.2
  misc_feature (1)..(223): Homolog of NCBI NO: 18404044 NR Description: transfactor, putative
MRTMGVKGLTLYHLKSHLQKFRLGRQAGKESTENSKDASCVGESQDTGSSSTSSMRMAQQEQNEGYQVTEALRAQMEVQRRLHDQLEVQRRLQLRIEAQGKYLQSILEKACKAFDEQAATFAGLEAAREELSELAIKVSNSSQGTSVPYFDATKMMMMPSLSELAVAIDNKNNITTNCSVESSLTSITHGSSISAASMKKRQRGDNLGVGYESGWIMPSSTIG

SEQ ID NO: 27523 - DNA, 1228 bp, Arabidopsis thaliana
  misc_feature (1)..(1228): Ceres Seq. ID no. 12421727
  misc_feature: MA Experiment ID: 108434 Result: Down-regulated in Transcription
  misc_feature: MA Experiment 108434 PARAMETER Experiment Name: At_Root_Tips_cDNA_P Parameter: Tissue Value: Root Tips
  misc_feature: MA Experiment ID: 108461 Result: Down-regulated in Transcription
  misc_feature: MA Experiment 108461 PARAMETER Experiment Name: At_Germinating_Seeds_cDNA_P Parameter: Age (day) Value: 1 vs. 0
  misc_feature: MA Experiment 108461 PARAMETER Experiment Name: At_Germinating_Seeds_cDNA_P Parameter: Tissue Value: Germinating Seeds
  misc_feature: MA Experiment ID: 108463 Result: Up-regulated in Transcription
  misc_feature: MA Experiment 108463 PARAMETER Experiment Name: At_Germinating_Seeds_cDNA_P Parameter: Age (day) Value: 3 vs. 0
  misc_feature: MA Experiment 108463 PARAMETER Experiment Name: At_Germinating_Seeds_cDNA_P Parameter: Tissue Value: Germinating Seeds
  misc_feature: MA Experiment ID: 108561 Result: Up-regulated in Transcription
  misc_feature: MA Experiment 108561 PARAMETER Experiment Name: At_100uM_ABA_cDNA_P Parameter: Timepoint (hr) Value: 6
  misc_feature: MA Experiment 108561 PARAMETER Experiment Name: At_100uM_ABA_cDNA_P Parameter: Tissue Value: Aerial
  misc_feature: MA Experiment 108561 PARAMETER Experiment Name: At_100uM_ABA_cDNA_P Parameter: Treatment Value: 100uM ABA vs. No Treatment
  misc_feature: MA Experiment ID: 108569 Result: Up-regulated in Transcription
  misc_feature: MA Experiment 108569 PARAMETER Experiment Name: At_0.001%_MeJA__cDNA_P Parameter: Timepoint (hr) Value: 6
  misc_feature: MA Experiment 108569 PARAMETER Experiment Name: At_0.001%_MeJA__cDNA_P Parameter: Tissue Value: Aerial
  misc_feature: MA Experiment 108569 PARAMETER Experiment Name: At_0.001%_MeJA__cDNA_P Parameter: Treatment Value: 0.001% MeJA vs. No Treatment
  misc_feature: MA Experiment ID: 108572 Result: Up-regulated in Transcription
  misc_feature: MA Experiment 108572 PARAMETER Experiment Name: At_Drought_cDNA_P Parameter: Timepoint (hr) Value: 1
  misc_feature: MA Experiment 108572 PARAMETER Experiment Name: At_Drought_cDNA_P Parameter: Tissue Value: Aerial
  misc_feature: MA Experiment 108572 PARAMETER Experiment Name: At_Drought_cDNA_P Parameter: Treatment Value: Drought vs. No Drought
  misc_feature: MA Experiment ID: 108573 Result: Up-regulated in Transcription
  misc_feature: MA Experiment 108573 PARAMETER Experiment Name: At_Drought_cDNA_P Parameter: Timepoint (hr) Value: 6
  misc_feature: MA Experiment 108573 PARAMETER Experiment Name: At_Drought_cDNA_P Parameter: Tissue Value: Aerial
  misc_feature: MA Experiment 108573 PARAMETER Experiment Name: At_Drought_cDNA_P Parameter: Treatment Value: Drought vs. No Drought
  misc_feature: MA Experiment ID: 108585 Result: Up-regulated in Transcription
  misc_feature: MA Experiment 108585 PARAMETER Experiment Name: At_5mM_NaNP_cDNA_P Parameter: Timepoint (hr) Value: 6
  misc_feature: MA Experiment 108585 PARAMETER Experiment Name: At_5mM_NaNP_cDNA_P Parameter: Tissue Value: Aerial
  misc_feature: MA Experiment 108585 PARAMETER Experiment Name: At_5mM_NaNP_cDNA_P Parameter: Treatment Value: null
  misc_feature: MA Experiment ID: 108605 Result: Up-regulated in Transcription
  misc_feature: MA Experiment 108605 PARAMETER Experiment Name: At_100uM_ABA_cDNA_P Parameter: Timepoint (hr) Value: 6
  misc_feature: MA Experiment 108605 PARAMETER Experiment Name: At_100uM_ABA_cDNA_P Parameter: Tissue Value: Aerial
  misc_feature: MA Experiment 108605 PARAMETER Experiment Name: At_100uM_ABA_cDNA_P Parameter: Treatment Value: 100uM ABA vs. No Treatment
  misc_feature: MA Experiment ID: 108607 Result: Up-regulated in Transcription
  misc_feature: MA Experiment 108607 PARAMETER Experiment Name: At_100uM_ABA_cDNA_P Parameter: Timepoint (hr) Value: 4
  misc_feature: MA Experiment 108607 PARAMETER Experiment Name: At_100uM_ABA_cDNA_P Parameter: Tissue Value: Aerial
  misc_feature: MA Experiment 108607 PARAMETER Experiment Name: At_100uM_ABA_cDNA_P Parameter: Treatment Value: 100uM ABA vs. No Treatment
  misc_feature: MA Experiment ID: 108609 Result: Up-regulated in Transcription
  misc_feature: MA Experiment 108609 PARAMETER Experiment Name: At_100uM_ABA_cDNA_P Parameter: Timepoint (hr) Value: 24
  misc_feature: MA Experiment 108609 PARAMETER Experiment Name: At_100uM_ABA_cDNA_P Parameter: Tissue Value: Aerial
  misc_feature: MA Experiment 108609 PARAMETER Experiment Name: At_100uM_ABA_cDNA_P Parameter: Treatment Value: 100uM ABA vs. No Treatment
  misc_feature: MA Experiment ID: 108668 Result: Up-regulated in Transcription
  misc_feature: MA Experiment 108668 PARAMETER Experiment Name: At_2mM_SA_cDNA_P Parameter: Plant Line Value: WS
  misc_feature: MA Experiment 108668 PARAMETER Experiment Name: At_2mM_SA_cDNA_P Parameter: Timepoint (hr) Value: 6
  misc_feature: MA Experiment 108668 PARAMETER Experiment Name: At_2mM_SA_cDNA_P Parameter: Treatment Value: 2mM SA vs. No Treatment
  misc_feature: MA Experiment ID: 20000070 Result: Up-regulated in Transcription
  misc_feature: MA Experiment 20000070 PARAMETER Experiment Name: At_100uM_ABA_Mutants_cDNA_P Parameter: Plant Line Value: CS24
  misc_feature: MA Experiment 20000070 PARAMETER Experiment Name: At_100uM_ABA_Mutants_cDNA_P Parameter: Timepoint (hr) Value: 6
  misc_feature: MA Experiment 20000070 PARAMETER Experiment Name: At_100uM_ABA_Mutants_cDNA_P Parameter: Tissue Value: Aerial
  misc_feature: MA Experiment 20000070 PARAMETER Experiment Name: At_100uM_ABA_Mutants_cDNA_P Parameter: Treatment Value: 100uM ABA vs. No Treatment
  misc_feature: MA Experiment ID: 20000071 Result: Up-regulated in Transcription
  misc_feature: MA Experiment 20000071 PARAMETER Experiment Name: At_100uM_ABA_Mutants_cDNA_P Parameter: Plant Line Value: CS8104
  misc_feature: MA Experiment 20000071 PARAMETER Experiment Name: At_100uM_ABA_Mutants_cDNA_P Parameter: Timepoint (hr) Value: 6
  misc_feature: MA Experiment 20000071 PARAMETER Experiment Name: At_100uM_ABA_Mutants_cDNA_P Parameter: Tissue Value: Aerial
  misc_feature: MA Experiment 20000071 PARAMETER Experiment Name: At_100uM_ABA_Mutants_cDNA_P Parameter: Treatment Value: 100uM ABA vs. No Treatment
  misc_feature: MA Experiment ID: 20000072 Result: Up-regulated in Transcription
  misc_feature: MA Experiment 20000072 PARAMETER Experiment Name: At_100uM_ABA_Mutants_cDNA_P Parameter: Plant Line Value: CS8105
  misc_feature: MA Experiment 20000072 PARAMETER Experiment Name: At_100uM_ABA_Mutants_cDNA_P Parameter: Timepoint (hr) Value: 6
  misc_feature: MA Experiment 20000072 PARAMETER Experiment Name: At_100uM_ABA_Mutants_cDNA_P Parameter: Tissue Value: Aerial
  misc_feature: MA Experiment 20000072 PARAMETER Experiment Name: At_100uM_ABA_Mutants_cDNA_P Parameter: Treatment Value: 100uM ABA vs. No Treatment
  misc_feature: MA Experiment ID: 20000086 Result: Up-regulated in Transcription
  misc_feature: MA Experiment 20000086 PARAMETER Experiment Name: At_100uM_ABA_Mutants_cDNA_P Parameter: Plant Line Value: CS22
  misc_feature: MA Experiment 20000086 PARAMETER Experiment Name: At_100uM_ABA_Mutants_cDNA_P Parameter: Timepoint (hr) Value: 6
  misc_feature: MA Experiment 20000086 PARAMETER Experiment Name: At_100uM_ABA_Mutants_cDNA_P Parameter: Tissue Value: Aerial
  misc_feature: MA Experiment 20000086 PARAMETER Experiment Name: At_100uM_ABA_Mutants_cDNA_P Parameter: Treatment Value: 100uM ABA vs. No Treatment
  misc_feature: MA Experiment ID: 20000087 Result: Up-regulated in Transcription
  misc_feature: MA Experiment 20000087 PARAMETER Experiment Name: At_100uM_ABA_Mutants_cDNA_P Parameter: Plant Line Value: WS
  misc_feature: MA Experiment 20000087 PARAMETER Experiment Name: At_100uM_ABA_Mutants_cDNA_P Parameter: Timepoint (hr) Value: 6
  misc_feature: MA Experiment 20000087 PARAMETER Experiment Name: At_100uM_ABA_Mutants_cDNA_P Parameter: Tissue Value: Aerial
  misc_feature: MA Experiment 20000087 PARAMETER Experiment Name: At_100uM_ABA_Mutants_cDNA_P Parameter: Treatment Value: 100uM ABA vs. No Treatment
  misc_feature: MA Experiment ID: 20000088 Result: Up-regulated in Transcription
  misc_feature: MA Experiment 20000088 PARAMETER Experiment Name: At_100uM_ABA_Mutants_cDNA_P Parameter: Plant Line Value: Landsberg
  misc_feature: MA Experiment 20000088 PARAMETER Experiment Name: At_100uM_ABA_Mutants_cDNA_P Parameter: Timepoint (hr) Value: 6
  misc_feature: MA Experiment 20000088 PARAMETER Experiment Name: At_100uM_ABA_Mutants_cDNA_P Parameter: Tissue Value: Aerial
  misc_feature: MA Experiment 20000088 PARAMETER Experiment Name: At_100uM_ABA_Mutants_cDNA_P Parameter: Treatment Value: 100uM ABA vs. No Treatment
  misc_feature: MA Experiment ID: 20000117 Result: Up-regulated in Transcription
  misc_feature: MA Experiment 20000117 PARAMETER Experiment Name: At_100uM_ABA_Mutants_cDNA_P Parameter: Plant Line Value: Columbia
  misc_feature: MA Experiment 20000117 PARAMETER Experiment Name: At_100uM_ABA_Mutants_cDNA_P Parameter: Timepoint (hr) Value: 6
  misc_feature: MA Experiment 20000117 PARAMETER Experiment Name: At_100uM_ABA_Mutants_cDNA_P Parameter: Tissue Value: Aerial
  misc_feature: MA Experiment 20000117 PARAMETER Experiment Name: At_100uM_ABA_Mutants_cDNA_P Parameter: Treatment Value: 100uM ABA vs. No Treatment
  misc_feature: MA Experiment ID: 20000169 Result: Up-regulated in Transcription
  misc_feature: MA Experiment 20000169 PARAMETER Experiment Name: At_100uM_ABA_P Parameter: Age (day) Value: 14
  misc_feature: MA Experiment 20000169 PARAMETER Experiment Name: At_100uM_ABA_P Parameter: Organism Value: A. thaliana
  misc_feature: MA Experiment 20000169 PARAMETER Experiment Name: At_100uM_ABA_P Parameter: Plant Line Value: WS
  misc_feature: MA Experiment 20000169 PARAMETER Experiment Name: At_100uM_ABA_P Parameter: Timepoint (hr) Value: 6
  misc_feature: MA Experiment 20000169 PARAMETER Experiment Name: At_100uM_ABA_P Parameter: Tissue Value: Aerial
  misc_feature: MA Experiment 20000169 PARAMETER Experiment Name: At_100uM_ABA_P Parameter: Treatment Value: 100uM ABA vs. No Treatment
  misc_feature: MA Experiment ID: 20000182 Result: Up-regulated in Transcription
  misc_feature: MA Experiment 20000182 PARAMETER Experiment Name: At_2mM_SA_P Parameter: Age (day) Value: 14
  misc_feature: MA Experiment 20000182 PARAMETER Experiment Name: At_2mM_SA_P Parameter: Organism Value: A. thaliana
  misc_feature: MA Experiment 20000182 PARAMETER Experiment Name: At_2mM_SA_P Parameter: Plant Line Value: WS
  misc_feature: MA Experiment 20000182 PARAMETER Experiment Name: At_2mM_SA_P Parameter: Timepoint (hr) Value: 6
  misc_feature: MA Experiment 20000182 PARAMETER Experiment Name: At_2mM_SA_P Parameter: Tissue Value: Aerial
  misc_feature: MA Experiment 20000182 PARAMETER Experiment Name: At_2mM_SA_P Parameter: Treatment Value: 2mM SA vs. No Treatment
  misc_feature: MA Experiment ID: 20000268 Result: Up-regulated in Transcription
  misc_feature: MA Experiment 20000268 PARAMETER Experiment Name: At_100mM_NaCl__P Parameter: Age (day) Value: 14
  misc_feature: MA Experiment 20000268 PARAMETER Experiment Name: At_100mM_NaCl__P Parameter: Organism Value: A. thaliana
  misc_feature: MA Experiment 20000268 PARAMETER Experiment Name: At_100mM_NaCl__P Parameter: Plant Line Value: WS
  misc_feature: MA Experiment 20000268 PARAMETER Experiment Name: At_100mM_NaCl__P Parameter: Timepoint (hr) Value: 6
  misc_feature: MA Experiment 20000268 PARAMETER Experiment Name: At_100mM_NaCl__P Parameter: Tissue Value: Whole Plant
  misc_feature: MA Experiment 20000268 PARAMETER Experiment Name: At_100mM_NaCl__P Parameter: Treatment Value: 100mM NaCl vs. No Treatment
  misc_feature: MA Experiment ID: 20000453 Result: Up-regulated in Transcription
  misc_feature: MA Experiment 20000453 PARAMETER Experiment Name: At_100uM_ABA_P Parameter: Age (day) Value: 15
  misc_feature: MA Experiment 20000453 PARAMETER Experiment Name: At_100uM_ABA_P Parameter: Organism Value: A. thaliana
  misc_feature: MA Experiment 20000453 PARAMETER Experiment Name: At_100uM_ABA_P Parameter: Plant Line Value: WS
  misc_feature: MA Experiment 20000453 PARAMETER Experiment Name: At_100uM_ABA_P Parameter: Timepoint (hr) Value: 24
  misc_feature: MA Experiment 20000453 PARAMETER Experiment Name: At_100uM_ABA_P Parameter: Tissue Value: Aerial
  misc_feature: MA Experiment 20000453 PARAMETER Experiment Name: At_100uM_ABA_P Parameter: Treatment Value: 100uM ABA vs. No Treatment
  misc_feature: MA Experiment ID: 20001248 Result: Down-regulated in Transcription
  misc_feature: MA Experiment 20001248 PARAMETER Experiment Name: At_Far-red-induction_P Parameter: Age (day) Value: 7
  misc_feature: MA Experiment 20001248 PARAMETER Experiment Name: At_Far-red-induction_P Parameter: Light Value: Far-red vs. White
  misc_feature: MA Experiment 20001248 PARAMETER Experiment Name: At_Far-red-induction_P Parameter: Organism Value: A. thaliana
  misc_feature: MA Experiment 20001248 PARAMETER Experiment Name: At_Far-red-induction_P Parameter: Plant Line Value: Columbia
  misc_feature: MA Experiment 20001248 PARAMETER Experiment Name: At_Far-red-induction_P Parameter: Timepoint (hr) Value: 4
  misc_feature: MA Experiment 20001248 PARAMETER Experiment Name: At_Far-red-induction_P Parameter: Tissue Value: Whole Plant
  misc_feature: MA Experiment ID: 20001560 Result: Up-regulated in Transcription
  misc_feature: MA Experiment 20001560 PARAMETER Experiment Name: At_Drought_Soil_Dry_P Parameter: Age (day) Value: 28
  misc_feature: MA Experiment 20001560 PARAMETER Experiment Name: At_Drought_Soil_Dry_P Parameter: Organism Value: A. thaliana
  misc_feature: MA Experiment 20001560 PARAMETER Experiment Name: At_Drought_Soil_Dry_P Parameter: Plant Line Value: WS
  misc_feature: MA Experiment 20001560 PARAMETER Experiment Name: At_Drought_Soil_Dry_P Parameter: Post Timepoint (hr) Value: None
  misc_feature: MA Experiment 20001560 PARAMETER Experiment Name: At_Drought_Soil_Dry_P Parameter: Post-Treatment Value: None
  misc_feature: MA Experiment 20001560 PARAMETER Experiment Name: At_Drought_Soil_Dry_P Parameter: Timepoint (day) Value: 14
  misc_feature: MA Experiment 20001560 PARAMETER Experiment Name: At_Drought_Soil_Dry_P Parameter: Treatment Value: Drought vs. No Drought
  misc_feature: MA Experiment ID: 20001904 Result: Up-regulated in Transcription
  misc_feature: MA Experiment 20001904 PARAMETER Experiment Name: At_Drought_Reproduction_P Parameter: Age (day) Value: 37
  misc_feature: MA Experiment 20001904 PARAMETER Experiment Name: At_Drought_Reproduction_P Parameter: Organism Value: A. thaliana
  misc_feature: MA Experiment 20001904 PARAMETER Experiment Name: At_Drought_Reproduction_P Parameter: Plant Line Value: WS
  misc_feature: MA Experiment 20001904 PARAMETER Experiment Name: At_Drought_Reproduction_P Parameter: Timepoint (day) Value: 7
  misc_feature: MA Experiment 20001904 PARAMETER Experiment Name: At_Drought_Reproduction_P Parameter: Tissue Value: Rosettes
  misc_feature: MA Experiment 20001904 PARAMETER Experiment Name: At_Drought_Reproduction_P Parameter: Treatment Value: Drought vs. No Drought
gctatttctccgagttacgtatgtttcttttcttctgcatctagttttttttttgcatattcatcaccttctctcagttttcttctttcaatagaattatccagaaaacttttaagagatggcagctccgattcgattctttgaactgaacactggtgccaagttaccttgcgtcggtctaggaacctacgcaatggtcgcgacagcgatcgaacaggcgattaagattggttacaggcatatcgactgtgcttcgatttacggaaacgagaaagagattggtggtgtgttgaagaagctgataggtgatggttttgtgaagcgtgaggagttatttatcacttccaaactctggagcaatgatcatttacctgaagatgtgcctaaggcactggaaaaaacgttacaggacttacagattgactatgttgatttatatctgatacattggcctgcgagcttgaagaaggaatcactaatgccaacacctgagatgctcacaaaacctgatataactagcacatggaaagcaatggaagctctctatgactctggaaaagctcgagcaatcggtgtaagcaatttctcgtcgaagaagcttacagatcttcttaacgtggcacgtgtaaccccggctgttaaccaagttgaatgtcacccagtttggcagcaacaaggtcttcatgagttatgcaaatccaaaggagttcacttatctggttactctcctttgggttcccaaagtaagggagaagtcaggctaaaggttcttcaaaacccgattgttaccgaggttgctgagaaacttggaaagaccaccgcccaagtggctctccgttggggactccaaactggtcatagtgttctaccaaagagctcgagcggggctcggctcaaggagaatcttgatgtttttgactggtccataccggaagatctgtttaccaagttctctaacattccccaggagaagttttgccgagctactgagtttgcgcatgagacacacggcttctataagaccattgaggaattgtgggacggtgaaatttgagataatgtccctcctttctacttgtttaaccataaaccattaaggacattgaaataaatatgttatctttttatatttaatctttctatgagaaaacactaaacacatgcttgggatttcatgatgtttggcaaatgttgttattctgcattcttcaaacaataaaatgttttc

SEQ ID NO: 27524 - protein, 311 aa, Arabidopsis thaliana
  peptide (1)..(311): Ceres Seq. ID no. 12421728
  misc_feature (1)..(294): Homolog of NCBI NO: 25283479 NR Description: probable alcohol dehydrogenase [imported] -
  misc_feature (1)..(311): Homolog of NCBI NO: 13160399 NR Description: aldose reductase [Digitalis purpurea]
  misc_feature (1)..(311): Homolog of NCBI NO: 13160397 NR Description: aldose reductase [Digitalis purpurea]
  misc_feature (1)..(311): Homolog of NCBI NO: 15232354 NR Description: aldo/keto reductase family
  misc_feature (12)..(311): Homolog of NCBI NO: 28393400 NR Description: putative aldo/keto reductase [Arabidopsis
  misc_feature (1)..(311): Homolog of NCBI NO: 30687247 NR Description: aldo/keto reductase family [Arabidopsis thaliana]
  misc_feature (1)..(311): Homolog of NCBI NO: 30687261 NR Description: aldo/keto reductase family [Arabidopsis thaliana]
  misc_feature (1)..(311): Homolog of NCBI NO: 7431112 NR Description: abscisic acid activated protein - alfalfa
  misc_feature (1)..(283): Homolog of NCBI NO: 7431106 NR Description: probable alcohol dehydrogenase [imported] -
  misc_feature (1)..(311): Homolog of NCBI NO: 18404526 NR Description: aldo/keto reductase family
MAAPIRFFELNTGAKLPCVGLGTYAMVATAIEQAIKIGYRHIDCASIYGNEKEIGGVLKKLIGDGFVKREELFITSKLWSNDHLPEDVPKALEKTLQDLQIDYVDLYLIHWPASLKKESLMPTPEMLTKPDITSTWKAMEALYDSGKARAIGVSNFSSKKLTDLLNVARVTPAVNQVECHPVWQQQGLHELCKSKGVHLSGYSPLGSQSKGEVRLKVLQNPIVTEVAEKLGKTTAQVALRWGLQTGHSVLPKSSSGARLKENLDVFDWSIPEDLFTKFSNIPQEKFCRATEFAHETHGFYKTIEELWDGEI

SEQ ID NO: 27525 - protein, 286 aa, Arabidopsis thaliana
  peptide (1)..(286): Ceres Seq. ID no. 12421729
  misc_feature (1)..(269): Homolog of NCBI NO: 25283479 NR Description: probable alcohol dehydrogenase [imported] -
  misc_feature (1)..(286): Homolog of NCBI NO: 13160399 NR Description: aldose reductase [Digitalis purpurea]
  misc_feature (1)..(286): Homolog of NCBI NO: 13160397 NR Description: aldose reductase [Digitalis purpurea]
  misc_feature (1)..(286): Homolog of NCBI NO: 15232354 NR Description: aldo/keto reductase family
  misc_feature (1)..(286): Homolog of NCBI NO: 28393400 NR Description: putative aldo/keto reductase [Arabidopsis
  misc_feature (1)..(286): Homolog of NCBI NO: 30687247 NR Description: aldo/keto reductase family [Arabidopsis thaliana]
  misc_feature (1)..(286): Homolog of NCBI NO: 30687261 NR Description: aldo/keto reductase family [Arabidopsis thaliana]
  misc_feature (1)..(286): Homolog of NCBI NO: 7431112 NR Description: abscisic acid activated protein - alfalfa
  misc_feature (1)..(258): Homolog of NCBI NO: 7431106 NR Description: probable alcohol dehydrogenase [imported] -
  misc_feature (1)..(286): Homolog of NCBI NO: 18404526 NR Description: aldo/keto reductase family
MVATAIEQAIKIGYRHIDCASIYGNEKEIGGVLKKLIGDGFVKREELFITSKLWSNDHLPEDVPKALEKTLQDLQIDYVDLYLIHWPASLKKESLMPTPEMLTKPDITSTWKAMEALYDSGKARAIGVSNFSSKKLTDLLNVARVTPAVNQVECHPVWQQQGLHELCKSKGVHLSGYSPLGSQSKGEVRLKVLQNPIVTEVAEKLGKTTAQVALRWGLQTGHSVLPKSSSGARLKENLDVFDWSIPEDLFTKFSNIPQEKFCRATEFAHETHGFYKTIEELWDGEI

SEQ ID NO: 27526 - protein, 191 aa, Arabidopsis thaliana
  peptide (1)..(191): Ceres Seq. ID no. 12421730
  misc_feature (1)..(174): Homolog of NCBI NO: 25283479 NR Description: probable alcohol dehydrogenase [imported] -
  misc_feature (1)..(191): Homolog of NCBI NO: 13160399 NR Description: aldose reductase [Digitalis purpurea]
  misc_feature (1)..(191): Homolog of NCBI NO: 13160397 NR Description: aldose reductase [Digitalis purpurea]
  misc_feature (1)..(191): Homolog of NCBI NO: 15232354 NR Description: aldo/keto reductase family
  misc_feature (1)..(191): Homolog of NCBI NO: 28393400 NR Description: putative aldo/keto reductase [Arabidopsis
  misc_feature (1)..(191): Homolog of NCBI NO: 30687247 NR Description: aldo/keto reductase family [Arabidopsis thaliana]
  misc_feature (1)..(191): Homolog of NCBI NO: 30687261 NR Description: aldo/keto reductase family [Arabidopsis thaliana]
  misc_feature (1)..(191): Homolog of NCBI NO: 7431112 NR Description: abscisic acid activated protein - alfalfa
  misc_feature (1)..(163): Homolog of NCBI NO: 7431106 NR Description: probable alcohol dehydrogenase [imported] -
  misc_feature (1)..(191): Homolog of NCBI NO: 18404526 NR Description: aldo/keto reductase family
MPTPEMLTKPDITSTWKAMEALYDSGKARAIGVSNFSSKKLTDLLNVARVTPAVNQVECHPVWQQQGLHELCKSKGVHLSGYSPLGSQSKGEVRLKVLQNPIVTEVAEKLGKTTAQVALRWGLQTGHSVLPKSSSGARLKENLDVFDWSIPEDLFTKFSNIPQEKFCRATEFAHETHGFYKTIEELWDGEI

SEQ ID NO: 27527 - DNA, 1342 bp, Arabidopsis thaliana
  misc_feature (1)..(1342): Ceres Seq. ID no. 13489686
  misc_feature: MA Experiment ID: 108433 Result: Down-regulated in Transcription
  misc_feature: MA Experiment 108433 PARAMETER Experiment Name: At_rhl_Mutant2_cDNA_P Parameter: Age (day) Value: 7
  misc_feature: MA Experiment 108433 PARAMETER Experiment Name: At_rhl_Mutant2_cDNA_P Parameter: Organism Value: A. thaliana
  misc_feature: MA Experiment 108433 PARAMETER Experiment Name: At_rhl_Mutant2_cDNA_P Parameter: Plant Line Value: rhl Mutant vs. wt landsburg
  misc_feature: MA Experiment 108433 PARAMETER Experiment Name: At_rhl_Mutant2_cDNA_P Parameter: Tissue Value: Roots
  misc_feature: MA Experiment ID: 20000111 Result: Down-regulated in Transcription
  misc_feature: MA Experiment 20000111 PARAMETER Experiment Name: At_42deg_Heat_cDNA_P Parameter: Temperature (deg C) Value: 42 vs. 22
  misc_feature: MA Experiment 20000111 PARAMETER Experiment Name: At_42deg_Heat_cDNA_P Parameter: Timepoint (hr) Value: 6
  misc_feature: MA Experiment 20000111 PARAMETER Experiment Name: At_42deg_Heat_cDNA_P Parameter: Tissue Value: Aerial
  misc_feature: MA Experiment ID: 20000144 Result: Down-regulated in Transcription
  misc_feature: MA Experiment 20000144 PARAMETER Experiment Name: At_42deg_Heat_cDNA_P Parameter: Temperature (deg C) Value: 42 vs. 22
  misc_feature: MA Experiment 20000144 PARAMETER Experiment Name: At_42deg_Heat_cDNA_P Parameter: Timepoint (hr) Value: 1
  misc_feature: MA Experiment 20000144 PARAMETER Experiment Name: At_42deg_Heat_cDNA_P Parameter: Tissue Value: Aerial
  misc_feature: MA Experiment ID: 20000224 Result: Down-regulated in Transcription
  misc_feature: MA Experiment ID: 20001451 Result: Down-regulated in Transcription
  misc_feature: MA Experiment 20001451 PARAMETER Experiment Name: At_Far-red-induction_P Parameter: Age (day) Value: 7
  misc_feature: MA Experiment 20001451 PARAMETER Experiment Name: At_Far-red-induction_P Parameter: Light Value: Far-red vs. White
  misc_feature: MA Experiment 20001451 PARAMETER Experiment Name: At_Far-red-induction_P Parameter: Organism Value: A. thaliana
  misc_feature: MA Experiment 20001451 PARAMETER Experiment Name: At_Far-red-induction_P Parameter: Plant Line Value: Columbia
  misc_feature: MA Experiment 20001451 PARAMETER Experiment Name: At_Far-red-induction_P Parameter: Timepoint (hr) Value: 24
  misc_feature: MA Experiment 20001451 PARAMETER Experiment Name: At_Far-red-induction_P Parameter: Tissue Value: Whole Plant
acacggcggatcaacgagagagagaaaaagagagaggctttattcttctcttccccgtttcgatctcctctttaatgcatctgcgtatctgattttgaaagatttaacggttctttaaaatgatgggtattggtcaaagaagctcttttcaatctgggaaggttactgggtaaatgttggtacattggctcaggttttataaagtttggtgatcattctcagtttcaagtttgatcaaaatgtggggctttgcgtcgaatgtcattggaagtatggggttaaagaagtcccctaaagattcagctcaagcatcctctcaatgctcagatgatgaggtttcaaatattagcagggatgaagagggattagaatgtcccatatgttgggaatctttcaacattgttgagaatgttccttatgtgttatggtgtggtcatactctttgccagaattgtgtctttggtctccaatctgctgtcttgagactctcaagccaagatattcggattccgtttttcgtctcgtgcccgtggtgtcagttgctttcgttcaggattgtttacaagggtaatctaaagttccctcggaagaatttcttccttctctggatggttgagagtctgaatggtgacaggacaagtcatggtgacaggacaagtcatggttccttggtcactgataaccagcaatcggctccgactccgaggtgtagcatgtctctgggaaaccacagcagcaacaacaatctggttgcgaggcctttattgcgtaaccagtctacagaccttttgccacatcatgaccacagtaaccaaccaagcagacaactcttctcctttcacaaatctcttgattttttcatctctttcacctccaagtttccgtttgtgatcatcttccttctgatcgtattctttgctatacctggtagcctcataattcttgccctttacttcctcctcacaatacttttcgcagttccagctggtcttgtactatattttgcttatcctattctagaaaggttggtaaatgaaataacatcatcatgagactggtgctgaactcataactcctattattggttgctcggcccattctgggtgattgtagttcactatggaacccttttttagcactttggagcctttgatggtcagaactcagaagaagtttttatgatttttggtagttctgcacatttcttataatattgtttattgcaagattgagcattgtatttgtgattttgaactcttggttttagtattgttgtgcaactgtctaaagttttggttttcagatttgtgccataatggatcacatgtgtgttatctctctt

SEQ ID NO: 27528 - protein, 270 aa, Arabidopsis thaliana
  peptide (1)..(270): Ceres Seq. ID no. 13489687
  misc_feature (45)..(99): Pfam Name: Zinc finger, C3HC4 type (RING finger) Pfam Description: Zinc finger, C3HC4 type (RING finger)
  misc_feature (1)..(269): Homolog of NCBI NO: 15221223 NR Description: zinc finger (C3HC4-type RING finger) protein
  misc_feature (1)..(269): Homolog of NCBI NO: 21592563 NR Description: putative RING zinc finger protein [Arabidopsis
  misc_feature (1)..(269): Homolog of NCBI NO: 11994767 NR Description: RING zinc finger protein-like [Arabidopsis
  misc_feature (1)..(269): Homolog of NCBI NO: 15228658 NR Description: expressed protein [Arabidopsis thaliana]
  misc_feature (1)..(270): Homolog of NCBI NO: 21594048 NR Description: unknown [Arabidopsis thaliana]
  misc_feature (1)..(270): Homolog of NCBI NO: 18409246 NR Description: zinc finger (C3HC4-type RING finger) protein
MWGFASNVIGSMGLKKSPKDSAQASSQCSDDEVSNISRDEEGLECPICWESFNIVENVPYVLWCGHTLCQNCVFGLQSAVLRLSSQDIRIPFFVSCPWCQLLSFRIVYKGNLKFPRKNFFLLWMVESLNGDRTSHGDRTSHGSLVTDNQQSAPTPRCSMSLGNHSSNNNLVARPLLRNQSTDLLPHHDHSNQPSRQLFSFHKSLDFFISFTSKFPFVIIFLLIVFFAIPGSLIILALYFLLTILFAVPAGLVLYFAYPILERLVNEITSS

SEQ ID NO: 27529 - protein, 259 aa, Arabidopsis thaliana
  peptide (1)..(259): Ceres Seq. ID no. 13489688
  misc_feature (34)..(88): Pfam Name: Zinc finger, C3HC4 type (RING finger) Pfam Description: Zinc finger, C3HC4 type (RING finger)
  misc_feature (1)..(258): Homolog of NCBI NO: 15221223 NR Description: zinc finger (C3HC4-type RING finger) protein
  misc_feature (1)..(258): Homolog of NCBI NO: 21592563 NR Description: putative RING zinc finger protein [Arabidopsis
  misc_feature (1)..(258): Homolog of NCBI NO: 11994767 NR Description: RING zinc finger protein-like [Arabidopsis
  misc_feature (1)..(258): Homolog of NCBI NO: 15228658 NR Description: expressed protein [Arabidopsis thaliana]
  misc_feature (1)..(259): Homolog of NCBI NO: 21594048 NR Description: unknown [Arabidopsis thaliana]
  misc_feature (1)..(259): Homolog of NCBI NO: 18409246 NR Description: zinc finger (C3HC4-type RING finger) protein
MGLKKSPKDSAQASSQCSDDEVSNISRDEEGLECPICWESFNIVENVPYVLWCGHTLCQNCVFGLQSAVLRLSSQDIRIPFFVSCPWCQLLSFRIVYKGNLKFPRKNFFLLWMVESLNGDRTSHGDRTSHGSLVTDNQQSAPTPRCSMSLGNHSSNNNLVARPLLRNQSTDLLPHHDHSNQPSRQLFSFHKSLDFFISFTSKFPFVIIFLLIVFFAIPGSLIILALYFLLTILFAVPAGLVLYFAYPILERLVNEITSS

SEQ ID NO: 27530 - protein, 147 aa, Arabidopsis thaliana
  peptide (1)..(147): Ceres Seq. ID no. 13489689
  misc_feature (1)..(147): Homolog of NCBI NO: 18409246 NR Description: zinc finger (C3HC4-type RING finger) protein
  misc_feature (1)..(146): Homolog of NCBI NO: 15221223 NR Description: zinc finger (C3HC4-type RING finger) protein
  misc_feature (1)..(146): Homolog of NCBI NO: 21592563 NR Description: putative RING zinc finger protein [Arabidopsis
  misc_feature (1)..(146): Homolog of NCBI NO: 11994767 NR Description: RING zinc finger protein-like [Arabidopsis
  misc_feature (1)..(146): Homolog of NCBI NO: 15228658 NR Description: expressed protein [Arabidopsis thaliana]
  misc_feature (1)..(147): Homolog of NCBI NO: 21594048 NR Description: unknown [Arabidopsis thaliana]
MVESLNGDRTSHGDRTSHGSLVTDNQQSAPTPRCSMSLGNHSSNNNLVARPLLRNQSTDLLPHHDHSNQPSRQLFSFHKSLDFFISFTSKFPFVIIFLLIVFFAIPGSLIILALYFLLTILFAVPAGLVLYFAYPILERLVNEITSS

SEQ ID NO: 27531 - DNA, 1646 bp, Arabidopsis thaliana
  misc_feature (1)..(1646): Ceres Seq. ID no. 13488223
  misc_feature: MA Experiment ID: 108434 Result: Up-regulated in Transcription
  misc_feature: MA Experiment 108434 PARAMETER Experiment Name: At_Root_Tips_cDNA_P Parameter: Tissue Value: Root Tips
  misc_feature: MA Experiment ID: 108573 Result: Down-regulated in Transcription
  misc_feature: MA Experiment 108573 PARAMETER Experiment Name: At_Drought_cDNA_P Parameter: Timepoint (hr) Value: 6
  misc_feature: MA Experiment 108573 PARAMETER Experiment Name: At_Drought_cDNA_P Parameter: Tissue Value: Aerial
  misc_feature: MA Experiment 108573 PARAMETER Experiment Name: At_Drought_cDNA_P Parameter: Treatment Value: Drought vs. No Drought
  misc_feature: MA Experiment ID: 20000182 Result: Down-regulated in Transcription
  misc_feature: MA Experiment 20000182 PARAMETER Experiment Name: At_2mM_SA_P Parameter: Age (day) Value: 14
  misc_feature: MA Experiment 20000182 PARAMETER Experiment Name: At_2mM_SA_P Parameter: Organism Value: A. thaliana
  misc_feature: MA Experiment 20000182 PARAMETER Experiment Name: At_2mM_SA_P Parameter: Plant Line Value: WS
  misc_feature: MA Experiment 20000182 PARAMETER Experiment Name: At_2mM_SA_P Parameter: Timepoint (hr) Value: 6
  misc_feature: MA Experiment 20000182 PARAMETER Experiment Name: At_2mM_SA_P Parameter: Tissue Value: Aerial
  misc_feature: MA Experiment 20000182 PARAMETER Experiment Name: At_2mM_SA_P Parameter: Treatment Value: 2mM SA vs. No Treatment
  misc_feature: MA Experiment ID: 20000184 Result: Down-regulated in Transcription
  misc_feature: MA Experiment 20000184 PARAMETER Experiment Name: At_Shoots__P Parameter: Age (day) Value: 7
  misc_feature: MA Experiment 20000184 PARAMETER Experiment Name: At_Shoots__P Parameter: Tissue Value: Shoots vs. Whole Plant
  misc_feature: MA Experiment ID: 20000227 Result: Up-regulated in Transcription
  misc_feature: MA Experiment 20000227 PARAMETER Experiment Name: At_Root-Tips-vs-Tops_P Parameter: Tissue Value: Root Tips vs. Root Tops
  misc_feature: MA Experiment ID: 20000234 Result: Up-regulated in Transcription
  misc_feature: MA Experiment 20000234 PARAMETER Experiment Name: At_Siliques_P Parameter: Age (day) Value: 21
  misc_feature: MA Experiment 20000234 PARAMETER Experiment Name: At_Siliques_P Parameter: Organism Value: A. thaliana
  misc_feature: MA Experiment 20000234 PARAMETER Experiment Name: At_Siliques_P Parameter: Plant Line Value: WS
  misc_feature: MA Experiment 20000234 PARAMETER Experiment Name: At_Siliques_P Parameter: Tissue Value: Less Than 5mm Siliques vs. Whole Plant
  misc_feature: MA Experiment ID: 20000235 Result: Up-regulated in Transcription
  misc_feature: MA Experiment 20000235 PARAMETER Experiment Name: At_Siliques_P Parameter: Age (day) Value: 21
  misc_feature: MA Experiment 20000235 PARAMETER Experiment Name: At_Siliques_P Parameter: Organism Value: A. thaliana
  misc_feature: MA Experiment 20000235 PARAMETER Experiment Name: At_Siliques_P Parameter: Plant Line Value: WS
  misc_feature: MA Experiment 20000235 PARAMETER Experiment Name: At_Siliques_P Parameter: Tissue Value: 5-10mm Siliques vs. Whole Plant
  misc_feature: MA Experiment ID: 20000264 Result: Up-regulated in Transcription
  misc_feature: MA Experiment 20000264 PARAMETER Experiment Name: At_Open_Flower_P Parameter: Age (day) Value: 21
  misc_feature: MA Experiment 20000264 PARAMETER Experiment Name: At_Open_Flower_P Parameter: Plant Line Value: WS
  misc_feature: MA Experiment 20000264 PARAMETER Experiment Name: At_Open_Flower_P Parameter: Tissue Value: Open Flower vs. Whole Plant
  misc_feature: MA Experiment ID: 20000286 Result: Up-regulated in Transcription
  misc_feature: MA Experiment 20000286 PARAMETER Experiment Name: At_Open_Flower_P Parameter: Age (day) Value: 21
  misc_feature: MA Experiment 20000286 PARAMETER Experiment Name: At_Open_Flower_P Parameter: Plant Line Value: WS
  misc_feature: MA Experiment 20000286 PARAMETER Experiment Name: At_Open_Flower_P Parameter: Tissue Value: Half Open vs. Whole Plant
  misc_feature: MA Experiment ID: 20000438 Result: Down-regulated in Transcription
  misc_feature: MA Experiment 20000438 PARAMETER Experiment Name: At_Shoots__P Parameter: Age (day) Value: 14
  misc_feature: MA Experiment 20000438 PARAMETER Experiment Name: At_Shoots__P Parameter: Tissue Value: Shoots vs. Whole Plant
  misc_feature: MA Experiment ID: 20000439 Result: Down-regulated in Transcription
  misc_feature: MA Experiment 20000439 PARAMETER Experiment Name: At_Roots__P Parameter: Age (day) Value: 14 vs. 21
  misc_feature: MA Experiment 20000439 PARAMETER Experiment Name: At_Roots__P Parameter: Organism Value: A. thaliana
  misc_feature: MA Experiment 20000439 PARAMETER Experiment Name: At_Roots__P Parameter: Tissue Value: Roots vs. Whole Plant
  misc_feature: MA Experiment ID: 20000441 Result: Down-regulated in Transcription
  misc_feature: MA Experiment 20000441 PARAMETER Experiment Name: At_1uM_BR-BRZ__P Parameter: Tissue Value: Shoot Apices
  misc_feature: MA Experiment 20000441 PARAMETER Experiment Name: At_1uM_BR-BRZ__P Parameter: Treatment Value: 1uM BR vs. No Treatment
  misc_feature: MA Experiment ID: 20000443 Result: Down-regulated in Transcription
  misc_feature: MA Experiment 20000443 PARAMETER Experiment Name: At_1uM_BR-BRZ__P Parameter: Tissue Value: Shoot Apices
  misc_feature: MA Experiment 20000443 PARAMETER Experiment Name: At_1uM_BR-BRZ__P Parameter: Treatment Value: 1uM BRZ vs. No Treatment
  misc_feature: MA Experiment ID: 20000451 Result: Down-regulated in Transcription
  misc_feature: MA Experiment 20000451 PARAMETER Experiment Name: At_CS6879_Shoots-Roots_P Parameter: Age (day) Value: 14
  misc_feature: MA Experiment 20000451 PARAMETER Experiment Name: At_CS6879_Shoots-Roots_P Parameter: Organism Value: A. thaliana
  misc_feature: MA Experiment 20000451 PARAMETER Experiment Name: At_CS6879_Shoots-Roots_P Parameter: Plant Line Value: CS6879 vs. WS
  misc_feature: MA Experiment 20000451 PARAMETER Experiment Name: At_CS6879_Shoots-Roots_P Parameter: Tissue Value: Roots
  misc_feature: MA Experiment ID: 20000527 Result: Down-regulated in Transcription
  misc_feature: MA Experiment 20000527 PARAMETER Experiment Name: At_10percent_PEG_P Parameter: Age (day) Value: 20
  misc_feature: MA Experiment 20000527 PARAMETER Experiment Name: At_10percent_PEG_P Parameter: Organism Value: A. thaliana
  misc_feature: MA Experiment 20000527 PARAMETER Experiment Name: At_10percent_PEG_P Parameter: Plant Line Value: WS
  misc_feature: MA Experiment 20000527 PARAMETER Experiment Name: At_10percent_PEG_P Parameter: Timepoint (day) Value: 20
  misc_feature: MA Experiment 20000527 PARAMETER Experiment Name: At_10percent_PEG_P Parameter: Tissue Value: Whole Plant
  misc_feature: MA Experiment 20000527 PARAMETER Experiment Name: At_10percent_PEG_P Parameter: Treatment Value: 10percent PEG vs. No Treatment
  misc_feature: MA Experiment ID: 20001558 Result: Up-regulated in Transcription
  misc_feature: MA Experiment 20001558 PARAMETER Experiment Name: At_Drought_Soil_Dry_P Parameter: Age (day) Value: 27
  misc_feature: MA Experiment 20001558 PARAMETER Experiment Name: At_Drought_Soil_Dry_P Parameter: Organism Value: A. thaliana
  misc_feature: MA Experiment 20001558 PARAMETER Experiment Name: At_Drought_Soil_Dry_P Parameter: Plant Line Value: WS
  misc_feature: MA Experiment 20001558 PARAMETER Experiment Name: At_Drought_Soil_Dry_P Parameter: Post Timepoint (hr) Value: 6
  misc_feature: MA Experiment 20001558 PARAMETER Experiment Name: At_Drought_Soil_Dry_P Parameter: Post-Treatment Value: Re-Water vs. No Drought
  misc_feature: MA Experiment 20001558 PARAMETER Experiment Name: At_Drought_Soil_Dry_P Parameter: Timepoint (day) Value: 13
  misc_feature: MA Experiment 20001558 PARAMETER Experiment Name: At_Drought_Soil_Dry_P Parameter: Treatment Value: Drought vs. No Drought
  misc_feature: MA Experiment ID: 20001560 Result: Up-regulated in Transcription
  misc_feature: MA Experiment 20001560 PARAMETER Experiment Name: At_Drought_Soil_Dry_P Parameter: Age (day) Value: 28
  misc_feature: MA Experiment 20001560 PARAMETER Experiment Name: At_Drought_Soil_Dry_P Parameter: Organism Value: A. thaliana
  misc_feature: MA Experiment 20001560 PARAMETER Experiment Name: At_Drought_Soil_Dry_P Parameter: Plant Line Value: WS
  misc_feature: MA Experiment 20001560 PARAMETER Experiment Name: At_Drought_Soil_Dry_P Parameter: Post Timepoint (hr) Value: None
  misc_feature: MA Experiment 20001560 PARAMETER Experiment Name: At_Drought_Soil_Dry_P Parameter: Post-Treatment Value: None
  misc_feature: MA Experiment 20001560 PARAMETER Experiment Name: At_Drought_Soil_Dry_P Parameter: Timepoint (day) Value: 14
  misc_feature: MA Experiment 20001560 PARAMETER Experiment Name: At_Drought_Soil_Dry_P Parameter: Treatment Value: Drought vs. No Drought
  misc_feature: MA Experiment ID: 20001768 Result: Up-regulated in Transcription
  misc_feature: MA Experiment 20001768 PARAMETER Experiment Name: At_Far-red-enriched-adult_P Parameter: Age (day) Value: 28
  misc_feature: MA Experiment 20001768 PARAMETER Experiment Name: At_Far-red-enriched-adult_P Parameter: Light Value: Far-red enriched vs. White
  misc_feature: MA Experiment 20001768 PARAMETER Experiment Name: At_Far-red-enriched-adult_P Parameter: Organism Value: A. thaliana
  misc_feature: MA Experiment 20001768 PARAMETER Experiment Name: At_Far-red-enriched-adult_P Parameter: Plant Line Value: Columbia
  misc_feature: MA Experiment 20001768 PARAMETER Experiment Name: At_Far-red-enriched-adult_P Parameter: Timepoint (hr) Value: 1
  misc_feature: MA Experiment 20001768 PARAMETER Experiment Name: At_Far-red-enriched-adult_P Parameter: Tissue Value: Aerial
  misc_feature: MA Experiment ID: 20001771 Result: Up-regulated in Transcription
  misc_feature: MA Experiment 20001771 PARAMETER Experiment Name: At_Far-red-enriched-adult_P Parameter: Age (day) Value: 28
  misc_feature: MA Experiment 20001771 PARAMETER Experiment Name: At_Far-red-enriched-adult_P Parameter: Light Value: Far-red enriched vs. White
  misc_feature: MA Experiment 20001771 PARAMETER Experiment Name: At_Far-red-enriched-adult_P Parameter: Organism Value: A. thaliana
  misc_feature: MA Experiment 20001771 PARAMETER Experiment Name: At_Far-red-enriched-adult_P Parameter: Plant Line Value: Columbia
  misc_feature: MA Experiment 20001771 PARAMETER Experiment Name: At_Far-red-enriched-adult_P Parameter: Timepoint (hr) Value: 16
  misc_feature: MA Experiment 20001771 PARAMETER Experiment Name: At_Far-red-enriched-adult_P Parameter: Tissue Value: Aerial
  misc_feature: MA Experiment ID: 20001773 Result: Up-regulated in Transcription
  misc_feature: MA Experiment 20001773 PARAMETER Experiment Name: At_Far-red-enriched-adult_P Parameter: Age (day) Value: 30
  misc_feature: MA Experiment 20001773 PARAMETER Experiment Name: At_Far-red-enriched-adult_P Parameter: Light Value: Far-red enriched vs. White
  misc_feature: MA Experiment 20001773 PARAMETER Experiment Name: At_Far-red-enriched-adult_P Parameter: Organism Value: A. thaliana
  misc_feature: MA Experiment 20001773 PARAMETER Experiment Name: At_Far-red-enriched-adult_P Parameter: Plant Line Value: Columbia
  misc_feature: MA Experiment 20001773 PARAMETER Experiment Name: At_Far-red-enriched-adult_P Parameter: Timepoint (hr) Value: 48
  misc_feature: MA Experiment 20001773 PARAMETER Experiment Name: At_Far-red-enriched-adult_P Parameter: Tissue Value: Aerial
  misc_feature: MA Experiment ID: 20001906 Result: Down-regulated in Transcription
  misc_feature: MA Experiment 20001906 PARAMETER Experiment Name: At_Drought_Reproduction_P Parameter: Age (day) Value: 35
  misc_feature: MA Experiment 20001906 PARAMETER Experiment Name: At_Drought_Reproduction_P Parameter: Organism Value: A. thaliana
  misc_feature: MA Experiment 20001906 PARAMETER Experiment Name: At_Drought_Reproduction_P Parameter: Plant Line Value: WS
  misc_feature: MA Experiment 20001906 PARAMETER Experiment Name: At_Drought_Reproduction_P Parameter: Timepoint (day) Value: 5
  misc_feature: MA Experiment 20001906 PARAMETER Experiment Name: At_Drought_Reproduction_P Parameter: Tissue Value: Siliques
  misc_feature: MA Experiment 20001906 PARAMETER Experiment Name: At_Drought_Reproduction_P Parameter: Treatment Value: Drought vs. No Drought
  misc_feature: MA Experiment ID: 20001908 Result: Down-regulated in Transcription
  misc_feature: MA Experiment 20001908 PARAMETER Experiment Name: At_Drought_Reproduction_P Parameter: Age (day) Value: 40
  misc_feature: MA Experiment 20001908 PARAMETER Experiment Name: At_Drought_Reproduction_P Parameter: Organism Value: A. thaliana
  misc_feature: MA Experiment 20001908 PARAMETER Experiment Name: At_Drought_Reproduction_P Parameter: Plant Line Value: WS
  misc_feature: MA Experiment 20001908 PARAMETER Experiment Name: At_Drought_Reproduction_P Parameter: Timepoint (day) Value: 10
  misc_feature: MA Experiment 20001908 PARAMETER Experiment Name: At_Drought_Reproduction_P Parameter: Tissue Value: Siliques
  misc_feature: MA Experiment 20001908 PARAMETER Experiment Name: At_Drought_Reproduction_P Parameter: Treatment Value: Drought vs. No Drought
  misc_feature: MA Experiment ID: 20001911 Result: Down-regulated in Transcription
  misc_feature: MA Experiment 20001911 PARAMETER Experiment Name: At_Drought_Reproduction_P Parameter: Age (day) Value: 40
  misc_feature: MA Experiment 20001911 PARAMETER Experiment Name: At_Drought_Reproduction_P Parameter: Organism Value: A. thaliana
  misc_feature: MA Experiment 20001911 PARAMETER Experiment Name: At_Drought_Reproduction_P Parameter: Plant Line Value: WS
  misc_feature: MA Experiment 20001911 PARAMETER Experiment Name: At_Drought_Reproduction_P Parameter: Timepoint (day) Value: 10
  misc_feature: MA Experiment 20001911 PARAMETER Experiment Name: At_Drought_Reproduction_P Parameter: Tissue Value: Flowers
  misc_feature: MA Experiment 20001911 PARAMETER Experiment Name: At_Drought_Reproduction_P Parameter: Treatment Value: Drought vs. No Drought
tggtactctgttgcattatttctctcactcaaacgtatatacaaacataaattatgtcgacagaaatggaggtcgttagtgttcttaagtaccttgacaacaaatccatattggtcgttggagctgctgggttcttagcaaatatctttgtggagaagatattaagggtggcaccaaacgtgaagaaactctatctccttctaagagcatcaaaaggaaaatctgctacccagaggtttaacgacgagattttgaagaaagatttgttcaaggtgctgaaggagaagtatggtcccaatctaaatcaacttacatcagagaaaatcactattgtcgacggagacatttgccttgaggatttaggtcttcaagacttcgacttggctcatgagatgatccaccaagttgatgccattgttaatttagctgcaactactaagtttgatgaaagatacgatgtagctcttgggatcaacacattgggtgctctcaatgtcttgaactttgccaagagatgtgcaaaggttaagatccttgttcatgtatcaacagcttacgtgtgcggagaaaaatctggcttgataatggaaacaccgtaccgtatgggtgagacgttgaatggaaccaccggtttagacatcaactacgagaaaaaattggttcaggagaaacttgaccagctccgagtaatcggagccgctcctgaaaccatcacggaaaccatgaaggatctcggactcagacgggcaaagatgtacggatggccaaacacatatgtgttcaccaaagcaatgggggagatgatggtagggacaaaaagagaaaatctgtcacttgtgttgcttcgtccttcaattattaccagcacattcaaagaaccatttcctggttggactgagggcatcaggactattgatagtttagctgttggatatggcaaaggcaaactcacgtgcttcctctgtgatcttgatgctgtttctgatgtgatgccggcagatatggtagtaaattcgattcttgtatcaatggccgctcaagccggtaaacaagaagagattatttaccatgtgggttcttcacttagaaatccgatgaaaaattcaaagtttcctgaattagcgtatcggtatttctcaatcaaaccgtggaccaacaaagaagggaaggtcgttaaggtcggggccattgagatcctgagttctatgcgtagtttccatagatacatgaccatacgctacttgattgcattgaagggacttgaattggtaaacataatactttgcaagttgtttgagaaggaatttcagtatttcaataagaaaataaattttatattccggcttgttgatctctatcagccttacctctttttctatggaatatttgatgattcaaacacagaaaaattgcgaaaaatggtatcgaagacgggagtcgaaaacgagatgttttatttcgatccaaaggttctcgattgggacgactattttttgaacacacatgttattgggctgcttaagtatgtcttctaataattttagttgtataatctttatcttattttactacaacgagtataaattatgtggacactatcgttctccttaatccgttttcatacggctatgtttcgaaatttggtt

SEQ ID NO: 27532 - protein, 493 aa, Arabidopsis thaliana
  peptide (1)..(493): Ceres Seq. ID no. 13488224
  misc_feature (291)..(493): Pfam Name: Male sterility protein Pfam Description: Male sterility protein
  misc_feature (417)..(492): Homolog of NCBI NO: 15229993 NR Description: acyl CoA reductase -related protein [Arabidopsis
  misc_feature (9)..(373): Homolog of NCBI NO: 15229993 NR Description: acyl CoA reductase -related protein [Arabidopsis
  misc_feature (5)..(492): Homolog of NCBI NO: 35215152 NR Description: putative fatty acyl coA reductase
  misc_feature (11)..(492): Homolog of NCBI NO: 11357157 NR Description: acyl CoA reductase-protein - Arabidopsis thaliana
  misc_feature (11)..(492): Homolog of NCBI NO: 15242260 NR Description: male sterility 2-related protein (emb|CAA68191.1)
  misc_feature (6)..(492): Homolog of NCBI NO: 5020215 NR Description: acyl CoA reductase [Simmondsia chinensis]
  misc_feature (114)..(493): Homolog of NCBI NO: 30689818 NR Description: male sterility 2-related protein [Arabidopsis
  misc_feature (31)..(493): Homolog of NCBI NO: 7487952 NR Description: male sterility protein 2 homolog T16L1.280 -
  misc_feature (5)..(493): Homolog of NCBI NO: 25354587 NR Description: male sterility 2-like protein [imported] -
  misc_feature (1)..(493): Homolog of NCBI NO: 16323107 NR Description: AT4g33790/T16L1_280 [Arabidopsis thaliana]
MSTEMEVVSVLKYLDNKSILVVGAAGFLANIFVEKILRVAPNVKKLYLLLRASKGKSATQRFNDEILKKDLFKVLKEKYGPNLNQLTSEKITIVDGDICLEDLGLQDFDLAHEMIHQVDAIVNLAATTKFDERYDVALGINTLGALNVLNFAKRCAKVKILVHVSTAYVCGEKSGLIMETPYRMGETLNGTTGLDINYEKKLVQEKLDQLRVIGAAPETITETMKDLGLRRAKMYGWPNTYVFTKAMGEMMVGTKRENLSLVLLRPSIITSTFKEPFPGWTEGIRTIDSLAVGYGKGKLTCFLCDLDAVSDVMPADMVVNSILVSMAAQAGKQEEIIYHVGSSLRNPMKNSKFPELAYRYFSIKPWTNKEGKVVKVGAIEILSSMRSFHRYMTIRYLIALKGLELVNIILCKLFEKEFQYFNKKINFIFRLVDLYQPYLFFYGIFDDSNTEKLRKMVSKTGVENEMFYFDPKVLDWDDYFLNTHVIGLLKYVF

SEQ ID NO: 27533 - protein, 489 aa, Arabidopsis thaliana
  peptide (1)..(489): Ceres Seq. ID no. 13488225
  misc_feature (287)..(489): Pfam Name: Male sterility protein Pfam Description: Male sterility protein
  misc_feature (413)..(488): Homolog of NCBI NO: 15229993 NR Description: acyl CoA reductase -related protein [Arabidopsis
  misc_feature (5)..(369): Homolog of NCBI NO: 15229993 NR Description: acyl CoA reductase -related protein [Arabidopsis
  misc_feature (1)..(488): Homolog of NCBI NO: 35215152 NR Description: putative fatty acyl coA reductase
  misc_feature (7)..(488): Homolog of NCBI NO: 11357157 NR Description: acyl CoA reductase-protein - Arabidopsis thaliana
  misc_feature (7)..(488): Homolog of NCBI NO: 15242260 NR Description: male sterility 2-related protein (emb|CAA68191.1)
  misc_feature (2)..(488): Homolog of NCBI NO: 5020215 NR Description: acyl CoA reductase [Simmondsia chinensis]
  misc_feature (110)..(489): Homolog of NCBI NO: 30689818 NR Description: male sterility 2-related protein [Arabidopsis
  misc_feature (27)..(489): Homolog of NCBI NO: 7487952 NR Description: male sterility protein 2 homolog T16L1.280 -
  misc_feature (1)..(489): Homolog of NCBI NO: 25354587 NR Description: male sterility 2-like protein [imported] -
  misc_feature (1)..(489): Homolog of NCBI NO: 16323107 NR Description: AT4g33790/T16L1_280 [Arabidopsis thaliana]
MEVVSVLKYLDNKSILVVGAAGFLANIFVEKILRVAPNVKKLYLLLRASKGKSATQRFNDEILKKDLFKVLKEKYGPNLNQLTSEKITIVDGDICLEDLGLQDFDLAHEMIHQVDAIVNLAATTKFDERYDVALGINTLGALNVLNFAKRCAKVKILVHVSTAYVCGEKSGLIMETPYRMGETLNGTTGLDINYEKKLVQEKLDQLRVIGAAPETITETMKDLGLRRAKMYGWPNTYVFTKAMGEMMVGTKRENLSLVLLRPSIITSTFKEPFPGWTEGIRTIDSLAVGYGKGKLTCFLCDLDAVSDVMPADMVVNSILVSMAAQAGKQEEIIYHVGSSLRNPMKNSKFPELAYRYFSIKPWTNKEGKVVKVGAIEILSSMRSFHRYMTIRYLIALKGLELVNIILCKLFEKEFQYFNKKINFIFRLVDLYQPYLFFYGIFDDSNTEKLRKMVSKTGVENEMFYFDPKVLDWDDYFLNTHVIGLLKYVF

SEQ ID NO: 27534 - protein, 380 aa, Arabidopsis thaliana
  peptide (1)..(380): Ceres Seq. ID no. 13488226
  misc_feature (178)..(380): Pfam Name: Male sterility protein Pfam Description: Male sterility protein
  misc_feature (304)..(379): Homolog of NCBI NO: 15229993 NR Description: acyl CoA reductase -related protein [Arabidopsis
  misc_feature (1)..(260): Homolog of NCBI NO: 15229993 NR Description: acyl CoA reductase -related protein [Arabidopsis
  misc_feature (1)..(379): Homolog of NCBI NO: 35215152 NR Description: putative fatty acyl coA reductase
  misc_feature (1)..(379): Homolog of NCBI NO: 11357157 NR Description: acyl CoA reductase-protein - Arabidopsis thaliana
  misc_feature (1)..(379): Homolog of NCBI NO: 15242260 NR Description: male sterility 2-related protein (emb|CAA68191.1)
  misc_feature (1)..(379): Homolog of NCBI NO: 5020215 NR Description: acyl CoA reductase [Simmondsia chinensis]
  misc_feature (1)..(380): Homolog of NCBI NO: 30689818 NR Description: male sterility 2-related protein [Arabidopsis
  misc_feature (1)..(380): Homolog of NCBI NO: 7487952 NR Description: male sterility protein 2 homolog T16L1.280 -
  misc_feature (1)..(380): Homolog of NCBI NO: 25354587 NR Description: male sterility 2-like protein [imported] -
  misc_feature (1)..(380): Homolog of NCBI NO: 16323107 NR Description: AT4g33790/T16L1_280 [Arabidopsis thaliana]
MIHQVDAIVNLAATTKFDERYDVALGINTLGALNVLNFAKRCAKVKILVHVSTAYVCGEKSGLIMETPYRMGETLNGTTGLDINYEKKLVQEKLDQLRVIGAAPETITETMKDLGLRRAKMYGWPNTYVFTKAMGEMMVGTKRENLSLVLLRPSIITSTFKEPFPGWTEGIRTIDSLAVGYGKGKLTCFLCDLDAVSDVMPADMVVNSILVSMAAQAGKQEEIIYHVGSSLRNPMKNSKFPELAYRYFSIKPWTNKEGKVVKVGAIEILSSMRSFHRYMTIRYLIALKGLELVNIILCKLFEKEFQYFNKKINFIFRLVDLYQPYLFFYGIFDDSNTEKLRKMVSKTGVENEMFYFDPKVLDWDDYFLNTHVIGLLKYVF

SEQ ID NO: 27535 - DNA, 1263 bp, Arabidopsis thaliana
  misc_feature (1)..(1263): Ceres Seq. ID no. 13491651
  misc_feature: MA Experiment ID: 108434 Result: Down-regulated in Transcription
  misc_feature: MA Experiment 108434 PARAMETER Experiment Name: At_Root_Tips_cDNA_P Parameter: Tissue Value: Root Tips
  misc_feature: MA Experiment ID: 108462 Result: Up-regulated in Transcription
  misc_feature: MA Experiment 108462 PARAMETER Experiment Name: At_Germinating_Seeds_cDNA_P Parameter: Age (day) Value: 2 vs. 0
  misc_feature: MA Experiment 108462 PARAMETER Experiment Name: At_Germinating_Seeds_cDNA_P Parameter: Tissue Value: Germinating Seeds
  misc_feature: MA Experiment ID: 108463 Result: Up-regulated in Transcription
  misc_feature: MA Experiment 108463 PARAMETER Experiment Name: At_Germinating_Seeds_cDNA_P Parameter: Age (day) Value: 3 vs. 0
  misc_feature: MA Experiment 108463 PARAMETER Experiment Name: At_Germinating_Seeds_cDNA_P Parameter: Tissue Value: Germinating Seeds
  misc_feature: MA Experiment ID: 108464 Result: Up-regulated in Transcription
  misc_feature: MA Experiment 108464 PARAMETER Experiment Name: At_Germinating_Seeds_cDNA_P Parameter: Age (day) Value: 4 vs. 0
  misc_feature: MA Experiment 108464 PARAMETER Experiment Name: At_Germinating_Seeds_cDNA_P Parameter: Tissue Value: Germinating Seeds
  misc_feature: MA Experiment ID: 108469 Result: Up-regulated in Transcription
  misc_feature: MA Experiment ID: 108488 Result: Down-regulated in Transcription
  misc_feature: MA Experiment ID: 108574 Result: Up-regulated in Transcription
  misc_feature: MA Experiment 108574 PARAMETER Experiment Name: At_Wounding__cDNA_P Parameter: Timepoint (hr) Value: 1
  misc_feature: MA Experiment 108574 PARAMETER Experiment Name: At_Wounding__cDNA_P Parameter: Tissue Value: Aerial
  misc_feature: MA Experiment 108574 PARAMETER Experiment Name: At_Wounding__cDNA_P Parameter: Treatment Value: Wounding vs. No Wounding
  misc_feature: MA Experiment ID: 108577 Result: Down-regulated in Transcription
  misc_feature: MA Experiment 108577 PARAMETER Experiment Name: At_42deg_Heat_cDNA_P Parameter: Temperature (deg C) Value: 42 vs. 22
  misc_feature: MA Experiment 108577 PARAMETER Experiment Name: At_42deg_Heat_cDNA_P Parameter: Timepoint (hr) Value: 6
  misc_feature: MA Experiment 108577 PARAMETER Experiment Name: At_42deg_Heat_cDNA_P Parameter: Tissue Value: Aerial
  misc_feature: MA Experiment ID: 108579 Result: Up-regulated in Transcription
  misc_feature: MA Experiment 108579 PARAMETER Experiment Name: At_4deg_Cold_cDNA_P Parameter: Temperature (deg C) Value: 4 vs. 22
  misc_feature: MA Experiment 108579 PARAMETER Experiment Name: At_4deg_Cold_cDNA_P Parameter: Timepoint (hr) Value: 6
  misc_feature: MA Experiment 108579 PARAMETER Experiment Name: At_4deg_Cold_cDNA_P Parameter: Tissue Value: Aerial
  misc_feature: MA Experiment ID: 108585 Result: Up-regulated in Transcription
  misc_feature: MA Experiment 108585 PARAMETER Experiment Name: At_5mM_NaNP_cDNA_P Parameter: Timepoint (hr) Value: 6
  misc_feature: MA Experiment 108585 PARAMETER Experiment Name: At_5mM_NaNP_cDNA_P Parameter: Tissue Value: Aerial
  misc_feature: MA Experiment 108585 PARAMETER Experiment Name: At_5mM_NaNP_cDNA_P Parameter: Treatment Value: null
  misc_feature: MA Experiment ID: 108594 Result: Down-regulated in Transcription
  misc_feature: MA Experiment 108594 PARAMETER Experiment Name: At_Ler-rhl_Root_cDNA_P Parameter: Plant Line Value: null
  misc_feature: MA Experiment ID: 108595 Result: Up-regulated in Transcription
  misc_feature: MA Experiment 108595 PARAMETER Experiment Name: At_Ler-pi_Ovule_cDNA_P Parameter: Plant Line Value: null
  misc_feature: MA Experiment ID: 108608 Result: Up-regulated in Transcription
  misc_feature: MA Experiment 108608 PARAMETER Experiment Name: At_100uM_ABA_cDNA_P Parameter: Timepoint (hr) Value: 1
  misc_feature: MA Experiment 108608 PARAMETER Experiment Name: At_100uM_ABA_cDNA_P Parameter: Tissue Value: Aerial
  misc_feature: MA Experiment 108608 PARAMETER Experiment Name: At_100uM_ABA_cDNA_P Parameter: Treatment Value: 100uM ABA vs. No Treatment
  misc_feature: MA Experiment ID: 108667 Result: Up-regulated in Transcription
  misc_feature: MA Experiment 108667 PARAMETER Experiment Name: At_2mM_SA_cDNA_P Parameter: Plant Line Value: WS
  misc_feature: MA Experiment 108667 PARAMETER Experiment Name: At_2mM_SA_cDNA_P Parameter: Timepoint (hr) Value: 1
  misc_feature: MA Experiment 108667 PARAMETER Experiment Name: At_2mM_SA_cDNA_P Parameter: Treatment Value: 2mM SA vs. No Treatment
  misc_feature: MA Experiment ID: 108668 Result: Up-regulated in Transcription
  misc_feature: MA Experiment 108668 PARAMETER Experiment Name: At_2mM_SA_cDNA_P Parameter: Plant Line Value: WS
  misc_feature: MA Experiment 108668 PARAMETER Experiment Name: At_2mM_SA_cDNA_P Parameter: Timepoint (hr) Value: 6
  misc_feature: MA Experiment 108668 PARAMETER Experiment Name: At_2mM_SA_cDNA_P Parameter: Treatment Value: 2mM SA vs. No Treatment
  misc_feature: MA Experiment ID: 20000069 Result: Up-regulated in Transcription
  misc_feature: MA Experiment 20000069 PARAMETER Experiment Name: At_100uM_ABA_Mutants_cDNA_P Parameter: Plant Line Value: CS23
  misc_feature: MA Experiment 20000069 PARAMETER Experiment Name: At_100uM_ABA_Mutants_cDNA_P Parameter: Timepoint (hr) Value: 6
  misc_feature: MA Experiment 20000069 PARAMETER Experiment Name: At_100uM_ABA_Mutants_cDNA_P Parameter: Tissue Value: Aerial
  misc_feature: MA Experiment 20000069 PARAMETER Experiment Name: At_100uM_ABA_Mutants_cDNA_P Parameter: Treatment Value: 100uM ABA vs. No Treatment
  misc_feature: MA Experiment ID: 20000070 Result: Up-regulated in Transcription
  misc_feature: MA Experiment 20000070 PARAMETER Experiment Name: At_100uM_ABA_Mutants_cDNA_P Parameter: Plant Line Value: CS24
  misc_feature: MA Experiment 20000070 PARAMETER Experiment Name: At_100uM_ABA_Mutants_cDNA_P Parameter: Timepoint (hr) Value: 6
  misc_feature: MA Experiment 20000070 PARAMETER Experiment Name: At_100uM_ABA_Mutants_cDNA_P Parameter: Tissue Value: Aerial
  misc_feature: MA Experiment 20000070 PARAMETER Experiment Name: At_100uM_ABA_Mutants_cDNA_P Parameter: Treatment Value: 100uM ABA vs. No Treatment
  misc_feature: MA Experiment ID: 20000071 Result: Up-regulated in Transcription
  misc_feature: MA Experiment 20000071 PARAMETER Experiment Name: At_100uM_ABA_Mutants_cDNA_P Parameter: Plant Line Value: CS8104
  misc_feature: MA Experiment 20000071 PARAMETER Experiment Name: At_100uM_ABA_Mutants_cDNA_P Parameter: Timepoint (hr) Value: 6
  misc_feature: MA Experiment 20000071 PARAMETER Experiment Name: At_100uM_ABA_Mutants_cDNA_P Parameter: Tissue Value: Aerial
  misc_feature: MA Experiment 20000071 PARAMETER Experiment Name: At_100uM_ABA_Mutants_cDNA_P Parameter: Treatment Value: 100uM ABA vs. No Treatment
  misc_feature: MA Experiment ID: 20000086 Result: Up-regulated in Transcription
  misc_feature: MA Experiment 20000086 PARAMETER Experiment Name: At_100uM_ABA_Mutants_cDNA_P Parameter: Plant Line Value: CS22
  misc_feature: MA Experiment 20000086 PARAMETER Experiment Name: At_100uM_ABA_Mutants_cDNA_P Parameter: Timepoint (hr) Value: 6
  misc_feature: MA Experiment 20000086 PARAMETER Experiment Name: At_100uM_ABA_Mutants_cDNA_P Parameter: Tissue Value: Aerial
  misc_feature: MA Experiment 20000086 PARAMETER Experiment Name: At_100uM_ABA_Mutants_cDNA_P Parameter: Treatment Value: 100uM ABA vs. No Treatment
  misc_feature: MA Experiment ID: 20000087 Result: Up-regulated in Transcription
  misc_feature: MA Experiment 20000087 PARAMETER Experiment Name: At_100uM_ABA_Mutants_cDNA_P Parameter: Plant Line Value: WS
  misc_feature: MA Experiment 20000087 PARAMETER Experiment Name: At_100uM_ABA_Mutants_cDNA_P Parameter: Timepoint (hr) Value: 6
  misc_feature: MA Experiment 20000087 PARAMETER Experiment Name: At_100uM_ABA_Mutants_cDNA_P Parameter: Tissue Value: Aerial
  misc_feature: MA Experiment 20000087 PARAMETER Experiment Name: At_100uM_ABA_Mutants_cDNA_P Parameter: Treatment Value: 100uM ABA vs. No Treatment
  misc_feature: MA Experiment ID: 20000088 Result: Up-regulated in Transcription
  misc_feature: MA Experiment 20000088 PARAMETER Experiment Name: At_100uM_ABA_Mutants_cDNA_P Parameter: Plant Line Value: Landsberg
  misc_feature: MA Experiment 20000088 PARAMETER Experiment Name: At_100uM_ABA_Mutants_cDNA_P Parameter: Timepoint (hr) Value: 6
  misc_feature: MA Experiment 20000088 PARAMETER Experiment Name: At_100uM_ABA_Mutants_cDNA_P Parameter: Tissue Value: Aerial
  misc_feature: MA Experiment 20000088 PARAMETER Experiment Name: At_100uM_ABA_Mutants_cDNA_P Parameter: Treatment Value: 100uM ABA vs. No Treatment
  misc_feature: MA Experiment ID: 20000089 Result: Up-regulated in Transcription
  misc_feature: MA Experiment ID: 20000090 Result: Up-regulated in Transcription
  misc_feature: MA Experiment ID: 20000111 Result: Down-regulated in Transcription
  misc_feature: MA Experiment 20000111 PARAMETER Experiment Name: At_42deg_Heat_cDNA_P Parameter: Temperature (deg C) Value: 42 vs. 22
  misc_feature: MA Experiment 20000111 PARAMETER Experiment Name: At_42deg_Heat_cDNA_P Parameter: Timepoint (hr) Value: 6
  misc_feature: MA Experiment 20000111 PARAMETER Experiment Name: At_42deg_Heat_cDNA_P Parameter: Tissue Value: Aerial
  misc_feature: MA Experiment ID: 20000117 Result: Up-regulated in Transcription
  misc_feature: MA Experiment 20000117 PARAMETER Experiment Name: At_100uM_ABA_Mutants_cDNA_P Parameter: Plant Line Value: Columbia
  misc_feature: MA Experiment 20000117 PARAMETER Experiment Name: At_100uM_ABA_Mutants_cDNA_P Parameter: Timepoint (hr) Value: 6
  misc_feature: MA Experiment 20000117 PARAMETER Experiment Name: At_100uM_ABA_Mutants_cDNA_P Parameter: Tissue Value: Aerial
  misc_feature: MA Experiment 20000117 PARAMETER Experiment Name: At_100uM_ABA_Mutants_cDNA_P Parameter: Treatment Value: 100uM ABA vs. No Treatment
  misc_feature: MA Experiment ID: 20000166 Result: Up-regulated in Transcription
  misc_feature: MA Experiment 20000166 PARAMETER Experiment Name: At_100uM_ABA_P Parameter: Age (day) Value: 14
  misc_feature: MA Experiment 20000166 PARAMETER Experiment Name: At_100uM_ABA_P Parameter: Organism Value: A. thaliana
  misc_feature: MA Experiment 20000166 PARAMETER Experiment Name: At_100uM_ABA_P Parameter: Plant Line Value: WS
  misc_feature: MA Experiment 20000166 PARAMETER Experiment Name: At_100uM_ABA_P Parameter: Timepoint (hr) Value: 1
  misc_feature: MA Experiment 20000166 PARAMETER Experiment Name: At_100uM_ABA_P Parameter: Tissue Value: Aerial
  misc_feature: MA Experiment 20000166 PARAMETER Experiment Name: At_100uM_ABA_P Parameter: Treatment Value: 100uM ABA vs. No Treatment
  misc_feature: MA Experiment ID: 20000173 Result: Down-regulated in Transcription
  misc_feature: MA Experiment 20000173 PARAMETER Experiment Name: At_42deg_Heat_P Parameter: Age (day) Value: 14
  misc_feature: MA Experiment 20000173 PARAMETER Experiment Name: At_42deg_Heat_P Parameter: Organism Value: A. thaliana
  misc_feature: MA Experiment 20000173 PARAMETER Experiment Name: At_42deg_Heat_P Parameter: Plant Line Value: WS
  misc_feature: MA Experiment 20000173 PARAMETER Experiment Name: At_42deg_Heat_P Parameter: Temperature (deg C) Value: 42 vs. 22
  misc_feature: MA Experiment 20000173 PARAMETER Experiment Name: At_42deg_Heat_P Parameter: Timepoint (hr) Value: 6
  misc_feature: MA Experiment 20000173 PARAMETER Experiment Name: At_42deg_Heat_P Parameter: Tissue Value: Aerial
  misc_feature: MA Experiment ID: 20000179 Result: Down-regulated in Transcription
  misc_feature: MA Experiment 20000179 PARAMETER Experiment Name: At_Germinating_Seeds_P Parameter: Age (hr) Value: 6 vs. 0
  misc_feature: MA Experiment 20000179 PARAMETER Experiment Name: At_Germinating_Seeds_P Parameter: Tissue Value: Germinating Seeds
  misc_feature: MA Experiment ID: 20000180 Result: Down-regulated in Transcription
  misc_feature: MA Experiment 20000180 PARAMETER Experiment Name: At_Germinating_Seeds_P Parameter: Age (hr) Value: 24 vs. 0
  misc_feature: MA Experiment 20000180 PARAMETER Experiment Name: At_Germinating_Seeds_P Parameter: Tissue Value: Germinating Seeds
  misc_feature: MA Experiment ID: 20000182 Result: Up-regulated in Transcription
  misc_feature: MA Experiment 20000182 PARAMETER Experiment Name: At_2mM_SA_P Parameter: Age (day) Value: 14
  misc_feature: MA Experiment 20000182 PARAMETER Experiment Name: At_2mM_SA_P Parameter: Organism Value: A. thaliana
  misc_feature: MA Experiment 20000182 PARAMETER Experiment Name: At_2mM_SA_P Parameter: Plant Line Value: WS
  misc_feature: MA Experiment 20000182 PARAMETER Experiment Name: At_2mM_SA_P Parameter: Timepoint (hr) Value: 6
  misc_feature: MA Experiment 20000182 PARAMETER Experiment Name: At_2mM_SA_P Parameter: Tissue Value: Aerial
  misc_feature: MA Experiment 20000182 PARAMETER Experiment Name: At_2mM_SA_P Parameter: Treatment Value: 2mM SA vs. No Treatment
  misc_feature: MA Experiment ID: 20000184 Result: Down-regulated in Transcription
  misc_feature: MA Experiment 20000184 PARAMETER Experiment Name: At_Shoots__P Parameter: Age (day) Value: 7
  misc_feature: MA Experiment 20000184 PARAMETER Experiment Name: At_Shoots__P Parameter: Tissue Value: Shoots vs. Whole Plant
  misc_feature: MA Experiment ID: 20000213 Result: Up-regulated in Transcription
  misc_feature: MA Experiment 20000213 PARAMETER Experiment Name: At_4deg_Cold_P Parameter: Timepoint (hr) Value: 2
  misc_feature: MA Experiment ID: 20000214 Result: Up-regulated in Transcription
  misc_feature: MA Experiment 20000214 PARAMETER Experiment Name: At_4deg_Cold_P Parameter: Timepoint (hr) Value: 6
  misc_feature: MA Experiment ID: 20000234 Result: Down-regulated in Transcription
  misc_feature: MA Experiment 20000234 PARAMETER Experiment Name: At_Siliques_P Parameter: Age (day) Value: 21
  misc_feature: MA Experiment 20000234 PARAMETER Experiment Name: At_Siliques_P Parameter: Organism Value: A. thaliana
  misc_feature: MA Experiment 20000234 PARAMETER Experiment Name: At_Siliques_P Parameter: Plant Line Value: WS
  misc_feature: MA Experiment 20000234 PARAMETER Experiment Name: At_Siliques_P Parameter: Tissue Value: Less Than 5mm Siliques vs. Whole Plant
  misc_feature: MA Experiment ID: 20000235 Result: Down-regulated in Transcription
  misc_feature: MA Experiment 20000235 PARAMETER Experiment Name: At_Siliques_P Parameter: Age (day) Value: 21
  misc_feature: MA Experiment 20000235 PARAMETER Experiment Name: At_Siliques_P Parameter: Organism Value: A. thaliana
  misc_feature: MA Experiment 20000235 PARAMETER Experiment Name: At_Siliques_P Parameter: Plant Line Value: WS
  misc_feature: MA Experiment 20000235 PARAMETER Experiment Name: At_Siliques_P Parameter: Tissue Value: 5-10mm Siliques vs. Whole Plant
  misc_feature: MA Experiment ID: 20000265 Result: Down-regulated in Transcription
  misc_feature: MA Experiment 20000265 PARAMETER Experiment Name: At_Open_Flower_P Parameter: Age (day) Value: 21
  misc_feature: MA Experiment 20000265 PARAMETER Experiment Name: At_Open_Flower_P Parameter: Plant Line Value: WS
  misc_feature: MA Experiment 20000265 PARAMETER Experiment Name: At_Open_Flower_P Parameter: Tissue Value: Closed Flower vs. Whole Plant
  misc_feature: MA Experiment ID: 20000286 Result: Down-regulated in Transcription
  misc_feature: MA Experiment 20000286 PARAMETER Experiment Name: At_Open_Flower_P Parameter: Age (day) Value: 21
  misc_feature: MA Experiment 20000286 PARAMETER Experiment Name: At_Open_Flower_P Parameter: Plant Line Value: WS
  misc_feature: MA Experiment 20000286 PARAMETER Experiment Name: At_Open_Flower_P Parameter: Tissue Value: Half Open vs. Whole Plant
  misc_feature: MA Experiment ID: 20000495 Result: Down-regulated in Transcription
  misc_feature: MA Experiment 20000495 PARAMETER Experiment Name: At_Guard_Cells_P Parameter: Harvest Date Value: 8/2/2002
  misc_feature: MA Experiment 20000495 PARAMETER Experiment Name: At_Guard_Cells_P Parameter: Organism Value: A. thaliana
  misc_feature: MA Experiment 20000495 PARAMETER Experiment Name: At_Guard_Cells_P Parameter: Tissue Value: Guard Cells vs. Leaves
  misc_feature: MA Experiment ID: 20000527 Result: Down-regulated in Transcription
  misc_feature: MA Experiment 20000527 PARAMETER Experiment Name: At_10percent_PEG_P Parameter: Age (day) Value: 20
  misc_feature: MA Experiment 20000527 PARAMETER Experiment Name: At_10percent_PEG_P Parameter: Organism Value: A. thaliana
  misc_feature: MA Experiment 20000527 PARAMETER Experiment Name: At_10percent_PEG_P Parameter: Plant Line Value: WS
  misc_feature: MA Experiment 20000527 PARAMETER Experiment Name: At_10percent_PEG_P Parameter: Timepoint (day) Value: 20
  misc_feature: MA Experiment 20000527 PARAMETER Experiment Name: At_10percent_PEG_P Parameter: Tissue Value: Whole Plant
  misc_feature: MA Experiment 20000527 PARAMETER Experiment Name: At_10percent_PEG_P Parameter: Treatment Value: 10percent PEG vs. No Treatment
  misc_feature: MA Experiment ID: 20000709 Result: Up-regulated in Transcription
  misc_feature: MA Experiment 20000709 PARAMETER Experiment Name: At_15mM_NH4NO3_L-to-H_P Parameter: Age (hr) Value: 14
  misc_feature: MA Experiment 20000709 PARAMETER Experiment Name: At_15mM_NH4NO3_L-to-H_P Parameter: Organism Value: A. thaliana
  misc_feature: MA Experiment 20000709 PARAMETER Experiment Name: At_15mM_NH4NO3_L-to-H_P Parameter: Plant Line Value: WS
  misc_feature: MA Experiment 20000709 PARAMETER Experiment Name: At_15mM_NH4NO3_L-to-H_P Parameter: Timepoint (hr) Value: 4
  misc_feature: MA Experiment 20000709 PARAMETER Experiment Name: At_15mM_NH4NO3_L-to-H_P Parameter: Tissue Value: Aerial
  misc_feature: MA Experiment 20000709 PARAMETER Experiment Name: At_15mM_NH4NO3_L-to-H_P Parameter: Treatment Value: 15mM NH4NO3 vs. 30mM Mannitol
  misc_feature: MA Experiment ID: 20001451 Result: Down-regulated in Transcription
  misc_feature: MA Experiment 20001451 PARAMETER Experiment Name: At_Far-red-induction_P Parameter: Age (day) Value: 7
  misc_feature: MA Experiment 20001451 PARAMETER Experiment Name: At_Far-red-induction_P Parameter: Light Value: Far-red vs. White
  misc_feature: MA Experiment 20001451 PARAMETER Experiment Name: At_Far-red-induction_P Parameter: Organism Value: A. thaliana
  misc_feature: MA Experiment 20001451 PARAMETER Experiment Name: At_Far-red-induction_P Parameter: Plant Line Value: Columbia
  misc_feature: MA Experiment 20001451 PARAMETER Experiment Name: At_Far-red-induction_P Parameter: Timepoint (hr) Value: 24
  misc_feature: MA Experiment 20001451 PARAMETER Experiment Name: At_Far-red-induction_P Parameter: Tissue Value: Whole Plant
  misc_feature: MA Experiment ID: 20001557 Result: Up-regulated in Transcription
  misc_feature: MA Experiment 20001557 PARAMETER Experiment Name: At_Drought_Soil_Dry_P Parameter: Age (day) Value: 27
  misc_feature: MA Experiment 20001557 PARAMETER Experiment Name: At_Drought_Soil_Dry_P Parameter: Organism Value: A. thaliana
  misc_feature: MA Experiment 20001557 PARAMETER Experiment Name: At_Drought_Soil_Dry_P Parameter: Plant Line Value: WS
  misc_feature: MA Experiment 20001557 PARAMETER Experiment Name: At_Drought_Soil_Dry_P Parameter: Post Timepoint (hr) Value: 3
  misc_feature: MA Experiment 20001557 PARAMETER Experiment Name: At_Drought_Soil_Dry_P Parameter: Post-Treatment Value: Re-Water vs. No Drought
  misc_feature: MA Experiment 20001557 PARAMETER Experiment Name: At_Drought_Soil_Dry_P Parameter: Timepoint (day) Value: 13
  misc_feature: MA Experiment 20001557 PARAMETER Experiment Name: At_Drought_Soil_Dry_P Parameter: Treatment Value: Drought vs. No Drought
  misc_feature: MA Experiment ID: 20001560 Result: Up-regulated in Transcription
  misc_feature: MA Experiment 20001560 PARAMETER Experiment Name: At_Drought_Soil_Dry_P Parameter: Age (day) Value: 28
  misc_feature: MA Experiment 20001560 PARAMETER Experiment Name: At_Drought_Soil_Dry_P Parameter: Organism Value: A. thaliana
  misc_feature: MA Experiment 20001560 PARAMETER Experiment Name: At_Drought_Soil_Dry_P Parameter: Plant Line Value: WS
  misc_feature: MA Experiment 20001560 PARAMETER Experiment Name: At_Drought_Soil_Dry_P Parameter: Post Timepoint (hr) Value: None
  misc_feature: MA Experiment 20001560 PARAMETER Experiment Name: At_Drought_Soil_Dry_P Parameter: Post-Treatment Value: None
  misc_feature: MA Experiment 20001560 PARAMETER Experiment Name: At_Drought_Soil_Dry_P Parameter: Timepoint (day) Value: 14
  misc_feature: MA Experiment 20001560 PARAMETER Experiment Name: At_Drought_Soil_Dry_P Parameter: Treatment Value: Drought vs. No Drought
  misc_feature: MA Experiment ID: 20001905 Result: Up-regulated in Transcription
  misc_feature: MA Experiment 20001905 PARAMETER Experiment Name: At_Drought_Reproduction_P Parameter: Age (day) Value: 40
  misc_feature: MA Experiment 20001905 PARAMETER Experiment Name: At_Drought_Reproduction_P Parameter: Organism Value: A. thaliana
  misc_feature: MA Experiment 20001905 PARAMETER Experiment Name: At_Drought_Reproduction_P Parameter: Plant Line Value: WS
  misc_feature: MA Experiment 20001905 PARAMETER Experiment Name: At_Drought_Reproduction_P Parameter: Timepoint (day) Value: 10
  misc_feature: MA Experiment 20001905 PARAMETER Experiment Name: At_Drought_Reproduction_P Parameter: Tissue Value: Rosettes
  misc_feature: MA Experiment 20001905 PARAMETER Experiment Name: At_Drought_Reproduction_P Parameter: Treatment Value: Drought vs. No Drought
atggactttgctctcttctcctcgatttcaatctttgagataaaccacaaagatcctccgattcgaaggtttataaaaactcaaaatcgaatcttatccacaagaaaacaacaaggtacttttccaaaaatgaaggcggagttgaatttgccggcgggattccgatttcatccgacggacgaagagcttgtcaagttctatctttgccggagatgtgcgtcagaaccgattaacgttccggttatcgcagagattgacttgtacaaattcaatccatgggagcttccagaaatggcgttgtacggtgagaaagaatggtacttcttctcgcatagagaccggaaatacccaaacgggtcgagaccaaaccgggcagctggaaccggttattggaaagcgactggagctgataaaccgatcggaaaaccgaagacgttagggattaagaaagcactcgtcttctacgcaggaaaagctccgaaagggattaaaacgaattggattatgcacgagtatcgtctcgctaatgtcgatcgatctgcttctaccaacaagaagaacaacttaagacttgatgattgggttttgtgtcggatatacaataagaaaggaacaatggagaagtatttaccggcggcggctgagaaaccgacggaaaagatgagtacgtcggactcaagatgctcaagtcacgtgatttcaccggacgtcacgtgttctgataactgggaggttgagagtgagcccaaatggattaatctggaagacgcgttagaggcatttaatgatgacacgtccatgtttagttccattggtttgttgcaaaatgacgcctttgttcctcagtttcagtaccagtcctccgatttcgtcgattcgtttcaggacccgttcgagcagaaaccgttcttgaattggaattttgctcctcaagggtaaaaataatcggcaaaaagttgaagcttttcagagtcttcgatcaccggcattgtgtcggatcctgacccggagaccaagtcgggtcatacgattacataatcgggttattgagatttccacatttggatttccgagactaaccaacttaacggattctggggtaattggggggttttgcacaggtgaatcacactgagtcagcaagtttcgattttttggttttgttttgtaatgattgattaaatgtctaaagatatcacgaagtagatacagaagaactgtaaaagcaattgtgaccaaccattatgaatcatatatatattc

SEQ ID NO: 27536 - protein, 312 aa, Arabidopsis thaliana
  peptide (1)..(312): Ceres Seq. ID no. 13491652
  misc_feature (50)..(175): Pfam Name: No apical meristem (NAM) protein Pfam Description: No apical meristem (NAM) protein
  misc_feature (47)..(214): Homolog of NCBI NO: 25458553 NR Description: OsNAC6 protein [imported] - rice
  misc_feature (46)..(208): Homolog of NCBI NO: 21105748 NR Description: nam-like protein 10 [Petunia x hybrida]
  misc_feature (44)..(191): Homolog of NCBI NO: 26452827 NR Description: putative ATAF2 protein [Arabidopsis thaliana]
  misc_feature (47)..(209): Homolog of NCBI NO: 40647397 NR Description: NAC domain protein [Lycopersicon esculentum]
  misc_feature (47)..(209): Homolog of NCBI NO: 21105734 NR Description: nam-like protein 3 [Petunia x hybrida]
  misc_feature (47)..(209): Homolog of NCBI NO: 14485513 NR Description: putative NAC domain protein [Solanum tuberosum]
  misc_feature (44)..(312): Homolog of NCBI NO: 22326685 NR Description: No apical meristem (NAM) protein family
  misc_feature (44)..(312): Homolog of NCBI NO: 10177060 NR Description: contains similarity to NAC-domain
  misc_feature (7)..(312): Homolog of NCBI NO: 23397338 NR Description: unknown protein [Arabidopsis thaliana]
  misc_feature (1)..(312): Homolog of NCBI NO: 30697896 NR Description: No apical meristem (NAM) protein family
MDFALFSSISIFEINHKDPPIRRFIKTQNRILSTRKQQGTFPKMKAELNLPAGFRFHPTDEELVKFYLCRRCASEPINVPVIAEIDLYKFNPWELPEMALYGEKEWYFFSHRDRKYPNGSRPNRAAGTGYWKATGADKPIGKPKTLGIKKALVFYAGKAPKGIKTNWIMHEYRLANVDRSASTNKKNNLRLDDWVLCRIYNKKGTMEKYLPAAAEKPTEKMSTSDSRCSSHVISPDVTCSDNWEVESEPKWINLEDALEAFNDDTSMFSSIGLLQNDAFVPQFQYQSSDFVDSFQDPFEQKPFLNWNFAPQG

SEQ ID NO: 27537 - protein, 269 aa, Arabidopsis thaliana
  peptide (1)..(269): Ceres Seq. ID no. 13491653
  misc_feature (7)..(132): Pfam Name: No apical meristem (NAM) protein Pfam Description: No apical meristem (NAM) protein
  misc_feature (4)..(171): Homolog of NCBI NO: 25458553 NR Description: OsNAC6 protein [imported] - rice
  misc_feature (3)..(165): Homolog of NCBI NO: 21105748 NR Description: nam-like protein 10 [Petunia x hybrida]
  misc_feature (1)..(148): Homolog of NCBI NO: 26452827 NR Description: putative ATAF2 protein [Arabidopsis thaliana]
  misc_feature (4)..(166): Homolog of NCBI NO: 40647397 NR Description: NAC domain protein [Lycopersicon esculentum]
  misc_feature (4)..(166): Homolog of NCBI NO: 21105734 NR Description: nam-like protein 3 [Petunia x hybrida]
  misc_feature (4)..(166): Homolog of NCBI NO: 14485513 NR Description: putative NAC domain protein [Solanum tuberosum]
  misc_feature (1)..(269): Homolog of NCBI NO: 22326685 NR Description: No apical meristem (NAM) protein family
  misc_feature (1)..(269): Homolog of NCBI NO: 10177060 NR Description: contains similarity to NAC-domain
  misc_feature (1)..(269): Homolog of NCBI NO: 23397338 NR Description: unknown protein [Arabidopsis thaliana]
  misc_feature (1)..(269): Homolog of NCBI NO: 30697896 NR Description: No apical meristem (NAM) protein family
MKAELNLPAGFRFHPTDEELVKFYLCRRCASEPINVPVIAEIDLYKFNPWELPEMALYGEKEWYFFSHRDRKYPNGSRPNRAAGTGYWKATGADKPIGKPKTLGIKKALVFYAGKAPKGIKTNWIMHEYRLANVDRSASTNKKNNLRLDDWVLCRIYNKKGTMEKYLPAAAEKPTEKMSTSDSRCSSHVISPDVTCSDNWEVESEPKWINLEDALEAFNDDTSMFSSIGLLQNDAFVPQFQYQSSDFVDSFQDPFEQKPFLNWNFAPQG

SEQ ID NO: 27538 - protein, 215 aa, Arabidopsis thaliana
  peptide (1)..(215): Ceres Seq. ID no. 13491654
  misc_feature (1)..(78): Pfam Name: No apical meristem (NAM) protein Pfam Description: No apical meristem (NAM) protein
  misc_feature (1)..(117): Homolog of NCBI NO: 25458553 NR Description: OsNAC6 protein [imported] - rice
  misc_feature (1)..(111): Homolog of NCBI NO: 21105748 NR Description: nam-like protein 10 [Petunia x hybrida]
  misc_feature (1)..(94): Homolog of NCBI NO: 26452827 NR Description: putative ATAF2 protein [Arabidopsis thaliana]
  misc_feature (1)..(112): Homolog of NCBI NO: 40647397 NR Description: NAC domain protein [Lycopersicon esculentum]
  misc_feature (1)..(112): Homolog of NCBI NO: 21105734 NR Description: nam-like protein 3 [Petunia x hybrida]
  misc_feature (1)..(112): Homolog of NCBI NO: 14485513 NR Description: putative NAC domain protein [Solanum tuberosum]
  misc_feature (1)..(215): Homolog of NCBI NO: 22326685 NR Description: No apical meristem (NAM) protein family
  misc_feature (1)..(215): Homolog of NCBI NO: 10177060 NR Description: contains similarity to NAC-domain
  misc_feature (1)..(215): Homolog of NCBI NO: 23397338 NR Description: unknown protein [Arabidopsis thaliana]
  misc_feature (1)..(215): Homolog of NCBI NO: 30697896 NR Description: No apical meristem (NAM) protein family
MALYGEKEWYFFSHRDRKYPNGSRPNRAAGTGYWKATGADKPIGKPKTLGIKKALVFYAGKAPKGIKTNWIMHEYRLANVDRSASTNKKNNLRLDDWVLCRIYNKKGTMEKYLPAAAEKPTEKMSTSDSRCSSHVISPDVTCSDNWEVESEPKWINLEDALEAFNDDTSMFSSIGLLQNDAFVPQFQYQSSDFVDSFQDPFEQKPFLNWNFAPQG

SEQ ID NO: 27539 - DNA, 1379 bp, Arabidopsis thaliana
  misc_feature (1)..(1379): Ceres Seq. ID no. 13489931
  misc_feature: MA Experiment ID: 108435 Result: Down-regulated in Transcription
  misc_feature: MA Experiment 108435 PARAMETER Experiment Name: At_stm_Mutants_cDNA_P Parameter: Plant Line Value: wt Landsburg vs stm
  misc_feature: MA Experiment 108435 PARAMETER Experiment Name: At_stm_Mutants_cDNA_P Parameter: Tissue Value: Shoot Apical Meristem Region
  misc_feature: MA Experiment ID: 108461 Result: Down-regulated in Transcription
  misc_feature: MA Experiment 108461 PARAMETER Experiment Name: At_Germinating_Seeds_cDNA_P Parameter: Age (day) Value: 1 vs. 0
  misc_feature: MA Experiment 108461 PARAMETER Experiment Name: At_Germinating_Seeds_cDNA_P Parameter: Tissue Value: Germinating Seeds
  misc_feature: MA Experiment ID: 108462 Result: Up-regulated in Transcription
  misc_feature: MA Experiment 108462 PARAMETER Experiment Name: At_Germinating_Seeds_cDNA_P Parameter: Age (day) Value: 2 vs. 0
  misc_feature: MA Experiment 108462 PARAMETER Experiment Name: At_Germinating_Seeds_cDNA_P Parameter: Tissue Value: Germinating Seeds
  misc_feature: MA Experiment ID: 108463 Result: Up-regulated in Transcription
  misc_feature: MA Experiment 108463 PARAMETER Experiment Name: At_Germinating_Seeds_cDNA_P Parameter: Age (day) Value: 3 vs. 0
  misc_feature: MA Experiment 108463 PARAMETER Experiment Name: At_Germinating_Seeds_cDNA_P Parameter: Tissue Value: Germinating Seeds
  misc_feature: MA Experiment ID: 108464 Result: Up-regulated in Transcription
  misc_feature: MA Experiment 108464 PARAMETER Experiment Name: At_Germinating_Seeds_cDNA_P Parameter: Age (day) Value: 4 vs. 0
  misc_feature: MA Experiment 108464 PARAMETER Experiment Name: At_Germinating_Seeds_cDNA_P Parameter: Tissue Value: Germinating Seeds
  misc_feature: MA Experiment ID: 108569 Result: Up-regulated in Transcription
  misc_feature: MA Experiment 108569 PARAMETER Experiment Name: At_0.001%_MeJA__cDNA_P Parameter: Timepoint (hr) Value: 6
  misc_feature: MA Experiment 108569 PARAMETER Experiment Name: At_0.001%_MeJA__cDNA_P Parameter: Tissue Value: Aerial
  misc_feature: MA Experiment 108569 PARAMETER Experiment Name: At_0.001%_MeJA__cDNA_P Parameter: Treatment Value: 0.001% MeJA vs. No Treatment
  misc_feature: MA Experiment ID: 108572 Result: Up-regulated in Transcription
  misc_feature: MA Experiment 108572 PARAMETER Experiment Name: At_Drought_cDNA_P Parameter: Timepoint (hr) Value: 1
  misc_feature: MA Experiment 108572 PARAMETER Experiment Name: At_Drought_cDNA_P Parameter: Tissue Value: Aerial
  misc_feature: MA Experiment 108572 PARAMETER Experiment Name: At_Drought_cDNA_P Parameter: Treatment Value: Drought vs. No Drought
  misc_feature: MA Experiment ID: 108573 Result: Up-regulated in Transcription
  misc_feature: MA Experiment 108573 PARAMETER Experiment Name: At_Drought_cDNA_P Parameter: Timepoint (hr) Value: 6
  misc_feature: MA Experiment 108573 PARAMETER Experiment Name: At_Drought_cDNA_P Parameter: Tissue Value: Aerial
  misc_feature: MA Experiment 108573 PARAMETER Experiment Name: At_Drought_cDNA_P Parameter: Treatment Value: Drought vs. No Drought
  misc_feature: MA Experiment ID: 108576 Result: Down-regulated in Transcription
  misc_feature: MA Experiment 108576 PARAMETER Experiment Name: At_42deg_Heat_cDNA_P Parameter: Temperature (deg C) Value: 42 vs. 22
  misc_feature: MA Experiment 108576 PARAMETER Experiment Name: At_42deg_Heat_cDNA_P Parameter: Timepoint (hr) Value: 1
  misc_feature: MA Experiment 108576 PARAMETER Experiment Name: At_42deg_Heat_cDNA_P Parameter: Tissue Value: Aerial
  misc_feature: MA Experiment ID: 108595 Result: Down-regulated in Transcription
  misc_feature: MA Experiment 108595 PARAMETER Experiment Name: At_Ler-pi_Ovule_cDNA_P Parameter: Plant Line Value: null
  misc_feature: MA Experiment ID: 20000113 Result: Up-regulated in Transcription
  misc_feature: MA Experiment 20000113 PARAMETER Experiment Name: At_42deg_Heat_cDNA_P Parameter: Temperature (deg C) Value: 42 vs. 22
  misc_feature: MA Experiment 20000113 PARAMETER Experiment Name: At_42deg_Heat_cDNA_P Parameter: Timepoint (hr) Value: 8
  misc_feature: MA Experiment 20000113 PARAMETER Experiment Name: At_42deg_Heat_cDNA_P Parameter: Tissue Value: Aerial
  misc_feature: MA Experiment ID: 20000180 Result: Up-regulated in Transcription
  misc_feature: MA Experiment 20000180 PARAMETER Experiment Name: At_Germinating_Seeds_P Parameter: Age (hr) Value: 24 vs. 0
  misc_feature: MA Experiment 20000180 PARAMETER Experiment Name: At_Germinating_Seeds_P Parameter: Tissue Value: Germinating Seeds
  misc_feature: MA Experiment ID: 20000224 Result: Down-regulated in Transcription
  misc_feature: MA Experiment ID: 20000227 Result: Down-regulated in Transcription
  misc_feature: MA Experiment 20000227 PARAMETER Experiment Name: At_Root-Tips-vs-Tops_P Parameter: Tissue Value: Root Tips vs. Root Tops
  misc_feature: MA Experiment ID: 20000234 Result: Down-regulated in Transcription
  misc_feature: MA Experiment 20000234 PARAMETER Experiment Name: At_Siliques_P Parameter: Age (day) Value: 21
  misc_feature: MA Experiment 20000234 PARAMETER Experiment Name: At_Siliques_P Parameter: Organism Value: A. thaliana
  misc_feature: MA Experiment 20000234 PARAMETER Experiment Name: At_Siliques_P Parameter: Plant Line Value: WS
  misc_feature: MA Experiment 20000234 PARAMETER Experiment Name: At_Siliques_P Parameter: Tissue Value: Less Than 5mm Siliques vs. Whole Plant
  misc_feature: MA Experiment ID: 20000265 Result: Down-regulated in Transcription
  misc_feature: MA Experiment 20000265 PARAMETER Experiment Name: At_Open_Flower_P Parameter: Age (day) Value: 21
  misc_feature: MA Experiment 20000265 PARAMETER Experiment Name: At_Open_Flower_P Parameter: Plant Line Value: WS
  misc_feature: MA Experiment 20000265 PARAMETER Experiment Name: At_Open_Flower_P Parameter: Tissue Value: Closed Flower vs. Whole Plant
  misc_feature: MA Experiment ID: 20000286 Result: Down-regulated in Transcription
  misc_feature: MA Experiment 20000286 PARAMETER Experiment Name: At_Open_Flower_P Parameter: Age (day) Value: 21
  misc_feature: MA Experiment 20000286 PARAMETER Experiment Name: At_Open_Flower_P Parameter: Plant Line Value: WS
  misc_feature: MA Experiment 20000286 PARAMETER Experiment Name: At_Open_Flower_P Parameter: Tissue Value: Half Open vs. Whole Plant
  misc_feature: MA Experiment ID: 20000308 Result: Down-regulated in Transcription
  misc_feature: MA Experiment 20000308 PARAMETER Experiment Name: At_100mM_NaCl__P Parameter: Age (day) Value: 17
  misc_feature: MA Experiment 20000308 PARAMETER Experiment Name: At_100mM_NaCl__P Parameter: Organism Value: A. thaliana
  misc_feature: MA Experiment 20000308 PARAMETER Experiment Name: At_100mM_NaCl__P Parameter: Plant Line Value: WS
  misc_feature: MA Experiment 20000308 PARAMETER Experiment Name: At_100mM_NaCl__P Parameter: Timepoint (hr) Value: 72
  misc_feature: MA Experiment 20000308 PARAMETER Experiment Name: At_100mM_NaCl__P Parameter: Tissue Value: Whole Plant
  misc_feature: MA Experiment 20000308 PARAMETER Experiment Name: At_100mM_NaCl__P Parameter: Treatment Value: 100mM NaCl vs. No Treatment
  misc_feature: MA Experiment ID: 20000439 Result: Down-regulated in Transcription
  misc_feature: MA Experiment 20000439 PARAMETER Experiment Name: At_Roots__P Parameter: Age (day) Value: 14 vs. 21
  misc_feature: MA Experiment 20000439 PARAMETER Experiment Name: At_Roots__P Parameter: Organism Value: A. thaliana
  misc_feature: MA Experiment 20000439 PARAMETER Experiment Name: At_Roots__P Parameter: Tissue Value: Roots vs. Whole Plant
  misc_feature: MA Experiment ID: 20000441 Result: Up-regulated in Transcription
  misc_feature: MA Experiment 20000441 PARAMETER Experiment Name: At_1uM_BR-BRZ__P Parameter: Tissue Value: Shoot Apices
  misc_feature: MA Experiment 20000441 PARAMETER Experiment Name: At_1uM_BR-BRZ__P Parameter: Treatment Value: 1uM BR vs. No Treatment
  misc_feature: MA Experiment ID: 20000443 Result: Up-regulated in Transcription
  misc_feature: MA Experiment 20000443 PARAMETER Experiment Name: At_1uM_BR-BRZ__P Parameter: Tissue Value: Shoot Apices
  misc_feature: MA Experiment 20000443 PARAMETER Experiment Name: At_1uM_BR-BRZ__P Parameter: Treatment Value: 1uM BRZ vs. No Treatment
  misc_feature: MA Experiment ID: 20000578 Result: Down-regulated in Transcription
  misc_feature: MA Experiment 20000578 PARAMETER Experiment Name: At_CS3726__P Parameter: Organism Value: A. thaliana
  misc_feature: MA Experiment 20000578 PARAMETER Experiment Name: At_CS3726__P Parameter: Plant Line Value: CS3726
  misc_feature: MA Experiment 20000578 PARAMETER Experiment Name: At_CS3726__P Parameter: Tissue Value: Whole Plant
  misc_feature: MA Experiment ID: 20001248 Result: Up-regulated in Transcription
  misc_feature: MA Experiment 20001248 PARAMETER Experiment Name: At_Far-red-induction_P Parameter: Age (day) Value: 7
  misc_feature: MA Experiment 20001248 PARAMETER Experiment Name: At_Far-red-induction_P Parameter: Light Value: Far-red vs. White
  misc_feature: MA Experiment 20001248 PARAMETER Experiment Name: At_Far-red-induction_P Parameter: Organism Value: A. thaliana
  misc_feature: MA Experiment 20001248 PARAMETER Experiment Name: At_Far-red-induction_P Parameter: Plant Line Value: Columbia
  misc_feature: MA Experiment 20001248 PARAMETER Experiment Name: At_Far-red-induction_P Parameter: Timepoint (hr) Value: 4
  misc_feature: MA Experiment 20001248 PARAMETER Experiment Name: At_Far-red-induction_P Parameter: Tissue Value: Whole Plant
  misc_feature: MA Experiment ID: 20001450 Result: Up-regulated in Transcription
  misc_feature: MA Experiment 20001450 PARAMETER Experiment Name: At_Far-red-induction_P Parameter: Age (day) Value: 7
  misc_feature: MA Experiment 20001450 PARAMETER Experiment Name: At_Far-red-induction_P Parameter: Light Value: Far-red vs. White
  misc_feature: MA Experiment 20001450 PARAMETER Experiment Name: At_Far-red-induction_P Parameter: Organism Value: A. thaliana
  misc_feature: MA Experiment 20001450 PARAMETER Experiment Name: At_Far-red-induction_P Parameter: Plant Line Value: Columbia
  misc_feature: MA Experiment 20001450 PARAMETER Experiment Name: At_Far-red-induction_P Parameter: Timepoint (hr) Value: 8
  misc_feature: MA Experiment 20001450 PARAMETER Experiment Name: At_Far-red-induction_P Parameter: Tissue Value: Whole Plant
  misc_feature: MA Experiment ID: 20001451 Result: Up-regulated in Transcription
  misc_feature: MA Experiment 20001451 PARAMETER Experiment Name: At_Far-red-induction_P Parameter: Age (day) Value: 7
  misc_feature: MA Experiment 20001451 PARAMETER Experiment Name: At_Far-red-induction_P Parameter: Light Value: Far-red vs. White
  misc_feature: MA Experiment 20001451 PARAMETER Experiment Name: At_Far-red-induction_P Parameter: Organism Value: A. thaliana
  misc_feature: MA Experiment 20001451 PARAMETER Experiment Name: At_Far-red-induction_P Parameter: Plant Line Value: Columbia
  misc_feature: MA Experiment 20001451 PARAMETER Experiment Name: At_Far-red-induction_P Parameter: Timepoint (hr) Value: 24
  misc_feature: MA Experiment 20001451 PARAMETER Experiment Name: At_Far-red-induction_P Parameter: Tissue Value: Whole Plant
  misc_feature: MA Experiment ID: 20001459 Result: Up-regulated in Transcription
  misc_feature: MA Experiment 20001459 PARAMETER Experiment Name: At_50mM_NH4NO3_L-to-H_P Parameter: Age (day) Value: Undefined
  misc_feature: MA Experiment 20001459 PARAMETER Experiment Name: At_50mM_NH4NO3_L-to-H_P Parameter: Organism Value: Undefined
  misc_feature: MA Experiment 20001459 PARAMETER Experiment Name: At_50mM_NH4NO3_L-to-H_P Parameter: Plant Line Value: Undefined
  misc_feature: MA Experiment 20001459 PARAMETER Experiment Name: At_50mM_NH4NO3_L-to-H_P Parameter: Timepoint (hr) Value: 4
  misc_feature: MA Experiment 20001459 PARAMETER Experiment Name: At_50mM_NH4NO3_L-to-H_P Parameter: Tissue Value: Siliques
  misc_feature: MA Experiment 20001459 PARAMETER Experiment Name: At_50mM_NH4NO3_L-to-H_P Parameter: Treatment Value: 50mM NH4NO3 vs. 100mM Manitol
  misc_feature: MA Experiment ID: 20001558 Result: Down-regulated in Transcription
  misc_feature: MA Experiment 20001558 PARAMETER Experiment Name: At_Drought_Soil_Dry_P Parameter: Age (day) Value: 27
  misc_feature: MA Experiment 20001558 PARAMETER Experiment Name: At_Drought_Soil_Dry_P Parameter: Organism Value: A. thaliana
  misc_feature: MA Experiment 20001558 PARAMETER Experiment Name: At_Drought_Soil_Dry_P Parameter: Plant Line Value: WS
  misc_feature: MA Experiment 20001558 PARAMETER Experiment Name: At_Drought_Soil_Dry_P Parameter: Post Timepoint (hr) Value: 6
  misc_feature: MA Experiment 20001558 PARAMETER Experiment Name: At_Drought_Soil_Dry_P Parameter: Post-Treatment Value: Re-Water vs. No Drought
  misc_feature: MA Experiment 20001558 PARAMETER Experiment Name: At_Drought_Soil_Dry_P Parameter: Timepoint (day) Value: 13
  misc_feature: MA Experiment 20001558 PARAMETER Experiment Name: At_Drought_Soil_Dry_P Parameter: Treatment Value: Drought vs. No Drought
  misc_feature: MA Experiment ID: 20001559 Result: Down-regulated in Transcription
  misc_feature: MA Experiment 20001559 PARAMETER Experiment Name: At_Drought_Soil_Dry_P Parameter: Age (day) Value: 28
  misc_feature: MA Experiment 20001559 PARAMETER Experiment Name: At_Drought_Soil_Dry_P Parameter: Organism Value: A. thaliana
  misc_feature: MA Experiment 20001559 PARAMETER Experiment Name: At_Drought_Soil_Dry_P Parameter: Plant Line Value: WS
  misc_feature: MA Experiment 20001559 PARAMETER Experiment Name: At_Drought_Soil_Dry_P Parameter: Post Timepoint (hr) Value: 29
  misc_feature: MA Experiment 20001559 PARAMETER Experiment Name: At_Drought_Soil_Dry_P Parameter: Post-Treatment Value: Re-Water vs. No Drought
  misc_feature: MA Experiment 20001559 PARAMETER Experiment Name: At_Drought_Soil_Dry_P Parameter: Timepoint (day) Value: 14
  misc_feature: MA Experiment 20001559 PARAMETER Experiment Name: At_Drought_Soil_Dry_P Parameter: Treatment Value: Drought vs. No Drought
  misc_feature: MA Experiment ID: 20001560 Result: Down-regulated in Transcription
  misc_feature: MA Experiment 20001560 PARAMETER Experiment Name: At_Drought_Soil_Dry_P Parameter: Age (day) Value: 28
  misc_feature: MA Experiment 20001560 PARAMETER Experiment Name: At_Drought_Soil_Dry_P Parameter: Organism Value: A. thaliana
  misc_feature: MA Experiment 20001560 PARAMETER Experiment Name: At_Drought_Soil_Dry_P Parameter: Plant Line Value: WS
  misc_feature: MA Experiment 20001560 PARAMETER Experiment Name: At_Drought_Soil_Dry_P Parameter: Post Timepoint (hr) Value: None
  misc_feature: MA Experiment 20001560 PARAMETER Experiment Name: At_Drought_Soil_Dry_P Parameter: Post-Treatment Value: None
  misc_feature: MA Experiment 20001560 PARAMETER Experiment Name: At_Drought_Soil_Dry_P Parameter: Timepoint (day) Value: 14
  misc_feature: MA Experiment 20001560 PARAMETER Experiment Name: At_Drought_Soil_Dry_P Parameter: Treatment Value: Drought vs. No Drought
  misc_feature: MA Experiment ID: 20001757 Result: Up-regulated in Transcription
  misc_feature: MA Experiment 20001757 PARAMETER Experiment Name: At_50mM_NH4NO3_L-to-H_P Parameter: Timepoint (hr) Value: 6
  misc_feature: MA Experiment 20001757 PARAMETER Experiment Name: At_50mM_NH4NO3_L-to-H_P Parameter: Tissue Value: Leaf
  misc_feature: MA Experiment 20001757 PARAMETER Experiment Name: At_50mM_NH4NO3_L-to-H_P Parameter: Treatment Value: 50mM NH4NO3 vs 100mM Mannitol
  misc_feature: MA Experiment ID: 20001768 Result: Up-regulated in Transcription
  misc_feature: MA Experiment 20001768 PARAMETER Experiment Name: At_Far-red-enriched-adult_P Parameter: Age (day) Value: 28
  misc_feature: MA Experiment 20001768 PARAMETER Experiment Name: At_Far-red-enriched-adult_P Parameter: Light Value: Far-red enriched vs. White
  misc_feature: MA Experiment 20001768 PARAMETER Experiment Name: At_Far-red-enriched-adult_P Parameter: Organism Value: A. thaliana
  misc_feature: MA Experiment 20001768 PARAMETER Experiment Name: At_Far-red-enriched-adult_P Parameter: Plant Line Value: Columbia
  misc_feature: MA Experiment 20001768 PARAMETER Experiment Name: At_Far-red-enriched-adult_P Parameter: Timepoint (hr) Value: 1
  misc_feature: MA Experiment 20001768 PARAMETER Experiment Name: At_Far-red-enriched-adult_P Parameter: Tissue Value: Aerial
  misc_feature: MA Experiment ID: 20001771 Result: Up-regulated in Transcription
  misc_feature: MA Experiment 20001771 PARAMETER Experiment Name: At_Far-red-enriched-adult_P Parameter: Age (day) Value: 28
  misc_feature: MA Experiment 20001771 PARAMETER Experiment Name: At_Far-red-enriched-adult_P Parameter: Light Value: Far-red enriched vs. White
  misc_feature: MA Experiment 20001771 PARAMETER Experiment Name: At_Far-red-enriched-adult_P Parameter: Organism Value: A. thaliana
  misc_feature: MA Experiment 20001771 PARAMETER Experiment Name: At_Far-red-enriched-adult_P Parameter: Plant Line Value: Columbia
  misc_feature: MA Experiment 20001771 PARAMETER Experiment Name: At_Far-red-enriched-adult_P Parameter: Timepoint (hr) Value: 16
  misc_feature: MA Experiment 20001771 PARAMETER Experiment Name: At_Far-red-enriched-adult_P Parameter: Tissue Value: Aerial
  misc_feature: MA Experiment ID: 20001906 Result: Down-regulated in Transcription
  misc_feature: MA Experiment 20001906 PARAMETER Experiment Name: At_Drought_Reproduction_P Parameter: Age (day) Value: 35
  misc_feature: MA Experiment 20001906 PARAMETER Experiment Name: At_Drought_Reproduction_P Parameter: Organism Value: A. thaliana
  misc_feature: MA Experiment 20001906 PARAMETER Experiment Name: At_Drought_Reproduction_P Parameter: Plant Line Value: WS
  misc_feature: MA Experiment 20001906 PARAMETER Experiment Name: At_Drought_Reproduction_P Parameter: Timepoint (day) Value: 5
  misc_feature: MA Experiment 20001906 PARAMETER Experiment Name: At_Drought_Reproduction_P Parameter: Tissue Value: Siliques
  misc_feature: MA Experiment 20001906 PARAMETER Experiment Name: At_Drought_Reproduction_P Parameter: Treatment Value: Drought vs. No Drought
  misc_feature: MA Experiment ID: 20001907 Result: Down-regulated in Transcription
  misc_feature: MA Experiment 20001907 PARAMETER Experiment Name: At_Drought_Reproduction_P Parameter: Age (day) Value: 37
  misc_feature: MA Experiment 20001907 PARAMETER Experiment Name: At_Drought_Reproduction_P Parameter: Organism Value: A. thaliana
  misc_feature: MA Experiment 20001907 PARAMETER Experiment Name: At_Drought_Reproduction_P Parameter: Plant Line Value: WS
  misc_feature: MA Experiment 20001907 PARAMETER Experiment Name: At_Drought_Reproduction_P Parameter: Timepoint (day) Value: 7
  misc_feature: MA Experiment 20001907 PARAMETER Experiment Name: At_Drought_Reproduction_P Parameter: Tissue Value: Siliques
  misc_feature: MA Experiment 20001907 PARAMETER Experiment Name: At_Drought_Reproduction_P Parameter: Treatment Value: Drought vs. No Drought
  misc_feature: MA Experiment ID: 20001908 Result: Down-regulated in Transcription
  misc_feature: MA Experiment 20001908 PARAMETER Experiment Name: At_Drought_Reproduction_P Parameter: Age (day) Value: 40
  misc_feature: MA Experiment 20001908 PARAMETER Experiment Name: At_Drought_Reproduction_P Parameter: Organism Value: A. thaliana
  misc_feature: MA Experiment 20001908 PARAMETER Experiment Name: At_Drought_Reproduction_P Parameter: Plant Line Value: WS
  misc_feature: MA Experiment 20001908 PARAMETER Experiment Name: At_Drought_Reproduction_P Parameter: Timepoint (day) Value: 10
  misc_feature: MA Experiment 20001908 PARAMETER Experiment Name: At_Drought_Reproduction_P Parameter: Tissue Value: Siliques
  misc_feature: MA Experiment 20001908 PARAMETER Experiment Name: At_Drought_Reproduction_P Parameter: Treatment Value: Drought vs. No Drought
aaaaaaaaaacttcaaagagagagagagagagagttttgtgaactcaagaaaataaaaaaagttatagttaatgggattcggcttagagagtatcaaatcaatctccggcggatggggcgcggcggcgcgttcctgtgacgcttgtaaatcagttaccgccgccgtgttctgtcgagttgactcagctttcttatgcatagcatgtgacacaagaatccattccttcactcgccacgagcgcgtgtgggtttgtgaagtttgtgaacaagctcccgccgccgtcacttgcaaagccgacgccgccgctctttgcgtcagttgtgatgccgatattcactctgctaatcctctcgctagccgtcacgaacgtgtccccgtcgaaactttcttcgactcagccgaaaccgccgtcgccaaaatctcagcttcttcgacttttggtatccttggctcatccaccaccgttgatttaaccgctgttccggttatggctgatgatctcggtttatgtccgtggttacttcctaatgatttcaacgaaccggctaaaatcgaaatcggaactgaaaacatgaaaggttcttctgactttatgttttctgatttcgatcggcttattgatttcgagtttccgaattcgttcaatcatcatcaaaacaacgccggaggagatagtcttgttccggttcagacgaaaacagagcctctcccgttaactaacaatgatcattgcttcgatattgatttctgcagatcaaagctctctgctttcacttacccttctcaatcagtcagccacagtgtttcgacttcttctattgaatacggtgtagttcctgacggaaacacaaacaactctgttaaccggagcacgatcactagctcgacgactggtggtgatcatcaagcgagctctatggatagagaagctagggttttgaggtacagagagaagagaaagaacaggaaatttgagaagacgattcgttacgcttcgaggaaagcttatgcagagtcacggccaaggatcaaaggccggtttgcgaaaagaacagagacagaaaacgacgacattttccttagtcatgtttatgcttcagcagcacacgcacagtacggtgtcgtaccaacgttctgattcgaatctacggtggataaacaatcaacctgaagacttcatatcttccaccgttgatttacagtcggtgtataataagtatagtgagtcttaccgtagacaaacatcttatcctctttaccgttttaattactttttttttacgcgctctcactgccactgtaactcttttttttttttcttcctatatatgtatgcttatttttatttagaaaatgttatgaaatcatataatttggt

SEQ ID NO: 27540 - protein, 355 aa, Arabidopsis thaliana
  peptide (1)..(355): Ceres Seq. ID no. 13489932
  misc_feature (56)..(103): Pfam Name: B-box zinc finger Pfam Description: B-box zinc finger
  misc_feature (18)..(178): Homolog of NCBI NO: 7488604 NR Description: CONSTANS protein homolog COL1 - radish
  misc_feature (17)..(173): Homolog of NCBI NO: 21553854 NR Description: zinc finger protein constans-like 8 [Arabidopsis
  misc_feature (17)..(173): Homolog of NCBI NO: 15224620 NR Description: CONSTANS B-box zinc finger family protein
  misc_feature (184)..(355): Homolog of NCBI NO: 21553854 NR Description: zinc finger protein constans-like 8 [Arabidopsis
  misc_feature (184)..(355): Homolog of NCBI NO: 15224620 NR Description: CONSTANS B-box zinc finger family protein
  misc_feature (18)..(355): Homolog of NCBI NO: 4091804 NR Description: CONSTANS-like protein 1 [Malus x domestica]
  misc_feature (18)..(355): Homolog of NCBI NO: 4091806 NR Description: CONSTANS-like protein 2 [Malus x domestica]
  misc_feature (1)..(355): Homolog of NCBI NO: 17433047 NR Description: Zinc finger protein constans-like 15
  misc_feature (1)..(355): Homolog of NCBI NO: 21594050 NR Description: CONSTANS-like B-box zinc finger protein-like
  misc_feature (1)..(355): Homolog of NCBI NO: 18424009 NR Description: CONSTANS B-box zinc finger family protein
MGFGLESIKSISGGWGAAARSCDACKSVTAAVFCRVDSAFLCIACDTRIHSFTRHERVWVCEVCEQAPAAVTCKADAAALCVSCDADIHSANPLASRHERVPVETFFDSAETAVAKISASSTFGILGSSTTVDLTAVPVMADDLGLCPWLLPNDFNEPAKIEIGTENMKGSSDFMFSDFDRLIDFEFPNSFNHHQNNAGGDSLVPVQTKTEPLPLTNNDHCFDIDFCRSKLSAFTYPSQSVSHSVSTSSIEYGVVPDGNTNNSVNRSTITSSTTGGDHQASSMDREARVLRYREKRKNRKFEKTIRYASRKAYAESRPRIKGRFAKRTETENDDIFLSHVYASAAHAQYGVVPTF

SEQ ID NO: 27541 - protein, 216 aa, Arabidopsis thaliana
  peptide (1)..(216): Ceres Seq. ID no. 13489933
  misc_feature (151)..(190): Pfam Name: CCT motif Pfam Description: CCT motif
  misc_feature (1)..(39): Homolog of NCBI NO: 7488604 NR Description: CONSTANS protein homolog COL1 - radish
  misc_feature (1)..(34): Homolog of NCBI NO: 21553854 NR Description: zinc finger protein constans-like 8 [Arabidopsis
  misc_feature (1)..(34): Homolog of NCBI NO: 15224620 NR Description: CONSTANS B-box zinc finger family protein
  misc_feature (45)..(216): Homolog of NCBI NO: 21553854 NR Description: zinc finger protein constans-like 8 [Arabidopsis
  misc_feature (45)..(216): Homolog of NCBI NO: 15224620 NR Description: CONSTANS B-box zinc finger family protein
  misc_feature (1)..(216): Homolog of NCBI NO: 4091804 NR Description: CONSTANS-like protein 1 [Malus x domestica]
  misc_feature (1)..(216): Homolog of NCBI NO: 4091806 NR Description: CONSTANS-like protein 2 [Malus x domestica]
  misc_feature (1)..(216): Homolog of NCBI NO: 17433047 NR Description: Zinc finger protein constans-like 15
  misc_feature (1)..(216): Homolog of NCBI NO: 21594050 NR Description: CONSTANS-like B-box zinc finger protein-like
  misc_feature (1)..(216): Homolog of NCBI NO: 18424009 NR Description: CONSTANS B-box zinc finger family protein
MADDLGLCPWLLPNDFNEPAKIEIGTENMKGSSDFMFSDFDRLIDFEFPNSFNHHQNNAGGDSLVPVQTKTEPLPLTNNDHCFDIDFCRSKLSAFTYPSQSVSHSVSTSSIEYGVVPDGNTNNSVNRSTITSSTTGGDHQASSMDREARVLRYREKRKNRKFEKTIRYASRKAYAESRPRIKGRFAKRTETENDDIFLSHVYASAAHAQYGVVPTF

SEQ ID NO: 27542 - protein, 188 aa, Arabidopsis thaliana
  peptide (1)..(188): Ceres Seq. ID no. 13489934
  misc_feature (123)..(162): Pfam Name: CCT motif Pfam Description: CCT motif
  misc_feature (1)..(188): Homolog of NCBI NO: 18424009 NR Description: CONSTANS B-box zinc finger family protein
  misc_feature (4)..(188): Homolog of NCBI NO: 4557093 NR Description: zinc finger protein [Pinus radiata]
  misc_feature (28)..(188): Homolog of NCBI NO: 7488604 NR Description: CONSTANS protein homolog COL1 - radish
  misc_feature (1)..(11): Homolog of NCBI NO: 7488604 NR Description: CONSTANS protein homolog COL1 - radish
  misc_feature (17)..(188): Homolog of NCBI NO: 21553854 NR Description: zinc finger protein constans-like 8 [Arabidopsis
  misc_feature (17)..(188): Homolog of NCBI NO: 15224620 NR Description: CONSTANS B-box zinc finger family protein
  misc_feature (1)..(188): Homolog of NCBI NO: 4091804 NR Description: CONSTANS-like protein 1 [Malus x domestica]
  misc_feature (1)..(188): Homolog of NCBI NO: 4091806 NR Description: CONSTANS-like protein 2 [Malus x domestica]
  misc_feature (1)..(188): Homolog of NCBI NO: 17433047 NR Description: Zinc finger protein constans-like 15
  misc_feature (1)..(188): Homolog of NCBI NO: 21594050 NR Description: CONSTANS-like B-box zinc finger protein-like
MKGSSDFMFSDFDRLIDFEFPNSFNHHQNNAGGDSLVPVQTKTEPLPLTNNDHCFDIDFCRSKLSAFTYPSQSVSHSVSTSSIEYGVVPDGNTNNSVNRSTITSSTTGGDHQASSMDREARVLRYREKRKNRKFEKTIRYASRKAYAESRPRIKGRFAKRTETENDDIFLSHVYASAAHAQYGVVPTF

SEQ ID NO: 27543 - DNA, 1145 bp, Arabidopsis thaliana
  misc_feature (1)..(1145): Ceres Seq. ID no. 12340318
  misc_feature: MA Experiment ID: 108433 Result: Down-regulated in Transcription
  misc_feature: MA Experiment 108433 PARAMETER Experiment Name: At_rhl_Mutant2_cDNA_P Parameter: Age (day) Value: 7
  misc_feature: MA Experiment 108433 PARAMETER Experiment Name: At_rhl_Mutant2_cDNA_P Parameter: Organism Value: A. thaliana
  misc_feature: MA Experiment 108433 PARAMETER Experiment Name: At_rhl_Mutant2_cDNA_P Parameter: Plant Line Value: rhl Mutant vs. wt landsburg
  misc_feature: MA Experiment 108433 PARAMETER Experiment Name: At_rhl_Mutant2_cDNA_P Parameter: Tissue Value: Roots
  misc_feature: MA Experiment ID: 108434 Result: Down-regulated in Transcription
  misc_feature: MA Experiment 108434 PARAMETER Experiment Name: At_Root_Tips_cDNA_P Parameter: Tissue Value: Root Tips
  misc_feature: MA Experiment ID: 108473 Result: Down-regulated in Transcription
  misc_feature: MA Experiment 108473 PARAMETER Experiment Name: At_Drought_Flowers_cDNA_P Parameter: Timepoint (hr) Value: 7 d
  misc_feature: MA Experiment 108473 PARAMETER Experiment Name: At_Drought_Flowers_cDNA_P Parameter: Tissue Value: Flower
  misc_feature: MA Experiment 108473 PARAMETER Experiment Name: At_Drought_Flowers_cDNA_P Parameter: Treatment Value: Drought vs. No Drought
  misc_feature: MA Experiment ID: 108488 Result: Down-regulated in Transcription
  misc_feature: MA Experiment ID: 108572 Result: Down-regulated in Transcription
  misc_feature: MA Experiment 108572 PARAMETER Experiment Name: At_Drought_cDNA_P Parameter: Timepoint (hr) Value: 1
  misc_feature: MA Experiment 108572 PARAMETER Experiment Name: At_Drought_cDNA_P Parameter: Tissue Value: Aerial
  misc_feature: MA Experiment 108572 PARAMETER Experiment Name: At_Drought_cDNA_P Parameter: Treatment Value: Drought vs. No Drought
  misc_feature: MA Experiment ID: 108577 Result: Down-regulated in Transcription
  misc_feature: MA Experiment 108577 PARAMETER Experiment Name: At_42deg_Heat_cDNA_P Parameter: Temperature (deg C) Value: 42 vs. 22
  misc_feature: MA Experiment 108577 PARAMETER Experiment Name: At_42deg_Heat_cDNA_P Parameter: Timepoint (hr) Value: 6
  misc_feature: MA Experiment 108577 PARAMETER Experiment Name: At_42deg_Heat_cDNA_P Parameter: Tissue Value: Aerial
  misc_feature: MA Experiment ID: 108594 Result: Up-regulated in Transcription
  misc_feature: MA Experiment 108594 PARAMETER Experiment Name: At_Ler-rhl_Root_cDNA_P Parameter: Plant Line Value: null
  misc_feature: MA Experiment ID: 108595 Result: Up-regulated in Transcription
  misc_feature: MA Experiment 108595 PARAMETER Experiment Name: At_Ler-pi_Ovule_cDNA_P Parameter: Plant Line Value: null
  misc_feature: MA Experiment ID: 108667 Result: Up-regulated in Transcription
  misc_feature: MA Experiment 108667 PARAMETER Experiment Name: At_2mM_SA_cDNA_P Parameter: Plant Line Value: WS
  misc_feature: MA Experiment 108667 PARAMETER Experiment Name: At_2mM_SA_cDNA_P Parameter: Timepoint (hr) Value: 1
  misc_feature: MA Experiment 108667 PARAMETER Experiment Name: At_2mM_SA_cDNA_P Parameter: Treatment Value: 2mM SA vs. No Treatment
  misc_feature: MA Experiment ID: 108668 Result: Down-regulated in Transcription
  misc_feature: MA Experiment 108668 PARAMETER Experiment Name: At_2mM_SA_cDNA_P Parameter: Plant Line Value: WS
  misc_feature: MA Experiment 108668 PARAMETER Experiment Name: At_2mM_SA_cDNA_P Parameter: Timepoint (hr) Value: 6
  misc_feature: MA Experiment 108668 PARAMETER Experiment Name: At_2mM_SA_cDNA_P Parameter: Treatment Value: 2mM SA vs. No Treatment
  misc_feature: MA Experiment ID: 20000068 Result: Down-regulated in Transcription
  misc_feature: MA Experiment ID: 20000069 Result: Down-regulated in Transcription
  misc_feature: MA Experiment 20000069 PARAMETER Experiment Name: At_100uM_ABA_Mutants_cDNA_P Parameter: Plant Line Value: CS23
  misc_feature: MA Experiment 20000069 PARAMETER Experiment Name: At_100uM_ABA_Mutants_cDNA_P Parameter: Timepoint (hr) Value: 6
  misc_feature: MA Experiment 20000069 PARAMETER Experiment Name: At_100uM_ABA_Mutants_cDNA_P Parameter: Tissue Value: Aerial
  misc_feature: MA Experiment 20000069 PARAMETER Experiment Name: At_100uM_ABA_Mutants_cDNA_P Parameter: Treatment Value: 100uM ABA vs. No Treatment
  misc_feature: MA Experiment ID: 20000089 Result: Down-regulated in Transcription
  misc_feature: MA Experiment ID: 20000090 Result: Down-regulated in Transcription
  misc_feature: MA Experiment ID: 20000113 Result: Up-regulated in Transcription
  misc_feature: MA Experiment 20000113 PARAMETER Experiment Name: At_42deg_Heat_cDNA_P Parameter: Temperature (deg C) Value: 42 vs. 22
  misc_feature: MA Experiment 20000113 PARAMETER Experiment Name: At_42deg_Heat_cDNA_P Parameter: Timepoint (hr) Value: 8
  misc_feature: MA Experiment 20000113 PARAMETER Experiment Name: At_42deg_Heat_cDNA_P Parameter: Tissue Value: Aerial
  misc_feature: MA Experiment ID: 20000180 Result: Down-regulated in Transcription
  misc_feature: MA Experiment 20000180 PARAMETER Experiment Name: At_Germinating_Seeds_P Parameter: Age (hr) Value: 24 vs. 0
  misc_feature: MA Experiment 20000180 PARAMETER Experiment Name: At_Germinating_Seeds_P Parameter: Tissue Value: Germinating Seeds
  misc_feature: MA Experiment ID: 20000224 Result: Down-regulated in Transcription
  misc_feature: MA Experiment ID: 20000268 Result: Down-regulated in Transcription
  misc_feature: MA Experiment 20000268 PARAMETER Experiment Name: At_100mM_NaCl__P Parameter: Age (day) Value: 14
  misc_feature: MA Experiment 20000268 PARAMETER Experiment Name: At_100mM_NaCl__P Parameter: Organism Value: A. thaliana
  misc_feature: MA Experiment 20000268 PARAMETER Experiment Name: At_100mM_NaCl__P Parameter: Plant Line Value: WS
  misc_feature: MA Experiment 20000268 PARAMETER Experiment Name: At_100mM_NaCl__P Parameter: Timepoint (hr) Value: 6
  misc_feature: MA Experiment 20000268 PARAMETER Experiment Name: At_100mM_NaCl__P Parameter: Tissue Value: Whole Plant
  misc_feature: MA Experiment 20000268 PARAMETER Experiment Name: At_100mM_NaCl__P Parameter: Treatment Value: 100mM NaCl vs. No Treatment
  misc_feature: MA Experiment ID: 20000308 Result: Down-regulated in Transcription
  misc_feature: MA Experiment 20000308 PARAMETER Experiment Name: At_100mM_NaCl__P Parameter: Age (day) Value: 17
  misc_feature: MA Experiment 20000308 PARAMETER Experiment Name: At_100mM_NaCl__P Parameter: Organism Value: A. thaliana
  misc_feature: MA Experiment 20000308 PARAMETER Experiment Name: At_100mM_NaCl__P Parameter: Plant Line Value: WS
  misc_feature: MA Experiment 20000308 PARAMETER Experiment Name: At_100mM_NaCl__P Parameter: Timepoint (hr) Value: 72
  misc_feature: MA Experiment 20000308 PARAMETER Experiment Name: At_100mM_NaCl__P Parameter: Tissue Value: Whole Plant
  misc_feature: MA Experiment 20000308 PARAMETER Experiment Name: At_100mM_NaCl__P Parameter: Treatment Value: 100mM NaCl vs. No Treatment
  misc_feature: MA Experiment ID: 20000437 Result: Down-regulated in Transcription
  misc_feature: MA Experiment 20000437 PARAMETER Experiment Name: At_Drought_P Parameter: Age (day) Value: 8
  misc_feature: MA Experiment 20000437 PARAMETER Experiment Name: At_Drought_P Parameter: Organism Value: A. thaliana
  misc_feature: MA Experiment 20000437 PARAMETER Experiment Name: At_Drought_P Parameter: Plant Line Value: WS
  misc_feature: MA Experiment 20000437 PARAMETER Experiment Name: At_Drought_P Parameter: Timepoint (hr) Value: 24
  misc_feature: MA Experiment 20000437 PARAMETER Experiment Name: At_Drought_P Parameter: Tissue Value: Whole Plant
  misc_feature: MA Experiment 20000437 PARAMETER Experiment Name: At_Drought_P Parameter: Treatment Value: Drought vs. No Drought
  misc_feature: MA Experiment ID: 20000439 Result: Down-regulated in Transcription
  misc_feature: MA Experiment 20000439 PARAMETER Experiment Name: At_Roots__P Parameter: Age (day) Value: 14 vs. 21
  misc_feature: MA Experiment 20000439 PARAMETER Experiment Name: At_Roots__P Parameter: Organism Value: A. thaliana
  misc_feature: MA Experiment 20000439 PARAMETER Experiment Name: At_Roots__P Parameter: Tissue Value: Roots vs. Whole Plant
  misc_feature: MA Experiment ID: 20000441 Result: Up-regulated in Transcription
  misc_feature: MA Experiment 20000441 PARAMETER Experiment Name: At_1uM_BR-BRZ__P Parameter: Tissue Value: Shoot Apices
  misc_feature: MA Experiment 20000441 PARAMETER Experiment Name: At_1uM_BR-BRZ__P Parameter: Treatment Value: 1uM BR vs. No Treatment
  misc_feature: MA Experiment ID: 20000443 Result: Up-regulated in Transcription
  misc_feature: MA Experiment 20000443 PARAMETER Experiment Name: At_1uM_BR-BRZ__P Parameter: Tissue Value: Shoot Apices
  misc_feature: MA Experiment 20000443 PARAMETER Experiment Name: At_1uM_BR-BRZ__P Parameter: Treatment Value: 1uM BRZ vs. No Treatment
  misc_feature: MA Experiment ID: 20000452 Result: Down-regulated in Transcription
  misc_feature: MA Experiment 20000452 PARAMETER Experiment Name: At_CS6879_Shoots-Roots_P Parameter: Age (day) Value: 14
  misc_feature: MA Experiment 20000452 PARAMETER Experiment Name: At_CS6879_Shoots-Roots_P Parameter: Organism Value: A. thaliana
  misc_feature: MA Experiment 20000452 PARAMETER Experiment Name: At_CS6879_Shoots-Roots_P Parameter: Plant Line Value: CS6879 vs. WS
  misc_feature: MA Experiment 20000452 PARAMETER Experiment Name: At_CS6879_Shoots-Roots_P Parameter: Tissue Value: Shoots
  misc_feature: MA Experiment ID: 20000460 Result: Up-regulated in Transcription
  misc_feature: MA Experiment 20000460 PARAMETER Experiment Name: At_10percent_PEG_P Parameter: Age (day) Value: 12
  misc_feature: MA Experiment 20000460 PARAMETER Experiment Name: At_10percent_PEG_P Parameter: Organism Value: A. thaliana
  misc_feature: MA Experiment 20000460 PARAMETER Experiment Name: At_10percent_PEG_P Parameter: Plant Line Value: WS
  misc_feature: MA Experiment 20000460 PARAMETER Experiment Name: At_10percent_PEG_P Parameter: Timepoint (day) Value: 12
  misc_feature: MA Experiment 20000460 PARAMETER Experiment Name: At_10percent_PEG_P Parameter: Tissue Value: Whole Plant
  misc_feature: MA Experiment 20000460 PARAMETER Experiment Name: At_10percent_PEG_P Parameter: Treatment Value: 10percent PEG vs. No Treatment
  misc_feature: MA Experiment ID: 20000527 Result: Up-regulated in Transcription
  misc_feature: MA Experiment 20000527 PARAMETER Experiment Name: At_10percent_PEG_P Parameter: Age (day) Value: 20
  misc_feature: MA Experiment 20000527 PARAMETER Experiment Name: At_10percent_PEG_P Parameter: Organism Value: A. thaliana
  misc_feature: MA Experiment 20000527 PARAMETER Experiment Name: At_10percent_PEG_P Parameter: Plant Line Value: WS
  misc_feature: MA Experiment 20000527 PARAMETER Experiment Name: At_10percent_PEG_P Parameter: Timepoint (day) Value: 20
  misc_feature: MA Experiment 20000527 PARAMETER Experiment Name: At_10percent_PEG_P Parameter: Tissue Value: Whole Plant
  misc_feature: MA Experiment 20000527 PARAMETER Experiment Name: At_10percent_PEG_P Parameter: Treatment Value: 10percent PEG vs. No Treatment
  misc_feature: MA Experiment ID: 20000606 Result: Up-regulated in Transcription
  misc_feature: MA Experiment 20000606 PARAMETER Experiment Name: At_CS8548_Mutant_P Parameter: Age (day) Value: 14
  misc_feature: MA Experiment 20000606 PARAMETER Experiment Name: At_CS8548_Mutant_P Parameter: Plant Line Value: CS8548 vs. wt
  misc_feature: MA Experiment 20000606 PARAMETER Experiment Name: At_CS8548_Mutant_P Parameter: Tissue Value: Whole Plant
  misc_feature: MA Experiment ID: 20000794 Result: Down-regulated in Transcription
  misc_feature: MA Experiment 20000794 PARAMETER Experiment Name: At_Petals_P Parameter: Age (day) Value: 23-25 days
  misc_feature: MA Experiment 20000794 PARAMETER Experiment Name: At_Petals_P Parameter: Plant Line Value: WS
  misc_feature: MA Experiment 20000794 PARAMETER Experiment Name: At_Petals_P Parameter: Tissue Value: Petals vs. Whole plant
  misc_feature: MA Experiment ID: 20001247 Result: Up-regulated in Transcription
  misc_feature: MA Experiment 20001247 PARAMETER Experiment Name: At_Far-red-induction_P Parameter: Age (day) Value: 7
  misc_feature: MA Experiment 20001247 PARAMETER Experiment Name: At_Far-red-induction_P Parameter: Light Value: Far-red vs. White
  misc_feature: MA Experiment 20001247 PARAMETER Experiment Name: At_Far-red-induction_P Parameter: Organism Value: A. thaliana
  misc_feature: MA Experiment 20001247 PARAMETER Experiment Name: At_Far-red-induction_P Parameter: Plant Line Value: Columbia
  misc_feature: MA Experiment 20001247 PARAMETER Experiment Name: At_Far-red-induction_P Parameter: Timepoint (hr) Value: 1
  misc_feature: MA Experiment 20001247 PARAMETER Experiment Name: At_Far-red-induction_P Parameter: Tissue Value: Whole Plant
  misc_feature: MA Experiment ID: 20001450 Result: Up-regulated in Transcription
  misc_feature: MA Experiment 20001450 PARAMETER Experiment Name: At_Far-red-induction_P Parameter: Age (day) Value: 7
  misc_feature: MA Experiment 20001450 PARAMETER Experiment Name: At_Far-red-induction_P Parameter: Light Value: Far-red vs. White
  misc_feature: MA Experiment 20001450 PARAMETER Experiment Name: At_Far-red-induction_P Parameter: Organism Value: A. thaliana
  misc_feature: MA Experiment 20001450 PARAMETER Experiment Name: At_Far-red-induction_P Parameter: Plant Line Value: Columbia
  misc_feature: MA Experiment 20001450 PARAMETER Experiment Name: At_Far-red-induction_P Parameter: Timepoint (hr) Value: 8
  misc_feature: MA Experiment 20001450 PARAMETER Experiment Name: At_Far-red-induction_P Parameter: Tissue Value: Whole Plant
  misc_feature: MA Experiment ID: 20001555 Result: Down-regulated in Transcription
  misc_feature: MA Experiment 20001555 PARAMETER Experiment Name: At_Drought_Soil_Dry_P Parameter: Age (day) Value: 24
  misc_feature: MA Experiment 20001555 PARAMETER Experiment Name: At_Drought_Soil_Dry_P Parameter: Organism Value: A. thaliana
  misc_feature: MA Experiment 20001555 PARAMETER Experiment Name: At_Drought_Soil_Dry_P Parameter: Plant Line Value: WS
  misc_feature: MA Experiment 20001555 PARAMETER Experiment Name: At_Drought_Soil_Dry_P Parameter: Post Timepoint (hr) Value: None
  misc_feature: MA Experiment 20001555 PARAMETER Experiment Name: At_Drought_Soil_Dry_P Parameter: Post-Treatment Value: None
  misc_feature: MA Experiment 20001555 PARAMETER Experiment Name: At_Drought_Soil_Dry_P Parameter: Timepoint (day) Value: 10
  misc_feature: MA Experiment 20001555 PARAMETER Experiment Name: At_Drought_Soil_Dry_P Parameter: Treatment Value: Drought vs. No Drought
  misc_feature: MA Experiment ID: 20001556 Result: Down-regulated in Transcription
  misc_feature: MA Experiment 20001556 PARAMETER Experiment Name: At_Drought_Soil_Dry_P Parameter: Age (day) Value: 26
  misc_feature: MA Experiment 20001556 PARAMETER Experiment Name: At_Drought_Soil_Dry_P Parameter: Organism Value: A. thaliana
  misc_feature: MA Experiment 20001556 PARAMETER Experiment Name: At_Drought_Soil_Dry_P Parameter: Plant Line Value: WS
  misc_feature: MA Experiment 20001556 PARAMETER Experiment Name: At_Drought_Soil_Dry_P Parameter: Post Timepoint (hr) Value: None
  misc_feature: MA Experiment 20001556 PARAMETER Experiment Name: At_Drought_Soil_Dry_P Parameter: Post-Treatment Value: None
  misc_feature: MA Experiment 20001556 PARAMETER Experiment Name: At_Drought_Soil_Dry_P Parameter: Timepoint (day) Value: 12
  misc_feature: MA Experiment 20001556 PARAMETER Experiment Name: At_Drought_Soil_Dry_P Parameter: Treatment Value: Drought vs. No Drought
  misc_feature: MA Experiment ID: 20001557 Result: Up-regulated in Transcription
  misc_feature: MA Experiment 20001557 PARAMETER Experiment Name: At_Drought_Soil_Dry_P Parameter: Age (day) Value: 27
  misc_feature: MA Experiment 20001557 PARAMETER Experiment Name: At_Drought_Soil_Dry_P Parameter: Organism Value: A. thaliana
  misc_feature: MA Experiment 20001557 PARAMETER Experiment Name: At_Drought_Soil_Dry_P Parameter: Plant Line Value: WS
  misc_feature: MA Experiment 20001557 PARAMETER Experiment Name: At_Drought_Soil_Dry_P Parameter: Post Timepoint (hr) Value: 3
  misc_feature: MA Experiment 20001557 PARAMETER Experiment Name: At_Drought_Soil_Dry_P Parameter: Post-Treatment Value: Re-Water vs. No Drought
  misc_feature: MA Experiment 20001557 PARAMETER Experiment Name: At_Drought_Soil_Dry_P Parameter: Timepoint (day) Value: 13
  misc_feature: MA Experiment 20001557 PARAMETER Experiment Name: At_Drought_Soil_Dry_P Parameter: Treatment Value: Drought vs. No Drought
  misc_feature: MA Experiment ID: 20001558 Result: Up-regulated in Transcription
  misc_feature: MA Experiment 20001558 PARAMETER Experiment Name: At_Drought_Soil_Dry_P Parameter: Age (day) Value: 27
  misc_feature: MA Experiment 20001558 PARAMETER Experiment Name: At_Drought_Soil_Dry_P Parameter: Organism Value: A. thaliana
  misc_feature: MA Experiment 20001558 PARAMETER Experiment Name: At_Drought_Soil_Dry_P Parameter: Plant Line Value: WS
  misc_feature: MA Experiment 20001558 PARAMETER Experiment Name: At_Drought_Soil_Dry_P Parameter: Post Timepoint (hr) Value: 6
  misc_feature: MA Experiment 20001558 PARAMETER Experiment Name: At_Drought_Soil_Dry_P Parameter: Post-Treatment Value: Re-Water vs. No Drought
  misc_feature: MA Experiment 20001558 PARAMETER Experiment Name: At_Drought_Soil_Dry_P Parameter: Timepoint (day) Value: 13
  misc_feature: MA Experiment 20001558 PARAMETER Experiment Name: At_Drought_Soil_Dry_P Parameter: Treatment Value: Drought vs. No Drought
  misc_feature: MA Experiment ID: 20001560 Result: Up-regulated in Transcription
  misc_feature: MA Experiment 20001560 PARAMETER Experiment Name: At_Drought_Soil_Dry_P Parameter: Age (day) Value: 28
  misc_feature: MA Experiment 20001560 PARAMETER Experiment Name: At_Drought_Soil_Dry_P Parameter: Organism Value: A. thaliana
  misc_feature: MA Experiment 20001560 PARAMETER Experiment Name: At_Drought_Soil_Dry_P Parameter: Plant Line Value: WS
  misc_feature: MA Experiment 20001560 PARAMETER Experiment Name: At_Drought_Soil_Dry_P Parameter: Post Timepoint (hr) Value: None
  misc_feature: MA Experiment 20001560 PARAMETER Experiment Name: At_Drought_Soil_Dry_P Parameter: Post-Treatment Value: None
  misc_feature: MA Experiment 20001560 PARAMETER Experiment Name: At_Drought_Soil_Dry_P Parameter: Timepoint (day) Value: 14
  misc_feature: MA Experiment 20001560 PARAMETER Experiment Name: At_Drought_Soil_Dry_P Parameter: Treatment Value: Drought vs. No Drought
  misc_feature: MA Experiment ID: 20001904 Result: Down-regulated in Transcription
  misc_feature: MA Experiment 20001904 PARAMETER Experiment Name: At_Drought_Reproduction_P Parameter: Age (day) Value: 37
  misc_feature: MA Experiment 20001904 PARAMETER Experiment Name: At_Drought_Reproduction_P Parameter: Organism Value: A. thaliana
  misc_feature: MA Experiment 20001904 PARAMETER Experiment Name: At_Drought_Reproduction_P Parameter: Plant Line Value: WS
  misc_feature: MA Experiment 20001904 PARAMETER Experiment Name: At_Drought_Reproduction_P Parameter: Timepoint (day) Value: 7
  misc_feature: MA Experiment 20001904 PARAMETER Experiment Name: At_Drought_Reproduction_P Parameter: Tissue Value: Rosettes
  misc_feature: MA Experiment 20001904 PARAMETER Experiment Name: At_Drought_Reproduction_P Parameter: Treatment Value: Drought vs. No Drought
  misc_feature: MA Experiment ID: 20001906 Result: Down-regulated in Transcription
  misc_feature: MA Experiment 20001906 PARAMETER Experiment Name: At_Drought_Reproduction_P Parameter: Age (day) Value: 35
  misc_feature: MA Experiment 20001906 PARAMETER Experiment Name: At_Drought_Reproduction_P Parameter: Organism Value: A. thaliana
  misc_feature: MA Experiment 20001906 PARAMETER Experiment Name: At_Drought_Reproduction_P Parameter: Plant Line Value: WS
  misc_feature: MA Experiment 20001906 PARAMETER Experiment Name: At_Drought_Reproduction_P Parameter: Timepoint (day) Value: 5
  misc_feature: MA Experiment 20001906 PARAMETER Experiment Name: At_Drought_Reproduction_P Parameter: Tissue Value: Siliques
  misc_feature: MA Experiment 20001906 PARAMETER Experiment Name: At_Drought_Reproduction_P Parameter: Treatment Value: Drought vs. No Drought
  misc_feature: MA Experiment ID: 20001907 Result: Down-regulated in Transcription
  misc_feature: MA Experiment 20001907 PARAMETER Experiment Name: At_Drought_Reproduction_P Parameter: Age (day) Value: 37
  misc_feature: MA Experiment 20001907 PARAMETER Experiment Name: At_Drought_Reproduction_P Parameter: Organism Value: A. thaliana
  misc_feature: MA Experiment 20001907 PARAMETER Experiment Name: At_Drought_Reproduction_P Parameter: Plant Line Value: WS
  misc_feature: MA Experiment 20001907 PARAMETER Experiment Name: At_Drought_Reproduction_P Parameter: Timepoint (day) Value: 7
  misc_feature: MA Experiment 20001907 PARAMETER Experiment Name: At_Drought_Reproduction_P Parameter: Tissue Value: Siliques
  misc_feature: MA Experiment 20001907 PARAMETER Experiment Name: At_Drought_Reproduction_P Parameter: Treatment Value: Drought vs. No Drought
  misc_feature: MA Experiment ID: 20001910 Result: Down-regulated in Transcription
  misc_feature: MA Experiment 20001910 PARAMETER Experiment Name: At_Drought_Reproduction_P Parameter: Age (day) Value: 37
  misc_feature: MA Experiment 20001910 PARAMETER Experiment Name: At_Drought_Reproduction_P Parameter: Organism Value: A. thaliana
  misc_feature: MA Experiment 20001910 PARAMETER Experiment Name: At_Drought_Reproduction_P Parameter: Plant Line Value: WS
  misc_feature: MA Experiment 20001910 PARAMETER Experiment Name: At_Drought_Reproduction_P Parameter: Timepoint (day) Value: 7
  misc_feature: MA Experiment 20001910 PARAMETER Experiment Name: At_Drought_Reproduction_P Parameter: Tissue Value: Flowers
  misc_feature: MA Experiment 20001910 PARAMETER Experiment Name: At_Drought_Reproduction_P Parameter: Treatment Value: Drought vs. No Drought
  misc_feature: MA Experiment ID: 20001911 Result: Down-regulated in Transcription
  misc_feature: MA Experiment 20001911 PARAMETER Experiment Name: At_Drought_Reproduction_P Parameter: Age (day) Value: 40
  misc_feature: MA Experiment 20001911 PARAMETER Experiment Name: At_Drought_Reproduction_P Parameter: Organism Value: A. thaliana
  misc_feature: MA Experiment 20001911 PARAMETER Experiment Name: At_Drought_Reproduction_P Parameter: Plant Line Value: WS
  misc_feature: MA Experiment 20001911 PARAMETER Experiment Name: At_Drought_Reproduction_P Parameter: Timepoint (day) Value: 10
  misc_feature: MA Experiment 20001911 PARAMETER Experiment Name: At_Drought_Reproduction_P Parameter: Tissue Value: Flowers
  misc_feature: MA Experiment 20001911 PARAMETER Experiment Name: At_Drought_Reproduction_P Parameter: Treatment Value: Drought vs. No Drought
aaaccaatctaaacatcaaaagacaaaaaccaaagctctttcactattacacaaccttctatttcacttttcctcaaaaaaaaaagaaaaatgtattcgttagtgtttaaactctttctatttttgtcacttctccaaatctctgtctctgctagaaacctagcttcacaagaaccaaaccagtttcaactactcaagtaccacaaaggagctcttctctccggcaaaatctccgttaacctaatctggtacggcaaattcaaaccatctcaaagagcaatcatctccgacttcattacctcactcacacacacttctcctacgtccaaaactctccaccaaccatctgttgccacgtggtggaaaaccacagaaaaatactacaaactcgcaacacccagcaaaaactcatcacctctgtctctaactctcgggaaacaaatcatcgacgagtcttgctctctaggaaaatctttaaccgataaaaagattcaaaccctagcttcgaaaggagaccaacgcaacgccatcaacgtcgttttgacttcagctgacgttacggttacaggatttggtatgagtcgttgcgggactcacggacacgctcgtggtttaggtaaacgtggctccaagtttgcttacatttgggttggaaactctgagacacaatgtcctggtcaatgcgcgtggcctttccacgcgccggtgtacggtccacagagtccaccactagtggcaccaaacaatgacgtgggactcgatgggatggttattaacttagctagtcttttagctggaaccgcaacgaacccttttggtaatggttactatcaaggtccacaaaacgcaccgcttgaagctgcgtctgcttgtcctggcgtttatggtaaaggagcttatcctggttacgctggagatttgcttgtggatactacaacgggaggtagttttaatgcgtatggtgcaaacggcaggaagtttttgcttcctgctttgtatgatcctacgacgtcggcttgctctactatggtctgaatactaaaaaaaagtccaatgtttggtctttggtagtagaaaataatattctagcgtaattcttttgttatgtttggttacaaattctagtataattcaatttattcagt

SEQ ID NO: 27544 - protein, 314 aa, Arabidopsis thaliana
  peptide (1)..(314): Ceres Seq. ID no. 12340319
  misc_feature (35)..(314): Pfam Name: Phosphate-induced protein 1 conserved region Pfam Description: Phosphate-induced protein 1 conserved region
  misc_feature (35)..(313): Homolog of NCBI NO: 37533672 NR Description: putative phosphate-induced protein
  misc_feature (137)..(313): Homolog of NCBI NO: 13194680 NR Description: phosphate-induced protein 1-like protein
  misc_feature (43)..(314): Homolog of NCBI NO: 15242420 NR Description: putative protein
  misc_feature (85)..(314): Homolog of NCBI NO: 31074969 NR Description: erg-1 [Solanum tuberosum]
  misc_feature (1)..(245): Homolog of NCBI NO: 11762144 NR Description: At1g35140 [Arabidopsis thaliana]
  misc_feature (6)..(314): Homolog of NCBI NO: 15237656 NR Description: phi-1-like protein
  misc_feature (1)..(313): Homolog of NCBI NO: 15219504 NR Description: phosphate-induced (phi-1) protein, putative
  misc_feature (5)..(314): Homolog of NCBI NO: 3759184 NR Description: phi-1 [Nicotiana tabacum]
  misc_feature (1)..(314): Homolog of NCBI NO: 15236667 NR Description: putative phi-1-like phosphate-induced protein
  misc_feature (1)..(314): Homolog of NCBI NO: 21593043 NR Description: putative phi-1-like phosphate-induced protein
MYSLVFKLFLFLSLLQISVSARNLASQEPNQFQLLKYHKGALLSGKISVNLIWYGKFKPSQRAIISDFITSLTHTSPTSKTLHQPSVATWWKTTEKYYKLATPSKNSSPLSLTLGKQIIDESCSLGKSLTDKKIQTLASKGDQRNAINVVLTSADVTVTGFGMSRCGTHGHARGLGKRGSKFAYIWVGNSETQCPGQCAWPFHAPVYGPQSPPLVAPNNDVGLDGMVINLASLLAGTATNPFGNGYYQGPQNAPLEAASACPGVYGKGAYPGYAGDLLVDTTTGGSFNAYGANGRKFLLPALYDPTTSACSTMV

SEQ ID NO: 27545 - DNA, 1353 bp, Arabidopsis thaliana
  misc_feature (1)..(1353): Ceres Seq. ID no. 13622031
  misc_feature: MA Experiment ID: 108577 Result: Down-regulated in Transcription
  misc_feature: MA Experiment 108577 PARAMETER Experiment Name: At_42deg_Heat_cDNA_P Parameter: Temperature (deg C) Value: 42 vs. 22
  misc_feature: MA Experiment 108577 PARAMETER Experiment Name: At_42deg_Heat_cDNA_P Parameter: Timepoint (hr) Value: 6
  misc_feature: MA Experiment 108577 PARAMETER Experiment Name: At_42deg_Heat_cDNA_P Parameter: Tissue Value: Aerial
  misc_feature: MA Experiment ID: 108595 Result: Down-regulated in Transcription
  misc_feature: MA Experiment 108595 PARAMETER Experiment Name: At_Ler-pi_Ovule_cDNA_P Parameter: Plant Line Value: null
  misc_feature: MA Experiment ID: 20000224 Result: Down-regulated in Transcription
  misc_feature: MA Experiment ID: 20000306 Result: Up-regulated in Transcription
  misc_feature: MA Experiment 20000306 PARAMETER Experiment Name: At_Germinating_Seeds_Sub_P Parameter: Age (hr) Value: 6 vs. 0
  misc_feature: MA Experiment 20000306 PARAMETER Experiment Name: At_Germinating_Seeds_Sub_P Parameter: Organism Value: A. thaliana
  misc_feature: MA Experiment 20000306 PARAMETER Experiment Name: At_Germinating_Seeds_Sub_P Parameter: Plant Line Value: WS
  misc_feature: MA Experiment 20000306 PARAMETER Experiment Name: At_Germinating_Seeds_Sub_P Parameter: Tissue Value: Germinating Seeds
  misc_feature: MA Experiment ID: 20000307 Result: Up-regulated in Transcription
  misc_feature: MA Experiment 20000307 PARAMETER Experiment Name: At_Germinating_Seeds_Sub_P Parameter: Age (hr) Value: 24 vs. 0
  misc_feature: MA Experiment 20000307 PARAMETER Experiment Name: At_Germinating_Seeds_Sub_P Parameter: Organism Value: A. thaliana
  misc_feature: MA Experiment 20000307 PARAMETER Experiment Name: At_Germinating_Seeds_Sub_P Parameter: Plant Line Value: WS
  misc_feature: MA Experiment 20000307 PARAMETER Experiment Name: At_Germinating_Seeds_Sub_P Parameter: Tissue Value: Germinating Seeds
cagacaattatttgttcatcttgaatttgtgtcccaagaacatatctctctctctctctctcctcaccttggattctctgtttgatgattgctagttctttagaagagcaatgagttattctggagccggactcggaaagcctggctcaggtaaaaggagaataagggatcttttaactcaatctgataaccgagtctgcgctgattgtggcgctccagatcctaagtgggcgtcagctaatattggagtgtttatatgcttaaaatgttgtggtgtccacagaagccttggcagtcatatctcaaaggtcttatccgtgacattggatgaatggtcagatgaagaagtcgattcgatgattgaaattggaggaaatgcctctgcaaattcaatttacgaggcgtttattcctgaaggtagctctaagcctggacctgatgctagtcatgaccagcgtatgaggttcattaggtcgaaatatgagcaccaagagtttctgaaaccaagcttgcggatcacatccgtgaggggctctagtacaaagactccagcatttctttcatcgagtctatctaaaaagattgttgatagctttcgcactaattcatcatcgcaacagccgcaacttgaaggcatggttgagtttattggattgttgaaggtgactattaaaaagggtaccaatatggccatccgagatatgatgtcaagtgatccctatgttgtgttgactctaggacaacagaaggctcaatctactgtagtgaagagcaacttaaaccctgtctggaatgaggaactcatgctctctgttcctcataactatggctcagtgaaattgcaagtgtttgactatgacacattttctgctgatgacataatgggagaagctgagattgatatccagcctctgattacatctgcaatggcttttggagaccctgaaatgtttggagatatgcagattggaaaatggctgaaatcgcacgacaatgctcttatagaagatagcatcatcaacattgcagatggtaaagtgaagcaagaggttcaaatcaagcttcagaatgttgaatctggtgaactagaactagaaatggagtggctacctcttgagcaataaataatcaactatataatagggtcattatatataccaaacaaattttattactgtattcattattttaacattcccccttggttcttgtttgacaaatttttgaaactttgatctcattgaaaactttctttcgtactttgttgttgtaatgttcttttggcagattagatatttgtataactcaaatgattatatgttttgactcatgttcttcaaaagatttcatttg

SEQ ID NO: 27546 - protein, 337 aa, Arabidopsis thaliana
  peptide (1)..(337): Ceres Seq. ID no. 13622032
  misc_feature (15)..(137): Pfam Name: Putative GTPase activating protein for Arf Pfam Description: Putative GTPase activating protein for Arf
  misc_feature (1)..(121): Homolog of NCBI NO: 25411567 NR Description: hypothetical protein At2g14490 [imported] -
  misc_feature (9)..(337): Homolog of NCBI NO: 19386828 NR Description: putative zinc finger and C2 domain protein
  misc_feature (17)..(337): Homolog of NCBI NO: 30680493 NR Description: zinc finger and C2 domain protein, putative
  misc_feature (17)..(337): Homolog of NCBI NO: 6648206 NR Description: putative GTPase activating protein [Arabidopsis
  misc_feature (1)..(337): Homolog of NCBI NO: 25407332 NR Description: hypothetical protein AT4g05330 [imported] -
  misc_feature (1)..(337): Homolog of NCBI NO: 18412932 NR Description: zinc finger and C2 domain protein, putative
  misc_feature (1)..(41): Homolog of NCBI NO: 7486586 NR Description: hypothetical protein F7J7.100 - Arabidopsis
  misc_feature (40)..(337): Homolog of NCBI NO: 7486586 NR Description: hypothetical protein F7J7.100 - Arabidopsis
  misc_feature (1)..(337): Homolog of NCBI NO: 21594052 NR Description: putative GTPase activating protein [Arabidopsis
  misc_feature (1)..(337): Homolog of NCBI NO: 18415638 NR Description: zinc finger and C2 domain protein (ZAC)
MSYSGAGLGKPGSGKRRIRDLLTQSDNRVCADCGAPDPKWASANIGVFICLKCCGVHRSLGSHISKVLSVTLDEWSDEEVDSMIEIGGNASANSIYEAFIPEGSSKPGPDASHDQRMRFIRSKYEHQEFLKPSLRITSVRGSSTKTPAFLSSSLSKKIVDSFRTNSSSQQPQLEGMVEFIGLLKVTIKKGTNMAIRDMMSSDPYVVLTLGQQKAQSTVVKSNLNPVWNEELMLSVPHNYGSVKLQVFDYDTFSADDIMGEAEIDIQPLITSAMAFGDPEMFGDMQIGKWLKSHDNALIEDSIINIADGKVKQEVQIKLQNVESGELELEMEWLPLEQ

SEQ ID NO: 27547 - protein, 255 aa, Arabidopsis thaliana
  peptide (1)..(255): Ceres Seq. ID no. 13622033
  misc_feature (1)..(55): Pfam Name: Putative GTPase activating protein for Arf Pfam Description: Putative GTPase activating protein for Arf
  misc_feature (1)..(28): Homolog of NCBI NO: 15225946 NR Description: ARF GTPase-activating domain-containing protein
  misc_feature (1)..(39): Homolog of NCBI NO: 25411567 NR Description: hypothetical protein At2g14490 [imported] -
  misc_feature (1)..(255): Homolog of NCBI NO: 19386828 NR Description: putative zinc finger and C2 domain protein
  misc_feature (1)..(255): Homolog of NCBI NO: 30680493 NR Description: zinc finger and C2 domain protein, putative
  misc_feature (1)..(255): Homolog of NCBI NO: 6648206 NR Description: putative GTPase activating protein [Arabidopsis
  misc_feature (1)..(255): Homolog of NCBI NO: 25407332 NR Description: hypothetical protein AT4g05330 [imported] -
  misc_feature (1)..(255): Homolog of NCBI NO: 18412932 NR Description: zinc finger and C2 domain protein, putative
  misc_feature (1)..(255): Homolog of NCBI NO: 7486586 NR Description: hypothetical protein F7J7.100 - Arabidopsis
  misc_feature (1)..(255): Homolog of NCBI NO: 21594052 NR Description: putative GTPase activating protein [Arabidopsis
  misc_feature (1)..(255): Homolog of NCBI NO: 18415638 NR Description: zinc finger and C2 domain protein (ZAC)
MIEIGGNASANSIYEAFIPEGSSKPGPDASHDQRMRFIRSKYEHQEFLKPSLRITSVRGSSTKTPAFLSSSLSKKIVDSFRTNSSSQQPQLEGMVEFIGLLKVTIKKGTNMAIRDMMSSDPYVVLTLGQQKAQSTVVKSNLNPVWNEELMLSVPHNYGSVKLQVFDYDTFSADDIMGEAEIDIQPLITSAMAFGDPEMFGDMQIGKWLKSHDNALIEDSIINIADGKVKQEVQIKLQNVESGELELEMEWLPLEQ

SEQ ID NO: 27548 - protein, 221 aa, Arabidopsis thaliana
  peptide (1)..(221): Ceres Seq. ID no. 13622034
  misc_feature (67)..(146): Pfam Name: C2 domain Pfam Description: C2 domain
  misc_feature (1)..(39): Homolog of NCBI NO: 28850396 NR Description: similar to Arabidopsis thaliana (Mouse-ear
  misc_feature (64)..(219): Homolog of NCBI NO: 33146442 NR Description: zinc finger and C2 domain protein-like
  misc_feature (1)..(221): Homolog of NCBI NO: 19386828 NR Description: putative zinc finger and C2 domain protein
  misc_feature (1)..(221): Homolog of NCBI NO: 30680493 NR Description: zinc finger and C2 domain protein, putative
  misc_feature (1)..(221): Homolog of NCBI NO: 6648206 NR Description: putative GTPase activating protein [Arabidopsis
  misc_feature (1)..(221): Homolog of NCBI NO: 25407332 NR Description: hypothetical protein AT4g05330 [imported] -
  misc_feature (1)..(221): Homolog of NCBI NO: 18412932 NR Description: zinc finger and C2 domain protein, putative
  misc_feature (1)..(221): Homolog of NCBI NO: 7486586 NR Description: hypothetical protein F7J7.100 - Arabidopsis
  misc_feature (1)..(221): Homolog of NCBI NO: 21594052 NR Description: putative GTPase activating protein [Arabidopsis
  misc_feature (1)..(221): Homolog of NCBI NO: 18415638 NR Description: zinc finger and C2 domain protein (ZAC)
MRFIRSKYEHQEFLKPSLRITSVRGSSTKTPAFLSSSLSKKIVDSFRTNSSSQQPQLEGMVEFIGLLKVTIKKGTNMAIRDMMSSDPYVVLTLGQQKAQSTVVKSNLNPVWNEELMLSVPHNYGSVKLQVFDYDTFSADDIMGEAEIDIQPLITSAMAFGDPEMFGDMQIGKWLKSHDNALIEDSIINIADGKVKQEVQIKLQNVESGELELEMEWLPLEQ

SEQ ID NO: 27549 - DNA, 1573 bp, Arabidopsis thaliana
  misc_feature (1)..(1573): Ceres Seq. ID no. 13489743
  misc_feature: MA Experiment ID: 108461 Result: Up-regulated in Transcription
  misc_feature: MA Experiment 108461 PARAMETER Experiment Name: At_Germinating_Seeds_cDNA_P Parameter: Age (day) Value: 1 vs. 0
  misc_feature: MA Experiment 108461 PARAMETER Experiment Name: At_Germinating_Seeds_cDNA_P Parameter: Tissue Value: Germinating Seeds
  misc_feature: MA Experiment ID: 108573 Result: Up-regulated in Transcription
  misc_feature: MA Experiment 108573 PARAMETER Experiment Name: At_Drought_cDNA_P Parameter: Timepoint (hr) Value: 6
  misc_feature: MA Experiment 108573 PARAMETER Experiment Name: At_Drought_cDNA_P Parameter: Tissue Value: Aerial
  misc_feature: MA Experiment 108573 PARAMETER Experiment Name: At_Drought_cDNA_P Parameter: Treatment Value: Drought vs. No Drought
  misc_feature: MA Experiment ID: 108576 Result: Down-regulated in Transcription
  misc_feature: MA Experiment 108576 PARAMETER Experiment Name: At_42deg_Heat_cDNA_P Parameter: Temperature (deg C) Value: 42 vs. 22
  misc_feature: MA Experiment 108576 PARAMETER Experiment Name: At_42deg_Heat_cDNA_P Parameter: Timepoint (hr) Value: 1
  misc_feature: MA Experiment 108576 PARAMETER Experiment Name: At_42deg_Heat_cDNA_P Parameter: Tissue Value: Aerial
  misc_feature: MA Experiment ID: 20000111 Result: Down-regulated in Transcription
  misc_feature: MA Experiment 20000111 PARAMETER Experiment Name: At_42deg_Heat_cDNA_P Parameter: Temperature (deg C) Value: 42 vs. 22
  misc_feature: MA Experiment 20000111 PARAMETER Experiment Name: At_42deg_Heat_cDNA_P Parameter: Timepoint (hr) Value: 6
  misc_feature: MA Experiment 20000111 PARAMETER Experiment Name: At_42deg_Heat_cDNA_P Parameter: Tissue Value: Aerial
  misc_feature: MA Experiment ID: 20000113 Result: Down-regulated in Transcription
  misc_feature: MA Experiment 20000113 PARAMETER Experiment Name: At_42deg_Heat_cDNA_P Parameter: Temperature (deg C) Value: 42 vs. 22
  misc_feature: MA Experiment 20000113 PARAMETER Experiment Name: At_42deg_Heat_cDNA_P Parameter: Timepoint (hr) Value: 8
  misc_feature: MA Experiment 20000113 PARAMETER Experiment Name: At_42deg_Heat_cDNA_P Parameter: Tissue Value: Aerial
gtcaaatcattttcgacgactgttattaataattaattcgttaatgacgcaccgttagtcaactccgcttcgtattaattactcctccgatctctttcttattcttctccggcgacacttcccttgcttctccctcttaggactctctctacgaatctgtaagcttcaaattcttacgccacactccgagattcgcttctgattattgtatgaatttttgagctccaaggatccactgccatgtatttatgctgctaaagcttgaaggcagtagtggaatcaccattaagttctttgctttgtaatttagcttgatttgagaataaacaaatgggaaaagcatcaggcttgcttctgtttctcttgggttttgggttctttgttgtcacatataatcttctgacacttatagttcacaatagatctggtgtgagtaattcagatggaagtccacttctggatcctgttgttcagatgcctctaaatattaggaaagccaagagttctccagcaccttttcatgttgccttaacagctacagatgcaccttataataagtggcagtgtcgtattatgtattattggtataagcagaagaaagctcttcctggttctgatatgggtggcttcacccgtattttgcattccggtaattctgataacttgatggatgaaatacccacatttgtggttgatcctcttcctccaggtcttgatcgggggtatgttgtcttgaatagaccatgggcattcgtgcaatggcttgaaagagctaccatcaaggaagactatgtgctcatggcagagcctgatcatgtatttgttaatccccttcccaatttggctgttggaggattcccagccgcttttccgtttttctatattactcctgaaaagtatgaaaacatagtcagaaagtattatccagcggagatggggccagtaacaaatatcgaccccattggcaactctcctgttatcataagcaaggaatcacttgaaaagattgctcctacatggatgaatgtctcgctgacaatgaaaaacgatccagaaactgataaggcatttggatgggtgctggaaatgtacggttacgcaattgcatctgctatacatggggtgcgtcacatacttcggaaggatttcatgcttcagcctccgtgggatttgtctaccaaggggaagtttatcattcattacacttatggatgcgactacaacatgaagggggagctgacatatggcaaaataggagagtggcgattcgataagagatcacatttgcggggtcctcctccaaggaacatgtccttgccgcctcccggtgttcccgaaagtgtggtgacacttgtgaagatggtgaatgaagctactgcgactatccctaattgggacactctctaactcacatccacacacaaaacacaaaccatagggacaaatccatacagcaacaatattttgcctaatttttttttccttctccctttacttcccttcttgtctgttttttcttgtaatggttaaattatgaacttgagtagtaaattacaaaattatttgtttgact

SEQ ID NO: 27550 - protein, 358 aa, Arabidopsis thaliana
  peptide (1)..(358): Ceres Seq. ID no. 13489744
  misc_feature (39)..(338): Homolog of NCBI NO: 22330795 NR Description: expressed protein [Arabidopsis thaliana]
  misc_feature (8)..(175): Homolog of NCBI NO: 34903224 NR Description: unnamed protein product [Oryza sativa (japonica
  misc_feature (56)..(132): Homolog of NCBI NO: 25371351 NR Description: hypothetical protein At2g25260 [imported] -
  misc_feature (188)..(339): Homolog of NCBI NO: 25371351 NR Description: hypothetical protein At2g25260 [imported] -
  misc_feature (56)..(132): Homolog of NCBI NO: 30682704 NR Description: expressed protein [Arabidopsis thaliana]
  misc_feature (188)..(357): Homolog of NCBI NO: 30682704 NR Description: expressed protein [Arabidopsis thaliana]
  misc_feature (2)..(357): Homolog of NCBI NO: 24413996 NR Description: hypothetical protein~similar to Arabidopsis
  misc_feature (1)..(355): Homolog of NCBI NO: 22327055 NR Description: expressed protein [Arabidopsis thaliana]
  misc_feature (1)..(358): Homolog of NCBI NO: 15240642 NR Description: expressed protein [Arabidopsis thaliana]
MGKASGLLLFLLGFGFFVVTYNLLTLIVHNRSGVSNSDGSPLLDPVVQMPLNIRKAKSSPAPFHVALTATDAPYNKWQCRIMYYWYKQKKALPGSDMGGFTRILHSGNSDNLMDEIPTFVVDPLPPGLDRGYVVLNRPWAFVQWLERATIKEDYVLMAEPDHVFVNPLPNLAVGGFPAAFPFFYITPEKYENIVRKYYPAEMGPVTNIDPIGNSPVIISKESLEKIAPTWMNVSLTMKNDPETDKAFGWVLEMYGYAIASAIHGVRHILRKDFMLQPPWDLSTKGKFIIHYTYGCDYNMKGELTYGKIGEWRFDKRSHLRGPPPRNMSLPPPGVPESVVTLVKMVNEATATIPNWDTL

SEQ ID NO: 27551 - protein, 310 aa, Arabidopsis thaliana
  peptide (1)..(310): Ceres Seq. ID no. 13489745
  misc_feature (1)..(290): Homolog of NCBI NO: 22330795 NR Description: expressed protein [Arabidopsis thaliana]
  misc_feature (1)..(127): Homolog of NCBI NO: 34903224 NR Description: unnamed protein product [Oryza sativa (japonica
  misc_feature (8)..(84): Homolog of NCBI NO: 25371351 NR Description: hypothetical protein At2g25260 [imported] -
  misc_feature (140)..(291): Homolog of NCBI NO: 25371351 NR Description: hypothetical protein At2g25260 [imported] -
  misc_feature (8)..(84): Homolog of NCBI NO: 30682704 NR Description: expressed protein [Arabidopsis thaliana]
  misc_feature (140)..(309): Homolog of NCBI NO: 30682704 NR Description: expressed protein [Arabidopsis thaliana]
  misc_feature (1)..(309): Homolog of NCBI NO: 24413996 NR Description: hypothetical protein~similar to Arabidopsis
  misc_feature (1)..(307): Homolog of NCBI NO: 22327055 NR Description: expressed protein [Arabidopsis thaliana]
  misc_feature (1)..(310): Homolog of NCBI NO: 15240642 NR Description: expressed protein [Arabidopsis thaliana]
MPLNIRKAKSSPAPFHVALTATDAPYNKWQCRIMYYWYKQKKALPGSDMGGFTRILHSGNSDNLMDEIPTFVVDPLPPGLDRGYVVLNRPWAFVQWLERATIKEDYVLMAEPDHVFVNPLPNLAVGGFPAAFPFFYITPEKYENIVRKYYPAEMGPVTNIDPIGNSPVIISKESLEKIAPTWMNVSLTMKNDPETDKAFGWVLEMYGYAIASAIHGVRHILRKDFMLQPPWDLSTKGKFIIHYTYGCDYNMKGELTYGKIGEWRFDKRSHLRGPPPRNMSLPPPGVPESVVTLVKMVNEATATIPNWDTL

SEQ ID NO: 27552 - protein, 277 aa, Arabidopsis thaliana
  peptide (1)..(277): Ceres Seq. ID no. 13489746
  misc_feature (1)..(257): Homolog of NCBI NO: 22330795 NR Description: expressed protein [Arabidopsis thaliana]
  misc_feature (1)..(94): Homolog of NCBI NO: 34903224 NR Description: unnamed protein product [Oryza sativa (japonica
  misc_feature (1)..(51): Homolog of NCBI NO: 25371351 NR Description: hypothetical protein At2g25260 [imported] -
  misc_feature (107)..(258): Homolog of NCBI NO: 25371351 NR Description: hypothetical protein At2g25260 [imported] -
  misc_feature (1)..(51): Homolog of NCBI NO: 30682704 NR Description: expressed protein [Arabidopsis thaliana]
  misc_feature (107)..(276): Homolog of NCBI NO: 30682704 NR Description: expressed protein [Arabidopsis thaliana]
  misc_feature (1)..(276): Homolog of NCBI NO: 24413996 NR Description: hypothetical protein~similar to Arabidopsis
  misc_feature (1)..(274): Homolog of NCBI NO: 22327055 NR Description: expressed protein [Arabidopsis thaliana]
  misc_feature (1)..(277): Homolog of NCBI NO: 15240642 NR Description: expressed protein [Arabidopsis thaliana]
MYYWYKQKKALPGSDMGGFTRILHSGNSDNLMDEIPTFVVDPLPPGLDRGYVVLNRPWAFVQWLERATIKEDYVLMAEPDHVFVNPLPNLAVGGFPAAFPFFYITPEKYENIVRKYYPAEMGPVTNIDPIGNSPVIISKESLEKIAPTWMNVSLTMKNDPETDKAFGWVLEMYGYAIASAIHGVRHILRKDFMLQPPWDLSTKGKFIIHYTYGCDYNMKGELTYGKIGEWRFDKRSHLRGPPPRNMSLPPPGVPESVVTLVKMVNEATATIPNWDTL

SEQ ID NO: 27553 - DNA, 1347 bp, Arabidopsis thaliana
  misc_feature (1)..(1347): Ceres Seq. ID no. 12357669
  misc_feature: MA Experiment ID: 108461 Result: Up-regulated in Transcription
  misc_feature: MA Experiment 108461 PARAMETER Experiment Name: At_Germinating_Seeds_cDNA_P Parameter: Age (day) Value: 1 vs. 0
  misc_feature: MA Experiment 108461 PARAMETER Experiment Name: At_Germinating_Seeds_cDNA_P Parameter: Tissue Value: Germinating Seeds
  misc_feature: MA Experiment ID: 108462 Result: Up-regulated in Transcription
  misc_feature: MA Experiment 108462 PARAMETER Experiment Name: At_Germinating_Seeds_cDNA_P Parameter: Age (day) Value: 2 vs. 0
  misc_feature: MA Experiment 108462 PARAMETER Experiment Name: At_Germinating_Seeds_cDNA_P Parameter: Tissue Value: Germinating Seeds
  misc_feature: MA Experiment ID: 108463 Result: Up-regulated in Transcription
  misc_feature: MA Experiment 108463 PARAMETER Experiment Name: At_Germinating_Seeds_cDNA_P Parameter: Age (day) Value: 3 vs. 0
  misc_feature: MA Experiment 108463 PARAMETER Experiment Name: At_Germinating_Seeds_cDNA_P Parameter: Tissue Value: Germinating Seeds
  misc_feature: MA Experiment ID: 108464 Result: Up-regulated in Transcription
  misc_feature: MA Experiment 108464 PARAMETER Experiment Name: At_Germinating_Seeds_cDNA_P Parameter: Age (day) Value: 4 vs. 0
  misc_feature: MA Experiment 108464 PARAMETER Experiment Name: At_Germinating_Seeds_cDNA_P Parameter: Tissue Value: Germinating Seeds
  misc_feature: MA Experiment ID: 108469 Result: Down-regulated in Transcription
  misc_feature: MA Experiment ID: 108501 Result: Up-regulated in Transcription
  misc_feature: MA Experiment 108501 PARAMETER Experiment Name: At_ap2_floral_buds_cDNA_P Parameter: Plant Line Value: ap2 (Ler.)
  misc_feature: MA Experiment 108501 PARAMETER Experiment Name: At_ap2_floral_buds_cDNA_P Parameter: Tissue Value: Closed Flower
  misc_feature: MA Experiment ID: 108561 Result: Down-regulated in Transcription
  misc_feature: MA Experiment 108561 PARAMETER Experiment Name: At_100uM_ABA_cDNA_P Parameter: Timepoint (hr) Value: 6
  misc_feature: MA Experiment 108561 PARAMETER Experiment Name: At_100uM_ABA_cDNA_P Parameter: Tissue Value: Aerial
  misc_feature: MA Experiment 108561 PARAMETER Experiment Name: At_100uM_ABA_cDNA_P Parameter: Treatment Value: 100uM ABA vs. No Treatment
  misc_feature: MA Experiment ID: 108573 Result: Down-regulated in Transcription
  misc_feature: MA Experiment 108573 PARAMETER Experiment Name: At_Drought_cDNA_P Parameter: Timepoint (hr) Value: 6
  misc_feature: MA Experiment 108573 PARAMETER Experiment Name: At_Drought_cDNA_P Parameter: Tissue Value: Aerial
  misc_feature: MA Experiment 108573 PARAMETER Experiment Name: At_Drought_cDNA_P Parameter: Treatment Value: Drought vs. No Drought
  misc_feature: MA Experiment ID: 108576 Result: Down-regulated in Transcription
  misc_feature: MA Experiment 108576 PARAMETER Experiment Name: At_42deg_Heat_cDNA_P Parameter: Temperature (deg C) Value: 42 vs. 22
  misc_feature: MA Experiment 108576 PARAMETER Experiment Name: At_42deg_Heat_cDNA_P Parameter: Timepoint (hr) Value: 1
  misc_feature: MA Experiment 108576 PARAMETER Experiment Name: At_42deg_Heat_cDNA_P Parameter: Tissue Value: Aerial
  misc_feature: MA Experiment ID: 108577 Result: Down-regulated in Transcription
  misc_feature: MA Experiment 108577 PARAMETER Experiment Name: At_42deg_Heat_cDNA_P Parameter: Temperature (deg C) Value: 42 vs. 22
  misc_feature: MA Experiment 108577 PARAMETER Experiment Name: At_42deg_Heat_cDNA_P Parameter: Timepoint (hr) Value: 6
  misc_feature: MA Experiment 108577 PARAMETER Experiment Name: At_42deg_Heat_cDNA_P Parameter: Tissue Value: Aerial
  misc_feature: MA Experiment ID: 108579 Result: Up-regulated in Transcription
  misc_feature: MA Experiment 108579 PARAMETER Experiment Name: At_4deg_Cold_cDNA_P Parameter: Temperature (deg C) Value: 4 vs. 22
  misc_feature: MA Experiment 108579 PARAMETER Experiment Name: At_4deg_Cold_cDNA_P Parameter: Timepoint (hr) Value: 6
  misc_feature: MA Experiment 108579 PARAMETER Experiment Name: At_4deg_Cold_cDNA_P Parameter: Tissue Value: Aerial
  misc_feature: MA Experiment ID: 108585 Result: Down-regulated in Transcription
  misc_feature: MA Experiment 108585 PARAMETER Experiment Name: At_5mM_NaNP_cDNA_P Parameter: Timepoint (hr) Value: 6
  misc_feature: MA Experiment 108585 PARAMETER Experiment Name: At_5mM_NaNP_cDNA_P Parameter: Tissue Value: Aerial
  misc_feature: MA Experiment 108585 PARAMETER Experiment Name: At_5mM_NaNP_cDNA_P Parameter: Treatment Value: null
  misc_feature: MA Experiment ID: 108595 Result: Down-regulated in Transcription
  misc_feature: MA Experiment 108595 PARAMETER Experiment Name: At_Ler-pi_Ovule_cDNA_P Parameter: Plant Line Value: null
  misc_feature: MA Experiment ID: 108605 Result: Down-regulated in Transcription
  misc_feature: MA Experiment 108605 PARAMETER Experiment Name: At_100uM_ABA_cDNA_P Parameter: Timepoint (hr) Value: 6
  misc_feature: MA Experiment 108605 PARAMETER Experiment Name: At_100uM_ABA_cDNA_P Parameter: Tissue Value: Aerial
  misc_feature: MA Experiment 108605 PARAMETER Experiment Name: At_100uM_ABA_cDNA_P Parameter: Treatment Value: 100uM ABA vs. No Treatment
  misc_feature: MA Experiment ID: 108607 Result: Down-regulated in Transcription
  misc_feature: MA Experiment 108607 PARAMETER Experiment Name: At_100uM_ABA_cDNA_P Parameter: Timepoint (hr) Value: 4
  misc_feature: MA Experiment 108607 PARAMETER Experiment Name: At_100uM_ABA_cDNA_P Parameter: Tissue Value: Aerial
  misc_feature: MA Experiment 108607 PARAMETER Experiment Name: At_100uM_ABA_cDNA_P Parameter: Treatment Value: 100uM ABA vs. No Treatment
  misc_feature: MA Experiment ID: 108668 Result: Down-regulated in Transcription
  misc_feature: MA Experiment 108668 PARAMETER Experiment Name: At_2mM_SA_cDNA_P Parameter: Plant Line Value: WS
  misc_feature: MA Experiment 108668 PARAMETER Experiment Name: At_2mM_SA_cDNA_P Parameter: Timepoint (hr) Value: 6
  misc_feature: MA Experiment 108668 PARAMETER Experiment Name: At_2mM_SA_cDNA_P Parameter: Treatment Value: 2mM SA vs. No Treatment
  misc_feature: MA Experiment ID: 20000069 Result: Down-regulated in Transcription
  misc_feature: MA Experiment 20000069 PARAMETER Experiment Name: At_100uM_ABA_Mutants_cDNA_P Parameter: Plant Line Value: CS23
  misc_feature: MA Experiment 20000069 PARAMETER Experiment Name: At_100uM_ABA_Mutants_cDNA_P Parameter: Timepoint (hr) Value: 6
  misc_feature: MA Experiment 20000069 PARAMETER Experiment Name: At_100uM_ABA_Mutants_cDNA_P Parameter: Tissue Value: Aerial
  misc_feature: MA Experiment 20000069 PARAMETER Experiment Name: At_100uM_ABA_Mutants_cDNA_P Parameter: Treatment Value: 100uM ABA vs. No Treatment
  misc_feature: MA Experiment ID: 20000070 Result: Down-regulated in Transcription
  misc_feature: MA Experiment 20000070 PARAMETER Experiment Name: At_100uM_ABA_Mutants_cDNA_P Parameter: Plant Line Value: CS24
  misc_feature: MA Experiment 20000070 PARAMETER Experiment Name: At_100uM_ABA_Mutants_cDNA_P Parameter: Timepoint (hr) Value: 6
  misc_feature: MA Experiment 20000070 PARAMETER Experiment Name: At_100uM_ABA_Mutants_cDNA_P Parameter: Tissue Value: Aerial
  misc_feature: MA Experiment 20000070 PARAMETER Experiment Name: At_100uM_ABA_Mutants_cDNA_P Parameter: Treatment Value: 100uM ABA vs. No Treatment
  misc_feature: MA Experiment ID: 20000071 Result: Down-regulated in Transcription
  misc_feature: MA Experiment 20000071 PARAMETER Experiment Name: At_100uM_ABA_Mutants_cDNA_P Parameter: Plant Line Value: CS8104
  misc_feature: MA Experiment 20000071 PARAMETER Experiment Name: At_100uM_ABA_Mutants_cDNA_P Parameter: Timepoint (hr) Value: 6
  misc_feature: MA Experiment 20000071 PARAMETER Experiment Name: At_100uM_ABA_Mutants_cDNA_P Parameter: Tissue Value: Aerial
  misc_feature: MA Experiment 20000071 PARAMETER Experiment Name: At_100uM_ABA_Mutants_cDNA_P Parameter: Treatment Value: 100uM ABA vs. No Treatment
  misc_feature: MA Experiment ID: 20000072 Result: Down-regulated in Transcription
  misc_feature: MA Experiment 20000072 PARAMETER Experiment Name: At_100uM_ABA_Mutants_cDNA_P Parameter: Plant Line Value: CS8105
  misc_feature: MA Experiment 20000072 PARAMETER Experiment Name: At_100uM_ABA_Mutants_cDNA_P Parameter: Timepoint (hr) Value: 6
  misc_feature: MA Experiment 20000072 PARAMETER Experiment Name: At_100uM_ABA_Mutants_cDNA_P Parameter: Tissue Value: Aerial
  misc_feature: MA Experiment 20000072 PARAMETER Experiment Name: At_100uM_ABA_Mutants_cDNA_P Parameter: Treatment Value: 100uM ABA vs. No Treatment
  misc_feature: MA Experiment ID: 20000086 Result: Down-regulated in Transcription
  misc_feature: MA Experiment 20000086 PARAMETER Experiment Name: At_100uM_ABA_Mutants_cDNA_P Parameter: Plant Line Value: CS22
  misc_feature: MA Experiment 20000086 PARAMETER Experiment Name: At_100uM_ABA_Mutants_cDNA_P Parameter: Timepoint (hr) Value: 6
  misc_feature: MA Experiment 20000086 PARAMETER Experiment Name: At_100uM_ABA_Mutants_cDNA_P Parameter: Tissue Value: Aerial
  misc_feature: MA Experiment 20000086 PARAMETER Experiment Name: At_100uM_ABA_Mutants_cDNA_P Parameter: Treatment Value: 100uM ABA vs. No Treatment
  misc_feature: MA Experiment ID: 20000087 Result: Down-regulated in Transcription
  misc_feature: MA Experiment 20000087 PARAMETER Experiment Name: At_100uM_ABA_Mutants_cDNA_P Parameter: Plant Line Value: WS
  misc_feature: MA Experiment 20000087 PARAMETER Experiment Name: At_100uM_ABA_Mutants_cDNA_P Parameter: Timepoint (hr) Value: 6
  misc_feature: MA Experiment 20000087 PARAMETER Experiment Name: At_100uM_ABA_Mutants_cDNA_P Parameter: Tissue Value: Aerial
  misc_feature: MA Experiment 20000087 PARAMETER Experiment Name: At_100uM_ABA_Mutants_cDNA_P Parameter: Treatment Value: 100uM ABA vs. No Treatment
  misc_feature: MA Experiment ID: 20000088 Result: Down-regulated in Transcription
  misc_feature: MA Experiment 20000088 PARAMETER Experiment Name: At_100uM_ABA_Mutants_cDNA_P Parameter: Plant Line Value: Landsberg
  misc_feature: MA Experiment 20000088 PARAMETER Experiment Name: At_100uM_ABA_Mutants_cDNA_P Parameter: Timepoint (hr) Value: 6
  misc_feature: MA Experiment 20000088 PARAMETER Experiment Name: At_100uM_ABA_Mutants_cDNA_P Parameter: Tissue Value: Aerial
  misc_feature: MA Experiment 20000088 PARAMETER Experiment Name: At_100uM_ABA_Mutants_cDNA_P Parameter: Treatment Value: 100uM ABA vs. No Treatment
  misc_feature: MA Experiment ID: 20000089 Result: Down-regulated in Transcription
  misc_feature: MA Experiment ID: 20000090 Result: Down-regulated in Transcription
  misc_feature: MA Experiment ID: 20000111 Result: Down-regulated in Transcription
  misc_feature: MA Experiment 20000111 PARAMETER Experiment Name: At_42deg_Heat_cDNA_P Parameter: Temperature (deg C) Value: 42 vs. 22
  misc_feature: MA Experiment 20000111 PARAMETER Experiment Name: At_42deg_Heat_cDNA_P Parameter: Timepoint (hr) Value: 6
  misc_feature: MA Experiment 20000111 PARAMETER Experiment Name: At_42deg_Heat_cDNA_P Parameter: Tissue Value: Aerial
  misc_feature: MA Experiment ID: 20000113 Result: Down-regulated in Transcription
  misc_feature: MA Experiment 20000113 PARAMETER Experiment Name: At_42deg_Heat_cDNA_P Parameter: Temperature (deg C) Value: 42 vs. 22
  misc_feature: MA Experiment 20000113 PARAMETER Experiment Name: At_42deg_Heat_cDNA_P Parameter: Timepoint (hr) Value: 8
  misc_feature: MA Experiment 20000113 PARAMETER Experiment Name: At_42deg_Heat_cDNA_P Parameter: Tissue Value: Aerial
  misc_feature: MA Experiment ID: 20000117 Result: Down-regulated in Transcription
  misc_feature: MA Experiment 20000117 PARAMETER Experiment Name: At_100uM_ABA_Mutants_cDNA_P Parameter: Plant Line Value: Columbia
  misc_feature: MA Experiment 20000117 PARAMETER Experiment Name: At_100uM_ABA_Mutants_cDNA_P Parameter: Timepoint (hr) Value: 6
  misc_feature: MA Experiment 20000117 PARAMETER Experiment Name: At_100uM_ABA_Mutants_cDNA_P Parameter: Tissue Value: Aerial
  misc_feature: MA Experiment 20000117 PARAMETER Experiment Name: At_100uM_ABA_Mutants_cDNA_P Parameter: Treatment Value: 100uM ABA vs. No Treatment
  misc_feature: MA Experiment ID: 20000144 Result: Down-regulated in Transcription
  misc_feature: MA Experiment 20000144 PARAMETER Experiment Name: At_42deg_Heat_cDNA_P Parameter: Temperature (deg C) Value: 42 vs. 22
  misc_feature: MA Experiment 20000144 PARAMETER Experiment Name: At_42deg_Heat_cDNA_P Parameter: Timepoint (hr) Value: 1
  misc_feature: MA Experiment 20000144 PARAMETER Experiment Name: At_42deg_Heat_cDNA_P Parameter: Tissue Value: Aerial
  misc_feature: MA Experiment ID: 20000169 Result: Down-regulated in Transcription
  misc_feature: MA Experiment 20000169 PARAMETER Experiment Name: At_100uM_ABA_P Parameter: Age (day) Value: 14
  misc_feature: MA Experiment 20000169 PARAMETER Experiment Name: At_100uM_ABA_P Parameter: Organism Value: A. thaliana
  misc_feature: MA Experiment 20000169 PARAMETER Experiment Name: At_100uM_ABA_P Parameter: Plant Line Value: WS
  misc_feature: MA Experiment 20000169 PARAMETER Experiment Name: At_100uM_ABA_P Parameter: Timepoint (hr) Value: 6
  misc_feature: MA Experiment 20000169 PARAMETER Experiment Name: At_100uM_ABA_P Parameter: Tissue Value: Aerial
  misc_feature: MA Experiment 20000169 PARAMETER Experiment Name: At_100uM_ABA_P Parameter: Treatment Value: 100uM ABA vs. No Treatment
  misc_feature: MA Experiment ID: 20000171 Result: Down-regulated in Transcription
  misc_feature: MA Experiment 20000171 PARAMETER Experiment Name: At_42deg_Heat_P Parameter: Age (day) Value: 14
  misc_feature: MA Experiment 20000171 PARAMETER Experiment Name: At_42deg_Heat_P Parameter: Organism Value: A. thaliana
  misc_feature: MA Experiment 20000171 PARAMETER Experiment Name: At_42deg_Heat_P Parameter: Plant Line Value: WS
  misc_feature: MA Experiment 20000171 PARAMETER Experiment Name: At_42deg_Heat_P Parameter: Temperature (deg C) Value: 42 vs. 22
  misc_feature: MA Experiment 20000171 PARAMETER Experiment Name: At_42deg_Heat_P Parameter: Timepoint (hr) Value: 1
  misc_feature: MA Experiment 20000171 PARAMETER Experiment Name: At_42deg_Heat_P Parameter: Tissue Value: Aerial
  misc_feature: MA Experiment ID: 20000173 Result: Down-regulated in Transcription
  misc_feature: MA Experiment 20000173 PARAMETER Experiment Name: At_42deg_Heat_P Parameter: Age (day) Value: 14
  misc_feature: MA Experiment 20000173 PARAMETER Experiment Name: At_42deg_Heat_P Parameter: Organism Value: A. thaliana
  misc_feature: MA Experiment 20000173 PARAMETER Experiment Name: At_42deg_Heat_P Parameter: Plant Line Value: WS
  misc_feature: MA Experiment 20000173 PARAMETER Experiment Name: At_42deg_Heat_P Parameter: Temperature (deg C) Value: 42 vs. 22
  misc_feature: MA Experiment 20000173 PARAMETER Experiment Name: At_42deg_Heat_P Parameter: Timepoint (hr) Value: 6
  misc_feature: MA Experiment 20000173 PARAMETER Experiment Name: At_42deg_Heat_P Parameter: Tissue Value: Aerial
  misc_feature: MA Experiment ID: 20000180 Result: Up-regulated in Transcription
  misc_feature: MA Experiment 20000180 PARAMETER Experiment Name: At_Germinating_Seeds_P Parameter: Age (hr) Value: 24 vs. 0
  misc_feature: MA Experiment 20000180 PARAMETER Experiment Name: At_Germinating_Seeds_P Parameter: Tissue Value: Germinating Seeds
  misc_feature: MA Experiment ID: 20000182 Result: Down-regulated in Transcription
  misc_feature: MA Experiment 20000182 PARAMETER Experiment Name: At_2mM_SA_P Parameter: Age (day) Value: 14
  misc_feature: MA Experiment 20000182 PARAMETER Experiment Name: At_2mM_SA_P Parameter: Organism Value: A. thaliana
  misc_feature: MA Experiment 20000182 PARAMETER Experiment Name: At_2mM_SA_P Parameter: Plant Line Value: WS
  misc_feature: MA Experiment 20000182 PARAMETER Experiment Name: At_2mM_SA_P Parameter: Timepoint (hr) Value: 6
  misc_feature: MA Experiment 20000182 PARAMETER Experiment Name: At_2mM_SA_P Parameter: Tissue Value: Aerial
  misc_feature: MA Experiment 20000182 PARAMETER Experiment Name: At_2mM_SA_P Parameter: Treatment Value: 2mM SA vs. No Treatment
  misc_feature: MA Experiment ID: 20000184 Result: Up-regulated in Transcription
  misc_feature: MA Experiment 20000184 PARAMETER Experiment Name: At_Shoots__P Parameter: Age (day) Value: 7
  misc_feature: MA Experiment 20000184 PARAMETER Experiment Name: At_Shoots__P Parameter: Tissue Value: Shoots vs. Whole Plant
  misc_feature: MA Experiment ID: 20000185 Result: Down-regulated in Transcription
  misc_feature: MA Experiment 20000185 PARAMETER Experiment Name: At_Roots__P Parameter: Age (day) Value: 7 vs. 21
  misc_feature: MA Experiment 20000185 PARAMETER Experiment Name: At_Roots__P Parameter: Organism Value: A. thaliana
  misc_feature: MA Experiment 20000185 PARAMETER Experiment Name: At_Roots__P Parameter: Tissue Value: Roots vs. Whole Plant
  misc_feature: MA Experiment ID: 20000235 Result: Up-regulated in Transcription
  misc_feature: MA Experiment 20000235 PARAMETER Experiment Name: At_Siliques_P Parameter: Age (day) Value: 21
  misc_feature: MA Experiment 20000235 PARAMETER Experiment Name: At_Siliques_P Parameter: Organism Value: A. thaliana
  misc_feature: MA Experiment 20000235 PARAMETER Experiment Name: At_Siliques_P Parameter: Plant Line Value: WS
  misc_feature: MA Experiment 20000235 PARAMETER Experiment Name: At_Siliques_P Parameter: Tissue Value: 5-10mm Siliques vs. Whole Plant
  misc_feature: MA Experiment ID: 20000265 Result: Down-regulated in Transcription
  misc_feature: MA Experiment 20000265 PARAMETER Experiment Name: At_Open_Flower_P Parameter: Age (day) Value: 21
  misc_feature: MA Experiment 20000265 PARAMETER Experiment Name: At_Open_Flower_P Parameter: Plant Line Value: WS
  misc_feature: MA Experiment 20000265 PARAMETER Experiment Name: At_Open_Flower_P Parameter: Tissue Value: Closed Flower vs. Whole Plant
  misc_feature: MA Experiment ID: 20000267 Result: Down-regulated in Transcription
  misc_feature: MA Experiment 20000267 PARAMETER Experiment Name: At_Drought_P Parameter: Age (day) Value: 7
  misc_feature: MA Experiment 20000267 PARAMETER Experiment Name: At_Drought_P Parameter: Organism Value: A. thaliana
  misc_feature: MA Experiment 20000267 PARAMETER Experiment Name: At_Drought_P Parameter: Plant Line Value: WS
  misc_feature: MA Experiment 20000267 PARAMETER Experiment Name: At_Drought_P Parameter: Timepoint (hr) Value: 6
  misc_feature: MA Experiment 20000267 PARAMETER Experiment Name: At_Drought_P Parameter: Tissue Value: Whole Plant
  misc_feature: MA Experiment 20000267 PARAMETER Experiment Name: At_Drought_P Parameter: Treatment Value: Drought vs. No Drought
  misc_feature: MA Experiment ID: 20000268 Result: Down-regulated in Transcription
  misc_feature: MA Experiment 20000268 PARAMETER Experiment Name: At_100mM_NaCl__P Parameter: Age (day) Value: 14
  misc_feature: MA Experiment 20000268 PARAMETER Experiment Name: At_100mM_NaCl__P Parameter: Organism Value: A. thaliana
  misc_feature: MA Experiment 20000268 PARAMETER Experiment Name: At_100mM_NaCl__P Parameter: Plant Line Value: WS
  misc_feature: MA Experiment 20000268 PARAMETER Experiment Name: At_100mM_NaCl__P Parameter: Timepoint (hr) Value: 6
  misc_feature: MA Experiment 20000268 PARAMETER Experiment Name: At_100mM_NaCl__P Parameter: Tissue Value: Whole Plant
  misc_feature: MA Experiment 20000268 PARAMETER Experiment Name: At_100mM_NaCl__P Parameter: Treatment Value: 100mM NaCl vs. No Treatment
  misc_feature: MA Experiment ID: 20000286 Result: Down-regulated in Transcription
  misc_feature: MA Experiment 20000286 PARAMETER Experiment Name: At_Open_Flower_P Parameter: Age (day) Value: 21
  misc_feature: MA Experiment 20000286 PARAMETER Experiment Name: At_Open_Flower_P Parameter: Plant Line Value: WS
  misc_feature: MA Experiment 20000286 PARAMETER Experiment Name: At_Open_Flower_P Parameter: Tissue Value: Half Open vs. Whole Plant
  misc_feature: MA Experiment ID: 20000436 Result: Down-regulated in Transcription
  misc_feature: MA Experiment 20000436 PARAMETER Experiment Name: At_Drought_P Parameter: Age (day) Value: 7
  misc_feature: MA Experiment 20000436 PARAMETER Experiment Name: At_Drought_P Parameter: Organism Value: A. thaliana
  misc_feature: MA Experiment 20000436 PARAMETER Experiment Name: At_Drought_P Parameter: Plant Line Value: WS
  misc_feature: MA Experiment 20000436 PARAMETER Experiment Name: At_Drought_P Parameter: Timepoint (hr) Value: 12
  misc_feature: MA Experiment 20000436 PARAMETER Experiment Name: At_Drought_P Parameter: Tissue Value: Whole Plant
  misc_feature: MA Experiment 20000436 PARAMETER Experiment Name: At_Drought_P Parameter: Treatment Value: Drought vs. No Drought
  misc_feature: MA Experiment ID: 20000437 Result: Down-regulated in Transcription
  misc_feature: MA Experiment 20000437 PARAMETER Experiment Name: At_Drought_P Parameter: Age (day) Value: 8
  misc_feature: MA Experiment 20000437 PARAMETER Experiment Name: At_Drought_P Parameter: Organism Value: A. thaliana
  misc_feature: MA Experiment 20000437 PARAMETER Experiment Name: At_Drought_P Parameter: Plant Line Value: WS
  misc_feature: MA Experiment 20000437 PARAMETER Experiment Name: At_Drought_P Parameter: Timepoint (hr) Value: 24
  misc_feature: MA Experiment 20000437 PARAMETER Experiment Name: At_Drought_P Parameter: Tissue Value: Whole Plant
  misc_feature: MA Experiment 20000437 PARAMETER Experiment Name: At_Drought_P Parameter: Treatment Value: Drought vs. No Drought
  misc_feature: MA Experiment ID: 20000438 Result: Up-regulated in Transcription
  misc_feature: MA Experiment 20000438 PARAMETER Experiment Name: At_Shoots__P Parameter: Age (day) Value: 14
  misc_feature: MA Experiment 20000438 PARAMETER Experiment Name: At_Shoots__P Parameter: Tissue Value: Shoots vs. Whole Plant
  misc_feature: MA Experiment ID: 20000439 Result: Down-regulated in Transcription
  misc_feature: MA Experiment 20000439 PARAMETER Experiment Name: At_Roots__P Parameter: Age (day) Value: 14 vs. 21
  misc_feature: MA Experiment 20000439 PARAMETER Experiment Name: At_Roots__P Parameter: Organism Value: A. thaliana
  misc_feature: MA Experiment 20000439 PARAMETER Experiment Name: At_Roots__P Parameter: Tissue Value: Roots vs. Whole Plant
  misc_feature: MA Experiment ID: 20000445 Result: Down-regulated in Transcription
  misc_feature: MA Experiment 20000445 PARAMETER Experiment Name: At_100uM_NAA__P Parameter: Age (day) Value: 14
  misc_feature: MA Experiment 20000445 PARAMETER Experiment Name: At_100uM_NAA__P Parameter: Organism Value: A. thaliana
  misc_feature: MA Experiment 20000445 PARAMETER Experiment Name: At_100uM_NAA__P Parameter: Plant Line Value: WS
  misc_feature: MA Experiment 20000445 PARAMETER Experiment Name: At_100uM_NAA__P Parameter: Timepoint (hr) Value: 6
  misc_feature: MA Experiment 20000445 PARAMETER Experiment Name: At_100uM_NAA__P Parameter: Tissue Value: Aerial
  misc_feature: MA Experiment 20000445 PARAMETER Experiment Name: At_100uM_NAA__P Parameter: Treatment Value: 100uM NAA vs. No Treatment
  misc_feature: MA Experiment ID: 20000451 Result: Up-regulated in Transcription
  misc_feature: MA Experiment 20000451 PARAMETER Experiment Name: At_CS6879_Shoots-Roots_P Parameter: Age (day) Value: 14
  misc_feature: MA Experiment 20000451 PARAMETER Experiment Name: At_CS6879_Shoots-Roots_P Parameter: Organism Value: A. thaliana
  misc_feature: MA Experiment 20000451 PARAMETER Experiment Name: At_CS6879_Shoots-Roots_P Parameter: Plant Line Value: CS6879 vs. WS
  misc_feature: MA Experiment 20000451 PARAMETER Experiment Name: At_CS6879_Shoots-Roots_P Parameter: Tissue Value: Roots
  misc_feature: MA Experiment ID: 20000573 Result: Down-regulated in Transcription
  misc_feature: MA Experiment 20000573 PARAMETER Experiment Name: At_100uM_ABA_Mutants__P Parameter: Organism Value: A. thaliana
  misc_feature: MA Experiment 20000573 PARAMETER Experiment Name: At_100uM_ABA_Mutants__P Parameter: Plant Line Value: CS22 vs. Ler wt
  misc_feature: MA Experiment 20000573 PARAMETER Experiment Name: At_100uM_ABA_Mutants__P Parameter: Timepoint (hr) Value: N/A
  misc_feature: MA Experiment 20000573 PARAMETER Experiment Name: At_100uM_ABA_Mutants__P Parameter: Tissue Value: Whole Plant
  misc_feature: MA Experiment 20000573 PARAMETER Experiment Name: At_100uM_ABA_Mutants__P Parameter: Treatment Value: None
  misc_feature: MA Experiment ID: 20000574 Result: Down-regulated in Transcription
  misc_feature: MA Experiment 20000574 PARAMETER Experiment Name: At_100uM_ABA_Mutants__P Parameter: Organism Value: A. thaliana
  misc_feature: MA Experiment 20000574 PARAMETER Experiment Name: At_100uM_ABA_Mutants__P Parameter: Plant Line Value: CS23 vs. Ler wt
  misc_feature: MA Experiment 20000574 PARAMETER Experiment Name: At_100uM_ABA_Mutants__P Parameter: Timepoint (hr) Value: N/A
  misc_feature: MA Experiment 20000574 PARAMETER Experiment Name: At_100uM_ABA_Mutants__P Parameter: Tissue Value: Whole Plant
  misc_feature: MA Experiment 20000574 PARAMETER Experiment Name: At_100uM_ABA_Mutants__P Parameter: Treatment Value: None
  misc_feature: MA Experiment ID: 20000794 Result: Down-regulated in Transcription
  misc_feature: MA Experiment 20000794 PARAMETER Experiment Name: At_Petals_P Parameter: Age (day) Value: 23-25 days
  misc_feature: MA Experiment 20000794 PARAMETER Experiment Name: At_Petals_P Parameter: Plant Line Value: WS
  misc_feature: MA Experiment 20000794 PARAMETER Experiment Name: At_Petals_P Parameter: Tissue Value: Petals vs. Whole plant
  misc_feature: MA Experiment ID: 20001248 Result: Down-regulated in Transcription
  misc_feature: MA Experiment 20001248 PARAMETER Experiment Name: At_Far-red-induction_P Parameter: Age (day) Value: 7
  misc_feature: MA Experiment 20001248 PARAMETER Experiment Name: At_Far-red-induction_P Parameter: Light Value: Far-red vs. White
  misc_feature: MA Experiment 20001248 PARAMETER Experiment Name: At_Far-red-induction_P Parameter: Organism Value: A. thaliana
  misc_feature: MA Experiment 20001248 PARAMETER Experiment Name: At_Far-red-induction_P Parameter: Plant Line Value: Columbia
  misc_feature: MA Experiment 20001248 PARAMETER Experiment Name: At_Far-red-induction_P Parameter: Timepoint (hr) Value: 4
  misc_feature: MA Experiment 20001248 PARAMETER Experiment Name: At_Far-red-induction_P Parameter: Tissue Value: Whole Plant
  misc_feature: MA Experiment ID: 20001554 Result: Down-regulated in Transcription
  misc_feature: MA Experiment 20001554 PARAMETER Experiment Name: At_Drought_Soil_Dry_P Parameter: Age (day) Value: 21
  misc_feature: MA Experiment 20001554 PARAMETER Experiment Name: At_Drought_Soil_Dry_P Parameter: Organism Value: A. thaliana
  misc_feature: MA Experiment 20001554 PARAMETER Experiment Name: At_Drought_Soil_Dry_P Parameter: Plant Line Value: WS
  misc_feature: MA Experiment 20001554 PARAMETER Experiment Name: At_Drought_Soil_Dry_P Parameter: Post Timepoint (hr) Value: None
  misc_feature: MA Experiment 20001554 PARAMETER Experiment Name: At_Drought_Soil_Dry_P Parameter: Post-Treatment Value: None
  misc_feature: MA Experiment 20001554 PARAMETER Experiment Name: At_Drought_Soil_Dry_P Parameter: Timepoint (day) Value: 7
  misc_feature: MA Experiment 20001554 PARAMETER Experiment Name: At_Drought_Soil_Dry_P Parameter: Treatment Value: Drought vs. No Drought
  misc_feature: MA Experiment ID: 20001555 Result: Down-regulated in Transcription
  misc_feature: MA Experiment 20001555 PARAMETER Experiment Name: At_Drought_Soil_Dry_P Parameter: Age (day) Value: 24
  misc_feature: MA Experiment 20001555 PARAMETER Experiment Name: At_Drought_Soil_Dry_P Parameter: Organism Value: A. thaliana
  misc_feature: MA Experiment 20001555 PARAMETER Experiment Name: At_Drought_Soil_Dry_P Parameter: Plant Line Value: WS
  misc_feature: MA Experiment 20001555 PARAMETER Experiment Name: At_Drought_Soil_Dry_P Parameter: Post Timepoint (hr) Value: None
  misc_feature: MA Experiment 20001555 PARAMETER Experiment Name: At_Drought_Soil_Dry_P Parameter: Post-Treatment Value: None
  misc_feature: MA Experiment 20001555 PARAMETER Experiment Name: At_Drought_Soil_Dry_P Parameter: Timepoint (day) Value: 10
  misc_feature: MA Experiment 20001555 PARAMETER Experiment Name: At_Drought_Soil_Dry_P Parameter: Treatment Value: Drought vs. No Drought
  misc_feature: MA Experiment ID: 20001556 Result: Down-regulated in Transcription
  misc_feature: MA Experiment 20001556 PARAMETER Experiment Name: At_Drought_Soil_Dry_P Parameter: Age (day) Value: 26
  misc_feature: MA Experiment 20001556 PARAMETER Experiment Name: At_Drought_Soil_Dry_P Parameter: Organism Value: A. thaliana
  misc_feature: MA Experiment 20001556 PARAMETER Experiment Name: At_Drought_Soil_Dry_P Parameter: Plant Line Value: WS
  misc_feature: MA Experiment 20001556 PARAMETER Experiment Name: At_Drought_Soil_Dry_P Parameter: Post Timepoint (hr) Value: None
  misc_feature: MA Experiment 20001556 PARAMETER Experiment Name: At_Drought_Soil_Dry_P Parameter: Post-Treatment Value: None
  misc_feature: MA Experiment 20001556 PARAMETER Experiment Name: At_Drought_Soil_Dry_P Parameter: Timepoint (day) Value: 12
  misc_feature: MA Experiment 20001556 PARAMETER Experiment Name: At_Drought_Soil_Dry_P Parameter: Treatment Value: Drought vs. No Drought
  misc_feature: MA Experiment ID: 20001558 Result: Up-regulated in Transcription
  misc_feature: MA Experiment 20001558 PARAMETER Experiment Name: At_Drought_Soil_Dry_P Parameter: Age (day) Value: 27
  misc_feature: MA Experiment 20001558 PARAMETER Experiment Name: At_Drought_Soil_Dry_P Parameter: Organism Value: A. thaliana
  misc_feature: MA Experiment 20001558 PARAMETER Experiment Name: At_Drought_Soil_Dry_P Parameter: Plant Line Value: WS
  misc_feature: MA Experiment 20001558 PARAMETER Experiment Name: At_Drought_Soil_Dry_P Parameter: Post Timepoint (hr) Value: 6
  misc_feature: MA Experiment 20001558 PARAMETER Experiment Name: At_Drought_Soil_Dry_P Parameter: Post-Treatment Value: Re-Water vs. No Drought
  misc_feature: MA Experiment 20001558 PARAMETER Experiment Name: At_Drought_Soil_Dry_P Parameter: Timepoint (day) Value: 13
  misc_feature: MA Experiment 20001558 PARAMETER Experiment Name: At_Drought_Soil_Dry_P Parameter: Treatment Value: Drought vs. No Drought
  misc_feature: MA Experiment ID: 20001560 Result: Up-regulated in Transcription
  misc_feature: MA Experiment 20001560 PARAMETER Experiment Name: At_Drought_Soil_Dry_P Parameter: Age (day) Value: 28
  misc_feature: MA Experiment 20001560 PARAMETER Experiment Name: At_Drought_Soil_Dry_P Parameter: Organism Value: A. thaliana
  misc_feature: MA Experiment 20001560 PARAMETER Experiment Name: At_Drought_Soil_Dry_P Parameter: Plant Line Value: WS
  misc_feature: MA Experiment 20001560 PARAMETER Experiment Name: At_Drought_Soil_Dry_P Parameter: Post Timepoint (hr) Value: None
  misc_feature: MA Experiment 20001560 PARAMETER Experiment Name: At_Drought_Soil_Dry_P Parameter: Post-Treatment Value: None
  misc_feature: MA Experiment 20001560 PARAMETER Experiment Name: At_Drought_Soil_Dry_P Parameter: Timepoint (day) Value: 14
  misc_feature: MA Experiment 20001560 PARAMETER Experiment Name: At_Drought_Soil_Dry_P Parameter: Treatment Value: Drought vs. No Drought
  misc_feature: MA Experiment ID: 20001904 Result: Down-regulated in Transcription
  misc_feature: MA Experiment 20001904 PARAMETER Experiment Name: At_Drought_Reproduction_P Parameter: Age (day) Value: 37
  misc_feature: MA Experiment 20001904 PARAMETER Experiment Name: At_Drought_Reproduction_P Parameter: Organism Value: A. thaliana
  misc_feature: MA Experiment 20001904 PARAMETER Experiment Name: At_Drought_Reproduction_P Parameter: Plant Line Value: WS
  misc_feature: MA Experiment 20001904 PARAMETER Experiment Name: At_Drought_Reproduction_P Parameter: Timepoint (day) Value: 7
  misc_feature: MA Experiment 20001904 PARAMETER Experiment Name: At_Drought_Reproduction_P Parameter: Tissue Value: Rosettes
  misc_feature: MA Experiment 20001904 PARAMETER Experiment Name: At_Drought_Reproduction_P Parameter: Treatment Value: Drought vs. No Drought
  misc_feature: MA Experiment ID: 20001905 Result: Down-regulated in Transcription
  misc_feature: MA Experiment 20001905 PARAMETER Experiment Name: At_Drought_Reproduction_P Parameter: Age (day) Value: 40
  misc_feature: MA Experiment 20001905 PARAMETER Experiment Name: At_Drought_Reproduction_P Parameter: Organism Value: A. thaliana
  misc_feature: MA Experiment 20001905 PARAMETER Experiment Name: At_Drought_Reproduction_P Parameter: Plant Line Value: WS
  misc_feature: MA Experiment 20001905 PARAMETER Experiment Name: At_Drought_Reproduction_P Parameter: Timepoint (day) Value: 10
  misc_feature: MA Experiment 20001905 PARAMETER Experiment Name: At_Drought_Reproduction_P Parameter: Tissue Value: Rosettes
  misc_feature: MA Experiment 20001905 PARAMETER Experiment Name: At_Drought_Reproduction_P Parameter: Treatment Value: Drought vs. No Drought
  misc_feature: MA Experiment ID: 20001906 Result: Down-regulated in Transcription
  misc_feature: MA Experiment 20001906 PARAMETER Experiment Name: At_Drought_Reproduction_P Parameter: Age (day) Value: 35
  misc_feature: MA Experiment 20001906 PARAMETER Experiment Name: At_Drought_Reproduction_P Parameter: Organism Value: A. thaliana
  misc_feature: MA Experiment 20001906 PARAMETER Experiment Name: At_Drought_Reproduction_P Parameter: Plant Line Value: WS
  misc_feature: MA Experiment 20001906 PARAMETER Experiment Name: At_Drought_Reproduction_P Parameter: Timepoint (day) Value: 5
  misc_feature: MA Experiment 20001906 PARAMETER Experiment Name: At_Drought_Reproduction_P Parameter: Tissue Value: Siliques
  misc_feature: MA Experiment 20001906 PARAMETER Experiment Name: At_Drought_Reproduction_P Parameter: Treatment Value: Drought vs. No Drought
  misc_feature: MA Experiment ID: 20001911 Result: Down-regulated in Transcription
  misc_feature: MA Experiment 20001911 PARAMETER Experiment Name: At_Drought_Reproduction_P Parameter: Age (day) Value: 40
  misc_feature: MA Experiment 20001911 PARAMETER Experiment Name: At_Drought_Reproduction_P Parameter: Organism Value: A. thaliana
  misc_feature: MA Experiment 20001911 PARAMETER Experiment Name: At_Drought_Reproduction_P Parameter: Plant Line Value: WS
  misc_feature: MA Experiment 20001911 PARAMETER Experiment Name: At_Drought_Reproduction_P Parameter: Timepoint (day) Value: 10
  misc_feature: MA Experiment 20001911 PARAMETER Experiment Name: At_Drought_Reproduction_P Parameter: Tissue Value: Flowers
  misc_feature: MA Experiment 20001911 PARAMETER Experiment Name: At_Drought_Reproduction_P Parameter: Treatment Value: Drought vs. No Drought
aacacatttcaccacaacgaccaccactcctacactaacacttatatcaccaacacattgtgttctactatacataaaattcagttcctaagtatttttgttttgttttgtgagatcgatggagagttacttgaggaaatggtgtttagtttctgtgtgggttttgcttttaggtttagggtttaaggtaaaagcagagcctcaagttccatgttacttcatctttggtgattctttggttgacaatggaaacaacaatcgtcttagatctattgcaagagccgattatttcccttacggcatcgatttcggcggccccaccggccgtttttccaacggcagaaccaccgtcgacgttctcactgagctacttggatttgataactacattcctgcgtatagtactgtgagtggccaagagatacttcaaggagtcaactacgcatctgcagctgctggaatcagagaagaaaccggtgcacaattgggacaaaggataacatttagtgggcaagtagagaattataagaacacagtggcacaagtggtggagattcttggagacgagtacactgcagcagattaccttaagagatgcatttactctgttggtatgggaagcaatgactatcttaataactacttcatgcctcagttctactccactagcagacagtacactcccgaacagtatgctgacgatcttatcagtcgttacagggaccagcttaatgcactgtacaactatggagctagaaagtttgcattggtaggaattggagccattggatgtagtccgaatgcgctcgcacagggcagccaagacggaacaacttgtgtggagcgtatcaactcggccaaccgaatcttcaacaacaggctcatatctatggtccaacaactaaacaacgctcattccgatgctagtttcacttacatcaatgcttatggcgcttttcaggatataatcgccaatccctctgcttatgggtttacgaatacgaacactgcgtgttgcggaattggaaggaacggaggtcagctaacatgtttaccgggagaacccccgtgcttgaaccgagatgagtacgtgttttgggatgcatttcatccttcggctgctgcaaacacggccattgcaaaaagatcttacaatgcacaaagatcttccgacgtttatccgattgatatctcgcaattagcacagctttgaaaggacagagaataggagagttttacaacaattgtatgcttttcaggttataaattgaattattggaaatgattctgatgttatgtgtgtacccaaagtgttcaactttatataaaaaaaatagggattgcatt

SEQ ID NO: 27554 - protein, 364 aa, Arabidopsis thaliana
  peptide (1)..(364): Ceres Seq. ID no. 12357670
  misc_feature (33)..(344): Pfam Name: GDSL-like Lipase/Acylhydrolase Pfam Description: GDSL-like Lipase/Acylhydrolase
  misc_feature (11)..(364): Homolog of NCBI NO: 21618199 NR Description: GDSL-motif lipase/hydrolase-like protein
  misc_feature (11)..(364): Homolog of NCBI NO: 18415211 NR Description: Expressed protein
  misc_feature (1)..(364): Homolog of NCBI NO: 7485419 NR Description: hypothetical protein F13C5.140 - Arabidopsis
  misc_feature (1)..(364): Homolog of NCBI NO: 21592417 NR Description: lipase/hydrolase, putative [Arabidopsis thaliana]
  misc_feature (10)..(364): Homolog of NCBI NO: 21553940 NR Description: GDSL-motif lipase/hydrolase-like protein
  misc_feature (10)..(364): Homolog of NCBI NO: 15242458 NR Description: GDSL-motif lipase/hydrolase-like protein
  misc_feature (34)..(351): Homolog of NCBI NO: 30693137 NR Description: lipase family [Arabidopsis thaliana]
  misc_feature (1)..(364): Homolog of NCBI NO: 15220514 NR Description: lipase/hydrolase, putative
  misc_feature (1)..(364): Homolog of NCBI NO: 21594055 NR Description: lipase/hydrolase, putative [Arabidopsis thaliana]
  misc_feature (1)..(364): Homolog of NCBI NO: 15220512 NR Description: lipase/hydrolase, putative
MESYLRKWCLVSVWVLLLGLGFKVKAEPQVPCYFIFGDSLVDNGNNNRLRSIARADYFPYGIDFGGPTGRFSNGRTTVDVLTELLGFDNYIPAYSTVSGQEILQGVNYASAAAGIREETGAQLGQRITFSGQVENYKNTVAQVVEILGDEYTAADYLKRCIYSVGMGSNDYLNNYFMPQFYSTSRQYTPEQYADDLISRYRDQLNALYNYGARKFALVGIGAIGCSPNALAQGSQDGTTCVERINSANRIFNNRLISMVQQLNNAHSDASFTYINAYGAFQDIIANPSAYGFTNTNTACCGIGRNGGQLTCLPGEPPCLNRDEYVFWDAFHPSAAANTAIAKRSYNAQRSSDVYPIDISQLAQL

SEQ ID NO: 27555 - protein, 199 aa, Arabidopsis thaliana
  peptide (1)..(199): Ceres Seq. ID no. 12357671
  misc_feature (1)..(179): Pfam Name: GDSL-like Lipase/Acylhydrolase Pfam Description: GDSL-like Lipase/Acylhydrolase
  misc_feature (1)..(186): Homolog of NCBI NO: 30693137 NR Description: lipase family [Arabidopsis thaliana]
  misc_feature (1)..(199): Homolog of NCBI NO: 21553940 NR Description: GDSL-motif lipase/hydrolase-like protein
  misc_feature (1)..(199): Homolog of NCBI NO: 15242458 NR Description: GDSL-motif lipase/hydrolase-like protein
  misc_feature (1)..(199): Homolog of NCBI NO: 21618199 NR Description: GDSL-motif lipase/hydrolase-like protein
  misc_feature (1)..(199): Homolog of NCBI NO: 18415211 NR Description: Expressed protein
  misc_feature (1)..(199): Homolog of NCBI NO: 7485419 NR Description: hypothetical protein F13C5.140 - Arabidopsis
  misc_feature (1)..(199): Homolog of NCBI NO: 21592417 NR Description: lipase/hydrolase, putative [Arabidopsis thaliana]
  misc_feature (1)..(199): Homolog of NCBI NO: 15220514 NR Description: lipase/hydrolase, putative
  misc_feature (1)..(199): Homolog of NCBI NO: 21594055 NR Description: lipase/hydrolase, putative [Arabidopsis thaliana]
  misc_feature (1)..(199): Homolog of NCBI NO: 15220512 NR Description: lipase/hydrolase, putative
MGSNDYLNNYFMPQFYSTSRQYTPEQYADDLISRYRDQLNALYNYGARKFALVGIGAIGCSPNALAQGSQDGTTCVERINSANRIFNNRLISMVQQLNNAHSDASFTYINAYGAFQDIIANPSAYGFTNTNTACCGIGRNGGQLTCLPGEPPCLNRDEYVFWDAFHPSAAANTAIAKRSYNAQRSSDVYPIDISQLAQL

SEQ ID NO: 27556 - protein, 188 aa, Arabidopsis thaliana
  peptide (1)..(188): Ceres Seq. ID no. 12357672
  misc_feature (1)..(168): Pfam Name: GDSL-like Lipase/Acylhydrolase Pfam Description: GDSL-like Lipase/Acylhydrolase
  misc_feature (1)..(175): Homolog of NCBI NO: 30693137 NR Description: lipase family [Arabidopsis thaliana]
  misc_feature (1)..(188): Homolog of NCBI NO: 21553940 NR Description: GDSL-motif lipase/hydrolase-like protein
  misc_feature (1)..(188): Homolog of NCBI NO: 15242458 NR Description: GDSL-motif lipase/hydrolase-like protein
  misc_feature (1)..(188): Homolog of NCBI NO: 21618199 NR Description: GDSL-motif lipase/hydrolase-like protein
  misc_feature (1)..(188): Homolog of NCBI NO: 18415211 NR Description: Expressed protein
  misc_feature (1)..(188): Homolog of NCBI NO: 7485419 NR Description: hypothetical protein F13C5.140 - Arabidopsis
  misc_feature (1)..(188): Homolog of NCBI NO: 21592417 NR Description: lipase/hydrolase, putative [Arabidopsis thaliana]
  misc_feature (1)..(188): Homolog of NCBI NO: 15220514 NR Description: lipase/hydrolase, putative
  misc_feature (1)..(188): Homolog of NCBI NO: 21594055 NR Description: lipase/hydrolase, putative [Arabidopsis thaliana]
  misc_feature (1)..(188): Homolog of NCBI NO: 15220512 NR Description: lipase/hydrolase, putative
MPQFYSTSRQYTPEQYADDLISRYRDQLNALYNYGARKFALVGIGAIGCSPNALAQGSQDGTTCVERINSANRIFNNRLISMVQQLNNAHSDASFTYINAYGAFQDIIANPSAYGFTNTNTACCGIGRNGGQLTCLPGEPPCLNRDEYVFWDAFHPSAAANTAIAKRSYNAQRSSDVYPIDISQLAQL

SEQ ID NO: 27557 - DNA, 1208 bp, Arabidopsis thaliana
  misc_feature (1)..(1208): Ceres Seq. ID no. 12348436
  misc_feature: MA Experiment ID: 108577 Result: Up-regulated in Transcription
  misc_feature: MA Experiment 108577 PARAMETER Experiment Name: At_42deg_Heat_cDNA_P Parameter: Temperature (deg C) Value: 42 vs. 22
  misc_feature: MA Experiment 108577 PARAMETER Experiment Name: At_42deg_Heat_cDNA_P Parameter: Timepoint (hr) Value: 6
  misc_feature: MA Experiment 108577 PARAMETER Experiment Name: At_42deg_Heat_cDNA_P Parameter: Tissue Value: Aerial
  misc_feature: Phenotype: ROSETTE LEAVES Disorganized Rosette-Disorganized Rosette
  misc_feature: Phenotype: ROSETTE LEAVES Shape-Lanceolate
  misc_feature: Phenotype: WHOLE PLANT Size-Small
  misc_feature: Phenotype: INFLORESCENCE Flowering Time-Late Flowering
  misc_feature: Phenotype: ROSETTE LEAVES Shape-Serrate
  misc_feature: Phenotype: WHOLE PLANT Size-Small
  misc_feature: Phenotype: WHOLE PLANT Size-Small
  misc_feature: Phenotype: WHOLE PLANT Size-Small
ataacgaagcggttggaagaagatgaaactgttcgacgcgcactgtcaccttcaagacccgaggattatcaccaaagctcctcagataatcacctccgccgttgcttccggcgtctctgctttcgccgtcaatggagtctccgagaaagattggagtttggtcaaagagatgggagctaaatacccttctgttgttccttgctttgggatccatccatggtatgtagcagagaggagtcctcaatggtttgagacataagagtttctttgagaccactcctactgctgctgttggagaaattggtttggacaaagggtctaagggaagggagattgatttctcagaacaggttaccgtctttcgtcaacagcttgaacttgcaaaggaattgaagaaacctgcgtcagttcattgtgttcgtgcatttggggatctactcgagatattaaaatctgtagggccttttccttctggggtcatgcttcactcgtatttgggttctgctgagatggttcctgaatttgctaagctcggtgcatatttctccttctccggtttccttatgtccatgagtgagaaaaaagccaagaagatgttgaaagcagttccatctgataggatcttattggagacggattcaccagatgcactaccaaaggcagagtcaggttgtctctactttgtagacggagatccttctctacccgaagaaggaaattcagctcaggatcttgattctgcttcatatgataagcctaatgtgtctagtgactcgatgaagttaacaaaggaaacacttaatcacccggctaatattcatatcgtactcggatatgtagcgcagttgttggatatgaagaatgaagaactcgcggaactaagttatcaaaatgctgttcggttattctcttacgaaggttcaaagatacttcttgacagaggtactggtgatgtctctggtcacactcaaaaccagtcaacaacacatgtatcatgagttcttacttcttaagaaatcgtagtgtttctcatcactctattacgagtctttgaatttggactctctcttttttttttctttttttttgaatgtttgaatttggaattattgtactagtgttatagacaatcacacttttctttgtacaaactacaaaggttctgattttgtgtgaaaattaattcagttaatgatgtgattagagcc

SEQ ID NO: 27558 - protein, 172 aa, Arabidopsis thaliana
  peptide (1)..(172): Ceres Seq. ID no. 12348437
  misc_feature (1)..(145): Pfam Name: TatD related DNase Pfam Description: TatD related DNase
  misc_feature (1)..(59): Homolog of NCBI NO: 16077107 NR Description: similar to hypothetical proteins [Bacillus
  misc_feature (1)..(56): Homolog of NCBI NO: 23028677 NR Description: hypothetical protein [Microbulbifer degradans
  misc_feature (1)..(64): Homolog of NCBI NO: 22537921 NR Description: deoxyribonuclease, TatD family [Streptococcus
  misc_feature (1)..(64): Homolog of NCBI NO: 23055931 NR Description: hypothetical protein [Geobacter metallireducens]
  misc_feature (1)..(85): Homolog of NCBI NO: 39998376 NR Description: hydrolase, TatD family [Geobacter sulfurreducens
  misc_feature (85)..(154): Homolog of NCBI NO: 15228573 NR Description: unknown protein; protein id: At3g03500.1
  misc_feature (1)..(86): Homolog of NCBI NO: 15228573 NR Description: unknown protein; protein id: At3g03500.1
  misc_feature (1)..(150): Homolog of NCBI NO: 38345538 NR Description: OSJNBa0020J04.13 [Oryza sativa (japonica
  misc_feature (1)..(172): Homolog of NCBI NO: 11357936 NR Description: hypothetical protein K10A8_50 - Arabidopsis
  misc_feature (1)..(172): Homolog of NCBI NO: 18418353 NR Description: putative protein
MLHSYLGSAEMVPEFAKLGAYFSFSGFLMSMSEKKAKKMLKAVPSDRILLETDSPDALPKAESGCLYFVDGDPSLPEEGNSAQDLDSASYDKPNVSSDSMKLTKETLNHPANIHIVLGYVAQLLDMKNEELAELSYQNAVRLFSYEGSKILLDRGTGDVSGHTQNQSTTHVS

SEQ ID NO: 27559 - protein, 162 aa, Arabidopsis thaliana
  peptide (1)..(162): Ceres Seq. ID no. 12348438
  misc_feature (1)..(135): Pfam Name: TatD related DNase Pfam Description: TatD related DNase
  misc_feature (1)..(49): Homolog of NCBI NO: 16077107 NR Description: similar to hypothetical proteins [Bacillus
  misc_feature (1)..(46): Homolog of NCBI NO: 23028677 NR Description: hypothetical protein [Microbulbifer degradans
  misc_feature (1)..(54): Homolog of NCBI NO: 22537921 NR Description: deoxyribonuclease, TatD family [Streptococcus
  misc_feature (1)..(54): Homolog of NCBI NO: 23055931 NR Description: hypothetical protein [Geobacter metallireducens]
  misc_feature (1)..(75): Homolog of NCBI NO: 39998376 NR Description: hydrolase, TatD family [Geobacter sulfurreducens
  misc_feature (75)..(144): Homolog of NCBI NO: 15228573 NR Description: unknown protein; protein id: At3g03500.1
  misc_feature (1)..(76): Homolog of NCBI NO: 15228573 NR Description: unknown protein; protein id: At3g03500.1
  misc_feature (1)..(140): Homolog of NCBI NO: 38345538 NR Description: OSJNBa0020J04.13 [Oryza sativa (japonica
  misc_feature (1)..(162): Homolog of NCBI NO: 11357936 NR Description: hypothetical protein K10A8_50 - Arabidopsis
  misc_feature (1)..(162): Homolog of NCBI NO: 18418353 NR Description: putative protein
MVPEFAKLGAYFSFSGFLMSMSEKKAKKMLKAVPSDRILLETDSPDALPKAESGCLYFVDGDPSLPEEGNSAQDLDSASYDKPNVSSDSMKLTKETLNHPANIHIVLGYVAQLLDMKNEELAELSYQNAVRLFSYEGSKILLDRGTGDVSGHTQNQSTTHVS

SEQ ID NO: 27560 - protein, 144 aa, Arabidopsis thaliana
  peptide (1)..(144): Ceres Seq. ID no. 12348439
  misc_feature (1)..(117): Pfam Name: TatD related DNase Pfam Description: TatD related DNase
  misc_feature (1)..(31): Homolog of NCBI NO: 16077107 NR Description: similar to hypothetical proteins [Bacillus
  misc_feature (1)..(28): Homolog of NCBI NO: 23028677 NR Description: hypothetical protein [Microbulbifer degradans
  misc_feature (1)..(36): Homolog of NCBI NO: 22537921 NR Description: deoxyribonuclease, TatD family [Streptococcus
  misc_feature (1)..(36): Homolog of NCBI NO: 23055931 NR Description: hypothetical protein [Geobacter metallireducens]
  misc_feature (1)..(57): Homolog of NCBI NO: 39998376 NR Description: hydrolase, TatD family [Geobacter sulfurreducens
  misc_feature (57)..(126): Homolog of NCBI NO: 15228573 NR Description: unknown protein; protein id: At3g03500.1
  misc_feature (1)..(58): Homolog of NCBI NO: 15228573 NR Description: unknown protein; protein id: At3g03500.1
  misc_feature (1)..(122): Homolog of NCBI NO: 38345538 NR Description: OSJNBa0020J04.13 [Oryza sativa (japonica
  misc_feature (1)..(144): Homolog of NCBI NO: 11357936 NR Description: hypothetical protein K10A8_50 - Arabidopsis
  misc_feature (1)..(144): Homolog of NCBI NO: 18418353 NR Description: putative protein
MSMSEKKAKKMLKAVPSDRILLETDSPDALPKAESGCLYFVDGDPSLPEEGNSAQDLDSASYDKPNVSSDSMKLTKETLNHPANIHIVLGYVAQLLDMKNEELAELSYQNAVRLFSYEGSKILLDRGTGDVSGHTQNQSTTHVS

SEQ ID NO: 27561 - DNA, 1518 bp, Arabidopsis thaliana
  misc_feature (1)..(1518): Ceres Seq. ID no. 12466440
  misc_feature: MA Experiment ID: 108435 Result: Down-regulated in Transcription
  misc_feature: MA Experiment 108435 PARAMETER Experiment Name: At_stm_Mutants_cDNA_P Parameter: Plant Line Value: wt Landsburg vs stm
  misc_feature: MA Experiment 108435 PARAMETER Experiment Name: At_stm_Mutants_cDNA_P Parameter: Tissue Value: Shoot Apical Meristem Region
  misc_feature: MA Experiment ID: 108462 Result: Up-regulated in Transcription
  misc_feature: MA Experiment 108462 PARAMETER Experiment Name: At_Germinating_Seeds_cDNA_P Parameter: Age (day) Value: 2 vs. 0
  misc_feature: MA Experiment 108462 PARAMETER Experiment Name: At_Germinating_Seeds_cDNA_P Parameter: Tissue Value: Germinating Seeds
  misc_feature: MA Experiment ID: 108463 Result: Up-regulated in Transcription
  misc_feature: MA Experiment 108463 PARAMETER Experiment Name: At_Germinating_Seeds_cDNA_P Parameter: Age (day) Value: 3 vs. 0
  misc_feature: MA Experiment 108463 PARAMETER Experiment Name: At_Germinating_Seeds_cDNA_P Parameter: Tissue Value: Germinating Seeds
  misc_feature: MA Experiment ID: 108464 Result: Up-regulated in Transcription
  misc_feature: MA Experiment 108464 PARAMETER Experiment Name: At_Germinating_Seeds_cDNA_P Parameter: Age (day) Value: 4 vs. 0
  misc_feature: MA Experiment 108464 PARAMETER Experiment Name: At_Germinating_Seeds_cDNA_P Parameter: Tissue Value: Germinating Seeds
  misc_feature: MA Experiment ID: 108488 Result: Up-regulated in Transcription
  misc_feature: MA Experiment ID: 108594 Result: Down-regulated in Transcription
  misc_feature: MA Experiment 108594 PARAMETER Experiment Name: At_Ler-rhl_Root_cDNA_P Parameter: Plant Line Value: null
  misc_feature: MA Experiment ID: 108595 Result: Down-regulated in Transcription
  misc_feature: MA Experiment 108595 PARAMETER Experiment Name: At_Ler-pi_Ovule_cDNA_P Parameter: Plant Line Value: null
  misc_feature: MA Experiment ID: 20000030 Result: Down-regulated in Transcription
  misc_feature: MA Experiment 20000030 PARAMETER Experiment Name: At_CS6630_Roots_cDNA_P Parameter: Plant Line Value: CS6630 vs. WS
  misc_feature: MA Experiment 20000030 PARAMETER Experiment Name: At_CS6630_Roots_cDNA_P Parameter: Tissue Value: Roots
  misc_feature: MA Experiment ID: 20000087 Result: Down-regulated in Transcription
  misc_feature: MA Experiment 20000087 PARAMETER Experiment Name: At_100uM_ABA_Mutants_cDNA_P Parameter: Plant Line Value: WS
  misc_feature: MA Experiment 20000087 PARAMETER Experiment Name: At_100uM_ABA_Mutants_cDNA_P Parameter: Timepoint (hr) Value: 6
  misc_feature: MA Experiment 20000087 PARAMETER Experiment Name: At_100uM_ABA_Mutants_cDNA_P Parameter: Tissue Value: Aerial
  misc_feature: MA Experiment 20000087 PARAMETER Experiment Name: At_100uM_ABA_Mutants_cDNA_P Parameter: Treatment Value: 100uM ABA vs. No Treatment
  misc_feature: MA Experiment ID: 20000117 Result: Down-regulated in Transcription
  misc_feature: MA Experiment 20000117 PARAMETER Experiment Name: At_100uM_ABA_Mutants_cDNA_P Parameter: Plant Line Value: Columbia
  misc_feature: MA Experiment 20000117 PARAMETER Experiment Name: At_100uM_ABA_Mutants_cDNA_P Parameter: Timepoint (hr) Value: 6
  misc_feature: MA Experiment 20000117 PARAMETER Experiment Name: At_100uM_ABA_Mutants_cDNA_P Parameter: Tissue Value: Aerial
  misc_feature: MA Experiment 20000117 PARAMETER Experiment Name: At_100uM_ABA_Mutants_cDNA_P Parameter: Treatment Value: 100uM ABA vs. No Treatment
  misc_feature: MA Experiment ID: 20000179 Result: Up-regulated in Transcription
  misc_feature: MA Experiment 20000179 PARAMETER Experiment Name: At_Germinating_Seeds_P Parameter: Age (hr) Value: 6 vs. 0
  misc_feature: MA Experiment 20000179 PARAMETER Experiment Name: At_Germinating_Seeds_P Parameter: Tissue Value: Germinating Seeds
  misc_feature: MA Experiment ID: 20000180 Result: Up-regulated in Transcription
  misc_feature: MA Experiment 20000180 PARAMETER Experiment Name: At_Germinating_Seeds_P Parameter: Age (hr) Value: 24 vs. 0
  misc_feature: MA Experiment 20000180 PARAMETER Experiment Name: At_Germinating_Seeds_P Parameter: Tissue Value: Germinating Seeds
  misc_feature: MA Experiment ID: 20000185 Result: Down-regulated in Transcription
  misc_feature: MA Experiment 20000185 PARAMETER Experiment Name: At_Roots__P Parameter: Age (day) Value: 7 vs. 21
  misc_feature: MA Experiment 20000185 PARAMETER Experiment Name: At_Roots__P Parameter: Organism Value: A. thaliana
  misc_feature: MA Experiment 20000185 PARAMETER Experiment Name: At_Roots__P Parameter: Tissue Value: Roots vs. Whole Plant
  misc_feature: MA Experiment ID: 20000227 Result: Down-regulated in Transcription
  misc_feature: MA Experiment 20000227 PARAMETER Experiment Name: At_Root-Tips-vs-Tops_P Parameter: Tissue Value: Root Tips vs. Root Tops
  misc_feature: MA Experiment ID: 20000269 Result: Down-regulated in Transcription
  misc_feature: MA Experiment 20000269 PARAMETER Experiment Name: At_1mM_KNO3_L-vs-H_Roots_P Parameter: Age (day) Value: 7,10,12
  misc_feature: MA Experiment 20000269 PARAMETER Experiment Name: At_1mM_KNO3_L-vs-H_Roots_P Parameter: Organism Value: A. thaliana
  misc_feature: MA Experiment 20000269 PARAMETER Experiment Name: At_1mM_KNO3_L-vs-H_Roots_P Parameter: Plant Line Value: WS
  misc_feature: MA Experiment 20000269 PARAMETER Experiment Name: At_1mM_KNO3_L-vs-H_Roots_P Parameter: Timepoint (day) Value: 7,10,12
  misc_feature: MA Experiment 20000269 PARAMETER Experiment Name: At_1mM_KNO3_L-vs-H_Roots_P Parameter: Tissue Value: Roots
  misc_feature: MA Experiment 20000269 PARAMETER Experiment Name: At_1mM_KNO3_L-vs-H_Roots_P Parameter: Treatment Value: 1mM KNO3 vs. 50mM KNO3
  misc_feature: MA Experiment ID: 20000437 Result: Down-regulated in Transcription
  misc_feature: MA Experiment 20000437 PARAMETER Experiment Name: At_Drought_P Parameter: Age (day) Value: 8
  misc_feature: MA Experiment 20000437 PARAMETER Experiment Name: At_Drought_P Parameter: Organism Value: A. thaliana
  misc_feature: MA Experiment 20000437 PARAMETER Experiment Name: At_Drought_P Parameter: Plant Line Value: WS
  misc_feature: MA Experiment 20000437 PARAMETER Experiment Name: At_Drought_P Parameter: Timepoint (hr) Value: 24
  misc_feature: MA Experiment 20000437 PARAMETER Experiment Name: At_Drought_P Parameter: Tissue Value: Whole Plant
  misc_feature: MA Experiment 20000437 PARAMETER Experiment Name: At_Drought_P Parameter: Treatment Value: Drought vs. No Drought
  misc_feature: MA Experiment ID: 20000438 Result: Up-regulated in Transcription
  misc_feature: MA Experiment 20000438 PARAMETER Experiment Name: At_Shoots__P Parameter: Age (day) Value: 14
  misc_feature: MA Experiment 20000438 PARAMETER Experiment Name: At_Shoots__P Parameter: Tissue Value: Shoots vs. Whole Plant
  misc_feature: MA Experiment ID: 20000439 Result: Down-regulated in Transcription
  misc_feature: MA Experiment 20000439 PARAMETER Experiment Name: At_Roots__P Parameter: Age (day) Value: 14 vs. 21
  misc_feature: MA Experiment 20000439 PARAMETER Experiment Name: At_Roots__P Parameter: Organism Value: A. thaliana
  misc_feature: MA Experiment 20000439 PARAMETER Experiment Name: At_Roots__P Parameter: Tissue Value: Roots vs. Whole Plant
  misc_feature: MA Experiment ID: 20000451 Result: Down-regulated in Transcription
  misc_feature: MA Experiment 20000451 PARAMETER Experiment Name: At_CS6879_Shoots-Roots_P Parameter: Age (day) Value: 14
  misc_feature: MA Experiment 20000451 PARAMETER Experiment Name: At_CS6879_Shoots-Roots_P Parameter: Organism Value: A. thaliana
  misc_feature: MA Experiment 20000451 PARAMETER Experiment Name: At_CS6879_Shoots-Roots_P Parameter: Plant Line Value: CS6879 vs. WS
  misc_feature: MA Experiment 20000451 PARAMETER Experiment Name: At_CS6879_Shoots-Roots_P Parameter: Tissue Value: Roots
  misc_feature: MA Experiment ID: 20000496 Result: Down-regulated in Transcription
  misc_feature: MA Experiment 20000496 PARAMETER Experiment Name: At_Guard_Cells_P Parameter: Harvest Date Value: 7/19/2002
  misc_feature: MA Experiment 20000496 PARAMETER Experiment Name: At_Guard_Cells_P Parameter: Organism Value: Canola
  misc_feature: MA Experiment 20000496 PARAMETER Experiment Name: At_Guard_Cells_P Parameter: Tissue Value: Guard Cells vs. Leaves
  misc_feature: MA Experiment ID: 20000794 Result: Down-regulated in Transcription
  misc_feature: MA Experiment 20000794 PARAMETER Experiment Name: At_Petals_P Parameter: Age (day) Value: 23-25 days
  misc_feature: MA Experiment 20000794 PARAMETER Experiment Name: At_Petals_P Parameter: Plant Line Value: WS
  misc_feature: MA Experiment 20000794 PARAMETER Experiment Name: At_Petals_P Parameter: Tissue Value: Petals vs. Whole plant
  misc_feature: MA Experiment ID: 20001248 Result: Down-regulated in Transcription
  misc_feature: MA Experiment 20001248 PARAMETER Experiment Name: At_Far-red-induction_P Parameter: Age (day) Value: 7
  misc_feature: MA Experiment 20001248 PARAMETER Experiment Name: At_Far-red-induction_P Parameter: Light Value: Far-red vs. White
  misc_feature: MA Experiment 20001248 PARAMETER Experiment Name: At_Far-red-induction_P Parameter: Organism Value: A. thaliana
  misc_feature: MA Experiment 20001248 PARAMETER Experiment Name: At_Far-red-induction_P Parameter: Plant Line Value: Columbia
  misc_feature: MA Experiment 20001248 PARAMETER Experiment Name: At_Far-red-induction_P Parameter: Timepoint (hr) Value: 4
  misc_feature: MA Experiment 20001248 PARAMETER Experiment Name: At_Far-red-induction_P Parameter: Tissue Value: Whole Plant
  misc_feature: MA Experiment ID: 20001450 Result: Down-regulated in Transcription
  misc_feature: MA Experiment 20001450 PARAMETER Experiment Name: At_Far-red-induction_P Parameter: Age (day) Value: 7
  misc_feature: MA Experiment 20001450 PARAMETER Experiment Name: At_Far-red-induction_P Parameter: Light Value: Far-red vs. White
  misc_feature: MA Experiment 20001450 PARAMETER Experiment Name: At_Far-red-induction_P Parameter: Organism Value: A. thaliana
  misc_feature: MA Experiment 20001450 PARAMETER Experiment Name: At_Far-red-induction_P Parameter: Plant Line Value: Columbia
  misc_feature: MA Experiment 20001450 PARAMETER Experiment Name: At_Far-red-induction_P Parameter: Timepoint (hr) Value: 8
  misc_feature: MA Experiment 20001450 PARAMETER Experiment Name: At_Far-red-induction_P Parameter: Tissue Value: Whole Plant
  misc_feature: MA Experiment ID: 20001451 Result: Down-regulated in Transcription
  misc_feature: MA Experiment 20001451 PARAMETER Experiment Name: At_Far-red-induction_P Parameter: Age (day) Value: 7
  misc_feature: MA Experiment 20001451 PARAMETER Experiment Name: At_Far-red-induction_P Parameter: Light Value: Far-red vs. White
  misc_feature: MA Experiment 20001451 PARAMETER Experiment Name: At_Far-red-induction_P Parameter: Organism Value: A. thaliana
  misc_feature: MA Experiment 20001451 PARAMETER Experiment Name: At_Far-red-induction_P Parameter: Plant Line Value: Columbia
  misc_feature: MA Experiment 20001451 PARAMETER Experiment Name: At_Far-red-induction_P Parameter: Timepoint (hr) Value: 24
  misc_feature: MA Experiment 20001451 PARAMETER Experiment Name: At_Far-red-induction_P Parameter: Tissue Value: Whole Plant
  misc_feature: MA Experiment ID: 20001757 Result: Up-regulated in Transcription
  misc_feature: MA Experiment 20001757 PARAMETER Experiment Name: At_50mM_NH4NO3_L-to-H_P Parameter: Timepoint (hr) Value: 6
  misc_feature: MA Experiment 20001757 PARAMETER Experiment Name: At_50mM_NH4NO3_L-to-H_P Parameter: Tissue Value: Leaf
  misc_feature: MA Experiment 20001757 PARAMETER Experiment Name: At_50mM_NH4NO3_L-to-H_P Parameter: Treatment Value: 50mM NH4NO3 vs 100mM Mannitol
  misc_feature: MA Experiment ID: 20001904 Result: Down-regulated in Transcription
  misc_feature: MA Experiment 20001904 PARAMETER Experiment Name: At_Drought_Reproduction_P Parameter: Age (day) Value: 37
  misc_feature: MA Experiment 20001904 PARAMETER Experiment Name: At_Drought_Reproduction_P Parameter: Organism Value: A. thaliana
  misc_feature: MA Experiment 20001904 PARAMETER Experiment Name: At_Drought_Reproduction_P Parameter: Plant Line Value: WS
  misc_feature: MA Experiment 20001904 PARAMETER Experiment Name: At_Drought_Reproduction_P Parameter: Timepoint (day) Value: 7
  misc_feature: MA Experiment 20001904 PARAMETER Experiment Name: At_Drought_Reproduction_P Parameter: Tissue Value: Rosettes
  misc_feature: MA Experiment 20001904 PARAMETER Experiment Name: At_Drought_Reproduction_P Parameter: Treatment Value: Drought vs. No Drought
  misc_feature: MA Experiment ID: 20001905 Result: Down-regulated in Transcription
  misc_feature: MA Experiment 20001905 PARAMETER Experiment Name: At_Drought_Reproduction_P Parameter: Age (day) Value: 40
  misc_feature: MA Experiment 20001905 PARAMETER Experiment Name: At_Drought_Reproduction_P Parameter: Organism Value: A. thaliana
  misc_feature: MA Experiment 20001905 PARAMETER Experiment Name: At_Drought_Reproduction_P Parameter: Plant Line Value: WS
  misc_feature: MA Experiment 20001905 PARAMETER Experiment Name: At_Drought_Reproduction_P Parameter: Timepoint (day) Value: 10
  misc_feature: MA Experiment 20001905 PARAMETER Experiment Name: At_Drought_Reproduction_P Parameter: Tissue Value: Rosettes
  misc_feature: MA Experiment 20001905 PARAMETER Experiment Name: At_Drought_Reproduction_P Parameter: Treatment Value: Drought vs. No Drought
  misc_feature: MA Experiment ID: 20001906 Result: Down-regulated in Transcription
  misc_feature: MA Experiment 20001906 PARAMETER Experiment Name: At_Drought_Reproduction_P Parameter: Age (day) Value: 35
  misc_feature: MA Experiment 20001906 PARAMETER Experiment Name: At_Drought_Reproduction_P Parameter: Organism Value: A. thaliana
  misc_feature: MA Experiment 20001906 PARAMETER Experiment Name: At_Drought_Reproduction_P Parameter: Plant Line Value: WS
  misc_feature: MA Experiment 20001906 PARAMETER Experiment Name: At_Drought_Reproduction_P Parameter: Timepoint (day) Value: 5
  misc_feature: MA Experiment 20001906 PARAMETER Experiment Name: At_Drought_Reproduction_P Parameter: Tissue Value: Siliques
  misc_feature: MA Experiment 20001906 PARAMETER Experiment Name: At_Drought_Reproduction_P Parameter: Treatment Value: Drought vs. No Drought
aaacctaatctcatcaccttctcttccctccactcaaatctctcctctcttctttcttcttcttcaatacaatacaatcaaaagaacagagagataaggttagagcaaaacactgtctgaaacaaacaacaaaaaaatggcttgctctaatctaacaacaatgtgggtttcatcaaaaccatctctttctgctgattcatcttccttatcattccgatctgttctcaagtgcccaactaacacttcctcacctccttcacgagcttcctctgtttcaccactccaagcgtctcttcgtgagctcagagaccgtatcgattcagtcaaaaacactcaaaagatcaccgaagctatgaagcttgtcgctgcagctaaagtcaggagagctcaagaagctgttgtcaatggacgaccattctcagaaaccctagttgaagttctttacaacatcaacgaacagcttcaaaccgatgatgtcgatgttcccttaaccaaagtcagaccggttaagaaagtagctctcgttgtcgtcaccggtgatcgtggattatgtggtggattcaacaatttcatcattaagaaagcagaggcaagaatcaaagagcttaaaggtctaggtcttgaatacacagtcattagcgtgggcaagaagggaaattcttatttcctccgtcgcccgtacatccccgtcgacaaatacctagaagccggaactttacctacggctaaagaagctcaagctgtggctgatgatgtcttctctctgtttataagtgaagaagtcgacaaagtcgagctcttgtacacaaagtttgtctctttggtcaaatcagaacccgtgatccacacgctactgcctttatcacctaaaggagagatctgtgacattaatggaacctgtgtggatgctgcggaagatgagtttttcaggttaacgacaaaagaagggaaattgacagttgaaagagagacttttaggacaccaacagctgatttctcgccgatcttgcaattcgagcaagaccctgttcagattcttgatgctttgttgcctctgtatcttaacagtcagattcttagggcattacaggagtcattggctagtgagcttgcagctagaatgagtgcaatgagtagtgcttcggataatgcatcggatctcaagaaatcgctttcgatggtgtataatagaaagcgtcaagctaagattactggagagattcttgagattgttgctggagctaatgcacaggtttgatttgttttgaaccctctttgaatcttctatatgagtccaaaactctcttcttcttctttttttttcgttatcgtttgtataatgtataattgataatctctagaactctttataatcatgcaattacaaacaaaaacgcggttgtatctattttggcttttcattggataaaatgatggagatcttcgttgaatatttgtggatgatgaagagtttttgtaggatcctttggaggaataagattttggtttctttggttg

SEQ ID NO: 27562 - protein, 373 aa, Arabidopsis thaliana
  peptide (1)..(373): Ceres Seq. ID no. 12466441
  misc_feature (51)..(372): Pfam Name: ATP synthase Pfam Description: ATP synthase
  misc_feature (40)..(371): Homolog of NCBI NO: 228698 NR Description: CF1 ATP synthase:SUBUNIT=gamma
  misc_feature (40)..(371): Homolog of NCBI NO: 114638 NR Description: ATP synthase gamma chain, chloroplast precursor
  misc_feature (5)..(371): Homolog of NCBI NO: 15218281 NR Description: ATP synthase gamma-subunit, putative
  misc_feature (1)..(371): Homolog of NCBI NO: 27818005 NR Description: OSJNBb0041J06.11 [Oryza sativa (japonica
  misc_feature (47)..(373): Homolog of NCBI NO: 755801 NR Description: ATP synthase [Spinacia oleracea]
  misc_feature (23)..(373): Homolog of NCBI NO: 114643 NR Description: ATP synthase gamma chain, chloroplast precursor
  misc_feature (1)..(368): Homolog of NCBI NO: 114640 NR Description: ATP synthase gamma chain, chloroplast precursor
  misc_feature (73)..(373): Homolog of NCBI NO: 5708095 NR Description: ATP synthase gamma chain, chloroplast precursor
  misc_feature (1)..(373): Homolog of NCBI NO: 231610 NR Description: ATP synthase gamma chain, chloroplast precursor
  misc_feature (1)..(373): Homolog of NCBI NO: 18412632 NR Description: coded for by A. thaliana cDNA AA041141
MACSNLTTMWVSSKPSLSADSSSLSFRSVLKCPTNTSSPPSRASSVSPLQASLRELRDRIDSVKNTQKITEAMKLVAAAKVRRAQEAVVNGRPFSETLVEVLYNINEQLQTDDVDVPLTKVRPVKKVALVVVTGDRGLCGGFNNFIIKKAEARIKELKGLGLEYTVISVGKKGNSYFLRRPYIPVDKYLEAGTLPTAKEAQAVADDVFSLFISEEVDKVELLYTKFVSLVKSEPVIHTLLPLSPKGEICDINGTCVDAAEDEFFRLTTKEGKLTVERETFRTPTADFSPILQFEQDPVQILDALLPLYLNSQILRALQESLASELAARMSAMSSASDNASDLKKSLSMVYNRKRQAKITGEILEIVAGANAQV

SEQ ID NO: 27563 - protein, 365 aa, Arabidopsis thaliana
  peptide (1)..(365): Ceres Seq. ID no. 12466442
  misc_feature (43)..(364): Pfam Name: ATP synthase Pfam Description: ATP synthase
  misc_feature (32)..(363): Homolog of NCBI NO: 228698 NR Description: CF1 ATP synthase:SUBUNIT=gamma
  misc_feature (32)..(363): Homolog of NCBI NO: 114638 NR Description: ATP synthase gamma chain, chloroplast precursor
  misc_feature (1)..(363): Homolog of NCBI NO: 15218281 NR Description: ATP synthase gamma-subunit, putative
  misc_feature (1)..(363): Homolog of NCBI NO: 27818005 NR Description: OSJNBb0041J06.11 [Oryza sativa (japonica
  misc_feature (39)..(365): Homolog of NCBI NO: 755801 NR Description: ATP synthase [Spinacia oleracea]
  misc_feature (15)..(365): Homolog of NCBI NO: 114643 NR Description: ATP synthase gamma chain, chloroplast precursor
  misc_feature (1)..(360): Homolog of NCBI NO: 114640 NR Description: ATP synthase gamma chain, chloroplast precursor
  misc_feature (65)..(365): Homolog of NCBI NO: 5708095 NR Description: ATP synthase gamma chain, chloroplast precursor
  misc_feature (1)..(365): Homolog of NCBI NO: 231610 NR Description: ATP synthase gamma chain, chloroplast precursor
  misc_feature (1)..(365): Homolog of NCBI NO: 18412632 NR Description: coded for by A. thaliana cDNA AA041141
MWVSSKPSLSADSSSLSFRSVLKCPTNTSSPPSRASSVSPLQASLRELRDRIDSVKNTQKITEAMKLVAAAKVRRAQEAVVNGRPFSETLVEVLYNINEQLQTDDVDVPLTKVRPVKKVALVVVTGDRGLCGGFNNFIIKKAEARIKELKGLGLEYTVISVGKKGNSYFLRRPYIPVDKYLEAGTLPTAKEAQAVADDVFSLFISEEVDKVELLYTKFVSLVKSEPVIHTLLPLSPKGEICDINGTCVDAAEDEFFRLTTKEGKLTVERETFRTPTADFSPILQFEQDPVQILDALLPLYLNSQILRALQESLASELAARMSAMSSASDNASDLKKSLSMVYNRKRQAKITGEILEIVAGANAQV

SEQ ID NO: 27564 - protein, 301 aa, Arabidopsis thaliana
  peptide (1)..(301): Ceres Seq. ID no. 12466443
  misc_feature (1)..(300): Pfam Name: ATP synthase Pfam Description: ATP synthase
  misc_feature (1)..(299): Homolog of NCBI NO: 228698 NR Description: CF1 ATP synthase:SUBUNIT=gamma
  misc_feature (1)..(299): Homolog of NCBI NO: 114638 NR Description: ATP synthase gamma chain, chloroplast precursor
  misc_feature (1)..(299): Homolog of NCBI NO: 15218281 NR Description: ATP synthase gamma-subunit, putative
  misc_feature (1)..(299): Homolog of NCBI NO: 27818005 NR Description: OSJNBb0041J06.11 [Oryza sativa (japonica
  misc_feature (1)..(301): Homolog of NCBI NO: 755801 NR Description: ATP synthase [Spinacia oleracea]
  misc_feature (1)..(301): Homolog of NCBI NO: 114643 NR Description: ATP synthase gamma chain, chloroplast precursor
  misc_feature (1)..(296): Homolog of NCBI NO: 114640 NR Description: ATP synthase gamma chain, chloroplast precursor
  misc_feature (1)..(301): Homolog of NCBI NO: 5708095 NR Description: ATP synthase gamma chain, chloroplast precursor
  misc_feature (1)..(301): Homolog of NCBI NO: 231610 NR Description: ATP synthase gamma chain, chloroplast precursor
  misc_feature (1)..(301): Homolog of NCBI NO: 18412632 NR Description: coded for by A. thaliana cDNA AA041141
MKLVAAAKVRRAQEAVVNGRPFSETLVEVLYNINEQLQTDDVDVPLTKVRPVKKVALVVVTGDRGLCGGFNNFIIKKAEARIKELKGLGLEYTVISVGKKGNSYFLRRPYIPVDKYLEAGTLPTAKEAQAVADDVFSLFISEEVDKVELLYTKFVSLVKSEPVIHTLLPLSPKGEICDINGTCVDAAEDEFFRLTTKEGKLTVERETFRTPTADFSPILQFEQDPVQILDALLPLYLNSQILRALQESLASELAARMSAMSSASDNASDLKKSLSMVYNRKRQAKITGEILEIVAGANAQV

SEQ ID NO: 27565 - DNA, 1234 bp, Arabidopsis thaliana
  misc_feature (1)..(1234): Ceres Seq. ID no. 12581463
  misc_feature: MA Experiment ID: 108434 Result: Down-regulated in Transcription
  misc_feature: MA Experiment 108434 PARAMETER Experiment Name: At_Root_Tips_cDNA_P Parameter: Tissue Value: Root Tips
  misc_feature: MA Experiment ID: 108462 Result: Up-regulated in Transcription
  misc_feature: MA Experiment 108462 PARAMETER Experiment Name: At_Germinating_Seeds_cDNA_P Parameter: Age (day) Value: 2 vs. 0
  misc_feature: MA Experiment 108462 PARAMETER Experiment Name: At_Germinating_Seeds_cDNA_P Parameter: Tissue Value: Germinating Seeds
  misc_feature: MA Experiment ID: 108463 Result: Up-regulated in Transcription
  misc_feature: MA Experiment 108463 PARAMETER Experiment Name: At_Germinating_Seeds_cDNA_P Parameter: Age (day) Value: 3 vs. 0
  misc_feature: MA Experiment 108463 PARAMETER Experiment Name: At_Germinating_Seeds_cDNA_P Parameter: Tissue Value: Germinating Seeds
  misc_feature: MA Experiment ID: 108464 Result: Up-regulated in Transcription
  misc_feature: MA Experiment 108464 PARAMETER Experiment Name: At_Germinating_Seeds_cDNA_P Parameter: Age (day) Value: 4 vs. 0
  misc_feature: MA Experiment 108464 PARAMETER Experiment Name: At_Germinating_Seeds_cDNA_P Parameter: Tissue Value: Germinating Seeds
  misc_feature: MA Experiment ID: 108561 Result: Up-regulated in Transcription
  misc_feature: MA Experiment 108561 PARAMETER Experiment Name: At_100uM_ABA_cDNA_P Parameter: Timepoint (hr) Value: 6
  misc_feature: MA Experiment 108561 PARAMETER Experiment Name: At_100uM_ABA_cDNA_P Parameter: Tissue Value: Aerial
  misc_feature: MA Experiment 108561 PARAMETER Experiment Name: At_100uM_ABA_cDNA_P Parameter: Treatment Value: 100uM ABA vs. No Treatment
  misc_feature: MA Experiment ID: 108569 Result: Up-regulated in Transcription
  misc_feature: MA Experiment 108569 PARAMETER Experiment Name: At_0.001%_MeJA__cDNA_P Parameter: Timepoint (hr) Value: 6
  misc_feature: MA Experiment 108569 PARAMETER Experiment Name: At_0.001%_MeJA__cDNA_P Parameter: Tissue Value: Aerial
  misc_feature: MA Experiment 108569 PARAMETER Experiment Name: At_0.001%_MeJA__cDNA_P Parameter: Treatment Value: 0.001% MeJA vs. No Treatment
  misc_feature: MA Experiment ID: 108572 Result: Up-regulated in Transcription
  misc_feature: MA Experiment 108572 PARAMETER Experiment Name: At_Drought_cDNA_P Parameter: Timepoint (hr) Value: 1
  misc_feature: MA Experiment 108572 PARAMETER Experiment Name: At_Drought_cDNA_P Parameter: Tissue Value: Aerial
  misc_feature: MA Experiment 108572 PARAMETER Experiment Name: At_Drought_cDNA_P Parameter: Treatment Value: Drought vs. No Drought
  misc_feature: MA Experiment ID: 108573 Result: Up-regulated in Transcription
  misc_feature: MA Experiment 108573 PARAMETER Experiment Name: At_Drought_cDNA_P Parameter: Timepoint (hr) Value: 6
  misc_feature: MA Experiment 108573 PARAMETER Experiment Name: At_Drought_cDNA_P Parameter: Tissue Value: Aerial
  misc_feature: MA Experiment 108573 PARAMETER Experiment Name: At_Drought_cDNA_P Parameter: Treatment Value: Drought vs. No Drought
  misc_feature: MA Experiment ID: 108577 Result: Up-regulated in Transcription
  misc_feature: MA Experiment 108577 PARAMETER Experiment Name: At_42deg_Heat_cDNA_P Parameter: Temperature (deg C) Value: 42 vs. 22
  misc_feature: MA Experiment 108577 PARAMETER Experiment Name: At_42deg_Heat_cDNA_P Parameter: Timepoint (hr) Value: 6
  misc_feature: MA Experiment 108577 PARAMETER Experiment Name: At_42deg_Heat_cDNA_P Parameter: Tissue Value: Aerial
  misc_feature: MA Experiment ID: 108594 Result: Down-regulated in Transcription
  misc_feature: MA Experiment 108594 PARAMETER Experiment Name: At_Ler-rhl_Root_cDNA_P Parameter: Plant Line Value: null
  misc_feature: MA Experiment ID: 108595 Result: Down-regulated in Transcription
  misc_feature: MA Experiment 108595 PARAMETER Experiment Name: At_Ler-pi_Ovule_cDNA_P Parameter: Plant Line Value: null
  misc_feature: MA Experiment ID: 108668 Result: Up-regulated in Transcription
  misc_feature: MA Experiment 108668 PARAMETER Experiment Name: At_2mM_SA_cDNA_P Parameter: Plant Line Value: WS
  misc_feature: MA Experiment 108668 PARAMETER Experiment Name: At_2mM_SA_cDNA_P Parameter: Timepoint (hr) Value: 6
  misc_feature: MA Experiment 108668 PARAMETER Experiment Name: At_2mM_SA_cDNA_P Parameter: Treatment Value: 2mM SA vs. No Treatment
  misc_feature: MA Experiment ID: 20000089 Result: Down-regulated in Transcription
  misc_feature: MA Experiment ID: 20000113 Result: Up-regulated in Transcription
  misc_feature: MA Experiment 20000113 PARAMETER Experiment Name: At_42deg_Heat_cDNA_P Parameter: Temperature (deg C) Value: 42 vs. 22
  misc_feature: MA Experiment 20000113 PARAMETER Experiment Name: At_42deg_Heat_cDNA_P Parameter: Timepoint (hr) Value: 8
  misc_feature: MA Experiment 20000113 PARAMETER Experiment Name: At_42deg_Heat_cDNA_P Parameter: Tissue Value: Aerial
  misc_feature: MA Experiment ID: 20000169 Result: Up-regulated in Transcription
  misc_feature: MA Experiment 20000169 PARAMETER Experiment Name: At_100uM_ABA_P Parameter: Age (day) Value: 14
  misc_feature: MA Experiment 20000169 PARAMETER Experiment Name: At_100uM_ABA_P Parameter: Organism Value: A. thaliana
  misc_feature: MA Experiment 20000169 PARAMETER Experiment Name: At_100uM_ABA_P Parameter: Plant Line Value: WS
  misc_feature: MA Experiment 20000169 PARAMETER Experiment Name: At_100uM_ABA_P Parameter: Timepoint (hr) Value: 6
  misc_feature: MA Experiment 20000169 PARAMETER Experiment Name: At_100uM_ABA_P Parameter: Tissue Value: Aerial
  misc_feature: MA Experiment 20000169 PARAMETER Experiment Name: At_100uM_ABA_P Parameter: Treatment Value: 100uM ABA vs. No Treatment
  misc_feature: MA Experiment ID: 20000180 Result: Up-regulated in Transcription
  misc_feature: MA Experiment 20000180 PARAMETER Experiment Name: At_Germinating_Seeds_P Parameter: Age (hr) Value: 24 vs. 0
  misc_feature: MA Experiment 20000180 PARAMETER Experiment Name: At_Germinating_Seeds_P Parameter: Tissue Value: Germinating Seeds
  misc_feature: MA Experiment ID: 20000182 Result: Up-regulated in Transcription
  misc_feature: MA Experiment 20000182 PARAMETER Experiment Name: At_2mM_SA_P Parameter: Age (day) Value: 14
  misc_feature: MA Experiment 20000182 PARAMETER Experiment Name: At_2mM_SA_P Parameter: Organism Value: A. thaliana
  misc_feature: MA Experiment 20000182 PARAMETER Experiment Name: At_2mM_SA_P Parameter: Plant Line Value: WS
  misc_feature: MA Experiment 20000182 PARAMETER Experiment Name: At_2mM_SA_P Parameter: Timepoint (hr) Value: 6
  misc_feature: MA Experiment 20000182 PARAMETER Experiment Name: At_2mM_SA_P Parameter: Tissue Value: Aerial
  misc_feature: MA Experiment 20000182 PARAMETER Experiment Name: At_2mM_SA_P Parameter: Treatment Value: 2mM SA vs. No Treatment
  misc_feature: MA Experiment ID: 20000234 Result: Down-regulated in Transcription
  misc_feature: MA Experiment 20000234 PARAMETER Experiment Name: At_Siliques_P Parameter: Age (day) Value: 21
  misc_feature: MA Experiment 20000234 PARAMETER Experiment Name: At_Siliques_P Parameter: Organism Value: A. thaliana
  misc_feature: MA Experiment 20000234 PARAMETER Experiment Name: At_Siliques_P Parameter: Plant Line Value: WS
  misc_feature: MA Experiment 20000234 PARAMETER Experiment Name: At_Siliques_P Parameter: Tissue Value: Less Than 5mm Siliques vs. Whole Plant
  misc_feature: MA Experiment ID: 20000451 Result: Down-regulated in Transcription
  misc_feature: MA Experiment 20000451 PARAMETER Experiment Name: At_CS6879_Shoots-Roots_P Parameter: Age (day) Value: 14
  misc_feature: MA Experiment 20000451 PARAMETER Experiment Name: At_CS6879_Shoots-Roots_P Parameter: Organism Value: A. thaliana
  misc_feature: MA Experiment 20000451 PARAMETER Experiment Name: At_CS6879_Shoots-Roots_P Parameter: Plant Line Value: CS6879 vs. WS
  misc_feature: MA Experiment 20000451 PARAMETER Experiment Name: At_CS6879_Shoots-Roots_P Parameter: Tissue Value: Roots
  misc_feature: MA Experiment ID: 20000506 Result: Up-regulated in Transcription
  misc_feature: MA Experiment 20000506 PARAMETER Experiment Name: At_Wounding_P Parameter: Organism Value: A. thaliana
  misc_feature: MA Experiment 20000506 PARAMETER Experiment Name: At_Wounding_P Parameter: Plant Line Value: WS
  misc_feature: MA Experiment 20000506 PARAMETER Experiment Name: At_Wounding_P Parameter: Timepoint (hr) Value: 6
  misc_feature: MA Experiment 20000506 PARAMETER Experiment Name: At_Wounding_P Parameter: Tissue Value: Aerial
  misc_feature: MA Experiment 20000506 PARAMETER Experiment Name: At_Wounding_P Parameter: Treatment Value: Wounding vs. No Wounding
  misc_feature: MA Experiment ID: 20001247 Result: Up-regulated in Transcription
  misc_feature: MA Experiment 20001247 PARAMETER Experiment Name: At_Far-red-induction_P Parameter: Age (day) Value: 7
  misc_feature: MA Experiment 20001247 PARAMETER Experiment Name: At_Far-red-induction_P Parameter: Light Value: Far-red vs. White
  misc_feature: MA Experiment 20001247 PARAMETER Experiment Name: At_Far-red-induction_P Parameter: Organism Value: A. thaliana
  misc_feature: MA Experiment 20001247 PARAMETER Experiment Name: At_Far-red-induction_P Parameter: Plant Line Value: Columbia
  misc_feature: MA Experiment 20001247 PARAMETER Experiment Name: At_Far-red-induction_P Parameter: Timepoint (hr) Value: 1
  misc_feature: MA Experiment 20001247 PARAMETER Experiment Name: At_Far-red-induction_P Parameter: Tissue Value: Whole Plant
  misc_feature: MA Experiment ID: 20001450 Result: Up-regulated in Transcription
  misc_feature: MA Experiment 20001450 PARAMETER Experiment Name: At_Far-red-induction_P Parameter: Age (day) Value: 7
  misc_feature: MA Experiment 20001450 PARAMETER Experiment Name: At_Far-red-induction_P Parameter: Light Value: Far-red vs. White
  misc_feature: MA Experiment 20001450 PARAMETER Experiment Name: At_Far-red-induction_P Parameter: Organism Value: A. thaliana
  misc_feature: MA Experiment 20001450 PARAMETER Experiment Name: At_Far-red-induction_P Parameter: Plant Line Value: Columbia
  misc_feature: MA Experiment 20001450 PARAMETER Experiment Name: At_Far-red-induction_P Parameter: Timepoint (hr) Value: 8
  misc_feature: MA Experiment 20001450 PARAMETER Experiment Name: At_Far-red-induction_P Parameter: Tissue Value: Whole Plant
  misc_feature: MA Experiment ID: 20001556 Result: Down-regulated in Transcription
  misc_feature: MA Experiment 20001556 PARAMETER Experiment Name: At_Drought_Soil_Dry_P Parameter: Age (day) Value: 26
  misc_feature: MA Experiment 20001556 PARAMETER Experiment Name: At_Drought_Soil_Dry_P Parameter: Organism Value: A. thaliana
  misc_feature: MA Experiment 20001556 PARAMETER Experiment Name: At_Drought_Soil_Dry_P Parameter: Plant Line Value: WS
  misc_feature: MA Experiment 20001556 PARAMETER Experiment Name: At_Drought_Soil_Dry_P Parameter: Post Timepoint (hr) Value: None
  misc_feature: MA Experiment 20001556 PARAMETER Experiment Name: At_Drought_Soil_Dry_P Parameter: Post-Treatment Value: None
  misc_feature: MA Experiment 20001556 PARAMETER Experiment Name: At_Drought_Soil_Dry_P Parameter: Timepoint (day) Value: 12
  misc_feature: MA Experiment 20001556 PARAMETER Experiment Name: At_Drought_Soil_Dry_P Parameter: Treatment Value: Drought vs. No Drought
  misc_feature: MA Experiment ID: 20001559 Result: Down-regulated in Transcription
  misc_feature: MA Experiment 20001559 PARAMETER Experiment Name: At_Drought_Soil_Dry_P Parameter: Age (day) Value: 28
  misc_feature: MA Experiment 20001559 PARAMETER Experiment Name: At_Drought_Soil_Dry_P Parameter: Organism Value: A. thaliana
  misc_feature: MA Experiment 20001559 PARAMETER Experiment Name: At_Drought_Soil_Dry_P Parameter: Plant Line Value: WS
  misc_feature: MA Experiment 20001559 PARAMETER Experiment Name: At_Drought_Soil_Dry_P Parameter: Post Timepoint (hr) Value: 29
  misc_feature: MA Experiment 20001559 PARAMETER Experiment Name: At_Drought_Soil_Dry_P Parameter: Post-Treatment Value: Re-Water vs. No Drought
  misc_feature: MA Experiment 20001559 PARAMETER Experiment Name: At_Drought_Soil_Dry_P Parameter: Timepoint (day) Value: 14
  misc_feature: MA Experiment 20001559 PARAMETER Experiment Name: At_Drought_Soil_Dry_P Parameter: Treatment Value: Drought vs. No Drought
  misc_feature: MA Experiment ID: 20001905 Result: Down-regulated in Transcription
  misc_feature: MA Experiment 20001905 PARAMETER Experiment Name: At_Drought_Reproduction_P Parameter: Age (day) Value: 40
  misc_feature: MA Experiment 20001905 PARAMETER Experiment Name: At_Drought_Reproduction_P Parameter: Organism Value: A. thaliana
  misc_feature: MA Experiment 20001905 PARAMETER Experiment Name: At_Drought_Reproduction_P Parameter: Plant Line Value: WS
  misc_feature: MA Experiment 20001905 PARAMETER Experiment Name: At_Drought_Reproduction_P Parameter: Timepoint (day) Value: 10
  misc_feature: MA Experiment 20001905 PARAMETER Experiment Name: At_Drought_Reproduction_P Parameter: Tissue Value: Rosettes
  misc_feature: MA Experiment 20001905 PARAMETER Experiment Name: At_Drought_Reproduction_P Parameter: Treatment Value: Drought vs. No Drought
  misc_feature: MA Experiment ID: 20001907 Result: Down-regulated in Transcription
  misc_feature: MA Experiment 20001907 PARAMETER Experiment Name: At_Drought_Reproduction_P Parameter: Age (day) Value: 37
  misc_feature: MA Experiment 20001907 PARAMETER Experiment Name: At_Drought_Reproduction_P Parameter: Organism Value: A. thaliana
  misc_feature: MA Experiment 20001907 PARAMETER Experiment Name: At_Drought_Reproduction_P Parameter: Plant Line Value: WS
  misc_feature: MA Experiment 20001907 PARAMETER Experiment Name: At_Drought_Reproduction_P Parameter: Timepoint (day) Value: 7
  misc_feature: MA Experiment 20001907 PARAMETER Experiment Name: At_Drought_Reproduction_P Parameter: Tissue Value: Siliques
  misc_feature: MA Experiment 20001907 PARAMETER Experiment Name: At_Drought_Reproduction_P Parameter: Treatment Value: Drought vs. No Drought
  misc_feature: MA Experiment ID: 20001908 Result: Down-regulated in Transcription
  misc_feature: MA Experiment 20001908 PARAMETER Experiment Name: At_Drought_Reproduction_P Parameter: Age (day) Value: 40
  misc_feature: MA Experiment 20001908 PARAMETER Experiment Name: At_Drought_Reproduction_P Parameter: Organism Value: A. thaliana
  misc_feature: MA Experiment 20001908 PARAMETER Experiment Name: At_Drought_Reproduction_P Parameter: Plant Line Value: WS
  misc_feature: MA Experiment 20001908 PARAMETER Experiment Name: At_Drought_Reproduction_P Parameter: Timepoint (day) Value: 10
  misc_feature: MA Experiment 20001908 PARAMETER Experiment Name: At_Drought_Reproduction_P Parameter: Tissue Value: Siliques
  misc_feature: MA Experiment 20001908 PARAMETER Experiment Name: At_Drought_Reproduction_P Parameter: Treatment Value: Drought vs. No Drought
aacaaaattttatgttattgtcaatttgtcatcatcgtctttattttttatttctcaactttctttgcattacatcttccaactatataattaaccactctactttctcaaatcccacactcagagaagaagaagaagaaaaaaaacagagctttacaatttctctctacagagatcgaagatatggaaggcaaggaagaagacgttagagttggagctaacaagctcccggagagacaaccaatcggaacatcagctcagagtgacaaggactacaaggaaccaccaccagctccgtttttcgaacctggtgagctttcttcatggtctttttggagagctgggatcgctgagttcatcgctacttttctctttctctacatcactgtcttgactgttatgggagtgaaaaggtcaccgaacatgtgtgcttccgtcggaatccaaggaatcgcttgggctttcggtggtatgatatttgccttagtctactgtaccgctggtatctccggtggacacatcaacccagcggttacttttggtctgttcttagcccggaagctgtcgcttactagagctctgtactacatagtgatgcagtgcttgggagctatctgtggtgctggagtggttaaagggttccagcctaagcaataccaggctctaggaggaggagctaacactgtggctcatggttacaccaagggaagtggtcttggagctgagatcattggcacattcgttcttgtatacacagtcttctcagcaactgacgccaagagaaatgctcgtgactctcatgtccctattcttgcaccactcccaatcgggtttgcggttttcttggttcacttggcaaccatcccaatcactggcacaggcatcaacccagctagaagccttggagctgcaatcatctacaacaaagaccattcctgggatgaccactgggtgttttgggttggccccttcattggagctgcacttgctgctctttaccatgtggttgtcatcagagccatccccttcaagtccagaagctaagtaaaaacaagacatcaagtcctctggtttctggccttgtccttagttgcttctatagttctattgttgatctactacatgtatgtgtgcaatgtgtttatctatgtgccctcttaatgcaatatttgtaaacaaggaagaagttccaaaggagaattatttgcaaattatgatgtttaacatgtttatt

SEQ ID NO: 27566 - protein, 286 aa, Arabidopsis thaliana
  peptide (1)..(286): Ceres Seq. ID no. 12581464
  misc_feature (44)..(273): Pfam Name: Major intrinsic protein Pfam Description: Major intrinsic protein
  misc_feature (1)..(286): Homolog of NCBI NO: 7209556 NR Description: plasma membrane aquaporin 1b [Raphanus sativus]
  misc_feature (1)..(286): Homolog of NCBI NO: 4467357 NR Description: PIP1b protein [Arabidopsis thaliana]
  misc_feature (1)..(286): Homolog of NCBI NO: 1199804 NR Description: transmembrane channel protein [Brassica oleracea]
  misc_feature (1)..(286): Homolog of NCBI NO: 10799095 NR Description: aquaporin PIP1b2 [Brassica oleracea]
  misc_feature (1)..(286): Homolog of NCBI NO: 15225913 NR Description: aquaporin (plasma membrane intrinsic protein 1B)
  misc_feature (1)..(286): Homolog of NCBI NO: 10799093 NR Description: aquaporin PIP1b1 [Brassica oleracea]
  misc_feature (1)..(286): Homolog of NCBI NO: 3551131 NR Description: plasma membrane aquaporin (PAQ1) [Raphanus
  misc_feature (1)..(286): Homolog of NCBI NO: 21594059 NR Description: plasma membrane intrinsic protein 1a [Arabidopsis
  misc_feature (1)..(286): Homolog of NCBI NO: 472873 NR Description: plasma membrane intrinsic protein 1a [Arabidopsis
  misc_feature (1)..(286): Homolog of NCBI NO: 15233109 NR Description: plasma membrane intrinsic protein 1a
MEGKEEDVRVGANKLPERQPIGTSAQSDKDYKEPPPAPFFEPGELSSWSFWRAGIAEFIATFLFLYITVLTVMGVKRSPNMCASVGIQGIAWAFGGMIFALVYCTAGISGGHINPAVTFGLFLARKLSLTRALYYIVMQCLGAICGAGVVKGFQPKQYQALGGGANTVAHGYTKGSGLGAEIIGTFVLVYTVFSATDAKRNARDSHVPILAPLPIGFAVFLVHLATIPITGTGINPARSLGAAIIYNKDHSWDDHWVFWVGPFIGAALAALYHVVVIRAIPFKSRS

SEQ ID NO: 27567 - protein, 214 aa, Arabidopsis thaliana
  peptide (1)..(214): Ceres Seq. ID no. 12581465
  misc_feature (1)..(201): Pfam Name: Major intrinsic protein Pfam Description: Major intrinsic protein
  misc_feature (1)..(214): Homolog of NCBI NO: 7209556 NR Description: plasma membrane aquaporin 1b [Raphanus sativus]
  misc_feature (1)..(214): Homolog of NCBI NO: 4467357 NR Description: PIP1b protein [Arabidopsis thaliana]
  misc_feature (1)..(214): Homolog of NCBI NO: 1199804 NR Description: transmembrane channel protein [Brassica oleracea]
  misc_feature (1)..(214): Homolog of NCBI NO: 10799095 NR Description: aquaporin PIP1b2 [Brassica oleracea]
  misc_feature (1)..(214): Homolog of NCBI NO: 15225913 NR Description: aquaporin (plasma membrane intrinsic protein 1B)
  misc_feature (1)..(214): Homolog of NCBI NO: 10799093 NR Description: aquaporin PIP1b1 [Brassica oleracea]
  misc_feature (1)..(214): Homolog of NCBI NO: 3551131 NR Description: plasma membrane aquaporin (PAQ1) [Raphanus
  misc_feature (1)..(214): Homolog of NCBI NO: 21594059 NR Description: plasma membrane intrinsic protein 1a [Arabidopsis
  misc_feature (1)..(214): Homolog of NCBI NO: 472873 NR Description: plasma membrane intrinsic protein 1a [Arabidopsis
  misc_feature (1)..(214): Homolog of NCBI NO: 15233109 NR Description: plasma membrane intrinsic protein 1a
MGVKRSPNMCASVGIQGIAWAFGGMIFALVYCTAGISGGHINPAVTFGLFLARKLSLTRALYYIVMQCLGAICGAGVVKGFQPKQYQALGGGANTVAHGYTKGSGLGAEIIGTFVLVYTVFSATDAKRNARDSHVPILAPLPIGFAVFLVHLATIPITGTGINPARSLGAAIIYNKDHSWDDHWVFWVGPFIGAALAALYHVVVIRAIPFKSRS

SEQ ID NO: 27568 - protein, 206 aa, Arabidopsis thaliana
  peptide (1)..(206): Ceres Seq. ID no. 12581466
  misc_feature (1)..(193): Pfam Name: Major intrinsic protein Pfam Description: Major intrinsic protein
  misc_feature (1)..(206): Homolog of NCBI NO: 7209556 NR Description: plasma membrane aquaporin 1b [Raphanus sativus]
  misc_feature (1)..(206): Homolog of NCBI NO: 4467357 NR Description: PIP1b protein [Arabidopsis thaliana]
  misc_feature (1)..(206): Homolog of NCBI NO: 1199804 NR Description: transmembrane channel protein [Brassica oleracea]
  misc_feature (1)..(206): Homolog of NCBI NO: 10799095 NR Description: aquaporin PIP1b2 [Brassica oleracea]
  misc_feature (1)..(206): Homolog of NCBI NO: 15225913 NR Description: aquaporin (plasma membrane intrinsic protein 1B)
  misc_feature (1)..(206): Homolog of NCBI NO: 10799093 NR Description: aquaporin PIP1b1 [Brassica oleracea]
  misc_feature (1)..(206): Homolog of NCBI NO: 3551131 NR Description: plasma membrane aquaporin (PAQ1) [Raphanus
  misc_feature (1)..(206): Homolog of NCBI NO: 21594059 NR Description: plasma membrane intrinsic protein 1a [Arabidopsis
  misc_feature (1)..(206): Homolog of NCBI NO: 472873 NR Description: plasma membrane intrinsic protein 1a [Arabidopsis
  misc_feature (1)..(206): Homolog of NCBI NO: 15233109 NR Description: plasma membrane intrinsic protein 1a
MCASVGIQGIAWAFGGMIFALVYCTAGISGGHINPAVTFGLFLARKLSLTRALYYIVMQCLGAICGAGVVKGFQPKQYQALGGGANTVAHGYTKGSGLGAEIIGTFVLVYTVFSATDAKRNARDSHVPILAPLPIGFAVFLVHLATIPITGTGINPARSLGAAIIYNKDHSWDDHWVFWVGPFIGAALAALYHVVVIRAIPFKSRS

SEQ ID NO: 27569 - DNA, 1061 bp, Arabidopsis thaliana
  misc_feature (1)..(1061): Ceres Seq. ID no. 13489980
  misc_feature: MA Experiment ID: 108461 Result: Up-regulated in Transcription
  misc_feature: MA Experiment 108461 PARAMETER Experiment Name: At_Germinating_Seeds_cDNA_P Parameter: Age (day) Value: 1 vs. 0
  misc_feature: MA Experiment 108461 PARAMETER Experiment Name: At_Germinating_Seeds_cDNA_P Parameter: Tissue Value: Germinating Seeds
  misc_feature: MA Experiment ID: 108462 Result: Up-regulated in Transcription
  misc_feature: MA Experiment 108462 PARAMETER Experiment Name: At_Germinating_Seeds_cDNA_P Parameter: Age (day) Value: 2 vs. 0
  misc_feature: MA Experiment 108462 PARAMETER Experiment Name: At_Germinating_Seeds_cDNA_P Parameter: Tissue Value: Germinating Seeds
  misc_feature: MA Experiment ID: 108464 Result: Up-regulated in Transcription
  misc_feature: MA Experiment 108464 PARAMETER Experiment Name: At_Germinating_Seeds_cDNA_P Parameter: Age (day) Value: 4 vs. 0
  misc_feature: MA Experiment 108464 PARAMETER Experiment Name: At_Germinating_Seeds_cDNA_P Parameter: Tissue Value: Germinating Seeds
  misc_feature: MA Experiment ID: 108573 Result: Up-regulated in Transcription
  misc_feature: MA Experiment 108573 PARAMETER Experiment Name: At_Drought_cDNA_P Parameter: Timepoint (hr) Value: 6
  misc_feature: MA Experiment 108573 PARAMETER Experiment Name: At_Drought_cDNA_P Parameter: Tissue Value: Aerial
  misc_feature: MA Experiment 108573 PARAMETER Experiment Name: At_Drought_cDNA_P Parameter: Treatment Value: Drought vs. No Drought
  misc_feature: MA Experiment ID: 108579 Result: Down-regulated in Transcription
  misc_feature: MA Experiment 108579 PARAMETER Experiment Name: At_4deg_Cold_cDNA_P Parameter: Temperature (deg C) Value: 4 vs. 22
  misc_feature: MA Experiment 108579 PARAMETER Experiment Name: At_4deg_Cold_cDNA_P Parameter: Timepoint (hr) Value: 6
  misc_feature: MA Experiment 108579 PARAMETER Experiment Name: At_4deg_Cold_cDNA_P Parameter: Tissue Value: Aerial
  misc_feature: MA Experiment ID: 20000180 Result: Up-regulated in Transcription
  misc_feature: MA Experiment 20000180 PARAMETER Experiment Name: At_Germinating_Seeds_P Parameter: Age (hr) Value: 24 vs. 0
  misc_feature: MA Experiment 20000180 PARAMETER Experiment Name: At_Germinating_Seeds_P Parameter: Tissue Value: Germinating Seeds
  misc_feature: MA Experiment ID: 20000214 Result: Down-regulated in Transcription
  misc_feature: MA Experiment 20000214 PARAMETER Experiment Name: At_4deg_Cold_P Parameter: Timepoint (hr) Value: 6
  misc_feature: MA Experiment ID: 20000224 Result: Down-regulated in Transcription
  misc_feature: MA Experiment ID: 20000495 Result: Up-regulated in Transcription
  misc_feature: MA Experiment 20000495 PARAMETER Experiment Name: At_Guard_Cells_P Parameter: Harvest Date Value: 8/2/2002
  misc_feature: MA Experiment 20000495 PARAMETER Experiment Name: At_Guard_Cells_P Parameter: Organism Value: A. thaliana
  misc_feature: MA Experiment 20000495 PARAMETER Experiment Name: At_Guard_Cells_P Parameter: Tissue Value: Guard Cells vs. Leaves
  misc_feature: MA Experiment ID: 20001451 Result: Up-regulated in Transcription
  misc_feature: MA Experiment 20001451 PARAMETER Experiment Name: At_Far-red-induction_P Parameter: Age (day) Value: 7
  misc_feature: MA Experiment 20001451 PARAMETER Experiment Name: At_Far-red-induction_P Parameter: Light Value: Far-red vs. White
  misc_feature: MA Experiment 20001451 PARAMETER Experiment Name: At_Far-red-induction_P Parameter: Organism Value: A. thaliana
  misc_feature: MA Experiment 20001451 PARAMETER Experiment Name: At_Far-red-induction_P Parameter: Plant Line Value: Columbia
  misc_feature: MA Experiment 20001451 PARAMETER Experiment Name: At_Far-red-induction_P Parameter: Timepoint (hr) Value: 24
  misc_feature: MA Experiment 20001451 PARAMETER Experiment Name: At_Far-red-induction_P Parameter: Tissue Value: Whole Plant
  misc_feature: MA Experiment ID: 20001911 Result: Down-regulated in Transcription
  misc_feature: MA Experiment 20001911 PARAMETER Experiment Name: At_Drought_Reproduction_P Parameter: Age (day) Value: 40
  misc_feature: MA Experiment 20001911 PARAMETER Experiment Name: At_Drought_Reproduction_P Parameter: Organism Value: A. thaliana
  misc_feature: MA Experiment 20001911 PARAMETER Experiment Name: At_Drought_Reproduction_P Parameter: Plant Line Value: WS
  misc_feature: MA Experiment 20001911 PARAMETER Experiment Name: At_Drought_Reproduction_P Parameter: Timepoint (day) Value: 10
  misc_feature: MA Experiment 20001911 PARAMETER Experiment Name: At_Drought_Reproduction_P Parameter: Tissue Value: Flowers
  misc_feature: MA Experiment 20001911 PARAMETER Experiment Name: At_Drought_Reproduction_P Parameter: Treatment Value: Drought vs. No Drought
atggaactttaaaaaagttatgatgttatccaaggaagatggaaaaccctacacactaagcaaaaaataagatctttctctctctgacgacgcaatccctaatttctggttctccgttcgtcggcggagaagatgggattcctttccaataaaatctccagagacgatgtgaaaccaggcgatcacatctattcatggcgtcaagcctacatttacgctcatcacggaatctatgtaggtaatggacaagtcaaccattttactcgtggtgatggtcaagagactggaactgggactttcttggacaacatcattgttagttcatctcataatcatggagacaacccatgtcctgattgtggagatcgatccaatcttggcggtgttatatcttcctgccttgaatgtttccttgccggaggtgatctctatgtctttgagtacagtgtttcccctgctatctttcttgccaaacctcgaggcggcgtatgcactatagcatcttcagatcctccagaagaagtcatctatcgagcaaattttctcttgcaaaatggttttggtgtgtacaatgtcttcaagaacaactgtgaagattttgccatctattgcaaaacgggtttgctagtggcaaacaccgacgtgggaaggagtggtcaagctgcttcaattgttgcagctgccagtgttcttctttcttcaccactcaggtttgtagcaggttttggtggtttggctgtggctggctatggcatgtactgcaccagtcgcttagtttcagatataggcatgcgatgggatgtgagcaaggtgcctgttgagagactagttgctgatgtggcttgtatgtcggacatggaagctaaaccagaagatgagaagactacttaatccaaaactgctcacacctgtattaccatactggttgatctctgattgtaaatgttgtggcggaagtaagagaatctgcttctgctgtatcgtgttgtgcaacatttgtttatgtaattacgaaacttggcttttgattaacactgaactatgatgcttcattttattat

SEQ ID NO: 27570 - protein, 252 aa, Arabidopsis thaliana
  peptide (1)..(252): Ceres Seq. ID no. 13489981
  misc_feature (100)..(180): Pfam Name: NC domain Pfam Description: NC domain
  misc_feature (32)..(232): Homolog of NCBI NO: 9758417 NR Description: gb|AAF32477.1~gene_id:MHF15.11~similar to unknown
  misc_feature (1)..(236): Homolog of NCBI NO: 22328196 NR Description: expressed protein [Arabidopsis thaliana]
  misc_feature (1)..(250): Homolog of NCBI NO: 21592684 NR Description: unknown [Arabidopsis thaliana]
  misc_feature (1)..(250): Homolog of NCBI NO: 18378812 NR Description: expressed protein [Arabidopsis thaliana]
  misc_feature (1)..(232): Homolog of NCBI NO: 18415178 NR Description: expressed protein [Arabidopsis thaliana]
  misc_feature (1)..(233): Homolog of NCBI NO: 15237327 NR Description: hypothetical protein [Arabidopsis thaliana]
  misc_feature (179)..(245): Homolog of NCBI NO: 15237330 NR Description: expressed protein [Arabidopsis thaliana]
  misc_feature (1)..(187): Homolog of NCBI NO: 15237330 NR Description: expressed protein [Arabidopsis thaliana]
  misc_feature (1)..(252): Homolog of NCBI NO: 21594170 NR Description: unknown [Arabidopsis thaliana]
  misc_feature (1)..(252): Homolog of NCBI NO: 18396282 NR Description: expressed protein [Arabidopsis thaliana]
MGFLSNKISRDDVKPGDHIYSWRQAYIYAHHGIYVGNGQVNHFTRGDGQETGTGTFLDNIIVSSSHNHGDNPCPDCGDRSNLGGVISSCLECFLAGGDLYVFEYSVSPAIFLAKPRGGVCTIASSDPPEEVIYRANFLLQNGFGVYNVFKNNCEDFAIYCKTGLLVANTDVGRSGQAASIVAAASVLLSSPLRFVAGFGGLAVAGYGMYCTSRLVSDIGMRWDVSKVPVERLVADVACMSDMEAKPEDEKTT

SEQ ID NO: 27571 - DNA, 1952 bp, Arabidopsis thaliana
  misc_feature (1)..(1952): Ceres Seq. ID no. 12370661
  misc_feature: MA Experiment ID: 108501 Result: Up-regulated in Transcription
  misc_feature: MA Experiment 108501 PARAMETER Experiment Name: At_ap2_floral_buds_cDNA_P Parameter: Plant Line Value: ap2 (Ler.)
  misc_feature: MA Experiment 108501 PARAMETER Experiment Name: At_ap2_floral_buds_cDNA_P Parameter: Tissue Value: Closed Flower
  misc_feature: MA Experiment ID: 20000111 Result: Up-regulated in Transcription
  misc_feature: MA Experiment 20000111 PARAMETER Experiment Name: At_42deg_Heat_cDNA_P Parameter: Temperature (deg C) Value: 42 vs. 22
  misc_feature: MA Experiment 20000111 PARAMETER Experiment Name: At_42deg_Heat_cDNA_P Parameter: Timepoint (hr) Value: 6
  misc_feature: MA Experiment 20000111 PARAMETER Experiment Name: At_42deg_Heat_cDNA_P Parameter: Tissue Value: Aerial
  misc_feature: MA Experiment ID: 20000184 Result: Down-regulated in Transcription
  misc_feature: MA Experiment 20000184 PARAMETER Experiment Name: At_Shoots__P Parameter: Age (day) Value: 7
  misc_feature: MA Experiment 20000184 PARAMETER Experiment Name: At_Shoots__P Parameter: Tissue Value: Shoots vs. Whole Plant
  misc_feature: MA Experiment ID: 20000234 Result: Up-regulated in Transcription
  misc_feature: MA Experiment 20000234 PARAMETER Experiment Name: At_Siliques_P Parameter: Age (day) Value: 21
  misc_feature: MA Experiment 20000234 PARAMETER Experiment Name: At_Siliques_P Parameter: Organism Value: A. thaliana
  misc_feature: MA Experiment 20000234 PARAMETER Experiment Name: At_Siliques_P Parameter: Plant Line Value: WS
  misc_feature: MA Experiment 20000234 PARAMETER Experiment Name: At_Siliques_P Parameter: Tissue Value: Less Than 5mm Siliques vs. Whole Plant
  misc_feature: MA Experiment ID: 20000235 Result: Up-regulated in Transcription
  misc_feature: MA Experiment 20000235 PARAMETER Experiment Name: At_Siliques_P Parameter: Age (day) Value: 21
  misc_feature: MA Experiment 20000235 PARAMETER Experiment Name: At_Siliques_P Parameter: Organism Value: A. thaliana
  misc_feature: MA Experiment 20000235 PARAMETER Experiment Name: At_Siliques_P Parameter: Plant Line Value: WS
  misc_feature: MA Experiment 20000235 PARAMETER Experiment Name: At_Siliques_P Parameter: Tissue Value: 5-10mm Siliques vs. Whole Plant
  misc_feature: MA Experiment ID: 20000264 Result: Up-regulated in Transcription
  misc_feature: MA Experiment 20000264 PARAMETER Experiment Name: At_Open_Flower_P Parameter: Age (day) Value: 21
  misc_feature: MA Experiment 20000264 PARAMETER Experiment Name: At_Open_Flower_P Parameter: Plant Line Value: WS
  misc_feature: MA Experiment 20000264 PARAMETER Experiment Name: At_Open_Flower_P Parameter: Tissue Value: Open Flower vs. Whole Plant
  misc_feature: MA Experiment ID: 20000286 Result: Up-regulated in Transcription
  misc_feature: MA Experiment 20000286 PARAMETER Experiment Name: At_Open_Flower_P Parameter: Age (day) Value: 21
  misc_feature: MA Experiment 20000286 PARAMETER Experiment Name: At_Open_Flower_P Parameter: Plant Line Value: WS
  misc_feature: MA Experiment 20000286 PARAMETER Experiment Name: At_Open_Flower_P Parameter: Tissue Value: Half Open vs. Whole Plant
  misc_feature: MA Experiment ID: 20000439 Result: Down-regulated in Transcription
  misc_feature: MA Experiment 20000439 PARAMETER Experiment Name: At_Roots__P Parameter: Age (day) Value: 14 vs. 21
  misc_feature: MA Experiment 20000439 PARAMETER Experiment Name: At_Roots__P Parameter: Organism Value: A. thaliana
  misc_feature: MA Experiment 20000439 PARAMETER Experiment Name: At_Roots__P Parameter: Tissue Value: Roots vs. Whole Plant
  misc_feature: MA Experiment ID: 20000794 Result: Down-regulated in Transcription
  misc_feature: MA Experiment 20000794 PARAMETER Experiment Name: At_Petals_P Parameter: Age (day) Value: 23-25 days
  misc_feature: MA Experiment 20000794 PARAMETER Experiment Name: At_Petals_P Parameter: Plant Line Value: WS
  misc_feature: MA Experiment 20000794 PARAMETER Experiment Name: At_Petals_P Parameter: Tissue Value: Petals vs. Whole plant
attatattttgttaagtccactcttctctctcatatcttctaaccaaaacagagtcacaaggggctcttaagcccttccaactaaattcttttcttttgttctcttgaaactgaatccaccagacaaaaaaatgggggttgatggtgaactgaaaaagaagaaatgcatcattgctggggttatcacagccttgctcgttctcatggttgtcgctgttggcatcacaacatcaagaaacaccagtcattcagaaaaaatcgtccctgtgcagattaaaacagccaccacggcagttgaagcagtttgtgcacctactgattacaaagagacttgtgtcaatagtctcatgaaagcttctcctgactctactcagcctcttgatctcattaagcttggcttcaacgtcaccattcgatccatagaagatagcatcaagaaagcttccgtggagctgacagccaaggcagctaatgacaaggataccaaaggggctttggagttgtgtgagaagcttatgaatgatgctacagatgatctgaagaagtgtcttgataactttgatgggttctcaattcctcagattgaggactttgtcgaagatcttcgtgtttggcttagtggctccattgcttatcaacaaacatgtatggatacgtttgaagaaactaactcgaaactttcacaagacatgcagaaaatctttaaaacatctagagaactcactagtaatggccttgccatgattactaacatctctaaccttctcggagagttcaacgtcacaggagtaaccggggatctcggtaaatacgcaagaaaacttttgtcggcggaagacggtataccaagttgggttggaccaaacactagacggctcatggcaacgaaaggaggtgtgaaagctaacgtggtggttgcacacgacggaagtggtcagtacaagactatcaatgaagccttgaatgcagtgcctaaagccaaccaaaagccatttgttatctacattaagcaaggtgtctataacgagaaagttgacgtcaccaagaaaatgactcatgtcactttcatcggtgatggaccaaccaaaactaagatcactggtagtctcaactattacattggcaaggtcaagacataccttactgccactgttgcgatcaatggtgataacttcacggcgaagaacatcgggtttgaaaacactgcaggtcccgaaggacatcaagctgtggccctaagagtctcggcggatttggccgtcttctacaactgccaaatcgatggttaccaagacacactctacgtccattctcatcgtcaattcttccgtgactgcacagtctcgggcaccgttgacttcattttcggcgatggtatagtagtcttacaaaactgtaacattgttgtgagaaaacccatgaaaagtcagtcttgcatgatcacagcccaaggccgctccgataaacgtgaatccaccggactcgtgctacaaaactgccatattaccggagaaccagcgtatattcccgtaaaatctataaacaaagcatatcttggaaggccatggaaagagttttcaagaaccattataatgggaacaaccatagacgacgttattgatccagcgggatggcttccttggaatggtgattttgcacttaatacgctttactatgctgagtatgagaataatgggcctgggtcaaaccaagcccaacgtgttaagtggcctggaattaagaaactatcgcccaagcaagctcttcgatttactcctgctaggtttttacgtggtaacttgtggattccaccaaatcgtgtgccttacatggggaattttcagtagattccaattggtgaattttccactttctgtgtgctctttaaaaaaaaaaatgaaggtgaataatttatatgcgtgtcttgtcttaaagtcctgacttgccgaaac

SEQ ID NO: 27572 - protein, 571 aa, Arabidopsis thaliana
  peptide (1)..(571): Ceres Seq. ID no. 12370662
  misc_feature (259)..(556): Pfam Name: Pectinesterase Pfam Description: Pectinesterase
  misc_feature (30)..(568): Homolog of NCBI NO: 25313441 NR Description: pectinesterase (EC 3.1.1.11) [imported] - Salix
  misc_feature (2)..(566): Homolog of NCBI NO: 26451784 NR Description: putative pectinesterase [Arabidopsis thaliana]
  misc_feature (2)..(566): Homolog of NCBI NO: 15230019 NR Description: putative pectinesterase; protein id: At3g05610.1
  misc_feature (2)..(570): Homolog of NCBI NO: 15241079 NR Description: pectin methyl-esterase - like protein; protein
  misc_feature (11)..(217): Homolog of NCBI NO: 15234768 NR Description: pectinesterase family; protein id: At4g15980.1
  misc_feature (232)..(569): Homolog of NCBI NO: 15234768 NR Description: pectinesterase family; protein id: At4g15980.1
  misc_feature (1)..(566): Homolog of NCBI NO: 7549630 NR Description: pectin methylesterase, putative [Arabidopsis
  misc_feature (1)..(566): Homolog of NCBI NO: 39104585 NR Description: putative pectin methylesterase [Arabidopsis
  misc_feature (1)..(566): Homolog of NCBI NO: 22330893 NR Description: pectin methylesterase, putative; protein id:
  misc_feature (1)..(571): Homolog of NCBI NO: 15239814 NR Description: pectinesterase family
MGVDGELKKKKCIIAGVITALLVLMVVAVGITTSRNTSHSEKIVPVQIKTATTAVEAVCAPTDYKETCVNSLMKASPDSTQPLDLIKLGFNVTIRSIEDSIKKASVELTAKAANDKDTKGALELCEKLMNDATDDLKKCLDNFDGFSIPQIEDFVEDLRVWLSGSIAYQQTCMDTFEETNSKLSQDMQKIFKTSRELTSNGLAMITNISNLLGEFNVTGVTGDLGKYARKLLSAEDGIPSWVGPNTRRLMATKGGVKANVVVAHDGSGQYKTINEALNAVPKANQKPFVIYIKQGVYNEKVDVTKKMTHVTFIGDGPTKTKITGSLNYYIGKVKTYLTATVAINGDNFTAKNIGFENTAGPEGHQAVALRVSADLAVFYNCQIDGYQDTLYVHSHRQFFRDCTVSGTVDFIFGDGIVVLQNCNIVVRKPMKSQSCMITAQGRSDKRESTGLVLQNCHITGEPAYIPVKSINKAYLGRPWKEFSRTIIMGTTIDDVIDPAGWLPWNGDFALNTLYYAEYENNGPGSNQAQRVKWPGIKKLSPKQALRFTPARFLRGNLWIPPNRVPYMGNFQ

SEQ ID NO: 27573 - protein, 547 aa, Arabidopsis thaliana
  peptide (1)..(547): Ceres Seq. ID no. 12370663
  misc_feature (235)..(532): Pfam Name: Pectinesterase Pfam Description: Pectinesterase
  misc_feature (6)..(544): Homolog of NCBI NO: 25313441 NR Description: pectinesterase (EC 3.1.1.11) [imported] - Salix
  misc_feature (1)..(542): Homolog of NCBI NO: 26451784 NR Description: putative pectinesterase [Arabidopsis thaliana]
  misc_feature (1)..(542): Homolog of NCBI NO: 15230019 NR Description: putative pectinesterase; protein id: At3g05610.1
  misc_feature (1)..(546): Homolog of NCBI NO: 15241079 NR Description: pectin methyl-esterase - like protein; protein
  misc_feature (1)..(193): Homolog of NCBI NO: 15234768 NR Description: pectinesterase family; protein id: At4g15980.1
  misc_feature (208)..(545): Homolog of NCBI NO: 15234768 NR Description: pectinesterase family; protein id: At4g15980.1
  misc_feature (1)..(542): Homolog of NCBI NO: 7549630 NR Description: pectin methylesterase, putative [Arabidopsis
  misc_feature (1)..(542): Homolog of NCBI NO: 39104585 NR Description: putative pectin methylesterase [Arabidopsis
  misc_feature (1)..(542): Homolog of NCBI NO: 22330893 NR Description: pectin methylesterase, putative; protein id:
  misc_feature (1)..(547): Homolog of NCBI NO: 15239814 NR Description: pectinesterase family
MVVAVGITTSRNTSHSEKIVPVQIKTATTAVEAVCAPTDYKETCVNSLMKASPDSTQPLDLIKLGFNVTIRSIEDSIKKASVELTAKAANDKDTKGALELCEKLMNDATDDLKKCLDNFDGFSIPQIEDFVEDLRVWLSGSIAYQQTCMDTFEETNSKLSQDMQKIFKTSRELTSNGLAMITNISNLLGEFNVTGVTGDLGKYARKLLSAEDGIPSWVGPNTRRLMATKGGVKANVVVAHDGSGQYKTINEALNAVPKANQKPFVIYIKQGVYNEKVDVTKKMTHVTFIGDGPTKTKITGSLNYYIGKVKTYLTATVAINGDNFTAKNIGFENTAGPEGHQAVALRVSADLAVFYNCQIDGYQDTLYVHSHRQFFRDCTVSGTVDFIFGDGIVVLQNCNIVVRKPMKSQSCMITAQGRSDKRESTGLVLQNCHITGEPAYIPVKSINKAYLGRPWKEFSRTIIMGTTIDDVIDPAGWLPWNGDFALNTLYYAEYENNGPGSNQAQRVKWPGIKKLSPKQALRFTPARFLRGNLWIPPNRVPYMGNFQ

SEQ ID NO: 27574 - protein, 499 aa, Arabidopsis thaliana
  peptide (1)..(499): Ceres Seq. ID no. 12370664
  misc_feature (187)..(484): Pfam Name: Pectinesterase Pfam Description: Pectinesterase
  misc_feature (1)..(496): Homolog of NCBI NO: 25313441 NR Description: pectinesterase (EC 3.1.1.11) [imported] - Salix
  misc_feature (1)..(494): Homolog of NCBI NO: 26451784 NR Description: putative pectinesterase [Arabidopsis thaliana]
  misc_feature (1)..(494): Homolog of NCBI NO: 15230019 NR Description: putative pectinesterase; protein id: At3g05610.1
  misc_feature (1)..(498): Homolog of NCBI NO: 15241079 NR Description: pectin methyl-esterase - like protein; protein
  misc_feature (1)..(145): Homolog of NCBI NO: 15234768 NR Description: pectinesterase family; protein id: At4g15980.1
  misc_feature (160)..(497): Homolog of NCBI NO: 15234768 NR Description: pectinesterase family; protein id: At4g15980.1
  misc_feature (1)..(494): Homolog of NCBI NO: 7549630 NR Description: pectin methylesterase, putative [Arabidopsis
  misc_feature (1)..(494): Homolog of NCBI NO: 39104585 NR Description: putative pectin methylesterase [Arabidopsis
  misc_feature (1)..(494): Homolog of NCBI NO: 22330893 NR Description: pectin methylesterase, putative; protein id:
  misc_feature (1)..(499): Homolog of NCBI NO: 15239814 NR Description: pectinesterase family
MKASPDSTQPLDLIKLGFNVTIRSIEDSIKKASVELTAKAANDKDTKGALELCEKLMNDATDDLKKCLDNFDGFSIPQIEDFVEDLRVWLSGSIAYQQTCMDTFEETNSKLSQDMQKIFKTSRELTSNGLAMITNISNLLGEFNVTGVTGDLGKYARKLLSAEDGIPSWVGPNTRRLMATKGGVKANVVVAHDGSGQYKTINEALNAVPKANQKPFVIYIKQGVYNEKVDVTKKMTHVTFIGDGPTKTKITGSLNYYIGKVKTYLTATVAINGDNFTAKNIGFENTAGPEGHQAVALRVSADLAVFYNCQIDGYQDTLYVHSHRQFFRDCTVSGTVDFIFGDGIVVLQNCNIVVRKPMKSQSCMITAQGRSDKRESTGLVLQNCHITGEPAYIPVKSINKAYLGRPWKEFSRTIIMGTTIDDVIDPAGWLPWNGDFALNTLYYAEYENNGPGSNQAQRVKWPGIKKLSPKQALRFTPARFLRGNLWIPPNRVPYMGNFQ

SEQ ID NO: 27575 - DNA, 1420 bp, Arabidopsis thaliana
  misc_feature (1)..(1420): Ceres Seq. ID no. 12331583
  misc_feature: MA Experiment ID: 108576 Result: Up-regulated in Transcription
  misc_feature: MA Experiment 108576 PARAMETER Experiment Name: At_42deg_Heat_cDNA_P Parameter: Temperature (deg C) Value: 42 vs. 22
  misc_feature: MA Experiment 108576 PARAMETER Experiment Name: At_42deg_Heat_cDNA_P Parameter: Timepoint (hr) Value: 1
  misc_feature: MA Experiment 108576 PARAMETER Experiment Name: At_42deg_Heat_cDNA_P Parameter: Tissue Value: Aerial
  misc_feature: MA Experiment ID: 108595 Result: Down-regulated in Transcription
  misc_feature: MA Experiment 108595 PARAMETER Experiment Name: At_Ler-pi_Ovule_cDNA_P Parameter: Plant Line Value: null
  misc_feature: MA Experiment ID: 20000179 Result: Up-regulated in Transcription
  misc_feature: MA Experiment 20000179 PARAMETER Experiment Name: At_Germinating_Seeds_P Parameter: Age (hr) Value: 6 vs. 0
  misc_feature: MA Experiment 20000179 PARAMETER Experiment Name: At_Germinating_Seeds_P Parameter: Tissue Value: Germinating Seeds
  misc_feature: MA Experiment ID: 20000180 Result: Up-regulated in Transcription
  misc_feature: MA Experiment 20000180 PARAMETER Experiment Name: At_Germinating_Seeds_P Parameter: Age (hr) Value: 24 vs. 0
  misc_feature: MA Experiment 20000180 PARAMETER Experiment Name: At_Germinating_Seeds_P Parameter: Tissue Value: Germinating Seeds
  misc_feature: MA Experiment ID: 20000227 Result: Up-regulated in Transcription
  misc_feature: MA Experiment 20000227 PARAMETER Experiment Name: At_Root-Tips-vs-Tops_P Parameter: Tissue Value: Root Tips vs. Root Tops
  misc_feature: MA Experiment ID: 20000264 Result: Down-regulated in Transcription
  misc_feature: MA Experiment 20000264 PARAMETER Experiment Name: At_Open_Flower_P Parameter: Age (day) Value: 21
  misc_feature: MA Experiment 20000264 PARAMETER Experiment Name: At_Open_Flower_P Parameter: Plant Line Value: WS
  misc_feature: MA Experiment 20000264 PARAMETER Experiment Name: At_Open_Flower_P Parameter: Tissue Value: Open Flower vs. Whole Plant
  misc_feature: MA Experiment ID: 20000265 Result: Down-regulated in Transcription
  misc_feature: MA Experiment 20000265 PARAMETER Experiment Name: At_Open_Flower_P Parameter: Age (day) Value: 21
  misc_feature: MA Experiment 20000265 PARAMETER Experiment Name: At_Open_Flower_P Parameter: Plant Line Value: WS
  misc_feature: MA Experiment 20000265 PARAMETER Experiment Name: At_Open_Flower_P Parameter: Tissue Value: Closed Flower vs. Whole Plant
  misc_feature: MA Experiment ID: 20000286 Result: Down-regulated in Transcription
  misc_feature: MA Experiment 20000286 PARAMETER Experiment Name: At_Open_Flower_P Parameter: Age (day) Value: 21
  misc_feature: MA Experiment 20000286 PARAMETER Experiment Name: At_Open_Flower_P Parameter: Plant Line Value: WS
  misc_feature: MA Experiment 20000286 PARAMETER Experiment Name: At_Open_Flower_P Parameter: Tissue Value: Half Open vs. Whole Plant
  misc_feature: MA Experiment ID: 20000438 Result: Down-regulated in Transcription
  misc_feature: MA Experiment 20000438 PARAMETER Experiment Name: At_Shoots__P Parameter: Age (day) Value: 14
  misc_feature: MA Experiment 20000438 PARAMETER Experiment Name: At_Shoots__P Parameter: Tissue Value: Shoots vs. Whole Plant
  misc_feature: MA Experiment ID: 20000794 Result: Down-regulated in Transcription
  misc_feature: MA Experiment 20000794 PARAMETER Experiment Name: At_Petals_P Parameter: Age (day) Value: 23-25 days
  misc_feature: MA Experiment 20000794 PARAMETER Experiment Name: At_Petals_P Parameter: Plant Line Value: WS
  misc_feature: MA Experiment 20000794 PARAMETER Experiment Name: At_Petals_P Parameter: Tissue Value: Petals vs. Whole plant
  misc_feature: MA Experiment ID: 20001556 Result: Down-regulated in Transcription
  misc_feature: MA Experiment 20001556 PARAMETER Experiment Name: At_Drought_Soil_Dry_P Parameter: Age (day) Value: 26
  misc_feature: MA Experiment 20001556 PARAMETER Experiment Name: At_Drought_Soil_Dry_P Parameter: Organism Value: A. thaliana
  misc_feature: MA Experiment 20001556 PARAMETER Experiment Name: At_Drought_Soil_Dry_P Parameter: Plant Line Value: WS
  misc_feature: MA Experiment 20001556 PARAMETER Experiment Name: At_Drought_Soil_Dry_P Parameter: Post Timepoint (hr) Value: None
  misc_feature: MA Experiment 20001556 PARAMETER Experiment Name: At_Drought_Soil_Dry_P Parameter: Post-Treatment Value: None
  misc_feature: MA Experiment 20001556 PARAMETER Experiment Name: At_Drought_Soil_Dry_P Parameter: Timepoint (day) Value: 12
  misc_feature: MA Experiment 20001556 PARAMETER Experiment Name: At_Drought_Soil_Dry_P Parameter: Treatment Value: Drought vs. No Drought
  misc_feature: MA Experiment ID: 20001757 Result: Down-regulated in Transcription
  misc_feature: MA Experiment 20001757 PARAMETER Experiment Name: At_50mM_NH4NO3_L-to-H_P Parameter: Timepoint (hr) Value: 6
  misc_feature: MA Experiment 20001757 PARAMETER Experiment Name: At_50mM_NH4NO3_L-to-H_P Parameter: Tissue Value: Leaf
  misc_feature: MA Experiment 20001757 PARAMETER Experiment Name: At_50mM_NH4NO3_L-to-H_P Parameter: Treatment Value: 50mM NH4NO3 vs 100mM Mannitol
  misc_feature: MA Experiment ID: 20001773 Result: Up-regulated in Transcription
  misc_feature: MA Experiment 20001773 PARAMETER Experiment Name: At_Far-red-enriched-adult_P Parameter: Age (day) Value: 30
  misc_feature: MA Experiment 20001773 PARAMETER Experiment Name: At_Far-red-enriched-adult_P Parameter: Light Value: Far-red enriched vs. White
  misc_feature: MA Experiment 20001773 PARAMETER Experiment Name: At_Far-red-enriched-adult_P Parameter: Organism Value: A. thaliana
  misc_feature: MA Experiment 20001773 PARAMETER Experiment Name: At_Far-red-enriched-adult_P Parameter: Plant Line Value: Columbia
  misc_feature: MA Experiment 20001773 PARAMETER Experiment Name: At_Far-red-enriched-adult_P Parameter: Timepoint (hr) Value: 48
  misc_feature: MA Experiment 20001773 PARAMETER Experiment Name: At_Far-red-enriched-adult_P Parameter: Tissue Value: Aerial
  misc_feature: MA Experiment ID: 20001904 Result: Up-regulated in Transcription
  misc_feature: MA Experiment 20001904 PARAMETER Experiment Name: At_Drought_Reproduction_P Parameter: Age (day) Value: 37
  misc_feature: MA Experiment 20001904 PARAMETER Experiment Name: At_Drought_Reproduction_P Parameter: Organism Value: A. thaliana
  misc_feature: MA Experiment 20001904 PARAMETER Experiment Name: At_Drought_Reproduction_P Parameter: Plant Line Value: WS
  misc_feature: MA Experiment 20001904 PARAMETER Experiment Name: At_Drought_Reproduction_P Parameter: Timepoint (day) Value: 7
  misc_feature: MA Experiment 20001904 PARAMETER Experiment Name: At_Drought_Reproduction_P Parameter: Tissue Value: Rosettes
  misc_feature: MA Experiment 20001904 PARAMETER Experiment Name: At_Drought_Reproduction_P Parameter: Treatment Value: Drought vs. No Drought
  misc_feature: MA Experiment ID: 20001905 Result: Up-regulated in Transcription
  misc_feature: MA Experiment 20001905 PARAMETER Experiment Name: At_Drought_Reproduction_P Parameter: Age (day) Value: 40
  misc_feature: MA Experiment 20001905 PARAMETER Experiment Name: At_Drought_Reproduction_P Parameter: Organism Value: A. thaliana
  misc_feature: MA Experiment 20001905 PARAMETER Experiment Name: At_Drought_Reproduction_P Parameter: Plant Line Value: WS
  misc_feature: MA Experiment 20001905 PARAMETER Experiment Name: At_Drought_Reproduction_P Parameter: Timepoint (day) Value: 10
  misc_feature: MA Experiment 20001905 PARAMETER Experiment Name: At_Drought_Reproduction_P Parameter: Tissue Value: Rosettes
  misc_feature: MA Experiment 20001905 PARAMETER Experiment Name: At_Drought_Reproduction_P Parameter: Treatment Value: Drought vs. No Drought
gaagttcagacacctaggactataagtagacgatctcttattgtcttgtcttctcatcagacagacatcagatcagaagattttggtttcaagctcttcttctacgattccccgaagcttctggattgagatctctctctcaagcaatggcagctacaagtgagaaacagaacaccacaaagcctcctccttctccttctcctctccgcaattccaagttttgtcagcccaatatgaggatcttgatctctggaggagctggcttcattggttctcacttggatgataagcttatggaaaatgagaagaatgaggtggttgttgctgataactatttcactggctcaaaagaaaacctcaagaagtggatcggtcaccccaggtttgaacttattcgtcacgatgttaccgagcctttgttgatcgaggttgatcggatttaccatcttgcttgtcctgcctctcctatcttctacaaatacaaccctgttaagacaatcaagaccaatgtgattggtacactcaacatgctcggtcttgccaagcgtgttggagcaagaattttactaacctcaacctctgaagtgtatggagatcctctcatccaccctcaaccagagagctactggggaaatgtcaaccctattggggttcggagttgctatgacgaaggcaagcgggtagccgaaaccttgatgtttgactaccacagacaacatggcattgaaatccgcattgctagaatcttcaacacatatggtcctcgaatgaacatcgatgatgggcgtgttgtgagcaacttcattgctcaagcactccggggtgaggcattgacagttcagaaaccggggacacagacccgcagtttctgttatgtctccgacatggtggatggacttatccgtcttatggaaggcaatgatactggccctatcaacatcggtaacccaggtgagttcacaatggtggaactggctgagacggttaaggagcttattaacccaagcatagagataaagatggtggagaacacaccagatgatccaagacagaggaaaccagacattagtaaagccaaagaagtgttgggttgggagccaaaggtgaagctcagagaaggacttcctctcatggaagaagatttccgactaaggcttaacgtcccaagaaactaaaaccacaagaaaacacagacggttttgagttcacgagagttgtcagctgttgagttatatgatgatgctattatactacaaagtggtgggtttttgtttggtctcatgtgttattcatattgcttttgttcgtagaaaaataagttgggaatgggtctccttgtgaggaatggctcttctttgtttttcagtatattgtggtatggttattatttgtgtggttttaatgaaatttgttcacttag

SEQ ID NO: 27576 - protein, 342 aa, Arabidopsis thaliana
  peptide (1)..(342): Ceres Seq. ID no. 12331584
  misc_feature (32)..(338): Pfam Name: NAD dependent epimerase/dehydratase family Pfam Description: NAD dependent epimerase/dehydratase family
  misc_feature (30)..(337): Homolog of NCBI NO: 15227109 NR Description: putative dTDP-glucose 4-6-dehydratase; protein
  misc_feature (79)..(342): Homolog of NCBI NO: 2351580 NR Description: thymidine diphospho-glucose 4-6-dehydratase
  misc_feature (1)..(341): Homolog of NCBI NO: 11121508 NR Description: d-TDP-glucose dehydratase [Phragmites australis]
  misc_feature (4)..(341): Homolog of NCBI NO: 18447934 NR Description: UDP-glucuronic acid decarboxylase
  misc_feature (1)..(341): Homolog of NCBI NO: 11270075 NR Description: dTDPglucose 4,6-dehydratase (EC 4.2.1.46)
  misc_feature (1)..(342): Homolog of NCBI NO: 13591616 NR Description: UDP-D-glucuronate carboxy-lyase [Pisum sativum]
  misc_feature (1)..(341): Homolog of NCBI NO: 15226950 NR Description: putative nucleotide-sugar dehydratase
  misc_feature (3)..(342): Homolog of NCBI NO: 15231432 NR Description: dTDP-glucose 4-6-dehydratases-like protein
  misc_feature (1)..(342): Homolog of NCBI NO: 15237853 NR Description: dTDP-glucose 4-6-dehydratase - like protein
  misc_feature (1)..(342): Homolog of NCBI NO: 14030703 NR Description: AT5g59290/mnc17_180 [Arabidopsis thaliana]
MAATSEKQNTTKPPPSPSPLRNSKFCQPNMRILISGGAGFIGSHLDDKLMENEKNEVVVADNYFTGSKENLKKWIGHPRFELIRHDVTEPLLIEVDRIYHLACPASPIFYKYNPVKTIKTNVIGTLNMLGLAKRVGARILLTSTSEVYGDPLIHPQPESYWGNVNPIGVRSCYDEGKRVAETLMFDYHRQHGIEIRIARIFNTYGPRMNIDDGRVVSNFIAQALRGEALTVQKPGTQTRSFCYVSDMVDGLIRLMEGNDTGPINIGNPGEFTMVELAETVKELINPSIEIKMVENTPDDPRQRKPDISKAKEVLGWEPKVKLREGLPLMEEDFRLRLNVPRN

SEQ ID NO: 27577 - protein, 313 aa, Arabidopsis thaliana
  peptide (1)..(313): Ceres Seq. ID no. 12331585
  misc_feature (3)..(309): Pfam Name: NAD dependent epimerase/dehydratase family Pfam Description: NAD dependent epimerase/dehydratase family
  misc_feature (1)..(308): Homolog of NCBI NO: 15227109 NR Description: putative dTDP-glucose 4-6-dehydratase; protein
  misc_feature (50)..(313): Homolog of NCBI NO: 2351580 NR Description: thymidine diphospho-glucose 4-6-dehydratase
  misc_feature (1)..(312): Homolog of NCBI NO: 11121508 NR Description: d-TDP-glucose dehydratase [Phragmites australis]
  misc_feature (1)..(312): Homolog of NCBI NO: 18447934 NR Description: UDP-glucuronic acid decarboxylase
  misc_feature (1)..(312): Homolog of NCBI NO: 11270075 NR Description: dTDPglucose 4,6-dehydratase (EC 4.2.1.46)
  misc_feature (1)..(313): Homolog of NCBI NO: 13591616 NR Description: UDP-D-glucuronate carboxy-lyase [Pisum sativum]
  misc_feature (1)..(312): Homolog of NCBI NO: 15226950 NR Description: putative nucleotide-sugar dehydratase
  misc_feature (1)..(313): Homolog of NCBI NO: 15231432 NR Description: dTDP-glucose 4-6-dehydratases-like protein
  misc_feature (1)..(313): Homolog of NCBI NO: 15237853 NR Description: dTDP-glucose 4-6-dehydratase - like protein
  misc_feature (1)..(313): Homolog of NCBI NO: 14030703 NR Description: AT5g59290/mnc17_180 [Arabidopsis thaliana]
MRILISGGAGFIGSHLDDKLMENEKNEVVVADNYFTGSKENLKKWIGHPRFELIRHDVTEPLLIEVDRIYHLACPASPIFYKYNPVKTIKTNVIGTLNMLGLAKRVGARILLTSTSEVYGDPLIHPQPESYWGNVNPIGVRSCYDEGKRVAETLMFDYHRQHGIEIRIARIFNTYGPRMNIDDGRVVSNFIAQALRGEALTVQKPGTQTRSFCYVSDMVDGLIRLMEGNDTGPINIGNPGEFTMVELAETVKELINPSIEIKMVENTPDDPRQRKPDISKAKEVLGWEPKVKLREGLPLMEEDFRLRLNVPRN

SEQ ID NO: 27578 - protein, 293 aa, Arabidopsis thaliana
  peptide (1)..(293): Ceres Seq. ID no. 12331586
  misc_feature (1)..(289): Pfam Name: NAD dependent epimerase/dehydratase family Pfam Description: NAD dependent epimerase/dehydratase family
  misc_feature (1)..(288): Homolog of NCBI NO: 15227109 NR Description: putative dTDP-glucose 4-6-dehydratase; protein
  misc_feature (30)..(293): Homolog of NCBI NO: 2351580 NR Description: thymidine diphospho-glucose 4-6-dehydratase
  misc_feature (1)..(292): Homolog of NCBI NO: 11121508 NR Description: d-TDP-glucose dehydratase [Phragmites australis]
  misc_feature (1)..(292): Homolog of NCBI NO: 18447934 NR Description: UDP-glucuronic acid decarboxylase
  misc_feature (1)..(292): Homolog of NCBI NO: 11270075 NR Description: dTDPglucose 4,6-dehydratase (EC 4.2.1.46)
  misc_feature (1)..(293): Homolog of NCBI NO: 13591616 NR Description: UDP-D-glucuronate carboxy-lyase [Pisum sativum]
  misc_feature (1)..(292): Homolog of NCBI NO: 15226950 NR Description: putative nucleotide-sugar dehydratase
  misc_feature (1)..(293): Homolog of NCBI NO: 15231432 NR Description: dTDP-glucose 4-6-dehydratases-like protein
  misc_feature (1)..(293): Homolog of NCBI NO: 15237853 NR Description: dTDP-glucose 4-6-dehydratase - like protein
  misc_feature (1)..(293): Homolog of NCBI NO: 14030703 NR Description: AT5g59290/mnc17_180 [Arabidopsis thaliana]
MENEKNEVVVADNYFTGSKENLKKWIGHPRFELIRHDVTEPLLIEVDRIYHLACPASPIFYKYNPVKTIKTNVIGTLNMLGLAKRVGARILLTSTSEVYGDPLIHPQPESYWGNVNPIGVRSCYDEGKRVAETLMFDYHRQHGIEIRIARIFNTYGPRMNIDDGRVVSNFIAQALRGEALTVQKPGTQTRSFCYVSDMVDGLIRLMEGNDTGPINIGNPGEFTMVELAETVKELINPSIEIKMVENTPDDPRQRKPDISKAKEVLGWEPKVKLREGLPLMEEDFRLRLNVPRN

SEQ ID NO: 27579 - DNA, 1089 bp, Arabidopsis thaliana
  misc_feature (1)..(1089): Ceres Seq. ID no. 13488415
  misc_feature: MA Experiment ID: 108434 Result: Up-regulated in Transcription
  misc_feature: MA Experiment 108434 PARAMETER Experiment Name: At_Root_Tips_cDNA_P Parameter: Tissue Value: Root Tips
  misc_feature: MA Experiment ID: 108573 Result: Up-regulated in Transcription
  misc_feature: MA Experiment 108573 PARAMETER Experiment Name: At_Drought_cDNA_P Parameter: Timepoint (hr) Value: 6
  misc_feature: MA Experiment 108573 PARAMETER Experiment Name: At_Drought_cDNA_P Parameter: Tissue Value: Aerial
  misc_feature: MA Experiment 108573 PARAMETER Experiment Name: At_Drought_cDNA_P Parameter: Treatment Value: Drought vs. No Drought
aaaaacttgtctatgtatattaattaggaagcttgcagaaccacaaaaaaagacttttttgtcaattgattcgattcaagagttctttcaacgtttggagtagagagagtttaacctatttgaaagtctctgagaccggtgtggcatgacggtcgcggcgggtatcggctacgcgctggtggctttaggaccgtctctttcacttttcgtctccgtcatctccagaaagccctttctcatcctcactgttctctccagtacgttgctttggcttgtgagtctgatcatcttgtcgggattatggagaccatttcttcctctcaaagccaatgtgtggtggccttatgctgtacttgttatcacctctgtctgtttccaggaaggccttcgctttctcttctggaaggtctacaagaggcttgaggatgtcttggattcctttgcggatcgtatctcaaggccccgcctgtttctcactgataagctgcagattgctctagctggtggtttaggtcatggtgtggcgcatgctgtattcttttgtttgagcctcttaactccagcgtttggtccagccacattctatgtcgaaagatgttcgaaggtgccattttttctcatctctgcaatcattgctcttgcatttgttacgatccacacattctcgatggtcatcgctttcgaagggtatgcaaaagggaacaaagtagatcaaataatagttccagtcatacaccttactgctggaatgttgacattggtgaattttgcatcggaaggttgtgtgatcggcgttcctcttctttaccttgtggcatctttgactcttgtgcattgtggaaaaatggtttggcaaaggttgttggaaagccggaaccaaagcagcgcctcacggtaatctggcctcggtctcagaacaacaatagaacagtcgttaatatcattttatctcatgtcttggtttcttgcttgcaaatctcgtacgtctttatctcctaattgcttcgaaacttaaacccttatgttttcaaacgcacttatgatcctaaattatcaaaaaaaaaaacgaggaaattttatcattgaatc

SEQ ID NO: 27580 - protein, 250 aa, Arabidopsis thaliana
  peptide (1)..(250): Ceres Seq. ID no. 13488416
  misc_feature (1)..(110): Homolog of NCBI NO: 34864287 NR Description: similar to RIKEN cDNA 0610008A10 [Rattus
  misc_feature (1)..(248): Homolog of NCBI NO: 34858248 NR Description: similar to Aph1a-pending protein [Rattus
  misc_feature (1)..(207): Homolog of NCBI NO: 13775224 NR Description: presenilin stabilization factor-like [Homo
  misc_feature (1)..(207): Homolog of NCBI NO: 29243936 NR Description: hypothetical protein 4632417K02 [Mus musculus]
  misc_feature (1)..(207): Homolog of NCBI NO: 18088649 NR Description: hypothetical protein DKFZp564D0372 [Homo sapiens]
  misc_feature (1)..(227): Homolog of NCBI NO: 20129183 NR Description: presenilin stabilization factor CG2855-PA
  misc_feature (1)..(250): Homolog of NCBI NO: 18402667 NR Description: expressed protein [Arabidopsis thaliana]
  misc_feature (1)..(250): Homolog of NCBI NO: 21594204 NR Description: unknown [Arabidopsis thaliana]
MTVAAGIGYALVALGPSLSLFVSVISRKPFLILTVLSSTLLWLVSLIILSGLWRPFLPLKANVWWPYAVLVITSVCFQEGLRFLFWKVYKRLEDVLDSFADRISRPRLFLTDKLQIALAGGLGHGVAHAVFFCLSLLTPAFGPATFYVERCSKVPFFLISAIIALAFVTIHTFSMVIAFEGYAKGNKVDQIIVPVIHLTAGMLTLVNFASEGCVIGVPLLYLVASLTLVHCGKMVWQRLLESRNQSSASR

SEQ ID NO: 27581 - protein, 134 aa, Arabidopsis thaliana
  peptide (1)..(134): Ceres Seq. ID no. 13488417
  misc_feature (12)..(134): Homolog of NCBI NO: 25370758 NR Description: hypothetical protein At2g31440 [imported] -
MFEGAIFSHLCNHCSCICYDPHILDGHRFRRVCKREQSRSNNSSSHTPYCWNVDIGEFCIGRLCDRRSSSLPCGIFDSCALWKNGLAKVVGKPEPKQRLTVIWPRSQNNNRTVVNIILSHVLVSCLQISYVFIS

SEQ ID NO: 27582 - DNA, 825 bp, Arabidopsis thaliana
  misc_feature (1)..(825): Ceres Seq. ID no. 12384990
  misc_feature: MA Experiment ID: 108501 Result: Up-regulated in Transcription
  misc_feature: MA Experiment 108501 PARAMETER Experiment Name: At_ap2_floral_buds_cDNA_P Parameter: Plant Line Value: ap2 (Ler.)
  misc_feature: MA Experiment 108501 PARAMETER Experiment Name: At_ap2_floral_buds_cDNA_P Parameter: Tissue Value: Closed Flower
  misc_feature: MA Experiment ID: 108572 Result: Down-regulated in Transcription
  misc_feature: MA Experiment 108572 PARAMETER Experiment Name: At_Drought_cDNA_P Parameter: Timepoint (hr) Value: 1
  misc_feature: MA Experiment 108572 PARAMETER Experiment Name: At_Drought_cDNA_P Parameter: Tissue Value: Aerial
  misc_feature: MA Experiment 108572 PARAMETER Experiment Name: At_Drought_cDNA_P Parameter: Treatment Value: Drought vs. No Drought
  misc_feature: MA Experiment ID: 108595 Result: Up-regulated in Transcription
  misc_feature: MA Experiment 108595 PARAMETER Experiment Name: At_Ler-pi_Ovule_cDNA_P Parameter: Plant Line Value: null
  misc_feature: MA Experiment ID: 20000166 Result: Down-regulated in Transcription
  misc_feature: MA Experiment 20000166 PARAMETER Experiment Name: At_100uM_ABA_P Parameter: Age (day) Value: 14
  misc_feature: MA Experiment 20000166 PARAMETER Experiment Name: At_100uM_ABA_P Parameter: Organism Value: A. thaliana
  misc_feature: MA Experiment 20000166 PARAMETER Experiment Name: At_100uM_ABA_P Parameter: Plant Line Value: WS
  misc_feature: MA Experiment 20000166 PARAMETER Experiment Name: At_100uM_ABA_P Parameter: Timepoint (hr) Value: 1
  misc_feature: MA Experiment 20000166 PARAMETER Experiment Name: At_100uM_ABA_P Parameter: Tissue Value: Aerial
  misc_feature: MA Experiment 20000166 PARAMETER Experiment Name: At_100uM_ABA_P Parameter: Treatment Value: 100uM ABA vs. No Treatment
  misc_feature: MA Experiment ID: 20000173 Result: Down-regulated in Transcription
  misc_feature: MA Experiment 20000173 PARAMETER Experiment Name: At_42deg_Heat_P Parameter: Age (day) Value: 14
  misc_feature: MA Experiment 20000173 PARAMETER Experiment Name: At_42deg_Heat_P Parameter: Organism Value: A. thaliana
  misc_feature: MA Experiment 20000173 PARAMETER Experiment Name: At_42deg_Heat_P Parameter: Plant Line Value: WS
  misc_feature: MA Experiment 20000173 PARAMETER Experiment Name: At_42deg_Heat_P Parameter: Temperature (deg C) Value: 42 vs. 22
  misc_feature: MA Experiment 20000173 PARAMETER Experiment Name: At_42deg_Heat_P Parameter: Timepoint (hr) Value: 6
  misc_feature: MA Experiment 20000173 PARAMETER Experiment Name: At_42deg_Heat_P Parameter: Tissue Value: Aerial
  misc_feature: MA Experiment ID: 20000234 Result: Up-regulated in Transcription
  misc_feature: MA Experiment 20000234 PARAMETER Experiment Name: At_Siliques_P Parameter: Age (day) Value: 21
  misc_feature: MA Experiment 20000234 PARAMETER Experiment Name: At_Siliques_P Parameter: Organism Value: A. thaliana
  misc_feature: MA Experiment 20000234 PARAMETER Experiment Name: At_Siliques_P Parameter: Plant Line Value: WS
  misc_feature: MA Experiment 20000234 PARAMETER Experiment Name: At_Siliques_P Parameter: Tissue Value: Less Than 5mm Siliques vs. Whole Plant
  misc_feature: MA Experiment ID: 20000235 Result: Up-regulated in Transcription
  misc_feature: MA Experiment 20000235 PARAMETER Experiment Name: At_Siliques_P Parameter: Age (day) Value: 21
  misc_feature: MA Experiment 20000235 PARAMETER Experiment Name: At_Siliques_P Parameter: Organism Value: A. thaliana
  misc_feature: MA Experiment 20000235 PARAMETER Experiment Name: At_Siliques_P Parameter: Plant Line Value: WS
  misc_feature: MA Experiment 20000235 PARAMETER Experiment Name: At_Siliques_P Parameter: Tissue Value: 5-10mm Siliques vs. Whole Plant
  misc_feature: MA Experiment ID: 20000264 Result: Up-regulated in Transcription
  misc_feature: MA Experiment 20000264 PARAMETER Experiment Name: At_Open_Flower_P Parameter: Age (day) Value: 21
  misc_feature: MA Experiment 20000264 PARAMETER Experiment Name: At_Open_Flower_P Parameter: Plant Line Value: WS
  misc_feature: MA Experiment 20000264 PARAMETER Experiment Name: At_Open_Flower_P Parameter: Tissue Value: Open Flower vs. Whole Plant
  misc_feature: MA Experiment ID: 20000265 Result: Up-regulated in Transcription
  misc_feature: MA Experiment 20000265 PARAMETER Experiment Name: At_Open_Flower_P Parameter: Age (day) Value: 21
  misc_feature: MA Experiment 20000265 PARAMETER Experiment Name: At_Open_Flower_P Parameter: Plant Line Value: WS
  misc_feature: MA Experiment 20000265 PARAMETER Experiment Name: At_Open_Flower_P Parameter: Tissue Value: Closed Flower vs. Whole Plant
  misc_feature: MA Experiment ID: 20000269 Result: Up-regulated in Transcription
  misc_feature: MA Experiment 20000269 PARAMETER Experiment Name: At_1mM_KNO3_L-vs-H_Roots_P Parameter: Age (day) Value: 7,10,12
  misc_feature: MA Experiment 20000269 PARAMETER Experiment Name: At_1mM_KNO3_L-vs-H_Roots_P Parameter: Organism Value: A. thaliana
  misc_feature: MA Experiment 20000269 PARAMETER Experiment Name: At_1mM_KNO3_L-vs-H_Roots_P Parameter: Plant Line Value: WS
  misc_feature: MA Experiment 20000269 PARAMETER Experiment Name: At_1mM_KNO3_L-vs-H_Roots_P Parameter: Timepoint (day) Value: 7,10,12
  misc_feature: MA Experiment 20000269 PARAMETER Experiment Name: At_1mM_KNO3_L-vs-H_Roots_P Parameter: Tissue Value: Roots
  misc_feature: MA Experiment 20000269 PARAMETER Experiment Name: At_1mM_KNO3_L-vs-H_Roots_P Parameter: Treatment Value: 1mM KNO3 vs. 50mM KNO3
  misc_feature: MA Experiment ID: 20000286 Result: Up-regulated in Transcription
  misc_feature: MA Experiment 20000286 PARAMETER Experiment Name: At_Open_Flower_P Parameter: Age (day) Value: 21
  misc_feature: MA Experiment 20000286 PARAMETER Experiment Name: At_Open_Flower_P Parameter: Plant Line Value: WS
  misc_feature: MA Experiment 20000286 PARAMETER Experiment Name: At_Open_Flower_P Parameter: Tissue Value: Half Open vs. Whole Plant
  misc_feature: MA Experiment ID: 20000438 Result: Down-regulated in Transcription
  misc_feature: MA Experiment 20000438 PARAMETER Experiment Name: At_Shoots__P Parameter: Age (day) Value: 14
  misc_feature: MA Experiment 20000438 PARAMETER Experiment Name: At_Shoots__P Parameter: Tissue Value: Shoots vs. Whole Plant
  misc_feature: MA Experiment ID: 20000460 Result: Down-regulated in Transcription
  misc_feature: MA Experiment 20000460 PARAMETER Experiment Name: At_10percent_PEG_P Parameter: Age (day) Value: 12
  misc_feature: MA Experiment 20000460 PARAMETER Experiment Name: At_10percent_PEG_P Parameter: Organism Value: A. thaliana
  misc_feature: MA Experiment 20000460 PARAMETER Experiment Name: At_10percent_PEG_P Parameter: Plant Line Value: WS
  misc_feature: MA Experiment 20000460 PARAMETER Experiment Name: At_10percent_PEG_P Parameter: Timepoint (day) Value: 12
  misc_feature: MA Experiment 20000460 PARAMETER Experiment Name: At_10percent_PEG_P Parameter: Tissue Value: Whole Plant
  misc_feature: MA Experiment 20000460 PARAMETER Experiment Name: At_10percent_PEG_P Parameter: Treatment Value: 10percent PEG vs. No Treatment
  misc_feature: MA Experiment ID: 20000527 Result: Down-regulated in Transcription
  misc_feature: MA Experiment 20000527 PARAMETER Experiment Name: At_10percent_PEG_P Parameter: Age (day) Value: 20
  misc_feature: MA Experiment 20000527 PARAMETER Experiment Name: At_10percent_PEG_P Parameter: Organism Value: A. thaliana
  misc_feature: MA Experiment 20000527 PARAMETER Experiment Name: At_10percent_PEG_P Parameter: Plant Line Value: WS
  misc_feature: MA Experiment 20000527 PARAMETER Experiment Name: At_10percent_PEG_P Parameter: Timepoint (day) Value: 20
  misc_feature: MA Experiment 20000527 PARAMETER Experiment Name: At_10percent_PEG_P Parameter: Tissue Value: Whole Plant
  misc_feature: MA Experiment 20000527 PARAMETER Experiment Name: At_10percent_PEG_P Parameter: Treatment Value: 10percent PEG vs. No Treatment
  misc_feature: MA Experiment ID: 20000573 Result: Down-regulated in Transcription
  misc_feature: MA Experiment 20000573 PARAMETER Experiment Name: At_100uM_ABA_Mutants__P Parameter: Organism Value: A. thaliana
  misc_feature: MA Experiment 20000573 PARAMETER Experiment Name: At_100uM_ABA_Mutants__P Parameter: Plant Line Value: CS22 vs. Ler wt
  misc_feature: MA Experiment 20000573 PARAMETER Experiment Name: At_100uM_ABA_Mutants__P Parameter: Timepoint (hr) Value: N/A
  misc_feature: MA Experiment 20000573 PARAMETER Experiment Name: At_100uM_ABA_Mutants__P Parameter: Tissue Value: Whole Plant
  misc_feature: MA Experiment 20000573 PARAMETER Experiment Name: At_100uM_ABA_Mutants__P Parameter: Treatment Value: None
  misc_feature: MA Experiment ID: 20000574 Result: Down-regulated in Transcription
  misc_feature: MA Experiment 20000574 PARAMETER Experiment Name: At_100uM_ABA_Mutants__P Parameter: Organism Value: A. thaliana
  misc_feature: MA Experiment 20000574 PARAMETER Experiment Name: At_100uM_ABA_Mutants__P Parameter: Plant Line Value: CS23 vs. Ler wt
  misc_feature: MA Experiment 20000574 PARAMETER Experiment Name: At_100uM_ABA_Mutants__P Parameter: Timepoint (hr) Value: N/A
  misc_feature: MA Experiment 20000574 PARAMETER Experiment Name: At_100uM_ABA_Mutants__P Parameter: Tissue Value: Whole Plant
  misc_feature: MA Experiment 20000574 PARAMETER Experiment Name: At_100uM_ABA_Mutants__P Parameter: Treatment Value: None
  misc_feature: MA Experiment ID: 20000709 Result: Down-regulated in Transcription
  misc_feature: MA Experiment 20000709 PARAMETER Experiment Name: At_15mM_NH4NO3_L-to-H_P Parameter: Age (hr) Value: 14
  misc_feature: MA Experiment 20000709 PARAMETER Experiment Name: At_15mM_NH4NO3_L-to-H_P Parameter: Organism Value: A. thaliana
  misc_feature: MA Experiment 20000709 PARAMETER Experiment Name: At_15mM_NH4NO3_L-to-H_P Parameter: Plant Line Value: WS
  misc_feature: MA Experiment 20000709 PARAMETER Experiment Name: At_15mM_NH4NO3_L-to-H_P Parameter: Timepoint (hr) Value: 4
  misc_feature: MA Experiment 20000709 PARAMETER Experiment Name: At_15mM_NH4NO3_L-to-H_P Parameter: Tissue Value: Aerial
  misc_feature: MA Experiment 20000709 PARAMETER Experiment Name: At_15mM_NH4NO3_L-to-H_P Parameter: Treatment Value: 15mM NH4NO3 vs. 30mM Mannitol
  misc_feature: MA Experiment ID: 20000794 Result: Up-regulated in Transcription
  misc_feature: MA Experiment 20000794 PARAMETER Experiment Name: At_Petals_P Parameter: Age (day) Value: 23-25 days
  misc_feature: MA Experiment 20000794 PARAMETER Experiment Name: At_Petals_P Parameter: Plant Line Value: WS
  misc_feature: MA Experiment 20000794 PARAMETER Experiment Name: At_Petals_P Parameter: Tissue Value: Petals vs. Whole plant
  misc_feature: MA Experiment ID: 20001560 Result: Down-regulated in Transcription
  misc_feature: MA Experiment 20001560 PARAMETER Experiment Name: At_Drought_Soil_Dry_P Parameter: Age (day) Value: 28
  misc_feature: MA Experiment 20001560 PARAMETER Experiment Name: At_Drought_Soil_Dry_P Parameter: Organism Value: A. thaliana
  misc_feature: MA Experiment 20001560 PARAMETER Experiment Name: At_Drought_Soil_Dry_P Parameter: Plant Line Value: WS
  misc_feature: MA Experiment 20001560 PARAMETER Experiment Name: At_Drought_Soil_Dry_P Parameter: Post Timepoint (hr) Value: None
  misc_feature: MA Experiment 20001560 PARAMETER Experiment Name: At_Drought_Soil_Dry_P Parameter: Post-Treatment Value: None
  misc_feature: MA Experiment 20001560 PARAMETER Experiment Name: At_Drought_Soil_Dry_P Parameter: Timepoint (day) Value: 14
  misc_feature: MA Experiment 20001560 PARAMETER Experiment Name: At_Drought_Soil_Dry_P Parameter: Treatment Value: Drought vs. No Drought
acaccaaacctctctctctatctctgtccaaataagaacaaaaaaagacaagattcagaaaaaaatggaggtttcgatgagaaagccttatttcatagaagaagaagacgatggttttgtttctttatctgagatggaagctggagtttcaagtccttcttgttacaactatcctcagagttattattataaccatcatcatcatcagtactctgtttcatctcccagatctggaaaatttcatgattttagattcgacaatagctattacggttatggacagcctcatttcttggactcttgcttcctctgcaagaaacgtcttggtgataacagagacatcttcatgtacagaggagacacaccgttctgtagtgaagagtgtagagaagaacagatagaaagagacgaagcaaaagagaagaaacagagtctgtctacatctgtgaaagctatgagaagaaatgaaaagcgaagctcttcttcttctccaactagatctcgtaactatgctttccgcactggaactgttgctgctgcctaatttaaagttataaaggaaaaaaagggagatagagaatccattaacgctcatattgctgtaaaagctagttaatggatttatgggttttttcttcatctaaagatctttctttagtttgaatttgaatactaaaccaaaaaaaaaatggttagggaaaaagaaaaaaaaaaaagcgaagaaacctctctttttttaaagggtttgtcctttctttgttttattttcatgtttattagttttgtttttcttgaagaaaaatatatatatgcaattttgggtgc

SEQ ID NO: 27583 - protein, 180 aa, Arabidopsis thaliana
  peptide (1)..(180): Ceres Seq. ID no. 12384991
  misc_feature (82)..(140): Pfam Name: Protein of unknown function (DUF581) Pfam Description: Protein of unknown function (DUF581)
  misc_feature (83)..(164): Homolog of NCBI NO: 38344285 NR Description: OSJNBa0013K16.17 [Oryza sativa (japonica
  misc_feature (91)..(164): Homolog of NCBI NO: 34898006 NR Description: ESTs C26056(C11550),AU082131(C11550) correspond a region of the predicted gene.~Similar to Arabidopsis thaliana
  misc_feature (96)..(159): Homolog of NCBI NO: 38344282 NR Description: OSJNBa0013K16.14 [Oryza sativa (japonica
  misc_feature (93)..(160): Homolog of NCBI NO: 38344283 NR Description: OSJNBa0013K16.15 [Oryza sativa (japonica
  misc_feature (92)..(179): Homolog of NCBI NO: 38344280 NR Description: OSJNBa0013K16.12 [Oryza sativa (japonica
  misc_feature (88)..(180): Homolog of NCBI NO: 18406598 NR Description: expressed protein; protein id: At2g44670.1
  misc_feature (37)..(180): Homolog of NCBI NO: 15238001 NR Description: putative protein; protein id: At5g47060.1
  misc_feature (22)..(180): Homolog of NCBI NO: 7485163 NR Description: hypothetical protein - Arabidopsis thaliana
  misc_feature (22)..(180): Homolog of NCBI NO: 21594214 NR Description: unknown [Arabidopsis thaliana]
  misc_feature (22)..(180): Homolog of NCBI NO: 18414940 NR Description: expressed protein
HQTSLSISVQIRTKKDKIQKKMEVSMRKPYFIEEEDDGFVSLSEMEAGVSSPSCYNYPQSYYYNHHHHQYSVSSPRSGKFHDFRFDNSYYGYGQPHFLDSCFLCKKRLGDNRDIFMYRGDTPFCSEECREEQIERDEAKEKKQSLSTSVKAMRRNEKRSSSSSPTRSRNYAFRTGTVAAA

SEQ ID NO: 27584 - protein, 159 aa, Arabidopsis thaliana
  peptide (1)..(159): Ceres Seq. ID no. 12384992
  misc_feature (61)..(119): Pfam Name: Protein of unknown function (DUF581) Pfam Description: Protein of unknown function (DUF581)
  misc_feature (62)..(143): Homolog of NCBI NO: 38344285 NR Description: OSJNBa0013K16.17 [Oryza sativa (japonica
  misc_feature (70)..(143): Homolog of NCBI NO: 34898006 NR Description: ESTs C26056(C11550),AU082131(C11550) correspond a region of the predicted gene.~Similar to Arabidopsis thaliana
  misc_feature (75)..(138): Homolog of NCBI NO: 38344282 NR Description: OSJNBa0013K16.14 [Oryza sativa (japonica
  misc_feature (72)..(139): Homolog of NCBI NO: 38344283 NR Description: OSJNBa0013K16.15 [Oryza sativa (japonica
  misc_feature (71)..(158): Homolog of NCBI NO: 38344280 NR Description: OSJNBa0013K16.12 [Oryza sativa (japonica
  misc_feature (67)..(159): Homolog of NCBI NO: 18406598 NR Description: expressed protein; protein id: At2g44670.1
  misc_feature (16)..(159): Homolog of NCBI NO: 15238001 NR Description: putative protein; protein id: At5g47060.1
  misc_feature (1)..(159): Homolog of NCBI NO: 7485163 NR Description: hypothetical protein - Arabidopsis thaliana
  misc_feature (1)..(159): Homolog of NCBI NO: 21594214 NR Description: unknown [Arabidopsis thaliana]
  misc_feature (1)..(159): Homolog of NCBI NO: 18414940 NR Description: expressed protein
MEVSMRKPYFIEEEDDGFVSLSEMEAGVSSPSCYNYPQSYYYNHHHHQYSVSSPRSGKFHDFRFDNSYYGYGQPHFLDSCFLCKKRLGDNRDIFMYRGDTPFCSEECREEQIERDEAKEKKQSLSTSVKAMRRNEKRSSSSSPTRSRNYAFRTGTVAAA

SEQ ID NO: 27585 - protein, 155 aa, Arabidopsis thaliana
  peptide (1)..(155): Ceres Seq. ID no. 12384993
  misc_feature (57)..(115): Pfam Name: Protein of unknown function (DUF581) Pfam Description: Protein of unknown function (DUF581)
  misc_feature (58)..(139): Homolog of NCBI NO: 38344285 NR Description: OSJNBa0013K16.17 [Oryza sativa (japonica
  misc_feature (66)..(139): Homolog of NCBI NO: 34898006 NR Description: ESTs C26056(C11550),AU082131(C11550) correspond a region of the predicted gene.~Similar to Arabidopsis thaliana
  misc_feature (71)..(134): Homolog of NCBI NO: 38344282 NR Description: OSJNBa0013K16.14 [Oryza sativa (japonica
  misc_feature (68)..(135): Homolog of NCBI NO: 38344283 NR Description: OSJNBa0013K16.15 [Oryza sativa (japonica
  misc_feature (67)..(154): Homolog of NCBI NO: 38344280 NR Description: OSJNBa0013K16.12 [Oryza sativa (japonica
  misc_feature (63)..(155): Homolog of NCBI NO: 18406598 NR Description: expressed protein; protein id: At2g44670.1
  misc_feature (12)..(155): Homolog of NCBI NO: 15238001 NR Description: putative protein; protein id: At5g47060.1
  misc_feature (1)..(155): Homolog of NCBI NO: 7485163 NR Description: hypothetical protein - Arabidopsis thaliana
  misc_feature (1)..(155): Homolog of NCBI NO: 21594214 NR Description: unknown [Arabidopsis thaliana]
  misc_feature (1)..(155): Homolog of NCBI NO: 18414940 NR Description: expressed protein
MRKPYFIEEEDDGFVSLSEMEAGVSSPSCYNYPQSYYYNHHHHQYSVSSPRSGKFHDFRFDNSYYGYGQPHFLDSCFLCKKRLGDNRDIFMYRGDTPFCSEECREEQIERDEAKEKKQSLSTSVKAMRRNEKRSSSSSPTRSRNYAFRTGTVAAA

SEQ ID NO: 27586 - DNA, 1145 bp, Arabidopsis thaliana
  misc_feature (1)..(1145): Ceres Seq. ID no. 12394991
  misc_feature: MA Experiment ID: 108435 Result: Down-regulated in Transcription
  misc_feature: MA Experiment 108435 PARAMETER Experiment Name: At_stm_Mutants_cDNA_P Parameter: Plant Line Value: wt Landsburg vs stm
  misc_feature: MA Experiment 108435 PARAMETER Experiment Name: At_stm_Mutants_cDNA_P Parameter: Tissue Value: Shoot Apical Meristem Region
  misc_feature: MA Experiment ID: 108488 Result: Up-regulated in Transcription
  misc_feature: MA Experiment ID: 108595 Result: Down-regulated in Transcription
  misc_feature: MA Experiment 108595 PARAMETER Experiment Name: At_Ler-pi_Ovule_cDNA_P Parameter: Plant Line Value: null
  misc_feature: MA Experiment ID: 20000224 Result: Down-regulated in Transcription
  misc_feature: MA Experiment ID: 20001905 Result: Down-regulated in Transcription
  misc_feature: MA Experiment 20001905 PARAMETER Experiment Name: At_Drought_Reproduction_P Parameter: Age (day) Value: 40
  misc_feature: MA Experiment 20001905 PARAMETER Experiment Name: At_Drought_Reproduction_P Parameter: Organism Value: A. thaliana
  misc_feature: MA Experiment 20001905 PARAMETER Experiment Name: At_Drought_Reproduction_P Parameter: Plant Line Value: WS
  misc_feature: MA Experiment 20001905 PARAMETER Experiment Name: At_Drought_Reproduction_P Parameter: Timepoint (day) Value: 10
  misc_feature: MA Experiment 20001905 PARAMETER Experiment Name: At_Drought_Reproduction_P Parameter: Tissue Value: Rosettes
  misc_feature: MA Experiment 20001905 PARAMETER Experiment Name: At_Drought_Reproduction_P Parameter: Treatment Value: Drought vs. No Drought
attcttttatctcttgagcacacacacacatacaagactctcctcacagaacgatttagatttaatcgggaaaaagttcagtcagtgacactaatgttcgaatcgaacatggttcttcaaacactatcttcttcttctcctccaattcaccgtctctatcttcaccattctcagattctcccttcttctgggtcacccagcaagatttctcttcaggcagatacatggaaggactttggccattcgatcttttcatgaaatttctgctagaggtttaccggctttgaacaaagcttccttgaagaagctaccaatcaaaggatctacctttctgctggggcagagcttgttgatggtttctgctcacccacagttggcagcagcagcagaaatcataaagcctgaaccgatttacgaagttggagagttatttgaacttagtattcagctttcttacttgctgttactactggggttgcttggagttggtactttctatgtgatccgtcaagtacttgtacgcagagaactagacctctccgctaaagaattgcaggagcaagtaaggagcggagatgcaagtgcaacagagctctttgagcttggtgcagtgatgttgagaaggaagttttatcctgcagccaacaagtttttgcaacaagctatccagaaatgggacggtgatgatcaagatcttgctcaggtctataacgctcttggagtgagttatgtacgagaggataaacttgacaaaggaattgctcagtttgaaatggcggtgaagctgcaacccggttatgtaacagcttggaacaaccttggggatgcttatgagaagaagaaggagttgcctttggcattgaatgcgtttgaagaagttttgttgtttgatccaaacaataaggtggctcggcctcggcgagatgcgttgaaggatcgcgtgaagctttataaaggtgttgtggctgttaagtctaagaaacggtgacggctcaaacaagatgcaaactctgaaccaagaaccgttggtctctctcccccttgtgtatttttttggtttggtaatatgtatggagattttgtgttaatatgaaaatgaaactttgttgttttttgtaaccaataaaatcagatgtttaaaactt

SEQ ID NO: 27587 - protein, 211 aa, Arabidopsis thaliana
  peptide (1)..(211): Ceres Seq. ID no. 12394992
  misc_feature (150)..(183): Pfam Name: TPR Domain Pfam Description: TPR Domain
  misc_feature (30)..(194): Homolog of NCBI NO: 23129236 NR Description: hypothetical protein [Nostoc punctiforme]
  misc_feature (30)..(197): Homolog of NCBI NO: 23042213 NR Description: hypothetical protein [Trichodesmium erythraeum
  misc_feature (28)..(197): Homolog of NCBI NO: 22299949 NR Description: photosystem I assembly related protein
  misc_feature (7)..(118): Homolog of NCBI NO: 38636894 NR Description: stress inducible protein-like
  misc_feature (7)..(118): Homolog of NCBI NO: 37535100 NR Description: unknown protein [Oryza sativa (japonica
  misc_feature (7)..(211): Homolog of NCBI NO: 37535090 NR Description: putative stress inducible protein
  misc_feature (1)..(211): Homolog of NCBI NO: 7487355 NR Description: hypothetical protein T22J18.13 - Arabidopsis
  misc_feature (1)..(211): Homolog of NCBI NO: 21537104 NR Description: unknown [Arabidopsis thaliana]
  misc_feature (1)..(211): Homolog of NCBI NO: 30687988 NR Description: tetratricopeptide repeat (TPR)-containing protein
  misc_feature (1)..(211): Homolog of NCBI NO: 22329737 NR Description: expressed protein
MVSAHPQLAAAAEIIKPEPIYEVGELFELSIQLSYLLLLLGLLGVGTFYVIRQVLVRRELDLSAKELQEQVRSGDASATELFELGAVMLRRKFYPAANKFLQQAIQKWDGDDQDLAQVYNALGVSYVREDKLDKGIAQFEMAVKLQPGYVTAWNNLGDAYEKKKELPLALNAFEEVLLFDPNNKVARPRRDALKDRVKLYKGVVAVKSKKR

SEQ ID NO: 27588 - protein, 124 aa, Arabidopsis thaliana
  peptide (1)..(124): Ceres Seq. ID no. 12394993
  misc_feature (63)..(96): Pfam Name: TPR Domain Pfam Description: TPR Domain
  misc_feature (1)..(107): Homolog of NCBI NO: 23129236 NR Description: hypothetical protein [Nostoc punctiforme]
  misc_feature (1)..(110): Homolog of NCBI NO: 23042213 NR Description: hypothetical protein [Trichodesmium erythraeum
  misc_feature (1)..(110): Homolog of NCBI NO: 22299949 NR Description: photosystem I assembly related protein
  misc_feature (1)..(31): Homolog of NCBI NO: 38636894 NR Description: stress inducible protein-like
  misc_feature (1)..(31): Homolog of NCBI NO: 37535100 NR Description: unknown protein [Oryza sativa (japonica
  misc_feature (1)..(124): Homolog of NCBI NO: 37535090 NR Description: putative stress inducible protein
  misc_feature (1)..(124): Homolog of NCBI NO: 7487355 NR Description: hypothetical protein T22J18.13 - Arabidopsis
  misc_feature (1)..(124): Homolog of NCBI NO: 21537104 NR Description: unknown [Arabidopsis thaliana]
  misc_feature (1)..(124): Homolog of NCBI NO: 30687988 NR Description: tetratricopeptide repeat (TPR)-containing protein
  misc_feature (1)..(124): Homolog of NCBI NO: 22329737 NR Description: expressed protein
MLRRKFYPAANKFLQQAIQKWDGDDQDLAQVYNALGVSYVREDKLDKGIAQFEMAVKLQPGYVTAWNNLGDAYEKKKELPLALNAFEEVLLFDPNNKVARPRRDALKDRVKLYKGVVAVKSKKR

SEQ ID NO: 27589 - DNA, 1518 bp, Arabidopsis thaliana
  misc_feature (1)..(1518): Ceres Seq. ID no. 12333361
  misc_feature: MA Experiment ID: 108463 Result: Up-regulated in Transcription
  misc_feature: MA Experiment 108463 PARAMETER Experiment Name: At_Germinating_Seeds_cDNA_P Parameter: Age (day) Value: 3 vs. 0
  misc_feature: MA Experiment 108463 PARAMETER Experiment Name: At_Germinating_Seeds_cDNA_P Parameter: Tissue Value: Germinating Seeds
  misc_feature: MA Experiment ID: 108573 Result: Up-regulated in Transcription
  misc_feature: MA Experiment 108573 PARAMETER Experiment Name: At_Drought_cDNA_P Parameter: Timepoint (hr) Value: 6
  misc_feature: MA Experiment 108573 PARAMETER Experiment Name: At_Drought_cDNA_P Parameter: Tissue Value: Aerial
  misc_feature: MA Experiment 108573 PARAMETER Experiment Name: At_Drought_cDNA_P Parameter: Treatment Value: Drought vs. No Drought
  misc_feature: MA Experiment ID: 20000214 Result: Down-regulated in Transcription
  misc_feature: MA Experiment 20000214 PARAMETER Experiment Name: At_4deg_Cold_P Parameter: Timepoint (hr) Value: 6
  misc_feature: MA Experiment ID: 20000224 Result: Down-regulated in Transcription
  misc_feature: MA Experiment ID: 20001450 Result: Up-regulated in Transcription
  misc_feature: MA Experiment 20001450 PARAMETER Experiment Name: At_Far-red-induction_P Parameter: Age (day) Value: 7
  misc_feature: MA Experiment 20001450 PARAMETER Experiment Name: At_Far-red-induction_P Parameter: Light Value: Far-red vs. White
  misc_feature: MA Experiment 20001450 PARAMETER Experiment Name: At_Far-red-induction_P Parameter: Organism Value: A. thaliana
  misc_feature: MA Experiment 20001450 PARAMETER Experiment Name: At_Far-red-induction_P Parameter: Plant Line Value: Columbia
  misc_feature: MA Experiment 20001450 PARAMETER Experiment Name: At_Far-red-induction_P Parameter: Timepoint (hr) Value: 8
  misc_feature: MA Experiment 20001450 PARAMETER Experiment Name: At_Far-red-induction_P Parameter: Tissue Value: Whole Plant
acagaggaggaaaagaagcacattgtcgccgtctctttaacttccttcatcaatctccgtctcgtgaatctctgtttctttgatctgtaattgcgaattcgtcgtttcccaattttgaaattgttgtaatgtcggcggtctcgtgctccacggcgagttctagcggaggatgtgcatttaggtttcgatcaaagacatcaatccattctcctaatttcatcagaattgggacaaattctcagagtgacagattctgtaatcatcgtttggaattggtacatggaactcgtaaagtgaaaggagcatctgtacgtatggcattagttgaggagagacaatcaacgagcaaagatgttgctgagcctcctcgggtcctggcgtatgatcttgttcaaggagcacttgtgaaatggagatggaaggatgacaaatctgttccagatacacctactgctgttctcctacacggaattttagggagcgggaaaaactggggcacttttgctcgtagattggctcatgaattcccaacgtggcagtttctattggtagacctgcgttgccatggggattcaacatctctcaagaagagaggtccacactcggttgctactactgcttctgatgttctaaaacttgttggtcagttgaggttaacacctcgggtccttgttggtcatagctttggggggaaagttgtattaagcatggtagagcaagcagctaagcctcttccacgaccagtccgagcttgggtattggatgctactcctggtaaagttcgtgcaggaggagatggagaagatcatccacgagagcttatatcatttctacgtaaattgccaaaagtggtcttgtcaaagcgcgaggttcttaaagctcttataaatgaagggttttccaatgatgtcgcacagtgggtcattaccaatctcagacctactggaccatcagcttctagcttctcgtggacatttgacctagacgggatcgctgaactttaccagtcctacgaagagacaaatctatggaactttgttgagaatcttccaagaggagtacatgtgaattttctgaaagcggaaagaagcttgcaccgttgggccctagaagaccttcagcgaatccacgccgctgaagagctagcctctgaagaaggcggtggtgtagaaatgcatgtcttggaagatgccggtcattgggttcacacggataacccggatggtctcttcaggatcttgtcatcttctttccaggttctcagagcctagaggtgctgaacggtcttggttcggctctttttctgtgtaatacttgtggagaagttaggtctaaaaacagttgacagatacaatatcatatacatcaacactgtgtccgtgtaatgttctgtgtgacataagtaattcagaagtaacatcatatggctgtatcatccggtattattcttgactcgatgtcctttacattgcttttctttttttgtggttcacttagtcagagaaagttctaaagctc

SEQ ID NO: 27590 - protein, 380 aa, Arabidopsis thaliana
  peptide (1)..(380): Ceres Seq. ID no. 12333362
  misc_feature (136)..(373): Pfam Name: alpha/beta hydrolase fold Pfam Description: alpha/beta hydrolase fold
  misc_feature (108)..(304): Homolog of NCBI NO: 15642097 NR Description: esterase/lipase YbfF, putative [Vibrio cholerae]
  misc_feature (137)..(213): Homolog of NCBI NO: 20161236 NR Description: P0408G07.9 [Oryza sativa (japonica
  misc_feature (50)..(290): Homolog of NCBI NO: 21644577 NR Description: Williams-Beuren syndrome critical region 21 [Mus
  misc_feature (52)..(290): Homolog of NCBI NO: 34873230 NR Description: similar to Williams-Beuren syndrome critical
  misc_feature (108)..(375): Homolog of NCBI NO: 7486010 NR Description: hypothetical protein F22O6.50 - Arabidopsis
  misc_feature (104)..(200): Homolog of NCBI NO: 34908512 NR Description: P0679C12.26 [Oryza sativa (japonica
  misc_feature (209)..(375): Homolog of NCBI NO: 34908512 NR Description: P0679C12.26 [Oryza sativa (japonica
  misc_feature (108)..(375): Homolog of NCBI NO: 22331752 NR Description: putative protein
  misc_feature (209)..(377): Homolog of NCBI NO: 20161236 NR Description: P0408G07.9 [Oryza sativa (japonica
  misc_feature (1)..(380): Homolog of NCBI NO: 15234891 NR Description: putative protein
MSAVSCSTASSSGGCAFRFRSKTSIHSPNFIRIGTNSQSDRFCNHRLELVHGTRKVKGASVRMALVEERQSTSKDVAEPPRVLAYDLVQGALVKWRWKDDKSVPDTPTAVLLHGILGSGKNWGTFARRLAHEFPTWQFLLVDLRCHGDSTSLKKRGPHSVATTASDVLKLVGQLRLTPRVLVGHSFGGKVVLSMVEQAAKPLPRPVRAWVLDATPGKVRAGGDGEDHPRELISFLRKLPKVVLSKREVLKALINEGFSNDVAQWVITNLRPTGPSASSFSWTFDLDGIAELYQSYEETNLWNFVENLPRGVHVNFLKAERSLHRWALEDLQRIHAAEELASEEGGGVEMHVLEDAGHWVHTDNPDGLFRILSSSFQVLRA

SEQ ID NO: 27591 - protein, 318 aa, Arabidopsis thaliana
  peptide (1)..(318): Ceres Seq. ID no. 12333363
  misc_feature (74)..(311): Pfam Name: alpha/beta hydrolase fold Pfam Description: alpha/beta hydrolase fold
  misc_feature (46)..(242): Homolog of NCBI NO: 15642097 NR Description: esterase/lipase YbfF, putative [Vibrio cholerae]
  misc_feature (75)..(151): Homolog of NCBI NO: 20161236 NR Description: P0408G07.9 [Oryza sativa (japonica
  misc_feature (1)..(228): Homolog of NCBI NO: 21644577 NR Description: Williams-Beuren syndrome critical region 21 [Mus
  misc_feature (1)..(228): Homolog of NCBI NO: 34873230 NR Description: similar to Williams-Beuren syndrome critical
  misc_feature (46)..(313): Homolog of NCBI NO: 7486010 NR Description: hypothetical protein F22O6.50 - Arabidopsis
  misc_feature (42)..(138): Homolog of NCBI NO: 34908512 NR Description: P0679C12.26 [Oryza sativa (japonica
  misc_feature (147)..(313): Homolog of NCBI NO: 34908512 NR Description: P0679C12.26 [Oryza sativa (japonica
  misc_feature (46)..(313): Homolog of NCBI NO: 22331752 NR Description: putative protein
  misc_feature (147)..(315): Homolog of NCBI NO: 20161236 NR Description: P0408G07.9 [Oryza sativa (japonica
  misc_feature (1)..(318): Homolog of NCBI NO: 15234891 NR Description: putative protein
MALVEERQSTSKDVAEPPRVLAYDLVQGALVKWRWKDDKSVPDTPTAVLLHGILGSGKNWGTFARRLAHEFPTWQFLLVDLRCHGDSTSLKKRGPHSVATTASDVLKLVGQLRLTPRVLVGHSFGGKVVLSMVEQAAKPLPRPVRAWVLDATPGKVRAGGDGEDHPRELISFLRKLPKVVLSKREVLKALINEGFSNDVAQWVITNLRPTGPSASSFSWTFDLDGIAELYQSYEETNLWNFVENLPRGVHVNFLKAERSLHRWALEDLQRIHAAEELASEEGGGVEMHVLEDAGHWVHTDNPDGLFRILSSSFQVLRA

SEQ ID NO: 27592 - DNA, 1506 bp, Arabidopsis thaliana
  misc_feature (1)..(1506): Ceres Seq. ID no. 12331587
  misc_feature: MA Experiment ID: 108573 Result: Up-regulated in Transcription
  misc_feature: MA Experiment 108573 PARAMETER Experiment Name: At_Drought_cDNA_P Parameter: Timepoint (hr) Value: 6
  misc_feature: MA Experiment 108573 PARAMETER Experiment Name: At_Drought_cDNA_P Parameter: Tissue Value: Aerial
  misc_feature: MA Experiment 108573 PARAMETER Experiment Name: At_Drought_cDNA_P Parameter: Treatment Value: Drought vs. No Drought
  misc_feature: MA Experiment ID: 20000224 Result: Down-regulated in Transcription
gattagcaaatattcgtgatattttagctgtatggttttggttccgatcacaaagagcatcgaatcgagctacttcctccgccggctttgctgtgtgtgtgatcgttcgtttactaaatctgaaacaagtatctaacgccttgccggagatgtcgagctcaggccaaactcagttccgttatacacagacgccgtcgaaggtggttcatctgcggaatcttccatgggaatgcgtcgaagaggagctcatcgacctttgcaaacgattcggcaagatcgtcaataccaagagcaatgtcggcgccaatcgcaatcaagctttcgtcgaatttgctgacttgaatcaagctatatcaatggtttcgtattatgcttcatcttcagagcccgcacagattcgtgggaaaactgtctatattcagtactctaatcgccatgagattgttaacaatcagagtcctggagatgtccctggaaatgtcctcttggttacctttgaaggagtggaatctcacgaagtcagcatcgatgttatccatctggtattttctgcttttggatttgtgcataaaattgccacatttgagaaagctgctggtttccaggcactagttcaatttactgatgtggagactgcatccgcggcaaggagtgcgttggatggcagaagtatacccaggtatctgctttccgcacatgttggttcgtgcagtttgcgaatgtcttattcagctcatactgatctcaacatcaagtttcagtcccaccggagcagagattacacaaatccataccttccagtgaatcagaccgcaatggatgggtctatgcagcctgctttaggtgctgacggcaagaaagttgaatctcagagcaacgtccttctcggtttgattgagaatatgcagtatgctgtcactgtggatgttcttcacacggtgttttctgcatatggaactgtccagaagattgctatatttgagaagaatggttcaacgcaagcattaattcaatactctgatataccaacagcagcaatggccaaagaagcactggaaggacactgcatttatgacggtggctactgtaagcttcgactatcatactctcgtcatactgatctgaatgttaaggcttttagcgacaaaagcagagactatacacttcctgatctaagcctacttgtggcacaaaaaggtcccgcggtgtcgggttctgcaccaccagcaggttggcagaacccgcaagcgcaaagtcaatactcaggttatggcggaagcccatatatgtacccatcatctgatcccaacggggcttcaccctcaggtcaacctccttactatggatgagatattgtttactaaaaatttcggattttgctgccactggggagtatttccatgtttaggtttgtttgaggttaaaagtgtgattgttctttcttttttgttgttgacataatttaagtgggaagaccaataataaatcgaatatgttgcgcttgct

SEQ ID NO: 27593 - protein, 448 aa, Arabidopsis thaliana
  peptide (1)..(448): Ceres Seq. ID no. 12331588
  misc_feature (68)..(139): Pfam Name: RNA recognition motif. (a.k.a. RRM, RBD, or RNP domain) Pfam Description: RNA recognition motif. (a.k.a. RRM, RBD, or RNP
  misc_feature (29)..(175): Homolog of NCBI NO: 2500586 NR Description: Polypyrimidine tract-binding protein 1 (PTB)
  misc_feature (64)..(269): Homolog of NCBI NO: 28949889 NR Description: polypyrimidine track-binding protein homologue
  misc_feature (65)..(392): Homolog of NCBI NO: 22329999 NR Description: heterogeneous nuclear ribonucleoprotein (hnRNP),
  misc_feature (177)..(362): Homolog of NCBI NO: 20260638 NR Description: putative polypyrimidine tract-binding protein
  misc_feature (52)..(226): Homolog of NCBI NO: 34912728 NR Description: putative polypyrimidine tract-binding protein
  misc_feature (258)..(447): Homolog of NCBI NO: 34912728 NR Description: putative polypyrimidine tract-binding protein
  misc_feature (50)..(443): Homolog of NCBI NO: 15238677 NR Description: polypyrimidine tract-binding protein (PTB),
  misc_feature (50)..(444): Homolog of NCBI NO: 18921326 NR Description: putative polypyrimidine tract-binding protein
  misc_feature (50)..(448): Homolog of NCBI NO: 15232047 NR Description: polypyrimidine tract-binding protein (PTB)
  misc_feature (50)..(426): Homolog of NCBI NO: 11358627 NR Description: polypyrimidine tract-binding protein homolog
LANIRDILAVWFWFRSQRASNRATSSAGFAVCVIVRLLNLKQVSNALPEMSSSGQTQFRYTQTPSKVVHLRNLPWECVEEELIDLCKRFGKIVNTKSNVGANRNQAFVEFADLNQAISMVSYYASSSEPAQIRGKTVYIQYSNRHEIVNNQSPGDVPGNVLLVTFEGVESHEVSIDVIHLVFSAFGFVHKIATFEKAAGFQALVQFTDVETASAARSALDGRSIPRYLLSAHVGSCSLRMSYSAHTDLNIKFQSHRSRDYTNPYLPVNQTAMDGSMQPALGADGKKVESQSNVLLGLIENMQYAVTVDVLHTVFSAYGTVQKIAIFEKNGSTQALIQYSDIPTAAMAKEALEGHCIYDGGYCKLRLSYSRHTDLNVKAFSDKSRDYTLPDLSLLVAQKGPAVSGSAPPAGWQNPQAQSQYSGYGGSPYMYPSSDPNGASPSGQPPYYG

SEQ ID NO: 27594 - protein, 399 aa, Arabidopsis thaliana
  peptide (1)..(399): Ceres Seq. ID no. 12331589
  misc_feature (19)..(90): Pfam Name: RNA recognition motif. (a.k.a. RRM, RBD, or RNP domain) Pfam Description: RNA recognition motif. (a.k.a. RRM, RBD, or RNP
  misc_feature (1)..(126): Homolog of NCBI NO: 2500586 NR Description: Polypyrimidine tract-binding protein 1 (PTB)
  misc_feature (15)..(220): Homolog of NCBI NO: 28949889 NR Description: polypyrimidine track-binding protein homologue
  misc_feature (16)..(343): Homolog of NCBI NO: 22329999 NR Description: heterogeneous nuclear ribonucleoprotein (hnRNP),
  misc_feature (128)..(313): Homolog of NCBI NO: 20260638 NR Description: putative polypyrimidine tract-binding protein
  misc_feature (3)..(177): Homolog of NCBI NO: 34912728 NR Description: putative polypyrimidine tract-binding protein
  misc_feature (209)..(398): Homolog of NCBI NO: 34912728 NR Description: putative polypyrimidine tract-binding protein
  misc_feature (1)..(394): Homolog of NCBI NO: 15238677 NR Description: polypyrimidine tract-binding protein (PTB),
  misc_feature (1)..(395): Homolog of NCBI NO: 18921326 NR Description: putative polypyrimidine tract-binding protein
  misc_feature (1)..(399): Homolog of NCBI NO: 15232047 NR Description: polypyrimidine tract-binding protein (PTB)
  misc_feature (1)..(377): Homolog of NCBI NO: 11358627 NR Description: polypyrimidine tract-binding protein homolog
MSSSGQTQFRYTQTPSKVVHLRNLPWECVEEELIDLCKRFGKIVNTKSNVGANRNQAFVEFADLNQAISMVSYYASSSEPAQIRGKTVYIQYSNRHEIVNNQSPGDVPGNVLLVTFEGVESHEVSIDVIHLVFSAFGFVHKIATFEKAAGFQALVQFTDVETASAARSALDGRSIPRYLLSAHVGSCSLRMSYSAHTDLNIKFQSHRSRDYTNPYLPVNQTAMDGSMQPALGADGKKVESQSNVLLGLIENMQYAVTVDVLHTVFSAYGTVQKIAIFEKNGSTQALIQYSDIPTAAMAKEALEGHCIYDGGYCKLRLSYSRHTDLNVKAFSDKSRDYTLPDLSLLVAQKGPAVSGSAPPAGWQNPQAQSQYSGYGGSPYMYPSSDPNGASPSGQPPYYG

SEQ ID NO: 27595 - protein, 330 aa, Arabidopsis thaliana
  peptide (1)..(330): Ceres Seq. ID no. 12331590
  misc_feature (1)..(57): Homolog of NCBI NO: 2500586 NR Description: Polypyrimidine tract-binding protein 1 (PTB)
  misc_feature (1)..(151): Homolog of NCBI NO: 28949889 NR Description: polypyrimidine track-binding protein homologue
  misc_feature (1)..(274): Homolog of NCBI NO: 22329999 NR Description: heterogeneous nuclear ribonucleoprotein (hnRNP),
  misc_feature (59)..(244): Homolog of NCBI NO: 20260638 NR Description: putative polypyrimidine tract-binding protein
  misc_feature (1)..(108): Homolog of NCBI NO: 34912728 NR Description: putative polypyrimidine tract-binding protein
  misc_feature (140)..(329): Homolog of NCBI NO: 34912728 NR Description: putative polypyrimidine tract-binding protein
  misc_feature (1)..(325): Homolog of NCBI NO: 15238677 NR Description: polypyrimidine tract-binding protein (PTB),
  misc_feature (1)..(326): Homolog of NCBI NO: 18921326 NR Description: putative polypyrimidine tract-binding protein
  misc_feature (1)..(330): Homolog of NCBI NO: 15232047 NR Description: polypyrimidine tract-binding protein (PTB)
  misc_feature (1)..(308): Homolog of NCBI NO: 11358627 NR Description: polypyrimidine tract-binding protein homolog
MVSYYASSSEPAQIRGKTVYIQYSNRHEIVNNQSPGDVPGNVLLVTFEGVESHEVSIDVIHLVFSAFGFVHKIATFEKAAGFQALVQFTDVETASAARSALDGRSIPRYLLSAHVGSCSLRMSYSAHTDLNIKFQSHRSRDYTNPYLPVNQTAMDGSMQPALGADGKKVESQSNVLLGLIENMQYAVTVDVLHTVFSAYGTVQKIAIFEKNGSTQALIQYSDIPTAAMAKEALEGHCIYDGGYCKLRLSYSRHTDLNVKAFSDKSRDYTLPDLSLLVAQKGPAVSGSAPPAGWQNPQAQSQYSGYGGSPYMYPSSDPNGASPSGQPPYYG

SEQ ID NO: 27596 - DNA, 1179 bp, Arabidopsis thaliana
  misc_feature (1)..(1179): Ceres Seq. ID no. 12394969
  misc_feature: MA Experiment ID: 20000185 Result: Up-regulated in Transcription
  misc_feature: MA Experiment 20000185 PARAMETER Experiment Name: At_Roots__P Parameter: Age (day) Value: 7 vs. 21
  misc_feature: MA Experiment 20000185 PARAMETER Experiment Name: At_Roots__P Parameter: Organism Value: A. thaliana
  misc_feature: MA Experiment 20000185 PARAMETER Experiment Name: At_Roots__P Parameter: Tissue Value: Roots vs. Whole Plant
  misc_feature: MA Experiment ID: 20000227 Result: Up-regulated in Transcription
  misc_feature: MA Experiment 20000227 PARAMETER Experiment Name: At_Root-Tips-vs-Tops_P Parameter: Tissue Value: Root Tips vs. Root Tops
  misc_feature: MA Experiment ID: 20000235 Result: Down-regulated in Transcription
  misc_feature: MA Experiment 20000235 PARAMETER Experiment Name: At_Siliques_P Parameter: Age (day) Value: 21
  misc_feature: MA Experiment 20000235 PARAMETER Experiment Name: At_Siliques_P Parameter: Organism Value: A. thaliana
  misc_feature: MA Experiment 20000235 PARAMETER Experiment Name: At_Siliques_P Parameter: Plant Line Value: WS
  misc_feature: MA Experiment 20000235 PARAMETER Experiment Name: At_Siliques_P Parameter: Tissue Value: 5-10mm Siliques vs. Whole Plant
  misc_feature: MA Experiment ID: 20000264 Result: Down-regulated in Transcription
  misc_feature: MA Experiment 20000264 PARAMETER Experiment Name: At_Open_Flower_P Parameter: Age (day) Value: 21
  misc_feature: MA Experiment 20000264 PARAMETER Experiment Name: At_Open_Flower_P Parameter: Plant Line Value: WS
  misc_feature: MA Experiment 20000264 PARAMETER Experiment Name: At_Open_Flower_P Parameter: Tissue Value: Open Flower vs. Whole Plant
  misc_feature: MA Experiment ID: 20000265 Result: Up-regulated in Transcription
  misc_feature: MA Experiment 20000265 PARAMETER Experiment Name: At_Open_Flower_P Parameter: Age (day) Value: 21
  misc_feature: MA Experiment 20000265 PARAMETER Experiment Name: At_Open_Flower_P Parameter: Plant Line Value: WS
  misc_feature: MA Experiment 20000265 PARAMETER Experiment Name: At_Open_Flower_P Parameter: Tissue Value: Closed Flower vs. Whole Plant
  misc_feature: MA Experiment ID: 20000286 Result: Up-regulated in Transcription
  misc_feature: MA Experiment 20000286 PARAMETER Experiment Name: At_Open_Flower_P Parameter: Age (day) Value: 21
  misc_feature: MA Experiment 20000286 PARAMETER Experiment Name: At_Open_Flower_P Parameter: Plant Line Value: WS
  misc_feature: MA Experiment 20000286 PARAMETER Experiment Name: At_Open_Flower_P Parameter: Tissue Value: Half Open vs. Whole Plant
  misc_feature: MA Experiment ID: 20000437 Result: Down-regulated in Transcription
  misc_feature: MA Experiment 20000437 PARAMETER Experiment Name: At_Drought_P Parameter: Age (day) Value: 8
  misc_feature: MA Experiment 20000437 PARAMETER Experiment Name: At_Drought_P Parameter: Organism Value: A. thaliana
  misc_feature: MA Experiment 20000437 PARAMETER Experiment Name: At_Drought_P Parameter: Plant Line Value: WS
  misc_feature: MA Experiment 20000437 PARAMETER Experiment Name: At_Drought_P Parameter: Timepoint (hr) Value: 24
  misc_feature: MA Experiment 20000437 PARAMETER Experiment Name: At_Drought_P Parameter: Tissue Value: Whole Plant
  misc_feature: MA Experiment 20000437 PARAMETER Experiment Name: At_Drought_P Parameter: Treatment Value: Drought vs. No Drought
  misc_feature: MA Experiment ID: 20000438 Result: Down-regulated in Transcription
  misc_feature: MA Experiment 20000438 PARAMETER Experiment Name: At_Shoots__P Parameter: Age (day) Value: 14
  misc_feature: MA Experiment 20000438 PARAMETER Experiment Name: At_Shoots__P Parameter: Tissue Value: Shoots vs. Whole Plant
  misc_feature: MA Experiment ID: 20000794 Result: Down-regulated in Transcription
  misc_feature: MA Experiment 20000794 PARAMETER Experiment Name: At_Petals_P Parameter: Age (day) Value: 23-25 days
  misc_feature: MA Experiment 20000794 PARAMETER Experiment Name: At_Petals_P Parameter: Plant Line Value: WS
  misc_feature: MA Experiment 20000794 PARAMETER Experiment Name: At_Petals_P Parameter: Tissue Value: Petals vs. Whole plant
  misc_feature: MA Experiment ID: 20001771 Result: Up-regulated in Transcription
  misc_feature: MA Experiment 20001771 PARAMETER Experiment Name: At_Far-red-enriched-adult_P Parameter: Age (day) Value: 28
  misc_feature: MA Experiment 20001771 PARAMETER Experiment Name: At_Far-red-enriched-adult_P Parameter: Light Value: Far-red enriched vs. White
  misc_feature: MA Experiment 20001771 PARAMETER Experiment Name: At_Far-red-enriched-adult_P Parameter: Organism Value: A. thaliana
  misc_feature: MA Experiment 20001771 PARAMETER Experiment Name: At_Far-red-enriched-adult_P Parameter: Plant Line Value: Columbia
  misc_feature: MA Experiment 20001771 PARAMETER Experiment Name: At_Far-red-enriched-adult_P Parameter: Timepoint (hr) Value: 16
  misc_feature: MA Experiment 20001771 PARAMETER Experiment Name: At_Far-red-enriched-adult_P Parameter: Tissue Value: Aerial
  misc_feature: MA Experiment ID: 20001773 Result: Up-regulated in Transcription
  misc_feature: MA Experiment 20001773 PARAMETER Experiment Name: At_Far-red-enriched-adult_P Parameter: Age (day) Value: 30
  misc_feature: MA Experiment 20001773 PARAMETER Experiment Name: At_Far-red-enriched-adult_P Parameter: Light Value: Far-red enriched vs. White
  misc_feature: MA Experiment 20001773 PARAMETER Experiment Name: At_Far-red-enriched-adult_P Parameter: Organism Value: A. thaliana
  misc_feature: MA Experiment 20001773 PARAMETER Experiment Name: At_Far-red-enriched-adult_P Parameter: Plant Line Value: Columbia
  misc_feature: MA Experiment 20001773 PARAMETER Experiment Name: At_Far-red-enriched-adult_P Parameter: Timepoint (hr) Value: 48
  misc_feature: MA Experiment 20001773 PARAMETER Experiment Name: At_Far-red-enriched-adult_P Parameter: Tissue Value: Aerial
  misc_feature: MA Experiment ID: 20001910 Result: Down-regulated in Transcription
  misc_feature: MA Experiment 20001910 PARAMETER Experiment Name: At_Drought_Reproduction_P Parameter: Age (day) Value: 37
  misc_feature: MA Experiment 20001910 PARAMETER Experiment Name: At_Drought_Reproduction_P Parameter: Organism Value: A. thaliana
  misc_feature: MA Experiment 20001910 PARAMETER Experiment Name: At_Drought_Reproduction_P Parameter: Plant Line Value: WS
  misc_feature: MA Experiment 20001910 PARAMETER Experiment Name: At_Drought_Reproduction_P Parameter: Timepoint (day) Value: 7
  misc_feature: MA Experiment 20001910 PARAMETER Experiment Name: At_Drought_Reproduction_P Parameter: Tissue Value: Flowers
  misc_feature: MA Experiment 20001910 PARAMETER Experiment Name: At_Drought_Reproduction_P Parameter: Treatment Value: Drought vs. No Drought
aatatagtaccaactccattgaatgttaaaactcagaagaaagtggagtgatcatataacgacaatgaagaatctctttaacttgttccttatgtttttctttgcaatgccaattctttcactctccgagaatccaaccaatttcagcgagagttgcgaagacgggagtggagaaaccggttcaagctttggcatagggttcgatttggttcttgattttggtttataccggaatagctgccccgaagcagagtctatcgtctactcgtgggtggaaaccacggtgttagaggatccaagaatggctgcttctcttctccgtcttcatttccacgactgttttgtcaatggatgtgatgcttcggtgttgttagatgacacagaaggactggttggtgaaaaaacggcgcctcctaatctaaattctctacgagggttcgaagtgattgattcgataaagtctgatattgaatctgtatgtccagagaccgtctcatgcgcagacattcttgccatggctgctagagattcagtcgttgtgtcgggtggaccaaggtgggaggtggaagtaggaagaaaagacagtagaacagcaagcaaacaggcagcaacaaatggcttaccctcaccaaactcaaccgtatcaactctcatctctactttccagaatcttggcctttcacaaaccgacatggtcgctctttccggtggacatacattgggaaaggcacggtgcacttcgtttacagctcggttgcagccactgcaaactggacaaccagctaaccacggagacaaccttgagttcctcgagtcactgcaacagttatgctcgactgttggccccagtgtaggtatcactcagcttgacttggtgactccatcaacatttgacaaccagtactatgtaaacctcctctcgggtgagggattgcttccatcagaccaggctttagcggttcaagacccagggacaagggcgattgttgagacctacgcaacagatcagtcggttttctttgaggattttaagaacgctatggttaaaatgggagggatatccggtggtagtaatagcgagattaggaagaattgtagaatgattaactaaaaataaaagcccgacttattgaatgatatctaattatctatataaaaattaaagaagtccacctacgt

SEQ ID NO: 27597 - protein, 362 aa, Arabidopsis thaliana
  peptide (1)..(362): Ceres Seq. ID no. 12394970
  misc_feature (69)..(362): Homolog of NCBI NO: 7453855 NR Description: peroxidase prx15 precursor [Spinacia oleracea]
  misc_feature (64)..(362): Homolog of NCBI NO: 34913714 NR Description: putative peroxidase [Oryza sativa (japonica
  misc_feature (54)..(362): Homolog of NCBI NO: 14031051 NR Description: peroxidase [Nicotiana tabacum]
  misc_feature (69)..(362): Homolog of NCBI NO: 15219493 NR Description: peroxidase, putative
  misc_feature (69)..(362): Homolog of NCBI NO: 21554765 NR Description: peroxidase, putative [Arabidopsis thaliana]
  misc_feature (56)..(362): Homolog of NCBI NO: 34903044 NR Description: unnamed protein product [Oryza sativa (japonica
  misc_feature (48)..(362): Homolog of NCBI NO: 35215022 NR Description: putative peroxidase 40 precursor
  misc_feature (24)..(362): Homolog of NCBI NO: 34015359 NR Description: putative peroxidase [Oryza sativa (japonica
  misc_feature (15)..(362): Homolog of NCBI NO: 15234882 NR Description: peroxidase family; protein id: At4g16270.1
  misc_feature (15)..(362): Homolog of NCBI NO: 26397553 NR Description: Peroxidase 40 precursor (Atperox P40)
MLKLRRKWSDHITTMKNLFNLFLMFFFAMPILSLSENPTNFSESCEDGSGETGSSFGIGFDLVLDFGLYRNSCPEAESIVYSWVETTVLEDPRMAASLLRLHFHDCFVNGCDASVLLDDTEGLVGEKTAPPNLNSLRGFEVIDSIKSDIESVCPETVSCADILAMAARDSVVVSGGPRWEVEVGRKDSRTASKQAATNGLPSPNSTVSTLISTFQNLGLSQTDMVALSGGHTLGKARCTSFTARLQPLQTGQPANHGDNLEFLESLQQLCSTVGPSVGITQLDLVTPSTFDNQYYVNLLSGEGLLPSDQALAVQDPGTRAIVETYATDQSVFFEDFKNAMVKMGGISGGSNSEIRKNCRMIN

SEQ ID NO: 27598 - protein, 348 aa, Arabidopsis thaliana
  peptide (1)..(348): Ceres Seq. ID no. 12394971
  misc_feature (55)..(348): Homolog of NCBI NO: 7453855 NR Description: peroxidase prx15 precursor [Spinacia oleracea]
  misc_feature (50)..(348): Homolog of NCBI NO: 34913714 NR Description: putative peroxidase [Oryza sativa (japonica
  misc_feature (40)..(348): Homolog of NCBI NO: 14031051 NR Description: peroxidase [Nicotiana tabacum]
  misc_feature (55)..(348): Homolog of NCBI NO: 15219493 NR Description: peroxidase, putative
  misc_feature (55)..(348): Homolog of NCBI NO: 21554765 NR Description: peroxidase, putative [Arabidopsis thaliana]
  misc_feature (42)..(348): Homolog of NCBI NO: 34903044 NR Description: unnamed protein product [Oryza sativa (japonica
  misc_feature (34)..(348): Homolog of NCBI NO: 35215022 NR Description: putative peroxidase 40 precursor
  misc_feature (10)..(348): Homolog of NCBI NO: 34015359 NR Description: putative peroxidase [Oryza sativa (japonica
  misc_feature (1)..(348): Homolog of NCBI NO: 15234882 NR Description: peroxidase family; protein id: At4g16270.1
  misc_feature (1)..(348): Homolog of NCBI NO: 26397553 NR Description: Peroxidase 40 precursor (Atperox P40)
MKNLFNLFLMFFFAMPILSLSENPTNFSESCEDGSGETGSSFGIGFDLVLDFGLYRNSCPEAESIVYSWVETTVLEDPRMAASLLRLHFHDCFVNGCDASVLLDDTEGLVGEKTAPPNLNSLRGFEVIDSIKSDIESVCPETVSCADILAMAARDSVVVSGGPRWEVEVGRKDSRTASKQAATNGLPSPNSTVSTLISTFQNLGLSQTDMVALSGGHTLGKARCTSFTARLQPLQTGQPANHGDNLEFLESLQQLCSTVGPSVGITQLDLVTPSTFDNQYYVNLLSGEGLLPSDQALAVQDPGTRAIVETYATDQSVFFEDFKNAMVKMGGISGGSNSEIRKNCRMIN

SEQ ID NO: 27599 - protein, 339 aa, Arabidopsis thaliana
  peptide (1)..(339): Ceres Seq. ID no. 12394972
  misc_feature (46)..(339): Homolog of NCBI NO: 7453855 NR Description: peroxidase prx15 precursor [Spinacia oleracea]
  misc_feature (41)..(339): Homolog of NCBI NO: 34913714 NR Description: putative peroxidase [Oryza sativa (japonica
  misc_feature (31)..(339): Homolog of NCBI NO: 14031051 NR Description: peroxidase [Nicotiana tabacum]
  misc_feature (46)..(339): Homolog of NCBI NO: 15219493 NR Description: peroxidase, putative
  misc_feature (46)..(339): Homolog of NCBI NO: 21554765 NR Description: peroxidase, putative [Arabidopsis thaliana]
  misc_feature (33)..(339): Homolog of NCBI NO: 34903044 NR Description: unnamed protein product [Oryza sativa (japonica
  misc_feature (25)..(339): Homolog of NCBI NO: 35215022 NR Description: putative peroxidase 40 precursor
  misc_feature (1)..(339): Homolog of NCBI NO: 34015359 NR Description: putative peroxidase [Oryza sativa (japonica
  misc_feature (1)..(339): Homolog of NCBI NO: 15234882 NR Description: peroxidase family; protein id: At4g16270.1
  misc_feature (1)..(339): Homolog of NCBI NO: 26397553 NR Description: Peroxidase 40 precursor (Atperox P40)
MFFFAMPILSLSENPTNFSESCEDGSGETGSSFGIGFDLVLDFGLYRNSCPEAESIVYSWVETTVLEDPRMAASLLRLHFHDCFVNGCDASVLLDDTEGLVGEKTAPPNLNSLRGFEVIDSIKSDIESVCPETVSCADILAMAARDSVVVSGGPRWEVEVGRKDSRTASKQAATNGLPSPNSTVSTLISTFQNLGLSQTDMVALSGGHTLGKARCTSFTARLQPLQTGQPANHGDNLEFLESLQQLCSTVGPSVGITQLDLVTPSTFDNQYYVNLLSGEGLLPSDQALAVQDPGTRAIVETYATDQSVFFEDFKNAMVKMGGISGGSNSEIRKNCRMIN

SEQ ID NO: 27600 - DNA, 1167 bp, Arabidopsis thaliana
  misc_feature (1)..(1167): Ceres Seq. ID no. 12327065
  misc_feature: MA Experiment ID: 108434 Result: Up-regulated in Transcription
  misc_feature: MA Experiment 108434 PARAMETER Experiment Name: At_Root_Tips_cDNA_P Parameter: Tissue Value: Root Tips
  misc_feature: MA Experiment ID: 108462 Result: Down-regulated in Transcription
  misc_feature: MA Experiment 108462 PARAMETER Experiment Name: At_Germinating_Seeds_cDNA_P Parameter: Age (day) Value: 2 vs. 0
  misc_feature: MA Experiment 108462 PARAMETER Experiment Name: At_Germinating_Seeds_cDNA_P Parameter: Tissue Value: Germinating Seeds
  misc_feature: MA Experiment ID: 108463 Result: Down-regulated in Transcription
  misc_feature: MA Experiment 108463 PARAMETER Experiment Name: At_Germinating_Seeds_cDNA_P Parameter: Age (day) Value: 3 vs. 0
  misc_feature: MA Experiment 108463 PARAMETER Experiment Name: At_Germinating_Seeds_cDNA_P Parameter: Tissue Value: Germinating Seeds
  misc_feature: MA Experiment ID: 108464 Result: Down-regulated in Transcription
  misc_feature: MA Experiment 108464 PARAMETER Experiment Name: At_Germinating_Seeds_cDNA_P Parameter: Age (day) Value: 4 vs. 0
  misc_feature: MA Experiment 108464 PARAMETER Experiment Name: At_Germinating_Seeds_cDNA_P Parameter: Tissue Value: Germinating Seeds
  misc_feature: MA Experiment ID: 108489 Result: Up-regulated in Transcription
  misc_feature: MA Experiment ID: 20000111 Result: Down-regulated in Transcription
  misc_feature: MA Experiment 20000111 PARAMETER Experiment Name: At_42deg_Heat_cDNA_P Parameter: Temperature (deg C) Value: 42 vs. 22
  misc_feature: MA Experiment 20000111 PARAMETER Experiment Name: At_42deg_Heat_cDNA_P Parameter: Timepoint (hr) Value: 6
  misc_feature: MA Experiment 20000111 PARAMETER Experiment Name: At_42deg_Heat_cDNA_P Parameter: Tissue Value: Aerial
  misc_feature: MA Experiment ID: 20000113 Result: Down-regulated in Transcription
  misc_feature: MA Experiment 20000113 PARAMETER Experiment Name: At_42deg_Heat_cDNA_P Parameter: Temperature (deg C) Value: 42 vs. 22
  misc_feature: MA Experiment 20000113 PARAMETER Experiment Name: At_42deg_Heat_cDNA_P Parameter: Timepoint (hr) Value: 8
  misc_feature: MA Experiment 20000113 PARAMETER Experiment Name: At_42deg_Heat_cDNA_P Parameter: Tissue Value: Aerial
  misc_feature: MA Experiment ID: 20000173 Result: Down-regulated in Transcription
  misc_feature: MA Experiment 20000173 PARAMETER Experiment Name: At_42deg_Heat_P Parameter: Age (day) Value: 14
  misc_feature: MA Experiment 20000173 PARAMETER Experiment Name: At_42deg_Heat_P Parameter: Organism Value: A. thaliana
  misc_feature: MA Experiment 20000173 PARAMETER Experiment Name: At_42deg_Heat_P Parameter: Plant Line Value: WS
  misc_feature: MA Experiment 20000173 PARAMETER Experiment Name: At_42deg_Heat_P Parameter: Temperature (deg C) Value: 42 vs. 22
  misc_feature: MA Experiment 20000173 PARAMETER Experiment Name: At_42deg_Heat_P Parameter: Timepoint (hr) Value: 6
  misc_feature: MA Experiment 20000173 PARAMETER Experiment Name: At_42deg_Heat_P Parameter: Tissue Value: Aerial
  misc_feature: MA Experiment ID: 20000180 Result: Down-regulated in Transcription
  misc_feature: MA Experiment 20000180 PARAMETER Experiment Name: At_Germinating_Seeds_P Parameter: Age (hr) Value: 24 vs. 0
  misc_feature: MA Experiment 20000180 PARAMETER Experiment Name: At_Germinating_Seeds_P Parameter: Tissue Value: Germinating Seeds
  misc_feature: MA Experiment ID: 20001451 Result: Up-regulated in Transcription
  misc_feature: MA Experiment 20001451 PARAMETER Experiment Name: At_Far-red-induction_P Parameter: Age (day) Value: 7
  misc_feature: MA Experiment 20001451 PARAMETER Experiment Name: At_Far-red-induction_P Parameter: Light Value: Far-red vs. White
  misc_feature: MA Experiment 20001451 PARAMETER Experiment Name: At_Far-red-induction_P Parameter: Organism Value: A. thaliana
  misc_feature: MA Experiment 20001451 PARAMETER Experiment Name: At_Far-red-induction_P Parameter: Plant Line Value: Columbia
  misc_feature: MA Experiment 20001451 PARAMETER Experiment Name: At_Far-red-induction_P Parameter: Timepoint (hr) Value: 24
  misc_feature: MA Experiment 20001451 PARAMETER Experiment Name: At_Far-red-induction_P Parameter: Tissue Value: Whole Plant
  misc_feature: MA Experiment ID: 20001557 Result: Up-regulated in Transcription
  misc_feature: MA Experiment 20001557 PARAMETER Experiment Name: At_Drought_Soil_Dry_P Parameter: Age (day) Value: 27
  misc_feature: MA Experiment 20001557 PARAMETER Experiment Name: At_Drought_Soil_Dry_P Parameter: Organism Value: A. thaliana
  misc_feature: MA Experiment 20001557 PARAMETER Experiment Name: At_Drought_Soil_Dry_P Parameter: Plant Line Value: WS
  misc_feature: MA Experiment 20001557 PARAMETER Experiment Name: At_Drought_Soil_Dry_P Parameter: Post Timepoint (hr) Value: 3
  misc_feature: MA Experiment 20001557 PARAMETER Experiment Name: At_Drought_Soil_Dry_P Parameter: Post-Treatment Value: Re-Water vs. No Drought
  misc_feature: MA Experiment 20001557 PARAMETER Experiment Name: At_Drought_Soil_Dry_P Parameter: Timepoint (day) Value: 13
  misc_feature: MA Experiment 20001557 PARAMETER Experiment Name: At_Drought_Soil_Dry_P Parameter: Treatment Value: Drought vs. No Drought
  misc_feature: MA Experiment ID: 20001560 Result: Up-regulated in Transcription
  misc_feature: MA Experiment 20001560 PARAMETER Experiment Name: At_Drought_Soil_Dry_P Parameter: Age (day) Value: 28
  misc_feature: MA Experiment 20001560 PARAMETER Experiment Name: At_Drought_Soil_Dry_P Parameter: Organism Value: A. thaliana
  misc_feature: MA Experiment 20001560 PARAMETER Experiment Name: At_Drought_Soil_Dry_P Parameter: Plant Line Value: WS
  misc_feature: MA Experiment 20001560 PARAMETER Experiment Name: At_Drought_Soil_Dry_P Parameter: Post Timepoint (hr) Value: None
  misc_feature: MA Experiment 20001560 PARAMETER Experiment Name: At_Drought_Soil_Dry_P Parameter: Post-Treatment Value: None
  misc_feature: MA Experiment 20001560 PARAMETER Experiment Name: At_Drought_Soil_Dry_P Parameter: Timepoint (day) Value: 14
  misc_feature: MA Experiment 20001560 PARAMETER Experiment Name: At_Drought_Soil_Dry_P Parameter: Treatment Value: Drought vs. No Drought
aatttcagttctagggttttaatttgatacgaggtcagcgaatccggcgacgaatatccgccactagtaactctagctcaggtaaggatttgtgtccatggcagctttgcaaacgcttcgtgaatggatcggtatccagcagttcccacctgctactcaatctaaattgctcgagatccttgggaagtataaagaagaggatgtgagctcgctaacggtccttgtaattgggaaaagtggtgttggaaagtcatcaactgtgaattcagttataggcgagaaagctgctgcagttagtactttccagtctgaaggactgaggcctaccttggtctctcgcacaagatcgggatttacattgaatatcatcgacactcctggtcttattgagggaggatatgtgaatgatcaagccatcaacattataaaacgatttctcctcaacatgactatagatgtgctactatacgtagaccgtttggatgtgtaccgggtggatgaccttgataggcaagttgtcggtgctataactgatgcatttggtaaagagatatggaagaagtctgctcttgttctcacccatgctcagttctctccaccagacgggttaaattataaccactttgtctccaaaagatctaatgctcttctaaaagttatccagacaggcgctcaactgaagaaacaggatttgcagggtttttctattcctgtcattcttgttgagaacagcggaagatgccataagaacgaaagcgatgaaaagattcttccatgcgggactagttggattcccaatctgttcaacaaaatcacagagatctcttttaatggcaacaaggcgattcatgttgacaagaaactggtcgaagggccaaacccaaacgaaagaggaaaaaaactgattcctttaatgtttgcattccaatacttgctggtgatgaagccattggttcgagcaatcaagtccgatgtttcgagagagagtaaaccggcgtgggagctgcgagactccggtttagcaagtcgaaggtcttgagttgtggacacgagttttgtttggtttgtttgtctatctgagagattgttctgtagttgaaattgtgatacaactcgagaaatgtggttcacagataattactgtcgcaaagttctctcatcttaatt

SEQ ID NO: 27601 - protein, 313 aa, Arabidopsis thaliana
  peptide (1)..(313): Ceres Seq. ID no. 12327066
  misc_feature (39)..(236): Pfam Name: AIG1 family Pfam Description: AIG1 family
  misc_feature (7)..(299): Homolog of NCBI NO: 21780151 NR Description: toc33-like protein [Orychophragmus violaceus]
  misc_feature (7)..(299): Homolog of NCBI NO: 14596163 NR Description: similar to GTP-binding protein [Arabidopsis
  misc_feature (7)..(299): Homolog of NCBI NO: 15217705 NR Description: putative GTP-binding protein
  misc_feature (8)..(312): Homolog of NCBI NO: 7259224 NR Description: Toc34-2 protein [Zea mays]
  misc_feature (8)..(312): Homolog of NCBI NO: 6689637 NR Description: Toc34-1 protein [Zea mays]
  misc_feature (5)..(307): Homolog of NCBI NO: 1076522 NR Description: chloroplast import-associated protein IAP36,
  misc_feature (5)..(307): Homolog of NCBI NO: 25091388 NR Description: Translocase of chloroplast 34 (34 kDa chloroplast envelope protein) (GTP-binding protein OEP34) (GTP-binding
  misc_feature (1)..(313): Homolog of NCBI NO: 25091410 NR Description: Translocase of chloroplast 34 (34 kDa chloroplast
  misc_feature (1)..(313): Homolog of NCBI NO: 15238381 NR Description: GTP-binding protein (gb|AAD09203.1)
  misc_feature (1)..(313): Homolog of NCBI NO: 21594231 NR Description: GTP-binding protein [Arabidopsis thaliana]
MAALQTLREWIGIQQFPPATQSKLLEILGKYKEEDVSSLTVLVIGKSGVGKSSTVNSVIGEKAAAVSTFQSEGLRPTLVSRTRSGFTLNIIDTPGLIEGGYVNDQAINIIKRFLLNMTIDVLLYVDRLDVYRVDDLDRQVVGAITDAFGKEIWKKSALVLTHAQFSPPDGLNYNHFVSKRSNALLKVIQTGAQLKKQDLQGFSIPVILVENSGRCHKNESDEKILPCGTSWIPNLFNKITEISFNGNKAIHVDKKLVEGPNPNERGKKLIPLMFAFQYLLVMKPLVRAIKSDVSRESKPAWELRDSGLASRRS

SEQ ID NO: 27602 - protein, 197 aa, Arabidopsis thaliana
  peptide (1)..(197): Ceres Seq. ID no. 12327067
  misc_feature (1)..(120): Pfam Name: AIG1 family Pfam Description: AIG1 family
  misc_feature (1)..(183): Homolog of NCBI NO: 21780151 NR Description: toc33-like protein [Orychophragmus violaceus]
  misc_feature (1)..(183): Homolog of NCBI NO: 14596163 NR Description: similar to GTP-binding protein [Arabidopsis
  misc_feature (1)..(183): Homolog of NCBI NO: 15217705 NR Description: putative GTP-binding protein
  misc_feature (1)..(196): Homolog of NCBI NO: 7259224 NR Description: Toc34-2 protein [Zea mays]
  misc_feature (1)..(196): Homolog of NCBI NO: 6689637 NR Description: Toc34-1 protein [Zea mays]
  misc_feature (1)..(191): Homolog of NCBI NO: 1076522 NR Description: chloroplast import-associated protein IAP36,
  misc_feature (1)..(191): Homolog of NCBI NO: 25091388 NR Description: Translocase of chloroplast 34 (34 kDa chloroplast envelope protein) (GTP-binding protein OEP34) (GTP-binding
  misc_feature (1)..(197): Homolog of NCBI NO: 25091410 NR Description: Translocase of chloroplast 34 (34 kDa chloroplast
  misc_feature (1)..(197): Homolog of NCBI NO: 15238381 NR Description: GTP-binding protein (gb|AAD09203.1)
  misc_feature (1)..(197): Homolog of NCBI NO: 21594231 NR Description: GTP-binding protein [Arabidopsis thaliana]
MTIDVLLYVDRLDVYRVDDLDRQVVGAITDAFGKEIWKKSALVLTHAQFSPPDGLNYNHFVSKRSNALLKVIQTGAQLKKQDLQGFSIPVILVENSGRCHKNESDEKILPCGTSWIPNLFNKITEISFNGNKAIHVDKKLVEGPNPNERGKKLIPLMFAFQYLLVMKPLVRAIKSDVSRESKPAWELRDSGLASRRS

SEQ ID NO: 27603 - DNA, 1584 bp, Arabidopsis thaliana
  misc_feature (1)..(1584): Ceres Seq. ID no. 12704699
  misc_feature: MA Experiment ID: 20000068 Result: Down-regulated in Transcription
  misc_feature: MA Experiment ID: 20000113 Result: Down-regulated in Transcription
  misc_feature: MA Experiment 20000113 PARAMETER Experiment Name: At_42deg_Heat_cDNA_P Parameter: Temperature (deg C) Value: 42 vs. 22
  misc_feature: MA Experiment 20000113 PARAMETER Experiment Name: At_42deg_Heat_cDNA_P Parameter: Timepoint (hr) Value: 8
  misc_feature: MA Experiment 20000113 PARAMETER Experiment Name: At_42deg_Heat_cDNA_P Parameter: Tissue Value: Aerial
  misc_feature: MA Experiment ID: 20000171 Result: Down-regulated in Transcription
  misc_feature: MA Experiment 20000171 PARAMETER Experiment Name: At_42deg_Heat_P Parameter: Age (day) Value: 14
  misc_feature: MA Experiment 20000171 PARAMETER Experiment Name: At_42deg_Heat_P Parameter: Organism Value: A. thaliana
  misc_feature: MA Experiment 20000171 PARAMETER Experiment Name: At_42deg_Heat_P Parameter: Plant Line Value: WS
  misc_feature: MA Experiment 20000171 PARAMETER Experiment Name: At_42deg_Heat_P Parameter: Temperature (deg C) Value: 42 vs. 22
  misc_feature: MA Experiment 20000171 PARAMETER Experiment Name: At_42deg_Heat_P Parameter: Timepoint (hr) Value: 1
  misc_feature: MA Experiment 20000171 PARAMETER Experiment Name: At_42deg_Heat_P Parameter: Tissue Value: Aerial
  misc_feature: MA Experiment ID: 20000173 Result: Down-regulated in Transcription
  misc_feature: MA Experiment 20000173 PARAMETER Experiment Name: At_42deg_Heat_P Parameter: Age (day) Value: 14
  misc_feature: MA Experiment 20000173 PARAMETER Experiment Name: At_42deg_Heat_P Parameter: Organism Value: A. thaliana
  misc_feature: MA Experiment 20000173 PARAMETER Experiment Name: At_42deg_Heat_P Parameter: Plant Line Value: WS
  misc_feature: MA Experiment 20000173 PARAMETER Experiment Name: At_42deg_Heat_P Parameter: Temperature (deg C) Value: 42 vs. 22
  misc_feature: MA Experiment 20000173 PARAMETER Experiment Name: At_42deg_Heat_P Parameter: Timepoint (hr) Value: 6
  misc_feature: MA Experiment 20000173 PARAMETER Experiment Name: At_42deg_Heat_P Parameter: Tissue Value: Aerial
  misc_feature: MA Experiment ID: 20000184 Result: Down-regulated in Transcription
  misc_feature: MA Experiment 20000184 PARAMETER Experiment Name: At_Shoots__P Parameter: Age (day) Value: 7
  misc_feature: MA Experiment 20000184 PARAMETER Experiment Name: At_Shoots__P Parameter: Tissue Value: Shoots vs. Whole Plant
  misc_feature: MA Experiment ID: 20000185 Result: Down-regulated in Transcription
  misc_feature: MA Experiment 20000185 PARAMETER Experiment Name: At_Roots__P Parameter: Age (day) Value: 7 vs. 21
  misc_feature: MA Experiment 20000185 PARAMETER Experiment Name: At_Roots__P Parameter: Organism Value: A. thaliana
  misc_feature: MA Experiment 20000185 PARAMETER Experiment Name: At_Roots__P Parameter: Tissue Value: Roots vs. Whole Plant
  misc_feature: MA Experiment ID: 20000227 Result: Down-regulated in Transcription
  misc_feature: MA Experiment 20000227 PARAMETER Experiment Name: At_Root-Tips-vs-Tops_P Parameter: Tissue Value: Root Tips vs. Root Tops
  misc_feature: MA Experiment ID: 20000439 Result: Down-regulated in Transcription
  misc_feature: MA Experiment 20000439 PARAMETER Experiment Name: At_Roots__P Parameter: Age (day) Value: 14 vs. 21
  misc_feature: MA Experiment 20000439 PARAMETER Experiment Name: At_Roots__P Parameter: Organism Value: A. thaliana
  misc_feature: MA Experiment 20000439 PARAMETER Experiment Name: At_Roots__P Parameter: Tissue Value: Roots vs. Whole Plant
  misc_feature: MA Experiment ID: 20000496 Result: Up-regulated in Transcription
  misc_feature: MA Experiment 20000496 PARAMETER Experiment Name: At_Guard_Cells_P Parameter: Harvest Date Value: 7/19/2002
  misc_feature: MA Experiment 20000496 PARAMETER Experiment Name: At_Guard_Cells_P Parameter: Organism Value: Canola
  misc_feature: MA Experiment 20000496 PARAMETER Experiment Name: At_Guard_Cells_P Parameter: Tissue Value: Guard Cells vs. Leaves
  misc_feature: MA Experiment ID: 20000794 Result: Up-regulated in Transcription
  misc_feature: MA Experiment 20000794 PARAMETER Experiment Name: At_Petals_P Parameter: Age (day) Value: 23-25 days
  misc_feature: MA Experiment 20000794 PARAMETER Experiment Name: At_Petals_P Parameter: Plant Line Value: WS
  misc_feature: MA Experiment 20000794 PARAMETER Experiment Name: At_Petals_P Parameter: Tissue Value: Petals vs. Whole plant
  misc_feature: MA Experiment ID: 20001557 Result: Up-regulated in Transcription
  misc_feature: MA Experiment 20001557 PARAMETER Experiment Name: At_Drought_Soil_Dry_P Parameter: Age (day) Value: 27
  misc_feature: MA Experiment 20001557 PARAMETER Experiment Name: At_Drought_Soil_Dry_P Parameter: Organism Value: A. thaliana
  misc_feature: MA Experiment 20001557 PARAMETER Experiment Name: At_Drought_Soil_Dry_P Parameter: Plant Line Value: WS
  misc_feature: MA Experiment 20001557 PARAMETER Experiment Name: At_Drought_Soil_Dry_P Parameter: Post Timepoint (hr) Value: 3
  misc_feature: MA Experiment 20001557 PARAMETER Experiment Name: At_Drought_Soil_Dry_P Parameter: Post-Treatment Value: Re-Water vs. No Drought
  misc_feature: MA Experiment 20001557 PARAMETER Experiment Name: At_Drought_Soil_Dry_P Parameter: Timepoint (day) Value: 13
  misc_feature: MA Experiment 20001557 PARAMETER Experiment Name: At_Drought_Soil_Dry_P Parameter: Treatment Value: Drought vs. No Drought
  misc_feature: MA Experiment ID: 20001911 Result: Down-regulated in Transcription
  misc_feature: MA Experiment 20001911 PARAMETER Experiment Name: At_Drought_Reproduction_P Parameter: Age (day) Value: 40
  misc_feature: MA Experiment 20001911 PARAMETER Experiment Name: At_Drought_Reproduction_P Parameter: Organism Value: A. thaliana
  misc_feature: MA Experiment 20001911 PARAMETER Experiment Name: At_Drought_Reproduction_P Parameter: Plant Line Value: WS
  misc_feature: MA Experiment 20001911 PARAMETER Experiment Name: At_Drought_Reproduction_P Parameter: Timepoint (day) Value: 10
  misc_feature: MA Experiment 20001911 PARAMETER Experiment Name: At_Drought_Reproduction_P Parameter: Tissue Value: Flowers
  misc_feature: MA Experiment 20001911 PARAMETER Experiment Name: At_Drought_Reproduction_P Parameter: Treatment Value: Drought vs. No Drought
aaatttagttcctttctcatttatccactgctcttaatccaacttcaatatctctctatcctcacaatatttgttctgtttctccttcaactttcaactgataaagtttaaacctttatgctctttactctctgatctcaaaagggttttgtttagttctcctcaaaaccatggggatttgcttaagtgctcagattaaagctgtgagtccaggtaagccaggtgcaagtccgaagtatatgagctcagaggctaatgattcactgggaagtaaaagctcttctgtgtcaatcagaacaaacccaagaactgaaggagagatcttgcaatctcctaatctcaaaagtttcacttttgctgagcttaaagcagcaactaggaattttagaccagatagtgttcttggtgaaggtggttttggttctgttttcaaaggttggattgatgaacagactcttactgcttctaaaccgggaaccggtgtggttattgctgtcaaaaaacttaaccaagatggttggcaaggtcaccaggaatggctggcggaagtgaattacttggggcagttttcgcatcctaatcttgtgaaactgattggttattgcttagaggatgagcatcgtcttcttgtttatgagttcatgcctcgtggaagcttagagaatcatttgttcagaagaggttcttattttcaacctttatcttggactctccggttgaaagttgctcttggtgcagcgaaaggtcttgcgtttcttcataacgccgagactagtgtcatataccgcgatttcaaaacgtcgaatatactgcttgattcggagtacaatgctaagctttctgatttcgggctagctaaagacggtccaacgggtgataaaagccatgtctctacgcggatcatgggtacttacggatacgcagctcctgaatatcttgcaactggtcatttaacaaccaaaagtgatgtctatagctacggtgttgtgcttttggaggtgttgtctggacggagagctgtagacaagaaccgtccaccaggagagcaaaagctagtggaatgggcaagaccgttacttgctaacaaaaggaagttattccgagttatcgataaccgtctacaagatcaatactcaatggaagaagcttgtaaagtagctactcttgcgctgagatgcctcacattcgagataaagctgagaccaaacatgaacgaggttgtttctcacctcgaacacatccaaactttgaatgaagcaggaggaagaaatattgatatggtccagaggagaatgcgtaggagaagcgatagtgttgctatcaaccaaaaaccaaatgcaggttttgctcgacaaactgctgtaggcgtcatagctactgcttatccacgcccgtctgattcgcctctgtttgtttgagtacgaaacgatgaatgttctctttagttcggatgtacagttttgtttctgcttgtgtaccgaaaggattctcagttcatggctcgtttacacgactcagagatttgacaattgatctttgtagtgcgagaattgactaacataagtataaatgatctcattgtct

SEQ ID NO: 27604 - protein, 415 aa, Arabidopsis thaliana
  peptide (1)..(415): Ceres Seq. ID no. 12704700
  misc_feature (72)..(354): Pfam Name: Protein kinase domain Pfam Description: Protein kinase domain
  misc_feature (1)..(358): Homolog of NCBI NO: 15225520 NR Description: putative protein kinase
  misc_feature (1)..(390): Homolog of NCBI NO: 166809 NR Description: protein kinase
  misc_feature (1)..(390): Homolog of NCBI NO: 15241749 NR Description: serine/threonine-specific protein kinase NAK
  misc_feature (1)..(358): Homolog of NCBI NO: 34906046 NR Description: putative serine/threonine-specific protein kinase
  misc_feature (1)..(364): Homolog of NCBI NO: 14719339 NR Description: putative protein kinase [Oryza sativa]
  misc_feature (1)..(396): Homolog of NCBI NO: 34897424 NR Description: putative protein kinase [Oryza sativa (japonica
  misc_feature (259)..(413): Homolog of NCBI NO: 8778537 NR Description: F22G5.5 [Arabidopsis thaliana]
  misc_feature (1)..(259): Homolog of NCBI NO: 8778537 NR Description: F22G5.5 [Arabidopsis thaliana]
  misc_feature (1)..(415): Homolog of NCBI NO: 15222437 NR Description: protein kinase APK1A; protein id: At1g07570.1
  misc_feature (1)..(415): Homolog of NCBI NO: 15227001 NR Description: putative protein kinase; protein id: At2g28930.1
MGICLSAQIKAVSPGKPGASPKYMSSEANDSLGSKSSSVSIRTNPRTEGEILQSPNLKSFTFAELKAATRNFRPDSVLGEGGFGSVFKGWIDEQTLTASKPGTGVVIAVKKLNQDGWQGHQEWLAEVNYLGQFSHPNLVKLIGYCLEDEHRLLVYEFMPRGSLENHLFRRGSYFQPLSWTLRLKVALGAAKGLAFLHNAETSVIYRDFKTSNILLDSEYNAKLSDFGLAKDGPTGDKSHVSTRIMGTYGYAAPEYLATGHLTTKSDVYSYGVVLLEVLSGRRAVDKNRPPGEQKLVEWARPLLANKRKLFRVIDNRLQDQYSMEEACKVATLALRCLTFEIKLRPNMNEVVSHLEHIQTLNEAGGRNIDMVQRRMRRRSDSVAINQKPNAGFARQTAVGVIATAYPRPSDSPLFV

SEQ ID NO: 27605 - protein, 392 aa, Arabidopsis thaliana
  peptide (1)..(392): Ceres Seq. ID no. 12704701
  misc_feature (49)..(331): Pfam Name: Protein kinase domain Pfam Description: Protein kinase domain
  misc_feature (1)..(335): Homolog of NCBI NO: 15225520 NR Description: putative protein kinase
  misc_feature (1)..(367): Homolog of NCBI NO: 166809 NR Description: protein kinase
  misc_feature (1)..(367): Homolog of NCBI NO: 15241749 NR Description: serine/threonine-specific protein kinase NAK
  misc_feature (1)..(335): Homolog of NCBI NO: 34906046 NR Description: putative serine/threonine-specific protein kinase
  misc_feature (1)..(341): Homolog of NCBI NO: 14719339 NR Description: putative protein kinase [Oryza sativa]
  misc_feature (1)..(373): Homolog of NCBI NO: 34897424 NR Description: putative protein kinase [Oryza sativa (japonica
  misc_feature (236)..(390): Homolog of NCBI NO: 8778537 NR Description: F22G5.5 [Arabidopsis thaliana]
  misc_feature (1)..(236): Homolog of NCBI NO: 8778537 NR Description: F22G5.5 [Arabidopsis thaliana]
  misc_feature (1)..(392): Homolog of NCBI NO: 15222437 NR Description: protein kinase APK1A; protein id: At1g07570.1
  misc_feature (1)..(392): Homolog of NCBI NO: 15227001 NR Description: putative protein kinase; protein id: At2g28930.1
MSSEANDSLGSKSSSVSIRTNPRTEGEILQSPNLKSFTFAELKAATRNFRPDSVLGEGGFGSVFKGWIDEQTLTASKPGTGVVIAVKKLNQDGWQGHQEWLAEVNYLGQFSHPNLVKLIGYCLEDEHRLLVYEFMPRGSLENHLFRRGSYFQPLSWTLRLKVALGAAKGLAFLHNAETSVIYRDFKTSNILLDSEYNAKLSDFGLAKDGPTGDKSHVSTRIMGTYGYAAPEYLATGHLTTKSDVYSYGVVLLEVLSGRRAVDKNRPPGEQKLVEWARPLLANKRKLFRVIDNRLQDQYSMEEACKVATLALRCLTFEIKLRPNMNEVVSHLEHIQTLNEAGGRNIDMVQRRMRRRSDSVAINQKPNAGFARQTAVGVIATAYPRPSDSPLFV

SEQ ID NO: 27606 - protein, 258 aa, Arabidopsis thaliana
  peptide (1)..(258): Ceres Seq. ID no. 12704702
  misc_feature (1)..(197): Pfam Name: Protein kinase domain Pfam Description: Protein kinase domain
  misc_feature (1)..(201): Homolog of NCBI NO: 15225520 NR Description: putative protein kinase
  misc_feature (1)..(233): Homolog of NCBI NO: 166809 NR Description: protein kinase
  misc_feature (1)..(233): Homolog of NCBI NO: 15241749 NR Description: serine/threonine-specific protein kinase NAK
  misc_feature (1)..(201): Homolog of NCBI NO: 34906046 NR Description: putative serine/threonine-specific protein kinase
  misc_feature (1)..(207): Homolog of NCBI NO: 14719339 NR Description: putative protein kinase [Oryza sativa]
  misc_feature (1)..(239): Homolog of NCBI NO: 34897424 NR Description: putative protein kinase [Oryza sativa (japonica
  misc_feature (102)..(256): Homolog of NCBI NO: 8778537 NR Description: F22G5.5 [Arabidopsis thaliana]
  misc_feature (1)..(102): Homolog of NCBI NO: 8778537 NR Description: F22G5.5 [Arabidopsis thaliana]
  misc_feature (1)..(258): Homolog of NCBI NO: 15222437 NR Description: protein kinase APK1A; protein id: At1g07570.1
  misc_feature (1)..(258): Homolog of NCBI NO: 15227001 NR Description: putative protein kinase; protein id: At2g28930.1
MPRGSLENHLFRRGSYFQPLSWTLRLKVALGAAKGLAFLHNAETSVIYRDFKTSNILLDSEYNAKLSDFGLAKDGPTGDKSHVSTRIMGTYGYAAPEYLATGHLTTKSDVYSYGVVLLEVLSGRRAVDKNRPPGEQKLVEWARPLLANKRKLFRVIDNRLQDQYSMEEACKVATLALRCLTFEIKLRPNMNEVVSHLEHIQTLNEAGGRNIDMVQRRMRRRSDSVAINQKPNAGFARQTAVGVIATAYPRPSDSPLFV

SEQ ID NO: 27607 - DNA, 1205 bp, Arabidopsis thaliana
  misc_feature (1)..(1205): Ceres Seq. ID no. 12332476
  misc_feature: MA Experiment ID: 108461 Result: Down-regulated in Transcription
  misc_feature: MA Experiment 108461 PARAMETER Experiment Name: At_Germinating_Seeds_cDNA_P Parameter: Age (day) Value: 1 vs. 0
  misc_feature: MA Experiment 108461 PARAMETER Experiment Name: At_Germinating_Seeds_cDNA_P Parameter: Tissue Value: Germinating Seeds
  misc_feature: MA Experiment ID: 108469 Result: Up-regulated in Transcription
  misc_feature: MA Experiment ID: 108572 Result: Up-regulated in Transcription
  misc_feature: MA Experiment 108572 PARAMETER Experiment Name: At_Drought_cDNA_P Parameter: Timepoint (hr) Value: 1
  misc_feature: MA Experiment 108572 PARAMETER Experiment Name: At_Drought_cDNA_P Parameter: Tissue Value: Aerial
  misc_feature: MA Experiment 108572 PARAMETER Experiment Name: At_Drought_cDNA_P Parameter: Treatment Value: Drought vs. No Drought
  misc_feature: MA Experiment ID: 108573 Result: Up-regulated in Transcription
  misc_feature: MA Experiment 108573 PARAMETER Experiment Name: At_Drought_cDNA_P Parameter: Timepoint (hr) Value: 6
  misc_feature: MA Experiment 108573 PARAMETER Experiment Name: At_Drought_cDNA_P Parameter: Tissue Value: Aerial
  misc_feature: MA Experiment 108573 PARAMETER Experiment Name: At_Drought_cDNA_P Parameter: Treatment Value: Drought vs. No Drought
  misc_feature: MA Experiment ID: 108574 Result: Up-regulated in Transcription
  misc_feature: MA Experiment 108574 PARAMETER Experiment Name: At_Wounding__cDNA_P Parameter: Timepoint (hr) Value: 1
  misc_feature: MA Experiment 108574 PARAMETER Experiment Name: At_Wounding__cDNA_P Parameter: Tissue Value: Aerial
  misc_feature: MA Experiment 108574 PARAMETER Experiment Name: At_Wounding__cDNA_P Parameter: Treatment Value: Wounding vs. No Wounding
  misc_feature: MA Experiment ID: 108585 Result: Up-regulated in Transcription
  misc_feature: MA Experiment 108585 PARAMETER Experiment Name: At_5mM_NaNP_cDNA_P Parameter: Timepoint (hr) Value: 6
  misc_feature: MA Experiment 108585 PARAMETER Experiment Name: At_5mM_NaNP_cDNA_P Parameter: Tissue Value: Aerial
  misc_feature: MA Experiment 108585 PARAMETER Experiment Name: At_5mM_NaNP_cDNA_P Parameter: Treatment Value: null
  misc_feature: MA Experiment ID: 108667 Result: Up-regulated in Transcription
  misc_feature: MA Experiment 108667 PARAMETER Experiment Name: At_2mM_SA_cDNA_P Parameter: Plant Line Value: WS
  misc_feature: MA Experiment 108667 PARAMETER Experiment Name: At_2mM_SA_cDNA_P Parameter: Timepoint (hr) Value: 1
  misc_feature: MA Experiment 108667 PARAMETER Experiment Name: At_2mM_SA_cDNA_P Parameter: Treatment Value: 2mM SA vs. No Treatment
  misc_feature: MA Experiment ID: 108668 Result: Up-regulated in Transcription
  misc_feature: MA Experiment 108668 PARAMETER Experiment Name: At_2mM_SA_cDNA_P Parameter: Plant Line Value: WS
  misc_feature: MA Experiment 108668 PARAMETER Experiment Name: At_2mM_SA_cDNA_P Parameter: Timepoint (hr) Value: 6
  misc_feature: MA Experiment 108668 PARAMETER Experiment Name: At_2mM_SA_cDNA_P Parameter: Treatment Value: 2mM SA vs. No Treatment
  misc_feature: MA Experiment ID: 20000086 Result: Up-regulated in Transcription
  misc_feature: MA Experiment 20000086 PARAMETER Experiment Name: At_100uM_ABA_Mutants_cDNA_P Parameter: Plant Line Value: CS22
  misc_feature: MA Experiment 20000086 PARAMETER Experiment Name: At_100uM_ABA_Mutants_cDNA_P Parameter: Timepoint (hr) Value: 6
  misc_feature: MA Experiment 20000086 PARAMETER Experiment Name: At_100uM_ABA_Mutants_cDNA_P Parameter: Tissue Value: Aerial
  misc_feature: MA Experiment 20000086 PARAMETER Experiment Name: At_100uM_ABA_Mutants_cDNA_P Parameter: Treatment Value: 100uM ABA vs. No Treatment
  misc_feature: MA Experiment ID: 20000087 Result: Up-regulated in Transcription
  misc_feature: MA Experiment 20000087 PARAMETER Experiment Name: At_100uM_ABA_Mutants_cDNA_P Parameter: Plant Line Value: WS
  misc_feature: MA Experiment 20000087 PARAMETER Experiment Name: At_100uM_ABA_Mutants_cDNA_P Parameter: Timepoint (hr) Value: 6
  misc_feature: MA Experiment 20000087 PARAMETER Experiment Name: At_100uM_ABA_Mutants_cDNA_P Parameter: Tissue Value: Aerial
  misc_feature: MA Experiment 20000087 PARAMETER Experiment Name: At_100uM_ABA_Mutants_cDNA_P Parameter: Treatment Value: 100uM ABA vs. No Treatment
  misc_feature: MA Experiment ID: 20000089 Result: Up-regulated in Transcription
  misc_feature: MA Experiment ID: 20000090 Result: Up-regulated in Transcription
  misc_feature: MA Experiment ID: 20000117 Result: Up-regulated in Transcription
  misc_feature: MA Experiment 20000117 PARAMETER Experiment Name: At_100uM_ABA_Mutants_cDNA_P Parameter: Plant Line Value: Columbia
  misc_feature: MA Experiment 20000117 PARAMETER Experiment Name: At_100uM_ABA_Mutants_cDNA_P Parameter: Timepoint (hr) Value: 6
  misc_feature: MA Experiment 20000117 PARAMETER Experiment Name: At_100uM_ABA_Mutants_cDNA_P Parameter: Tissue Value: Aerial
  misc_feature: MA Experiment 20000117 PARAMETER Experiment Name: At_100uM_ABA_Mutants_cDNA_P Parameter: Treatment Value: 100uM ABA vs. No Treatment
  misc_feature: MA Experiment ID: 20000179 Result: Down-regulated in Transcription
  misc_feature: MA Experiment 20000179 PARAMETER Experiment Name: At_Germinating_Seeds_P Parameter: Age (hr) Value: 6 vs. 0
  misc_feature: MA Experiment 20000179 PARAMETER Experiment Name: At_Germinating_Seeds_P Parameter: Tissue Value: Germinating Seeds
  misc_feature: MA Experiment ID: 20000180 Result: Down-regulated in Transcription
  misc_feature: MA Experiment 20000180 PARAMETER Experiment Name: At_Germinating_Seeds_P Parameter: Age (hr) Value: 24 vs. 0
  misc_feature: MA Experiment 20000180 PARAMETER Experiment Name: At_Germinating_Seeds_P Parameter: Tissue Value: Germinating Seeds
  misc_feature: MA Experiment ID: 20000182 Result: Up-regulated in Transcription
  misc_feature: MA Experiment 20000182 PARAMETER Experiment Name: At_2mM_SA_P Parameter: Age (day) Value: 14
  misc_feature: MA Experiment 20000182 PARAMETER Experiment Name: At_2mM_SA_P Parameter: Organism Value: A. thaliana
  misc_feature: MA Experiment 20000182 PARAMETER Experiment Name: At_2mM_SA_P Parameter: Plant Line Value: WS
  misc_feature: MA Experiment 20000182 PARAMETER Experiment Name: At_2mM_SA_P Parameter: Timepoint (hr) Value: 6
  misc_feature: MA Experiment 20000182 PARAMETER Experiment Name: At_2mM_SA_P Parameter: Tissue Value: Aerial
  misc_feature: MA Experiment 20000182 PARAMETER Experiment Name: At_2mM_SA_P Parameter: Treatment Value: 2mM SA vs. No Treatment
  misc_feature: MA Experiment ID: 20000185 Result: Up-regulated in Transcription
  misc_feature: MA Experiment 20000185 PARAMETER Experiment Name: At_Roots__P Parameter: Age (day) Value: 7 vs. 21
  misc_feature: MA Experiment 20000185 PARAMETER Experiment Name: At_Roots__P Parameter: Organism Value: A. thaliana
  misc_feature: MA Experiment 20000185 PARAMETER Experiment Name: At_Roots__P Parameter: Tissue Value: Roots vs. Whole Plant
  misc_feature: MA Experiment ID: 20000224 Result: Up-regulated in Transcription
  misc_feature: MA Experiment ID: 20000437 Result: Up-regulated in Transcription
  misc_feature: MA Experiment 20000437 PARAMETER Experiment Name: At_Drought_P Parameter: Age (day) Value: 8
  misc_feature: MA Experiment 20000437 PARAMETER Experiment Name: At_Drought_P Parameter: Organism Value: A. thaliana
  misc_feature: MA Experiment 20000437 PARAMETER Experiment Name: At_Drought_P Parameter: Plant Line Value: WS
  misc_feature: MA Experiment 20000437 PARAMETER Experiment Name: At_Drought_P Parameter: Timepoint (hr) Value: 24
  misc_feature: MA Experiment 20000437 PARAMETER Experiment Name: At_Drought_P Parameter: Tissue Value: Whole Plant
  misc_feature: MA Experiment 20000437 PARAMETER Experiment Name: At_Drought_P Parameter: Treatment Value: Drought vs. No Drought
  misc_feature: MA Experiment ID: 20000439 Result: Up-regulated in Transcription
  misc_feature: MA Experiment 20000439 PARAMETER Experiment Name: At_Roots__P Parameter: Age (day) Value: 14 vs. 21
  misc_feature: MA Experiment 20000439 PARAMETER Experiment Name: At_Roots__P Parameter: Organism Value: A. thaliana
  misc_feature: MA Experiment 20000439 PARAMETER Experiment Name: At_Roots__P Parameter: Tissue Value: Roots vs. Whole Plant
  misc_feature: MA Experiment ID: 20000527 Result: Down-regulated in Transcription
  misc_feature: MA Experiment 20000527 PARAMETER Experiment Name: At_10percent_PEG_P Parameter: Age (day) Value: 20
  misc_feature: MA Experiment 20000527 PARAMETER Experiment Name: At_10percent_PEG_P Parameter: Organism Value: A. thaliana
  misc_feature: MA Experiment 20000527 PARAMETER Experiment Name: At_10percent_PEG_P Parameter: Plant Line Value: WS
  misc_feature: MA Experiment 20000527 PARAMETER Experiment Name: At_10percent_PEG_P Parameter: Timepoint (day) Value: 20
  misc_feature: MA Experiment 20000527 PARAMETER Experiment Name: At_10percent_PEG_P Parameter: Tissue Value: Whole Plant
  misc_feature: MA Experiment 20000527 PARAMETER Experiment Name: At_10percent_PEG_P Parameter: Treatment Value: 10percent PEG vs. No Treatment
  misc_feature: MA Experiment ID: 20000794 Result: Down-regulated in Transcription
  misc_feature: MA Experiment 20000794 PARAMETER Experiment Name: At_Petals_P Parameter: Age (day) Value: 23-25 days
  misc_feature: MA Experiment 20000794 PARAMETER Experiment Name: At_Petals_P Parameter: Plant Line Value: WS
  misc_feature: MA Experiment 20000794 PARAMETER Experiment Name: At_Petals_P Parameter: Tissue Value: Petals vs. Whole plant
  misc_feature: MA Experiment ID: 20001247 Result: Down-regulated in Transcription
  misc_feature: MA Experiment 20001247 PARAMETER Experiment Name: At_Far-red-induction_P Parameter: Age (day) Value: 7
  misc_feature: MA Experiment 20001247 PARAMETER Experiment Name: At_Far-red-induction_P Parameter: Light Value: Far-red vs. White
  misc_feature: MA Experiment 20001247 PARAMETER Experiment Name: At_Far-red-induction_P Parameter: Organism Value: A. thaliana
  misc_feature: MA Experiment 20001247 PARAMETER Experiment Name: At_Far-red-induction_P Parameter: Plant Line Value: Columbia
  misc_feature: MA Experiment 20001247 PARAMETER Experiment Name: At_Far-red-induction_P Parameter: Timepoint (hr) Value: 1
  misc_feature: MA Experiment 20001247 PARAMETER Experiment Name: At_Far-red-induction_P Parameter: Tissue Value: Whole Plant
  misc_feature: MA Experiment ID: 20001451 Result: Down-regulated in Transcription
  misc_feature: MA Experiment 20001451 PARAMETER Experiment Name: At_Far-red-induction_P Parameter: Age (day) Value: 7
  misc_feature: MA Experiment 20001451 PARAMETER Experiment Name: At_Far-red-induction_P Parameter: Light Value: Far-red vs. White
  misc_feature: MA Experiment 20001451 PARAMETER Experiment Name: At_Far-red-induction_P Parameter: Organism Value: A. thaliana
  misc_feature: MA Experiment 20001451 PARAMETER Experiment Name: At_Far-red-induction_P Parameter: Plant Line Value: Columbia
  misc_feature: MA Experiment 20001451 PARAMETER Experiment Name: At_Far-red-induction_P Parameter: Timepoint (hr) Value: 24
  misc_feature: MA Experiment 20001451 PARAMETER Experiment Name: At_Far-red-induction_P Parameter: Tissue Value: Whole Plant
  misc_feature: MA Experiment ID: 20001560 Result: Up-regulated in Transcription
  misc_feature: MA Experiment 20001560 PARAMETER Experiment Name: At_Drought_Soil_Dry_P Parameter: Age (day) Value: 28
  misc_feature: MA Experiment 20001560 PARAMETER Experiment Name: At_Drought_Soil_Dry_P Parameter: Organism Value: A. thaliana
  misc_feature: MA Experiment 20001560 PARAMETER Experiment Name: At_Drought_Soil_Dry_P Parameter: Plant Line Value: WS
  misc_feature: MA Experiment 20001560 PARAMETER Experiment Name: At_Drought_Soil_Dry_P Parameter: Post Timepoint (hr) Value: None
  misc_feature: MA Experiment 20001560 PARAMETER Experiment Name: At_Drought_Soil_Dry_P Parameter: Post-Treatment Value: None
  misc_feature: MA Experiment 20001560 PARAMETER Experiment Name: At_Drought_Soil_Dry_P Parameter: Timepoint (day) Value: 14
  misc_feature: MA Experiment 20001560 PARAMETER Experiment Name: At_Drought_Soil_Dry_P Parameter: Treatment Value: Drought vs. No Drought
  misc_feature: MA Experiment ID: 20001904 Result: Up-regulated in Transcription
  misc_feature: MA Experiment 20001904 PARAMETER Experiment Name: At_Drought_Reproduction_P Parameter: Age (day) Value: 37
  misc_feature: MA Experiment 20001904 PARAMETER Experiment Name: At_Drought_Reproduction_P Parameter: Organism Value: A. thaliana
  misc_feature: MA Experiment 20001904 PARAMETER Experiment Name: At_Drought_Reproduction_P Parameter: Plant Line Value: WS
  misc_feature: MA Experiment 20001904 PARAMETER Experiment Name: At_Drought_Reproduction_P Parameter: Timepoint (day) Value: 7
  misc_feature: MA Experiment 20001904 PARAMETER Experiment Name: At_Drought_Reproduction_P Parameter: Tissue Value: Rosettes
  misc_feature: MA Experiment 20001904 PARAMETER Experiment Name: At_Drought_Reproduction_P Parameter: Treatment Value: Drought vs. No Drought
  misc_feature: MA Experiment ID: 20001905 Result: Up-regulated in Transcription
  misc_feature: MA Experiment 20001905 PARAMETER Experiment Name: At_Drought_Reproduction_P Parameter: Age (day) Value: 40
  misc_feature: MA Experiment 20001905 PARAMETER Experiment Name: At_Drought_Reproduction_P Parameter: Organism Value: A. thaliana
  misc_feature: MA Experiment 20001905 PARAMETER Experiment Name: At_Drought_Reproduction_P Parameter: Plant Line Value: WS
  misc_feature: MA Experiment 20001905 PARAMETER Experiment Name: At_Drought_Reproduction_P Parameter: Timepoint (day) Value: 10
  misc_feature: MA Experiment 20001905 PARAMETER Experiment Name: At_Drought_Reproduction_P Parameter: Tissue Value: Rosettes
  misc_feature: MA Experiment 20001905 PARAMETER Experiment Name: At_Drought_Reproduction_P Parameter: Treatment Value: Drought vs. No Drought
acgcattcgtcatttggtccctccacttagagagaagcagacagaacataactaaaatcgagaaaaatggcaaacagtggtgaaggtaaagtggtgtgtgtaacaggagcctccggttacatcgcctcatggctcgtcaagttcctacttagccgtggctacactgttaaggcctccgtccgtgatcccagtgatccgaaaaagacacaacacttagtttcactagaaggtgcaaaggaaagacttcacttgttcaaagcagaccttttggaacaaggttctttcgactctgctattgatggttgccatggagttttccacactgcttctccattttttaatgatgccaaagacccacaggctgaacttattgatcctgcggtcaaggggacgcttaacgttttgaattcgtgcgccaaagcctcttcggttaagagggttgttgtaacctcctccatggctgccgttggttacaatggaaaaccacgcacacctgatgttaccgtcgatgaaacttggttctctgatcctgagctttgcgaggcctccaagatgtggtatgttctatccaagactttggcggaagatgcagcttggaaactcgctaaagagaaaggcttagacattgttactattaacccggctatggtgatcggtcctctcctacagccaactctgaacacgagtgctgctgctatattaaacttaatcaatggtgcaaagactttcccaaacttgagtttcggatgggttaatgtaaaagacgtagccaatgcgcacatccaaacatttgaggtcccttcagctaatgggcgttattgtttggtcgagcgtgtcgttcaccactccgagattgttaacattctacgtgagctttacccaaatctcccactacctgaaaggtgtgtggacgagaatccctacgtgccaacgtatcaagtgtccaaggataaaacgaggagccttggcatagactacatacccttgaaggttagcatcaaggagaccgtcgagtccttgaaggaaaaaggtttcgcacagttctgagaaagcatttgagccaatggatttaatccagattagataaagtatttggaagactatttcaaaaataatatttggaacatgtcaatgttctcaaggagatattagtatgttcttgtgtactttattgntgttccatcaaatgagttacttttcctttt

SEQ ID NO: 27608 - protein, 326 aa, Arabidopsis thaliana
  peptide (1)..(326): Ceres Seq. ID no. 12332477
  misc_feature (10)..(139): Pfam Name: NAD dependent epimerase/dehydratase family Pfam Description: NAD dependent epimerase/dehydratase family
  misc_feature (10)..(139): Pfam Name: NAD dependent epimerase/dehydratase family Pfam Description: NAD dependent epimerase/dehydratase family
  misc_feature (3)..(323): Homolog of NCBI NO: 5852203 NR Description: aldehyde reductase [Vigna radiata]
  misc_feature (3)..(326): Homolog of NCBI NO: 7431406 NR Description: probable cinnamyl-alcohol dehydrogenase (EC
  misc_feature (1)..(326): Homolog of NCBI NO: 34913420 NR Description: putative cinnamyl-alcohol dehydrogenase
  misc_feature (6)..(326): Homolog of NCBI NO: 25405464 NR Description: hypothetical protein F5D21.12 [imported] -
  misc_feature (3)..(326): Homolog of NCBI NO: 30694964 NR Description: cinnamyl-alcohol dehydrogenase (CAD), putative
  misc_feature (3)..(323): Homolog of NCBI NO: 5852203 NR Description: aldehyde reductase [Vigna radiata]
  misc_feature (1)..(326): Homolog of NCBI NO: 34913420 NR Description: putative cinnamyl-alcohol dehydrogenase
  misc_feature (3)..(326): Homolog of NCBI NO: 30694964 NR Description: cinnamyl-alcohol dehydrogenase (CAD), putative
  misc_feature (1)..(326): Homolog of NCBI NO: 21594240 NR Description: cinnamyl-alcohol dehydrogenase-like protein
  misc_feature (1)..(326): Homolog of NCBI NO: 15239741 NR Description: cinnamyl-alcohol dehydrogenase - like protein
  misc_feature (3)..(326): Homolog of NCBI NO: 7488627 NR Description: probable cinnamyl-alcohol dehydrogenase (EC
  misc_feature (2)..(326): Homolog of NCBI NO: 7431409 NR Description: cinnamyl-alcohol dehydrogenase (EC 1.1.1.195) -
  misc_feature (3)..(326): Homolog of NCBI NO: 37029996 NR Description: NADPH-dependent cinnamyl alcohol dehydrogenase
  misc_feature (6)..(326): Homolog of NCBI NO: 25405464 NR Description: hypothetical protein F5D21.12 [imported] -
  misc_feature (3)..(326): Homolog of NCBI NO: 7431406 NR Description: probable cinnamyl-alcohol dehydrogenase (EC
  misc_feature (3)..(326): Homolog of NCBI NO: 37029996 NR Description: NADPH-dependent cinnamyl alcohol dehydrogenase
  misc_feature (2)..(326): Homolog of NCBI NO: 7431409 NR Description: cinnamyl-alcohol dehydrogenase (EC 1.1.1.195) -
  misc_feature (3)..(326): Homolog of NCBI NO: 7488627 NR Description: probable cinnamyl-alcohol dehydrogenase (EC
  misc_feature (1)..(326): Homolog of NCBI NO: 15239741 NR Description: cinnamyl-alcohol dehydrogenase - like protein
  misc_feature (1)..(326): Homolog of NCBI NO: 21594240 NR Description: cinnamyl-alcohol dehydrogenase-like protein
MANSGEGKVVCVTGASGYIASWLVKFLLSRGYTVKASVRDPSDPKKTQHLVSLEGAKERLHLFKADLLEQGSFDSAIDGCHGVFHTASPFFNDAKDPQAELIDPAVKGTLNVLNSCAKASSVKRVVVTSSMAAVGYNGKPRTPDVTVDETWFSDPELCEASKMWYVLSKTLAEDAAWKLAKEKGLDIVTINPAMVIGPLLQPTLNTSAAAILNLINGAKTFPNLSFGWVNVKDVANAHIQTFEVPSANGRYCLVERVVHHSEIVNILRELYPNLPLPERCVDENPYVPTYQVSKDKTRSLGIDYIPLKVSIKETVESLKEKGFAQF

SEQ ID NO: 27609 - protein, 196 aa, Arabidopsis thaliana
  peptide (1)..(196): Ceres Seq. ID no. 12332478
  misc_feature (1)..(109): Pfam Name: 3-beta hydroxysteroid dehydrogenase/isomerase family Pfam Description: 3-beta hydroxysteroid dehydrogenase/isomerase
  misc_feature (1)..(109): Pfam Name: 3-beta hydroxysteroid dehydrogenase/isomerase family Pfam Description: 3-beta hydroxysteroid dehydrogenase/isomerase
  misc_feature (1)..(193): Homolog of NCBI NO: 5852203 NR Description: aldehyde reductase [Vigna radiata]
  misc_feature (1)..(196): Homolog of NCBI NO: 7431406 NR Description: probable cinnamyl-alcohol dehydrogenase (EC
  misc_feature (1)..(196): Homolog of NCBI NO: 34913420 NR Description: putative cinnamyl-alcohol dehydrogenase
  misc_feature (1)..(196): Homolog of NCBI NO: 25405464 NR Description: hypothetical protein F5D21.12 [imported] -
  misc_feature (1)..(196): Homolog of NCBI NO: 30694964 NR Description: cinnamyl-alcohol dehydrogenase (CAD), putative
  misc_feature (1)..(193): Homolog of NCBI NO: 5852203 NR Description: aldehyde reductase [Vigna radiata]
  misc_feature (1)..(196): Homolog of NCBI NO: 34913420 NR Description: putative cinnamyl-alcohol dehydrogenase
  misc_feature (1)..(196): Homolog of NCBI NO: 30694964 NR Description: cinnamyl-alcohol dehydrogenase (CAD), putative
  misc_feature (1)..(196): Homolog of NCBI NO: 21594240 NR Description: cinnamyl-alcohol dehydrogenase-like protein
  misc_feature (1)..(196): Homolog of NCBI NO: 15239741 NR Description: cinnamyl-alcohol dehydrogenase - like protein
  misc_feature (1)..(196): Homolog of NCBI NO: 7488627 NR Description: probable cinnamyl-alcohol dehydrogenase (EC
  misc_feature (1)..(196): Homolog of NCBI NO: 7431409 NR Description: cinnamyl-alcohol dehydrogenase (EC 1.1.1.195) -
  misc_feature (1)..(196): Homolog of NCBI NO: 37029996 NR Description: NADPH-dependent cinnamyl alcohol dehydrogenase
  misc_feature (1)..(196): Homolog of NCBI NO: 25405464 NR Description: hypothetical protein F5D21.12 [imported] -
  misc_feature (1)..(196): Homolog of NCBI NO: 7431406 NR Description: probable cinnamyl-alcohol dehydrogenase (EC
  misc_feature (1)..(196): Homolog of NCBI NO: 37029996 NR Description: NADPH-dependent cinnamyl alcohol dehydrogenase
  misc_feature (1)..(196): Homolog of NCBI NO: 7431409 NR Description: cinnamyl-alcohol dehydrogenase (EC 1.1.1.195) -
  misc_feature (1)..(196): Homolog of NCBI NO: 7488627 NR Description: probable cinnamyl-alcohol dehydrogenase (EC
  misc_feature (1)..(196): Homolog of NCBI NO: 15239741 NR Description: cinnamyl-alcohol dehydrogenase - like protein
  misc_feature (1)..(196): Homolog of NCBI NO: 21594240 NR Description: cinnamyl-alcohol dehydrogenase-like protein
MAAVGYNGKPRTPDVTVDETWFSDPELCEASKMWYVLSKTLAEDAAWKLAKEKGLDIVTINPAMVIGPLLQPTLNTSAAAILNLINGAKTFPNLSFGWVNVKDVANAHIQTFEVPSANGRYCLVERVVHHSEIVNILRELYPNLPLPERCVDENPYVPTYQVSKDKTRSLGIDYIPLKVSIKETVESLKEKGFAQF

SEQ ID NO: 27610 - protein, 164 aa, Arabidopsis thaliana
  peptide (1)..(164): Ceres Seq. ID no. 12332479
  misc_feature (1)..(77): Pfam Name: 3-beta hydroxysteroid dehydrogenase/isomerase family Pfam Description: 3-beta hydroxysteroid dehydrogenase/isomerase
  misc_feature (1)..(77): Pfam Name: 3-beta hydroxysteroid dehydrogenase/isomerase family Pfam Description: 3-beta hydroxysteroid dehydrogenase/isomerase
  misc_feature (1)..(161): Homolog of NCBI NO: 5852203 NR Description: aldehyde reductase [Vigna radiata]
  misc_feature (1)..(164): Homolog of NCBI NO: 7431406 NR Description: probable cinnamyl-alcohol dehydrogenase (EC
  misc_feature (1)..(164): Homolog of NCBI NO: 34913420 NR Description: putative cinnamyl-alcohol dehydrogenase
  misc_feature (1)..(164): Homolog of NCBI NO: 25405464 NR Description: hypothetical protein F5D21.12 [imported] -
  misc_feature (1)..(164): Homolog of NCBI NO: 30694964 NR Description: cinnamyl-alcohol dehydrogenase (CAD), putative
  misc_feature (1)..(161): Homolog of NCBI NO: 5852203 NR Description: aldehyde reductase [Vigna radiata]
  misc_feature (1)..(164): Homolog of NCBI NO: 34913420 NR Description: putative cinnamyl-alcohol dehydrogenase
  misc_feature (1)..(164): Homolog of NCBI NO: 30694964 NR Description: cinnamyl-alcohol dehydrogenase (CAD), putative
  misc_feature (1)..(164): Homolog of NCBI NO: 21594240 NR Description: cinnamyl-alcohol dehydrogenase-like protein
  misc_feature (1)..(164): Homolog of NCBI NO: 15239741 NR Description: cinnamyl-alcohol dehydrogenase - like protein
  misc_feature (1)..(164): Homolog of NCBI NO: 7488627 NR Description: probable cinnamyl-alcohol dehydrogenase (EC
  misc_feature (1)..(164): Homolog of NCBI NO: 7431409 NR Description: cinnamyl-alcohol dehydrogenase (EC 1.1.1.195) -
  misc_feature (1)..(164): Homolog of NCBI NO: 37029996 NR Description: NADPH-dependent cinnamyl alcohol dehydrogenase
  misc_feature (1)..(164): Homolog of NCBI NO: 25405464 NR Description: hypothetical protein F5D21.12 [imported] -
  misc_feature (1)..(164): Homolog of NCBI NO: 7431406 NR Description: probable cinnamyl-alcohol dehydrogenase (EC
  misc_feature (1)..(164): Homolog of NCBI NO: 37029996 NR Description: NADPH-dependent cinnamyl alcohol dehydrogenase
  misc_feature (1)..(164): Homolog of NCBI NO: 7431409 NR Description: cinnamyl-alcohol dehydrogenase (EC 1.1.1.195) -
  misc_feature (1)..(164): Homolog of NCBI NO: 7488627 NR Description: probable cinnamyl-alcohol dehydrogenase (EC
  misc_feature (1)..(164): Homolog of NCBI NO: 15239741 NR Description: cinnamyl-alcohol dehydrogenase - like protein
  misc_feature (1)..(164): Homolog of NCBI NO: 21594240 NR Description: cinnamyl-alcohol dehydrogenase-like protein
MWYVLSKTLAEDAAWKLAKEKGLDIVTINPAMVIGPLLQPTLNTSAAAILNLINGAKTFPNLSFGWVNVKDVANAHIQTFEVPSANGRYCLVERVVHHSEIVNILRELYPNLPLPERCVDENPYVPTYQVSKDKTRSLGIDYIPLKVSIKETVESLKEKGFAQF

SEQ ID NO: 27611 - DNA, 1391 bp, Arabidopsis thaliana
  misc_feature (1)..(1391): Ceres Seq. ID no. 12335464
  misc_feature: MA Experiment ID: 108435 Result: Down-regulated in Transcription
  misc_feature: MA Experiment 108435 PARAMETER Experiment Name: At_stm_Mutants_cDNA_P Parameter: Plant Line Value: wt Landsburg vs stm
  misc_feature: MA Experiment 108435 PARAMETER Experiment Name: At_stm_Mutants_cDNA_P Parameter: Tissue Value: Shoot Apical Meristem Region
  misc_feature: MA Experiment ID: 108462 Result: Up-regulated in Transcription
  misc_feature: MA Experiment 108462 PARAMETER Experiment Name: At_Germinating_Seeds_cDNA_P Parameter: Age (day) Value: 2 vs. 0
  misc_feature: MA Experiment 108462 PARAMETER Experiment Name: At_Germinating_Seeds_cDNA_P Parameter: Tissue Value: Germinating Seeds
  misc_feature: MA Experiment ID: 108577 Result: Down-regulated in Transcription
  misc_feature: MA Experiment 108577 PARAMETER Experiment Name: At_42deg_Heat_cDNA_P Parameter: Temperature (deg C) Value: 42 vs. 22
  misc_feature: MA Experiment 108577 PARAMETER Experiment Name: At_42deg_Heat_cDNA_P Parameter: Timepoint (hr) Value: 6
  misc_feature: MA Experiment 108577 PARAMETER Experiment Name: At_42deg_Heat_cDNA_P Parameter: Tissue Value: Aerial
  misc_feature: MA Experiment ID: 108595 Result: Down-regulated in Transcription
  misc_feature: MA Experiment 108595 PARAMETER Experiment Name: At_Ler-pi_Ovule_cDNA_P Parameter: Plant Line Value: null
  misc_feature: MA Experiment ID: 108668 Result: Down-regulated in Transcription
  misc_feature: MA Experiment 108668 PARAMETER Experiment Name: At_2mM_SA_cDNA_P Parameter: Plant Line Value: WS
  misc_feature: MA Experiment 108668 PARAMETER Experiment Name: At_2mM_SA_cDNA_P Parameter: Timepoint (hr) Value: 6
  misc_feature: MA Experiment 108668 PARAMETER Experiment Name: At_2mM_SA_cDNA_P Parameter: Treatment Value: 2mM SA vs. No Treatment
  misc_feature: MA Experiment ID: 20000069 Result: Down-regulated in Transcription
  misc_feature: MA Experiment 20000069 PARAMETER Experiment Name: At_100uM_ABA_Mutants_cDNA_P Parameter: Plant Line Value: CS23
  misc_feature: MA Experiment 20000069 PARAMETER Experiment Name: At_100uM_ABA_Mutants_cDNA_P Parameter: Timepoint (hr) Value: 6
  misc_feature: MA Experiment 20000069 PARAMETER Experiment Name: At_100uM_ABA_Mutants_cDNA_P Parameter: Tissue Value: Aerial
  misc_feature: MA Experiment 20000069 PARAMETER Experiment Name: At_100uM_ABA_Mutants_cDNA_P Parameter: Treatment Value: 100uM ABA vs. No Treatment
  misc_feature: MA Experiment ID: 20000184 Result: Up-regulated in Transcription
  misc_feature: MA Experiment 20000184 PARAMETER Experiment Name: At_Shoots__P Parameter: Age (day) Value: 7
  misc_feature: MA Experiment 20000184 PARAMETER Experiment Name: At_Shoots__P Parameter: Tissue Value: Shoots vs. Whole Plant
  misc_feature: MA Experiment ID: 20000224 Result: Down-regulated in Transcription
  misc_feature: MA Experiment ID: 20000437 Result: Down-regulated in Transcription
  misc_feature: MA Experiment 20000437 PARAMETER Experiment Name: At_Drought_P Parameter: Age (day) Value: 8
  misc_feature: MA Experiment 20000437 PARAMETER Experiment Name: At_Drought_P Parameter: Organism Value: A. thaliana
  misc_feature: MA Experiment 20000437 PARAMETER Experiment Name: At_Drought_P Parameter: Plant Line Value: WS
  misc_feature: MA Experiment 20000437 PARAMETER Experiment Name: At_Drought_P Parameter: Timepoint (hr) Value: 24
  misc_feature: MA Experiment 20000437 PARAMETER Experiment Name: At_Drought_P Parameter: Tissue Value: Whole Plant
  misc_feature: MA Experiment 20000437 PARAMETER Experiment Name: At_Drought_P Parameter: Treatment Value: Drought vs. No Drought
  misc_feature: MA Experiment ID: 20001911 Result: Down-regulated in Transcription
  misc_feature: MA Experiment 20001911 PARAMETER Experiment Name: At_Drought_Reproduction_P Parameter: Age (day) Value: 40
  misc_feature: MA Experiment 20001911 PARAMETER Experiment Name: At_Drought_Reproduction_P Parameter: Organism Value: A. thaliana
  misc_feature: MA Experiment 20001911 PARAMETER Experiment Name: At_Drought_Reproduction_P Parameter: Plant Line Value: WS
  misc_feature: MA Experiment 20001911 PARAMETER Experiment Name: At_Drought_Reproduction_P Parameter: Timepoint (day) Value: 10
  misc_feature: MA Experiment 20001911 PARAMETER Experiment Name: At_Drought_Reproduction_P Parameter: Tissue Value: Flowers
  misc_feature: MA Experiment 20001911 PARAMETER Experiment Name: At_Drought_Reproduction_P Parameter: Treatment Value: Drought vs. No Drought
actctctcttttccaccggcgaccattcattctctctcctcctcctcctcctcctcagcttcctccattgctccttaaccctcattcctcgatttgttcttctcttcaccatttcccctttttaccctttttctactcagacgtgacggcgactttttattactgtgtctcccacctttgactcgccctggggggatttttttttgctccagaggcgaaagaaacaaaaaaaagcaatggggtttctccgttgtctccagctgctgctgcttctgtttctatctcttcgtctacaaaagctctctgctcaatcttcttcacccaatgcttcttcttcttcttcactcgatgctcttcttcaagattactcttttagagccttgcttcgtcctcgtaccggcattctctacgaggctactactgttccttccaatttgactgggatcaaactcgctgctatgagactcagaagcggaagctttagaaaacgtggagtcactccttttaatgagttctcaattcccagcggcgttatcgtcaagccgtatgtgacaaggcttgttttggtttatcaaaacctagctaatttctctcacttgtattaccctttgtctggttatgattatgtcgctcctgtcttgggtcttctcgcttacgatgctaagaatctctctgcgcttaatttgcctcagcttgatttaagggtgtctaatgatcctatcagaatcgatttctctgatctggaacgaatcccgcaagggtctagtgctaagtgtgttagattcgattctaaaggtgaagcgagtttcagcgattcgattcagcctggaaacacatgcgagactgagcatcagggacatttctctgtggtggtgaaatctgtggcttctgctccgagtctagctcctcctgggattgagagtaagaagaagaagaagagctctgattccaattccaagacttggatcattgttgggtcggtggttggtggattgatactgttggggcttttactgtttctggttttgagatgtcgaaattacaagaagcaagagaaaatgagggagatggagagagctggagagacaggggaagctctgaggatgactcaggttggtgaaacaagagcaccaactgctactacgactcgtacacaaccaatgcttgaaaccgaatacgcagcttaggatacttttgtgtacatcatcatcatcatcacatcttcttgatcatctgttactgtctttttctttttttcttctacaattattcttcttttggtaaagtgtttctttttctgattattttttctttgtggtaagcaagttgatacttccacattcatcttgtttctctgctggtgataaggaaataagtaatattgttttctt

SEQ ID NO: 27612 - protein, 316 aa, Arabidopsis thaliana
  peptide (1)..(316): Ceres Seq. ID no. 12335465
  misc_feature (9)..(313): Homolog of NCBI NO: 34898284 NR Description: hypothetical protien~similar to Arabidopsis
  misc_feature (25)..(217): Homolog of NCBI NO: 7486583 NR Description: hypothetical protein F7H19.80 - Arabidopsis
  misc_feature (3)..(217): Homolog of NCBI NO: 30685980 NR Description: expressed protein [Arabidopsis thaliana]
  misc_feature (7)..(311): Homolog of NCBI NO: 28393831 NR Description: unknown protein [Arabidopsis thaliana]
  misc_feature (7)..(311): Homolog of NCBI NO: 15234077 NR Description: hypothetical protein; protein id: At4g01140.1
  misc_feature (4)..(314): Homolog of NCBI NO: 25354607 NR Description: F16P17.15 [imported] - Arabidopsis thaliana
  misc_feature (1)..(316): Homolog of NCBI NO: 27542758 NR Description: hypothetical protein-like protein [Sorghum
  misc_feature (1)..(316): Homolog of NCBI NO: 27542756 NR Description: hypothetical protein-like protein [Sorghum
  misc_feature (1)..(316): Homolog of NCBI NO: 21594262 NR Description: unknown [Arabidopsis thaliana]
  misc_feature (1)..(316): Homolog of NCBI NO: 18398173 NR Description: expressed protein
MGFLRCLQLLLLLFLSLRLQKLSAQSSSPNASSSSSLDALLQDYSFRALLRPRTGILYEATTVPSNLTGIKLAAMRLRSGSFRKRGVTPFNEFSIPSGVIVKPYVTRLVLVYQNLANFSHLYYPLSGYDYVAPVLGLLAYDAKNLSALNLPQLDLRVSNDPIRIDFSDLERIPQGSSAKCVRFDSKGEASFSDSIQPGNTCETEHQGHFSVVVKSVASAPSLAPPGIESKKKKKSSDSNSKTWIIVGSVVGGLILLGLLLFLVLRCRNYKKQEKMREMERAGETGEALRMTQVGETRAPTATTTRTQPMLETEYAA

SEQ ID NO: 27613 - protein, 242 aa, Arabidopsis thaliana
  peptide (1)..(242): Ceres Seq. ID no. 12335466
  misc_feature (1)..(239): Homolog of NCBI NO: 34898284 NR Description: hypothetical protien~similar to Arabidopsis
  misc_feature (1)..(143): Homolog of NCBI NO: 7486583 NR Description: hypothetical protein F7H19.80 - Arabidopsis
  misc_feature (1)..(143): Homolog of NCBI NO: 30685980 NR Description: expressed protein [Arabidopsis thaliana]
  misc_feature (1)..(237): Homolog of NCBI NO: 28393831 NR Description: unknown protein [Arabidopsis thaliana]
  misc_feature (1)..(237): Homolog of NCBI NO: 15234077 NR Description: hypothetical protein; protein id: At4g01140.1
  misc_feature (1)..(240): Homolog of NCBI NO: 25354607 NR Description: F16P17.15 [imported] - Arabidopsis thaliana
  misc_feature (1)..(242): Homolog of NCBI NO: 27542758 NR Description: hypothetical protein-like protein [Sorghum
  misc_feature (1)..(242): Homolog of NCBI NO: 27542756 NR Description: hypothetical protein-like protein [Sorghum
  misc_feature (1)..(242): Homolog of NCBI NO: 21594262 NR Description: unknown [Arabidopsis thaliana]
  misc_feature (1)..(242): Homolog of NCBI NO: 18398173 NR Description: expressed protein
MRLRSGSFRKRGVTPFNEFSIPSGVIVKPYVTRLVLVYQNLANFSHLYYPLSGYDYVAPVLGLLAYDAKNLSALNLPQLDLRVSNDPIRIDFSDLERIPQGSSAKCVRFDSKGEASFSDSIQPGNTCETEHQGHFSVVVKSVASAPSLAPPGIESKKKKKSSDSNSKTWIIVGSVVGGLILLGLLLFLVLRCRNYKKQEKMREMERAGETGEALRMTQVGETRAPTATTTRTQPMLETEYAA

SEQ ID NO: 27614 - DNA, 1310 bp, Arabidopsis thaliana
  misc_feature (1)..(1310): Ceres Seq. ID no. 12335884
  misc_feature: MA Experiment ID: 108434 Result: Up-regulated in Transcription
  misc_feature: MA Experiment 108434 PARAMETER Experiment Name: At_Root_Tips_cDNA_P Parameter: Tissue Value: Root Tips
  misc_feature: MA Experiment ID: 108461 Result: Up-regulated in Transcription
  misc_feature: MA Experiment 108461 PARAMETER Experiment Name: At_Germinating_Seeds_cDNA_P Parameter: Age (day) Value: 1 vs. 0
  misc_feature: MA Experiment 108461 PARAMETER Experiment Name: At_Germinating_Seeds_cDNA_P Parameter: Tissue Value: Germinating Seeds
  misc_feature: MA Experiment ID: 108577 Result: Down-regulated in Transcription
  misc_feature: MA Experiment 108577 PARAMETER Experiment Name: At_42deg_Heat_cDNA_P Parameter: Temperature (deg C) Value: 42 vs. 22
  misc_feature: MA Experiment 108577 PARAMETER Experiment Name: At_42deg_Heat_cDNA_P Parameter: Timepoint (hr) Value: 6
  misc_feature: MA Experiment 108577 PARAMETER Experiment Name: At_42deg_Heat_cDNA_P Parameter: Tissue Value: Aerial
  misc_feature: MA Experiment ID: 20000111 Result: Down-regulated in Transcription
  misc_feature: MA Experiment 20000111 PARAMETER Experiment Name: At_42deg_Heat_cDNA_P Parameter: Temperature (deg C) Value: 42 vs. 22
  misc_feature: MA Experiment 20000111 PARAMETER Experiment Name: At_42deg_Heat_cDNA_P Parameter: Timepoint (hr) Value: 6
  misc_feature: MA Experiment 20000111 PARAMETER Experiment Name: At_42deg_Heat_cDNA_P Parameter: Tissue Value: Aerial
  misc_feature: MA Experiment ID: 20000113 Result: Down-regulated in Transcription
  misc_feature: MA Experiment 20000113 PARAMETER Experiment Name: At_42deg_Heat_cDNA_P Parameter: Temperature (deg C) Value: 42 vs. 22
  misc_feature: MA Experiment 20000113 PARAMETER Experiment Name: At_42deg_Heat_cDNA_P Parameter: Timepoint (hr) Value: 8
  misc_feature: MA Experiment 20000113 PARAMETER Experiment Name: At_42deg_Heat_cDNA_P Parameter: Tissue Value: Aerial
  misc_feature: MA Experiment ID: 20000184 Result: Up-regulated in Transcription
  misc_feature: MA Experiment 20000184 PARAMETER Experiment Name: At_Shoots__P Parameter: Age (day) Value: 7
  misc_feature: MA Experiment 20000184 PARAMETER Experiment Name: At_Shoots__P Parameter: Tissue Value: Shoots vs. Whole Plant
  misc_feature: MA Experiment ID: 20000224 Result: Down-regulated in Transcription
  misc_feature: MA Experiment ID: 20000234 Result: Up-regulated in Transcription
  misc_feature: MA Experiment 20000234 PARAMETER Experiment Name: At_Siliques_P Parameter: Age (day) Value: 21
  misc_feature: MA Experiment 20000234 PARAMETER Experiment Name: At_Siliques_P Parameter: Organism Value: A. thaliana
  misc_feature: MA Experiment 20000234 PARAMETER Experiment Name: At_Siliques_P Parameter: Plant Line Value: WS
  misc_feature: MA Experiment 20000234 PARAMETER Experiment Name: At_Siliques_P Parameter: Tissue Value: Less Than 5mm Siliques vs. Whole Plant
  misc_feature: MA Experiment ID: 20000573 Result: Down-regulated in Transcription
  misc_feature: MA Experiment 20000573 PARAMETER Experiment Name: At_100uM_ABA_Mutants__P Parameter: Organism Value: A. thaliana
  misc_feature: MA Experiment 20000573 PARAMETER Experiment Name: At_100uM_ABA_Mutants__P Parameter: Plant Line Value: CS22 vs. Ler wt
  misc_feature: MA Experiment 20000573 PARAMETER Experiment Name: At_100uM_ABA_Mutants__P Parameter: Timepoint (hr) Value: N/A
  misc_feature: MA Experiment 20000573 PARAMETER Experiment Name: At_100uM_ABA_Mutants__P Parameter: Tissue Value: Whole Plant
  misc_feature: MA Experiment 20000573 PARAMETER Experiment Name: At_100uM_ABA_Mutants__P Parameter: Treatment Value: None
  misc_feature: MA Experiment ID: 20000794 Result: Down-regulated in Transcription
  misc_feature: MA Experiment 20000794 PARAMETER Experiment Name: At_Petals_P Parameter: Age (day) Value: 23-25 days
  misc_feature: MA Experiment 20000794 PARAMETER Experiment Name: At_Petals_P Parameter: Plant Line Value: WS
  misc_feature: MA Experiment 20000794 PARAMETER Experiment Name: At_Petals_P Parameter: Tissue Value: Petals vs. Whole plant
  misc_feature: MA Experiment ID: 20001558 Result: Up-regulated in Transcription
  misc_feature: MA Experiment 20001558 PARAMETER Experiment Name: At_Drought_Soil_Dry_P Parameter: Age (day) Value: 27
  misc_feature: MA Experiment 20001558 PARAMETER Experiment Name: At_Drought_Soil_Dry_P Parameter: Organism Value: A. thaliana
  misc_feature: MA Experiment 20001558 PARAMETER Experiment Name: At_Drought_Soil_Dry_P Parameter: Plant Line Value: WS
  misc_feature: MA Experiment 20001558 PARAMETER Experiment Name: At_Drought_Soil_Dry_P Parameter: Post Timepoint (hr) Value: 6
  misc_feature: MA Experiment 20001558 PARAMETER Experiment Name: At_Drought_Soil_Dry_P Parameter: Post-Treatment Value: Re-Water vs. No Drought
  misc_feature: MA Experiment 20001558 PARAMETER Experiment Name: At_Drought_Soil_Dry_P Parameter: Timepoint (day) Value: 13
  misc_feature: MA Experiment 20001558 PARAMETER Experiment Name: At_Drought_Soil_Dry_P Parameter: Treatment Value: Drought vs. No Drought
  misc_feature: MA Experiment ID: 20001560 Result: Up-regulated in Transcription
  misc_feature: MA Experiment 20001560 PARAMETER Experiment Name: At_Drought_Soil_Dry_P Parameter: Age (day) Value: 28
  misc_feature: MA Experiment 20001560 PARAMETER Experiment Name: At_Drought_Soil_Dry_P Parameter: Organism Value: A. thaliana
  misc_feature: MA Experiment 20001560 PARAMETER Experiment Name: At_Drought_Soil_Dry_P Parameter: Plant Line Value: WS
  misc_feature: MA Experiment 20001560 PARAMETER Experiment Name: At_Drought_Soil_Dry_P Parameter: Post Timepoint (hr) Value: None
  misc_feature: MA Experiment 20001560 PARAMETER Experiment Name: At_Drought_Soil_Dry_P Parameter: Post-Treatment Value: None
  misc_feature: MA Experiment 20001560 PARAMETER Experiment Name: At_Drought_Soil_Dry_P Parameter: Timepoint (day) Value: 14
  misc_feature: MA Experiment 20001560 PARAMETER Experiment Name: At_Drought_Soil_Dry_P Parameter: Treatment Value: Drought vs. No Drought
  misc_feature: MA Experiment ID: 20001911 Result: Down-regulated in Transcription
  misc_feature: MA Experiment 20001911 PARAMETER Experiment Name: At_Drought_Reproduction_P Parameter: Age (day) Value: 40
  misc_feature: MA Experiment 20001911 PARAMETER Experiment Name: At_Drought_Reproduction_P Parameter: Organism Value: A. thaliana
  misc_feature: MA Experiment 20001911 PARAMETER Experiment Name: At_Drought_Reproduction_P Parameter: Plant Line Value: WS
  misc_feature: MA Experiment 20001911 PARAMETER Experiment Name: At_Drought_Reproduction_P Parameter: Timepoint (day) Value: 10
  misc_feature: MA Experiment 20001911 PARAMETER Experiment Name: At_Drought_Reproduction_P Parameter: Tissue Value: Flowers
  misc_feature: MA Experiment 20001911 PARAMETER Experiment Name: At_Drought_Reproduction_P Parameter: Treatment Value: Drought vs. No Drought
actcccaactacatcctcttcaatgctcaatctcgtcttcttcttcctctctatttaatttcccttgtctctctatctctctcaatttcctcatctgggtcttcctcgtttgctccgcttaagcaccatgaaggtcaccgtcgtctcccgcagcggcagagaagtcctcaaagctccccttgacctccccgattcggcgactgttgctgatctgcaagaagcgtttcataagagagctaagaagttttacccatcgaggcaaagactgactcttcccgtgactcctggatcgaaggacaaacctgttgtcctcaatagcaagaaatcactgaaggagtactgtgatggaaacaacaactccttaactgtagtcttcaaagacctgggggcacaagtttcctaccgcacactcttcttcttcgagtatcttggccctctccttatctaccctgtcttttactacttccctgtttacaagtttcttggttatggagaggactgtgtgatccatccggtccagacgtacgctatgtactactggtgctttcactacttcaaacggatcttagaaacgtttttcgtacatcggttcagccacgcaacctccccaatcgggaatgtgttcaggaactgtgcttattactggagctttggtgcttacattgcttattacgtcaaccatcccttgtacactccagttagtgaccttcagatgaagattggtttcgggtttggtttggtttgccaagtcgcaaacttttactgtcacatattgctgaagaatctgagggaccccagtggggctggaggctaccagattccacgcggtttcctcttcaacattgttacatgtgccaattacactaccgagatttaccaatggctaggattcaacatcgctactcagaccattgcaggatatgttttcctcgctgttgctgctctaatcatgactaattgggctcttggaaagcacagccgtctgagaaagatatttgatggaaaagatggaaagccaaagtatccaagaagatgggtgatacttcctccattcctttagaagccattgttgcttatcagtaaaagctcttaataaagctgaaaatgagactttctttgggttctctgtatcgtttccttttttgttcggtctatgtattggttataacatgtttattccttttgtttcaatatgttttgatttttgaagttagagagatttagaaatgtacttgtgtagttgtttctcacgcaaaccaattcctctttatgtatcgcatacatgagtcaataataaatatgattactag

SEQ ID NO: 27615 - protein, 310 aa, Arabidopsis thaliana
  peptide (1)..(310): Ceres Seq. ID no. 12335885
  misc_feature (158)..(310): Pfam Name: 3-oxo-5-alpha-steroid 4-dehydrogenase Pfam Description: 3-oxo-5-alpha-steroid 4-dehydrogenase
  misc_feature (31)..(310): Homolog of NCBI NO: 39590267 NR Description: Hypothetical protein CBG11196 [Caenorhabditis
  misc_feature (24)..(310): Homolog of NCBI NO: 19923070 NR Description: synaptic glycoprotein SC2 [Mus musculus]
  misc_feature (24)..(310): Homolog of NCBI NO: 19924091 NR Description: synaptic glycoprotein SC2 [Rattus norvegicus]
  misc_feature (2)..(310): Homolog of NCBI NO: 30585427 NR Description: Homo sapiens glycoprotein, synaptic 2 [synthetic
  misc_feature (2)..(310): Homolog of NCBI NO: 24475816 NR Description: glycoprotein, synaptic 2; synaptic glycoprotein
  misc_feature (2)..(310): Homolog of NCBI NO: 13111809 NR Description: Unknown (protein for IMAGE:2901253) [Homo sapiens]
  misc_feature (2)..(310): Homolog of NCBI NO: 33585860 NR Description: Glycoprotein, synaptic 2 [Xenopus laevis]
  misc_feature (1)..(310): Homolog of NCBI NO: 25004880 NR Description: steroid 5-alpha reductase [Cicer arietinum]
  misc_feature (1)..(310): Homolog of NCBI NO: 34895848 NR Description: putative glycoprotein [Oryza sativa (japonica
  misc_feature (1)..(310): Homolog of NCBI NO: 15233250 NR Description: synaptic glycoprotein SC2-like protein
MKVTVVSRSGREVLKAPLDLPDSATVADLQEAFHKRAKKFYPSRQRLTLPVTPGSKDKPVVLNSKKSLKEYCDGNNNSLTVVFKDLGAQVSYRTLFFFEYLGPLLIYPVFYYFPVYKFLGYGEDCVIHPVQTYAMYYWCFHYFKRILETFFVHRFSHATSPIGNVFRNCAYYWSFGAYIAYYVNHPLYTPVSDLQMKIGFGFGLVCQVANFYCHILLKNLRDPSGAGGYQIPRGFLFNIVTCANYTTEIYQWLGFNIATQTIAGYVFLAVAALIMTNWALGKHSRLRKIFDGKDGKPKYPRRWVILPPFL

SEQ ID NO: 27616 - protein, 176 aa, Arabidopsis thaliana
  peptide (1)..(176): Ceres Seq. ID no. 12335886
  misc_feature (24)..(176): Pfam Name: 3-oxo-5-alpha-steroid 4-dehydrogenase Pfam Description: 3-oxo-5-alpha-steroid 4-dehydrogenase
  misc_feature (1)..(176): Homolog of NCBI NO: 39590267 NR Description: Hypothetical protein CBG11196 [Caenorhabditis
  misc_feature (1)..(176): Homolog of NCBI NO: 19923070 NR Description: synaptic glycoprotein SC2 [Mus musculus]
  misc_feature (1)..(176): Homolog of NCBI NO: 19924091 NR Description: synaptic glycoprotein SC2 [Rattus norvegicus]
  misc_feature (1)..(176): Homolog of NCBI NO: 30585427 NR Description: Homo sapiens glycoprotein, synaptic 2 [synthetic
  misc_feature (1)..(176): Homolog of NCBI NO: 24475816 NR Description: glycoprotein, synaptic 2; synaptic glycoprotein
  misc_feature (1)..(176): Homolog of NCBI NO: 13111809 NR Description: Unknown (protein for IMAGE:2901253) [Homo sapiens]
  misc_feature (1)..(176): Homolog of NCBI NO: 33585860 NR Description: Glycoprotein, synaptic 2 [Xenopus laevis]
  misc_feature (1)..(176): Homolog of NCBI NO: 25004880 NR Description: steroid 5-alpha reductase [Cicer arietinum]
  misc_feature (1)..(176): Homolog of NCBI NO: 34895848 NR Description: putative glycoprotein [Oryza sativa (japonica
  misc_feature (1)..(176): Homolog of NCBI NO: 15233250 NR Description: synaptic glycoprotein SC2-like protein
MYYWCFHYFKRILETFFVHRFSHATSPIGNVFRNCAYYWSFGAYIAYYVNHPLYTPVSDLQMKIGFGFGLVCQVANFYCHILLKNLRDPSGAGGYQIPRGFLFNIVTCANYTTEIYQWLGFNIATQTIAGYVFLAVAALIMTNWALGKHSRLRKIFDGKDGKPKYPRRWVILPPFL

SEQ ID NO: 27617 - DNA, 1070 bp, Arabidopsis thaliana
  misc_feature (1)..(1070): Ceres Seq. ID no. 4905418
  misc_feature: MA Experiment ID: 108434 Result: Down-regulated in Transcription
  misc_feature: MA Experiment 108434 PARAMETER Experiment Name: At_Root_Tips_cDNA_P Parameter: Tissue Value: Root Tips
  misc_feature: MA Experiment ID: 108462 Result: Down-regulated in Transcription
  misc_feature: MA Experiment 108462 PARAMETER Experiment Name: At_Germinating_Seeds_cDNA_P Parameter: Age (day) Value: 2 vs. 0
  misc_feature: MA Experiment 108462 PARAMETER Experiment Name: At_Germinating_Seeds_cDNA_P Parameter: Tissue Value: Germinating Seeds
  misc_feature: MA Experiment ID: 108463 Result: Down-regulated in Transcription
  misc_feature: MA Experiment 108463 PARAMETER Experiment Name: At_Germinating_Seeds_cDNA_P Parameter: Age (day) Value: 3 vs. 0
  misc_feature: MA Experiment 108463 PARAMETER Experiment Name: At_Germinating_Seeds_cDNA_P Parameter: Tissue Value: Germinating Seeds
  misc_feature: MA Experiment ID: 108464 Result: Down-regulated in Transcription
  misc_feature: MA Experiment 108464 PARAMETER Experiment Name: At_Germinating_Seeds_cDNA_P Parameter: Age (day) Value: 4 vs. 0
  misc_feature: MA Experiment 108464 PARAMETER Experiment Name: At_Germinating_Seeds_cDNA_P Parameter: Tissue Value: Germinating Seeds
  misc_feature: MA Experiment ID: 108473 Result: Down-regulated in Transcription
  misc_feature: MA Experiment 108473 PARAMETER Experiment Name: At_Drought_Flowers_cDNA_P Parameter: Timepoint (hr) Value: 7 d
  misc_feature: MA Experiment 108473 PARAMETER Experiment Name: At_Drought_Flowers_cDNA_P Parameter: Tissue Value: Flower
  misc_feature: MA Experiment 108473 PARAMETER Experiment Name: At_Drought_Flowers_cDNA_P Parameter: Treatment Value: Drought vs. No Drought
  misc_feature: MA Experiment ID: 108488 Result: Up-regulated in Transcription
  misc_feature: MA Experiment ID: 108489 Result: Up-regulated in Transcription
  misc_feature: MA Experiment ID: 108561 Result: Down-regulated in Transcription
  misc_feature: MA Experiment 108561 PARAMETER Experiment Name: At_100uM_ABA_cDNA_P Parameter: Timepoint (hr) Value: 6
  misc_feature: MA Experiment 108561 PARAMETER Experiment Name: At_100uM_ABA_cDNA_P Parameter: Tissue Value: Aerial
  misc_feature: MA Experiment 108561 PARAMETER Experiment Name: At_100uM_ABA_cDNA_P Parameter: Treatment Value: 100uM ABA vs. No Treatment
  misc_feature: MA Experiment ID: 108572 Result: Down-regulated in Transcription
  misc_feature: MA Experiment 108572 PARAMETER Experiment Name: At_Drought_cDNA_P Parameter: Timepoint (hr) Value: 1
  misc_feature: MA Experiment 108572 PARAMETER Experiment Name: At_Drought_cDNA_P Parameter: Tissue Value: Aerial
  misc_feature: MA Experiment 108572 PARAMETER Experiment Name: At_Drought_cDNA_P Parameter: Treatment Value: Drought vs. No Drought
  misc_feature: MA Experiment ID: 108579 Result: Up-regulated in Transcription
  misc_feature: MA Experiment 108579 PARAMETER Experiment Name: At_4deg_Cold_cDNA_P Parameter: Temperature (deg C) Value: 4 vs. 22
  misc_feature: MA Experiment 108579 PARAMETER Experiment Name: At_4deg_Cold_cDNA_P Parameter: Timepoint (hr) Value: 6
  misc_feature: MA Experiment 108579 PARAMETER Experiment Name: At_4deg_Cold_cDNA_P Parameter: Tissue Value: Aerial
  misc_feature: MA Experiment ID: 108607 Result: Down-regulated in Transcription
  misc_feature: MA Experiment 108607 PARAMETER Experiment Name: At_100uM_ABA_cDNA_P Parameter: Timepoint (hr) Value: 4
  misc_feature: MA Experiment 108607 PARAMETER Experiment Name: At_100uM_ABA_cDNA_P Parameter: Tissue Value: Aerial
  misc_feature: MA Experiment 108607 PARAMETER Experiment Name: At_100uM_ABA_cDNA_P Parameter: Treatment Value: 100uM ABA vs. No Treatment
  misc_feature: MA Experiment ID: 108608 Result: Down-regulated in Transcription
  misc_feature: MA Experiment 108608 PARAMETER Experiment Name: At_100uM_ABA_cDNA_P Parameter: Timepoint (hr) Value: 1
  misc_feature: MA Experiment 108608 PARAMETER Experiment Name: At_100uM_ABA_cDNA_P Parameter: Tissue Value: Aerial
  misc_feature: MA Experiment 108608 PARAMETER Experiment Name: At_100uM_ABA_cDNA_P Parameter: Treatment Value: 100uM ABA vs. No Treatment
  misc_feature: MA Experiment ID: 108609 Result: Down-regulated in Transcription
  misc_feature: MA Experiment 108609 PARAMETER Experiment Name: At_100uM_ABA_cDNA_P Parameter: Timepoint (hr) Value: 24
  misc_feature: MA Experiment 108609 PARAMETER Experiment Name: At_100uM_ABA_cDNA_P Parameter: Tissue Value: Aerial
  misc_feature: MA Experiment 108609 PARAMETER Experiment Name: At_100uM_ABA_cDNA_P Parameter: Treatment Value: 100uM ABA vs. No Treatment
  misc_feature: MA Experiment ID: 20000069 Result: Down-regulated in Transcription
  misc_feature: MA Experiment 20000069 PARAMETER Experiment Name: At_100uM_ABA_Mutants_cDNA_P Parameter: Plant Line Value: CS23
  misc_feature: MA Experiment 20000069 PARAMETER Experiment Name: At_100uM_ABA_Mutants_cDNA_P Parameter: Timepoint (hr) Value: 6
  misc_feature: MA Experiment 20000069 PARAMETER Experiment Name: At_100uM_ABA_Mutants_cDNA_P Parameter: Tissue Value: Aerial
  misc_feature: MA Experiment 20000069 PARAMETER Experiment Name: At_100uM_ABA_Mutants_cDNA_P Parameter: Treatment Value: 100uM ABA vs. No Treatment
  misc_feature: MA Experiment ID: 20000070 Result: Down-regulated in Transcription
  misc_feature: MA Experiment 20000070 PARAMETER Experiment Name: At_100uM_ABA_Mutants_cDNA_P Parameter: Plant Line Value: CS24
  misc_feature: MA Experiment 20000070 PARAMETER Experiment Name: At_100uM_ABA_Mutants_cDNA_P Parameter: Timepoint (hr) Value: 6
  misc_feature: MA Experiment 20000070 PARAMETER Experiment Name: At_100uM_ABA_Mutants_cDNA_P Parameter: Tissue Value: Aerial
  misc_feature: MA Experiment 20000070 PARAMETER Experiment Name: At_100uM_ABA_Mutants_cDNA_P Parameter: Treatment Value: 100uM ABA vs. No Treatment
  misc_feature: MA Experiment ID: 20000086 Result: Down-regulated in Transcription
  misc_feature: MA Experiment 20000086 PARAMETER Experiment Name: At_100uM_ABA_Mutants_cDNA_P Parameter: Plant Line Value: CS22
  misc_feature: MA Experiment 20000086 PARAMETER Experiment Name: At_100uM_ABA_Mutants_cDNA_P Parameter: Timepoint (hr) Value: 6
  misc_feature: MA Experiment 20000086 PARAMETER Experiment Name: At_100uM_ABA_Mutants_cDNA_P Parameter: Tissue Value: Aerial
  misc_feature: MA Experiment 20000086 PARAMETER Experiment Name: At_100uM_ABA_Mutants_cDNA_P Parameter: Treatment Value: 100uM ABA vs. No Treatment
  misc_feature: MA Experiment ID: 20000166 Result: Down-regulated in Transcription
  misc_feature: MA Experiment 20000166 PARAMETER Experiment Name: At_100uM_ABA_P Parameter: Age (day) Value: 14
  misc_feature: MA Experiment 20000166 PARAMETER Experiment Name: At_100uM_ABA_P Parameter: Organism Value: A. thaliana
  misc_feature: MA Experiment 20000166 PARAMETER Experiment Name: At_100uM_ABA_P Parameter: Plant Line Value: WS
  misc_feature: MA Experiment 20000166 PARAMETER Experiment Name: At_100uM_ABA_P Parameter: Timepoint (hr) Value: 1
  misc_feature: MA Experiment 20000166 PARAMETER Experiment Name: At_100uM_ABA_P Parameter: Tissue Value: Aerial
  misc_feature: MA Experiment 20000166 PARAMETER Experiment Name: At_100uM_ABA_P Parameter: Treatment Value: 100uM ABA vs. No Treatment
  misc_feature: MA Experiment ID: 20000185 Result: Down-regulated in Transcription
  misc_feature: MA Experiment 20000185 PARAMETER Experiment Name: At_Roots__P Parameter: Age (day) Value: 7 vs. 21
  misc_feature: MA Experiment 20000185 PARAMETER Experiment Name: At_Roots__P Parameter: Organism Value: A. thaliana
  misc_feature: MA Experiment 20000185 PARAMETER Experiment Name: At_Roots__P Parameter: Tissue Value: Roots vs. Whole Plant
  misc_feature: MA Experiment ID: 20000213 Result: Up-regulated in Transcription
  misc_feature: MA Experiment 20000213 PARAMETER Experiment Name: At_4deg_Cold_P Parameter: Timepoint (hr) Value: 2
  misc_feature: MA Experiment ID: 20000227 Result: Down-regulated in Transcription
  misc_feature: MA Experiment 20000227 PARAMETER Experiment Name: At_Root-Tips-vs-Tops_P Parameter: Tissue Value: Root Tips vs. Root Tops
  misc_feature: MA Experiment ID: 20000234 Result: Up-regulated in Transcription
  misc_feature: MA Experiment 20000234 PARAMETER Experiment Name: At_Siliques_P Parameter: Age (day) Value: 21
  misc_feature: MA Experiment 20000234 PARAMETER Experiment Name: At_Siliques_P Parameter: Organism Value: A. thaliana
  misc_feature: MA Experiment 20000234 PARAMETER Experiment Name: At_Siliques_P Parameter: Plant Line Value: WS
  misc_feature: MA Experiment 20000234 PARAMETER Experiment Name: At_Siliques_P Parameter: Tissue Value: Less Than 5mm Siliques vs. Whole Plant
  misc_feature: MA Experiment ID: 20000264 Result: Up-regulated in Transcription
  misc_feature: MA Experiment 20000264 PARAMETER Experiment Name: At_Open_Flower_P Parameter: Age (day) Value: 21
  misc_feature: MA Experiment 20000264 PARAMETER Experiment Name: At_Open_Flower_P Parameter: Plant Line Value: WS
  misc_feature: MA Experiment 20000264 PARAMETER Experiment Name: At_Open_Flower_P Parameter: Tissue Value: Open Flower vs. Whole Plant
  misc_feature: MA Experiment ID: 20000267 Result: Down-regulated in Transcription
  misc_feature: MA Experiment 20000267 PARAMETER Experiment Name: At_Drought_P Parameter: Age (day) Value: 7
  misc_feature: MA Experiment 20000267 PARAMETER Experiment Name: At_Drought_P Parameter: Organism Value: A. thaliana
  misc_feature: MA Experiment 20000267 PARAMETER Experiment Name: At_Drought_P Parameter: Plant Line Value: WS
  misc_feature: MA Experiment 20000267 PARAMETER Experiment Name: At_Drought_P Parameter: Timepoint (hr) Value: 6
  misc_feature: MA Experiment 20000267 PARAMETER Experiment Name: At_Drought_P Parameter: Tissue Value: Whole Plant
  misc_feature: MA Experiment 20000267 PARAMETER Experiment Name: At_Drought_P Parameter: Treatment Value: Drought vs. No Drought
  misc_feature: MA Experiment ID: 20000438 Result: Down-regulated in Transcription
  misc_feature: MA Experiment 20000438 PARAMETER Experiment Name: At_Shoots__P Parameter: Age (day) Value: 14
  misc_feature: MA Experiment 20000438 PARAMETER Experiment Name: At_Shoots__P Parameter: Tissue Value: Shoots vs. Whole Plant
  misc_feature: MA Experiment ID: 20000439 Result: Down-regulated in Transcription
  misc_feature: MA Experiment 20000439 PARAMETER Experiment Name: At_Roots__P Parameter: Age (day) Value: 14 vs. 21
  misc_feature: MA Experiment 20000439 PARAMETER Experiment Name: At_Roots__P Parameter: Organism Value: A. thaliana
  misc_feature: MA Experiment 20000439 PARAMETER Experiment Name: At_Roots__P Parameter: Tissue Value: Roots vs. Whole Plant
  misc_feature: MA Experiment ID: 20000441 Result: Up-regulated in Transcription
  misc_feature: MA Experiment 20000441 PARAMETER Experiment Name: At_1uM_BR-BRZ__P Parameter: Tissue Value: Shoot Apices
  misc_feature: MA Experiment 20000441 PARAMETER Experiment Name: At_1uM_BR-BRZ__P Parameter: Treatment Value: 1uM BR vs. No Treatment
  misc_feature: MA Experiment ID: 20000443 Result: Up-regulated in Transcription
  misc_feature: MA Experiment 20000443 PARAMETER Experiment Name: At_1uM_BR-BRZ__P Parameter: Tissue Value: Shoot Apices
  misc_feature: MA Experiment 20000443 PARAMETER Experiment Name: At_1uM_BR-BRZ__P Parameter: Treatment Value: 1uM BRZ vs. No Treatment
  misc_feature: MA Experiment ID: 20000573 Result: Up-regulated in Transcription
  misc_feature: MA Experiment 20000573 PARAMETER Experiment Name: At_100uM_ABA_Mutants__P Parameter: Organism Value: A. thaliana
  misc_feature: MA Experiment 20000573 PARAMETER Experiment Name: At_100uM_ABA_Mutants__P Parameter: Plant Line Value: CS22 vs. Ler wt
  misc_feature: MA Experiment 20000573 PARAMETER Experiment Name: At_100uM_ABA_Mutants__P Parameter: Timepoint (hr) Value: N/A
  misc_feature: MA Experiment 20000573 PARAMETER Experiment Name: At_100uM_ABA_Mutants__P Parameter: Tissue Value: Whole Plant
  misc_feature: MA Experiment 20000573 PARAMETER Experiment Name: At_100uM_ABA_Mutants__P Parameter: Treatment Value: None
  misc_feature: MA Experiment ID: 20000574 Result: Up-regulated in Transcription
  misc_feature: MA Experiment 20000574 PARAMETER Experiment Name: At_100uM_ABA_Mutants__P Parameter: Organism Value: A. thaliana
  misc_feature: MA Experiment 20000574 PARAMETER Experiment Name: At_100uM_ABA_Mutants__P Parameter: Plant Line Value: CS23 vs. Ler wt
  misc_feature: MA Experiment 20000574 PARAMETER Experiment Name: At_100uM_ABA_Mutants__P Parameter: Timepoint (hr) Value: N/A
  misc_feature: MA Experiment 20000574 PARAMETER Experiment Name: At_100uM_ABA_Mutants__P Parameter: Tissue Value: Whole Plant
  misc_feature: MA Experiment 20000574 PARAMETER Experiment Name: At_100uM_ABA_Mutants__P Parameter: Treatment Value: None
  misc_feature: MA Experiment ID: 20000575 Result: Down-regulated in Transcription
  misc_feature: MA Experiment 20000575 PARAMETER Experiment Name: At_100uM_ABA_Mutants__P Parameter: Organism Value: A. thaliana
  misc_feature: MA Experiment 20000575 PARAMETER Experiment Name: At_100uM_ABA_Mutants__P Parameter: Plant Line Value: CS22
  misc_feature: MA Experiment 20000575 PARAMETER Experiment Name: At_100uM_ABA_Mutants__P Parameter: Timepoint (hr) Value: 6
  misc_feature: MA Experiment 20000575 PARAMETER Experiment Name: At_100uM_ABA_Mutants__P Parameter: Tissue Value: Whole Plant
  misc_feature: MA Experiment 20000575 PARAMETER Experiment Name: At_100uM_ABA_Mutants__P Parameter: Treatment Value: 1uM ABA vs. No Treatment
  misc_feature: MA Experiment ID: 20000606 Result: Up-regulated in Transcription
  misc_feature: MA Experiment 20000606 PARAMETER Experiment Name: At_CS8548_Mutant_P Parameter: Age (day) Value: 14
  misc_feature: MA Experiment 20000606 PARAMETER Experiment Name: At_CS8548_Mutant_P Parameter: Plant Line Value: CS8548 vs. wt
  misc_feature: MA Experiment 20000606 PARAMETER Experiment Name: At_CS8548_Mutant_P Parameter: Tissue Value: Whole Plant
  misc_feature: MA Experiment ID: 20000794 Result: Up-regulated in Transcription
  misc_feature: MA Experiment 20000794 PARAMETER Experiment Name: At_Petals_P Parameter: Age (day) Value: 23-25 days
  misc_feature: MA Experiment 20000794 PARAMETER Experiment Name: At_Petals_P Parameter: Plant Line Value: WS
  misc_feature: MA Experiment 20000794 PARAMETER Experiment Name: At_Petals_P Parameter: Tissue Value: Petals vs. Whole plant
  misc_feature: MA Experiment ID: 20001554 Result: Down-regulated in Transcription
  misc_feature: MA Experiment 20001554 PARAMETER Experiment Name: At_Drought_Soil_Dry_P Parameter: Age (day) Value: 21
  misc_feature: MA Experiment 20001554 PARAMETER Experiment Name: At_Drought_Soil_Dry_P Parameter: Organism Value: A. thaliana
  misc_feature: MA Experiment 20001554 PARAMETER Experiment Name: At_Drought_Soil_Dry_P Parameter: Plant Line Value: WS
  misc_feature: MA Experiment 20001554 PARAMETER Experiment Name: At_Drought_Soil_Dry_P Parameter: Post Timepoint (hr) Value: None
  misc_feature: MA Experiment 20001554 PARAMETER Experiment Name: At_Drought_Soil_Dry_P Parameter: Post-Treatment Value: None
  misc_feature: MA Experiment 20001554 PARAMETER Experiment Name: At_Drought_Soil_Dry_P Parameter: Timepoint (day) Value: 7
  misc_feature: MA Experiment 20001554 PARAMETER Experiment Name: At_Drought_Soil_Dry_P Parameter: Treatment Value: Drought vs. No Drought
  misc_feature: MA Experiment ID: 20001557 Result: Up-regulated in Transcription
  misc_feature: MA Experiment 20001557 PARAMETER Experiment Name: At_Drought_Soil_Dry_P Parameter: Age (day) Value: 27
  misc_feature: MA Experiment 20001557 PARAMETER Experiment Name: At_Drought_Soil_Dry_P Parameter: Organism Value: A. thaliana
  misc_feature: MA Experiment 20001557 PARAMETER Experiment Name: At_Drought_Soil_Dry_P Parameter: Plant Line Value: WS
  misc_feature: MA Experiment 20001557 PARAMETER Experiment Name: At_Drought_Soil_Dry_P Parameter: Post Timepoint (hr) Value: 3
  misc_feature: MA Experiment 20001557 PARAMETER Experiment Name: At_Drought_Soil_Dry_P Parameter: Post-Treatment Value: Re-Water vs. No Drought
  misc_feature: MA Experiment 20001557 PARAMETER Experiment Name: At_Drought_Soil_Dry_P Parameter: Timepoint (day) Value: 13
  misc_feature: MA Experiment 20001557 PARAMETER Experiment Name: At_Drought_Soil_Dry_P Parameter: Treatment Value: Drought vs. No Drought
  misc_feature: MA Experiment ID: 20001558 Result: Up-regulated in Transcription
  misc_feature: MA Experiment 20001558 PARAMETER Experiment Name: At_Drought_Soil_Dry_P Parameter: Age (day) Value: 27
  misc_feature: MA Experiment 20001558 PARAMETER Experiment Name: At_Drought_Soil_Dry_P Parameter: Organism Value: A. thaliana
  misc_feature: MA Experiment 20001558 PARAMETER Experiment Name: At_Drought_Soil_Dry_P Parameter: Plant Line Value: WS
  misc_feature: MA Experiment 20001558 PARAMETER Experiment Name: At_Drought_Soil_Dry_P Parameter: Post Timepoint (hr) Value: 6
  misc_feature: MA Experiment 20001558 PARAMETER Experiment Name: At_Drought_Soil_Dry_P Parameter: Post-Treatment Value: Re-Water vs. No Drought
  misc_feature: MA Experiment 20001558 PARAMETER Experiment Name: At_Drought_Soil_Dry_P Parameter: Timepoint (day) Value: 13
  misc_feature: MA Experiment 20001558 PARAMETER Experiment Name: At_Drought_Soil_Dry_P Parameter: Treatment Value: Drought vs. No Drought
  misc_feature: MA Experiment ID: 20001910 Result: Down-regulated in Transcription
  misc_feature: MA Experiment 20001910 PARAMETER Experiment Name: At_Drought_Reproduction_P Parameter: Age (day) Value: 37
  misc_feature: MA Experiment 20001910 PARAMETER Experiment Name: At_Drought_Reproduction_P Parameter: Organism Value: A. thaliana
  misc_feature: MA Experiment 20001910 PARAMETER Experiment Name: At_Drought_Reproduction_P Parameter: Plant Line Value: WS
  misc_feature: MA Experiment 20001910 PARAMETER Experiment Name: At_Drought_Reproduction_P Parameter: Timepoint (day) Value: 7
  misc_feature: MA Experiment 20001910 PARAMETER Experiment Name: At_Drought_Reproduction_P Parameter: Tissue Value: Flowers
  misc_feature: MA Experiment 20001910 PARAMETER Experiment Name: At_Drought_Reproduction_P Parameter: Treatment Value: Drought vs. No Drought
attacatgtaaatatctctcattaatacaacctcacgaagaaaaccatttgttttcttagagagagccaagaatattaaaagagatatagagaaaagatttgctttaataatgccaacgtcgatacagtttcagagatcctccaccgccgcagaagcagccaacgccaccgtaagaaactatccccaccaccatcagaaacaggttcaaaaagtgagcctcacgcgcgggatggctgatgtgccggagcacgtggagctttcccacacgcacgtggttggtccttctcagtgcttctccgtcgtggtacaagacgtggaggctccggtttccacagtctggtcgatcctaagccgcttcgaacaccctcaagcgtacaaacacttcgtgaaaagctgccacgtggttatcggagacggtcgagaggttgggtcggtgagagaggtcagagtcgtctctggtctccccgcggcgtttagcttagagcggcttgagatcatggacgatgatcgccacgtcatcagtttcagcgtcgttggtggggaccacagactcatgaactacaagtcggtgacgacggtgcatgagtcggaggaggactccgacggcaagaagaggacacgtgtcgttgagtcatacgtcgttgacgtaccggcgggtaacgataaggaagagacttgtagctttgctgatactatagtacggtgcaacttgcaatcgctggctaaactcgccgagaacacttctaaattctcgtaattacattttttcaatctttttatttttattttattttctatatttctctctttcaaaatttatcttttatttttgggattctcgaggtggttttggattttaagatttaagtatttaactatcgtcggggatttttcgaaactaaaacaaaaaacaagaattatatcaaacaagatggttttggtttttcgaagttagggtttttagggtctgttaaatgtatgtctcaacgatactttggttttacccttaaaaccatttcttcttgtacagctctcgtagctttattatataaacattgattgtttagtt

SEQ ID NO: 27618 - protein, 215 aa, Arabidopsis thaliana
  peptide (1)..(215): Ceres Seq. ID no. 4905419
  misc_feature (59)..(202): Pfam Name: Pathogenesis-related protein Bet v I family Pfam Description: Pathogenesis-related protein Bet v I family
  misc_feature (40)..(209): Homolog of NCBI NO: 18378830 NR Description: expressed protein
  misc_feature (52)..(209): Homolog of NCBI NO: 9758515 NR Description: gene_id:MZA15.21~pir||T05073~similar to unknown
  misc_feature (61)..(209): Homolog of NCBI NO: 15242531 NR Description: putative protein; protein id: At5g45870.1
  misc_feature (61)..(212): Homolog of NCBI NO: 15242529 NR Description: putative protein; protein id: At5g45860.1
  misc_feature (10)..(209): Homolog of NCBI NO: 22327625 NR Description: putative protein
  misc_feature (44)..(209): Homolog of NCBI NO: 34907924 NR Description: B1088C09.9 [Oryza sativa (japonica
  misc_feature (1)..(206): Homolog of NCBI NO: 15239114 NR Description: putative protein
  misc_feature (52)..(212): Homolog of NCBI NO: 18404709 NR Description: expressed protein
  misc_feature (41)..(215): Homolog of NCBI NO: 25348262 NR Description: hypothetical protein At2g40330 [imported] -
  misc_feature (1)..(215): Homolog of NCBI NO: 18405351 NR Description: expressed protein
MPTSIQFQRSSTAAEAANATVRNYPHHHQKQVQKVSLTRGMADVPEHVELSHTHVVGPSQCFSVVVQDVEAPVSTVWSILSRFEHPQAYKHFVKSCHVVIGDGREVGSVREVRVVSGLPAAFSLERLEIMDDDRHVISFSVVGGDHRLMNYKSVTTVHESEEDSDGKKRTRVVESYVVDVPAGNDKEETCSFADTIVRCNLQSLAKLAENTSKFS

SEQ ID NO: 27619 - protein, 175 aa, Arabidopsis thaliana
  peptide (1)..(175): Ceres Seq. ID no. 4905420
  misc_feature (19)..(162): Pfam Name: Pathogenesis-related protein Bet v I family Pfam Description: Pathogenesis-related protein Bet v I family
  misc_feature (1)..(169): Homolog of NCBI NO: 18378830 NR Description: expressed protein
  misc_feature (12)..(169): Homolog of NCBI NO: 9758515 NR Description: gene_id:MZA15.21~pir||T05073~similar to unknown
  misc_feature (21)..(169): Homolog of NCBI NO: 15242531 NR Description: putative protein; protein id: At5g45870.1
  misc_feature (21)..(172): Homolog of NCBI NO: 15242529 NR Description: putative protein; protein id: At5g45860.1
  misc_feature (1)..(169): Homolog of NCBI NO: 22327625 NR Description: putative protein
  misc_feature (4)..(169): Homolog of NCBI NO: 34907924 NR Description: B1088C09.9 [Oryza sativa (japonica
  misc_feature (1)..(166): Homolog of NCBI NO: 15239114 NR Description: putative protein
  misc_feature (12)..(172): Homolog of NCBI NO: 18404709 NR Description: expressed protein
  misc_feature (1)..(175): Homolog of NCBI NO: 25348262 NR Description: hypothetical protein At2g40330 [imported] -
  misc_feature (1)..(175): Homolog of NCBI NO: 18405351 NR Description: expressed protein
MADVPEHVELSHTHVVGPSQCFSVVVQDVEAPVSTVWSILSRFEHPQAYKHFVKSCHVVIGDGREVGSVREVRVVSGLPAAFSLERLEIMDDDRHVISFSVVGGDHRLMNYKSVTTVHESEEDSDGKKRTRVVESYVVDVPAGNDKEETCSFADTIVRCNLQSLAKLAENTSKFS

SEQ ID NO: 27620 - DNA, 1167 bp, Arabidopsis thaliana
  misc_feature (1)..(1167): Ceres Seq. ID no. 13497461
  misc_feature: MA Experiment ID: 108434 Result: Up-regulated in Transcription
  misc_feature: MA Experiment 108434 PARAMETER Experiment Name: At_Root_Tips_cDNA_P Parameter: Tissue Value: Root Tips
  misc_feature: MA Experiment ID: 108462 Result: Down-regulated in Transcription
  misc_feature: MA Experiment 108462 PARAMETER Experiment Name: At_Germinating_Seeds_cDNA_P Parameter: Age (day) Value: 2 vs. 0
  misc_feature: MA Experiment 108462 PARAMETER Experiment Name: At_Germinating_Seeds_cDNA_P Parameter: Tissue Value: Germinating Seeds
  misc_feature: MA Experiment ID: 108463 Result: Down-regulated in Transcription
  misc_feature: MA Experiment 108463 PARAMETER Experiment Name: At_Germinating_Seeds_cDNA_P Parameter: Age (day) Value: 3 vs. 0
  misc_feature: MA Experiment 108463 PARAMETER Experiment Name: At_Germinating_Seeds_cDNA_P Parameter: Tissue Value: Germinating Seeds
  misc_feature: MA Experiment ID: 108464 Result: Down-regulated in Transcription
  misc_feature: MA Experiment 108464 PARAMETER Experiment Name: At_Germinating_Seeds_cDNA_P Parameter: Age (day) Value: 4 vs. 0
  misc_feature: MA Experiment 108464 PARAMETER Experiment Name: At_Germinating_Seeds_cDNA_P Parameter: Tissue Value: Germinating Seeds
  misc_feature: MA Experiment ID: 108488 Result: Up-regulated in Transcription
  misc_feature: MA Experiment ID: 108561 Result: Down-regulated in Transcription
  misc_feature: MA Experiment 108561 PARAMETER Experiment Name: At_100uM_ABA_cDNA_P Parameter: Timepoint (hr) Value: 6
  misc_feature: MA Experiment 108561 PARAMETER Experiment Name: At_100uM_ABA_cDNA_P Parameter: Tissue Value: Aerial
  misc_feature: MA Experiment 108561 PARAMETER Experiment Name: At_100uM_ABA_cDNA_P Parameter: Treatment Value: 100uM ABA vs. No Treatment
  misc_feature: MA Experiment ID: 108595 Result: Down-regulated in Transcription
  misc_feature: MA Experiment 108595 PARAMETER Experiment Name: At_Ler-pi_Ovule_cDNA_P Parameter: Plant Line Value: null
  misc_feature: MA Experiment ID: 108605 Result: Down-regulated in Transcription
  misc_feature: MA Experiment 108605 PARAMETER Experiment Name: At_100uM_ABA_cDNA_P Parameter: Timepoint (hr) Value: 6
  misc_feature: MA Experiment 108605 PARAMETER Experiment Name: At_100uM_ABA_cDNA_P Parameter: Tissue Value: Aerial
  misc_feature: MA Experiment 108605 PARAMETER Experiment Name: At_100uM_ABA_cDNA_P Parameter: Treatment Value: 100uM ABA vs. No Treatment
  misc_feature: MA Experiment ID: 108607 Result: Down-regulated in Transcription
  misc_feature: MA Experiment 108607 PARAMETER Experiment Name: At_100uM_ABA_cDNA_P Parameter: Timepoint (hr) Value: 4
  misc_feature: MA Experiment 108607 PARAMETER Experiment Name: At_100uM_ABA_cDNA_P Parameter: Tissue Value: Aerial
  misc_feature: MA Experiment 108607 PARAMETER Experiment Name: At_100uM_ABA_cDNA_P Parameter: Treatment Value: 100uM ABA vs. No Treatment
  misc_feature: MA Experiment ID: 20000090 Result: Up-regulated in Transcription
  misc_feature: MA Experiment ID: 20000111 Result: Down-regulated in Transcription
  misc_feature: MA Experiment 20000111 PARAMETER Experiment Name: At_42deg_Heat_cDNA_P Parameter: Temperature (deg C) Value: 42 vs. 22
  misc_feature: MA Experiment 20000111 PARAMETER Experiment Name: At_42deg_Heat_cDNA_P Parameter: Timepoint (hr) Value: 6
  misc_feature: MA Experiment 20000111 PARAMETER Experiment Name: At_42deg_Heat_cDNA_P Parameter: Tissue Value: Aerial
  misc_feature: MA Experiment ID: 20000112 Result: Down-regulated in Transcription
  misc_feature: MA Experiment 20000112 PARAMETER Experiment Name: At_42deg_Heat_cDNA_P Parameter: Temperature (deg C) Value: 42 vs. 22
  misc_feature: MA Experiment 20000112 PARAMETER Experiment Name: At_42deg_Heat_cDNA_P Parameter: Timepoint (hr) Value: 2
  misc_feature: MA Experiment 20000112 PARAMETER Experiment Name: At_42deg_Heat_cDNA_P Parameter: Tissue Value: Aerial
  misc_feature: MA Experiment ID: 20000113 Result: Down-regulated in Transcription
  misc_feature: MA Experiment 20000113 PARAMETER Experiment Name: At_42deg_Heat_cDNA_P Parameter: Temperature (deg C) Value: 42 vs. 22
  misc_feature: MA Experiment 20000113 PARAMETER Experiment Name: At_42deg_Heat_cDNA_P Parameter: Timepoint (hr) Value: 8
  misc_feature: MA Experiment 20000113 PARAMETER Experiment Name: At_42deg_Heat_cDNA_P Parameter: Tissue Value: Aerial
  misc_feature: MA Experiment ID: 20000169 Result: Down-regulated in Transcription
  misc_feature: MA Experiment 20000169 PARAMETER Experiment Name: At_100uM_ABA_P Parameter: Age (day) Value: 14
  misc_feature: MA Experiment 20000169 PARAMETER Experiment Name: At_100uM_ABA_P Parameter: Organism Value: A. thaliana
  misc_feature: MA Experiment 20000169 PARAMETER Experiment Name: At_100uM_ABA_P Parameter: Plant Line Value: WS
  misc_feature: MA Experiment 20000169 PARAMETER Experiment Name: At_100uM_ABA_P Parameter: Timepoint (hr) Value: 6
  misc_feature: MA Experiment 20000169 PARAMETER Experiment Name: At_100uM_ABA_P Parameter: Tissue Value: Aerial
  misc_feature: MA Experiment 20000169 PARAMETER Experiment Name: At_100uM_ABA_P Parameter: Treatment Value: 100uM ABA vs. No Treatment
  misc_feature: MA Experiment ID: 20000173 Result: Down-regulated in Transcription
  misc_feature: MA Experiment 20000173 PARAMETER Experiment Name: At_42deg_Heat_P Parameter: Age (day) Value: 14
  misc_feature: MA Experiment 20000173 PARAMETER Experiment Name: At_42deg_Heat_P Parameter: Organism Value: A. thaliana
  misc_feature: MA Experiment 20000173 PARAMETER Experiment Name: At_42deg_Heat_P Parameter: Plant Line Value: WS
  misc_feature: MA Experiment 20000173 PARAMETER Experiment Name: At_42deg_Heat_P Parameter: Temperature (deg C) Value: 42 vs. 22
  misc_feature: MA Experiment 20000173 PARAMETER Experiment Name: At_42deg_Heat_P Parameter: Timepoint (hr) Value: 6
  misc_feature: MA Experiment 20000173 PARAMETER Experiment Name: At_42deg_Heat_P Parameter: Tissue Value: Aerial
  misc_feature: MA Experiment ID: 20000234 Result: Up-regulated in Transcription
  misc_feature: MA Experiment 20000234 PARAMETER Experiment Name: At_Siliques_P Parameter: Age (day) Value: 21
  misc_feature: MA Experiment 20000234 PARAMETER Experiment Name: At_Siliques_P Parameter: Organism Value: A. thaliana
  misc_feature: MA Experiment 20000234 PARAMETER Experiment Name: At_Siliques_P Parameter: Plant Line Value: WS
  misc_feature: MA Experiment 20000234 PARAMETER Experiment Name: At_Siliques_P Parameter: Tissue Value: Less Than 5mm Siliques vs. Whole Plant
  misc_feature: MA Experiment ID: 20000436 Result: Down-regulated in Transcription
  misc_feature: MA Experiment 20000436 PARAMETER Experiment Name: At_Drought_P Parameter: Age (day) Value: 7
  misc_feature: MA Experiment 20000436 PARAMETER Experiment Name: At_Drought_P Parameter: Organism Value: A. thaliana
  misc_feature: MA Experiment 20000436 PARAMETER Experiment Name: At_Drought_P Parameter: Plant Line Value: WS
  misc_feature: MA Experiment 20000436 PARAMETER Experiment Name: At_Drought_P Parameter: Timepoint (hr) Value: 12
  misc_feature: MA Experiment 20000436 PARAMETER Experiment Name: At_Drought_P Parameter: Tissue Value: Whole Plant
  misc_feature: MA Experiment 20000436 PARAMETER Experiment Name: At_Drought_P Parameter: Treatment Value: Drought vs. No Drought
  misc_feature: MA Experiment ID: 20000437 Result: Down-regulated in Transcription
  misc_feature: MA Experiment 20000437 PARAMETER Experiment Name: At_Drought_P Parameter: Age (day) Value: 8
  misc_feature: MA Experiment 20000437 PARAMETER Experiment Name: At_Drought_P Parameter: Organism Value: A. thaliana
  misc_feature: MA Experiment 20000437 PARAMETER Experiment Name: At_Drought_P Parameter: Plant Line Value: WS
  misc_feature: MA Experiment 20000437 PARAMETER Experiment Name: At_Drought_P Parameter: Timepoint (hr) Value: 24
  misc_feature: MA Experiment 20000437 PARAMETER Experiment Name: At_Drought_P Parameter: Tissue Value: Whole Plant
  misc_feature: MA Experiment 20000437 PARAMETER Experiment Name: At_Drought_P Parameter: Treatment Value: Drought vs. No Drought
  misc_feature: MA Experiment ID: 20000573 Result: Up-regulated in Transcription
  misc_feature: MA Experiment 20000573 PARAMETER Experiment Name: At_100uM_ABA_Mutants__P Parameter: Organism Value: A. thaliana
  misc_feature: MA Experiment 20000573 PARAMETER Experiment Name: At_100uM_ABA_Mutants__P Parameter: Plant Line Value: CS22 vs. Ler wt
  misc_feature: MA Experiment 20000573 PARAMETER Experiment Name: At_100uM_ABA_Mutants__P Parameter: Timepoint (hr) Value: N/A
  misc_feature: MA Experiment 20000573 PARAMETER Experiment Name: At_100uM_ABA_Mutants__P Parameter: Tissue Value: Whole Plant
  misc_feature: MA Experiment 20000573 PARAMETER Experiment Name: At_100uM_ABA_Mutants__P Parameter: Treatment Value: None
  misc_feature: MA Experiment ID: 20000574 Result: Up-regulated in Transcription
  misc_feature: MA Experiment 20000574 PARAMETER Experiment Name: At_100uM_ABA_Mutants__P Parameter: Organism Value: A. thaliana
  misc_feature: MA Experiment 20000574 PARAMETER Experiment Name: At_100uM_ABA_Mutants__P Parameter: Plant Line Value: CS23 vs. Ler wt
  misc_feature: MA Experiment 20000574 PARAMETER Experiment Name: At_100uM_ABA_Mutants__P Parameter: Timepoint (hr) Value: N/A
  misc_feature: MA Experiment 20000574 PARAMETER Experiment Name: At_100uM_ABA_Mutants__P Parameter: Tissue Value: Whole Plant
  misc_feature: MA Experiment 20000574 PARAMETER Experiment Name: At_100uM_ABA_Mutants__P Parameter: Treatment Value: None
  misc_feature: MA Experiment ID: 20000794 Result: Down-regulated in Transcription
  misc_feature: MA Experiment 20000794 PARAMETER Experiment Name: At_Petals_P Parameter: Age (day) Value: 23-25 days
  misc_feature: MA Experiment 20000794 PARAMETER Experiment Name: At_Petals_P Parameter: Plant Line Value: WS
  misc_feature: MA Experiment 20000794 PARAMETER Experiment Name: At_Petals_P Parameter: Tissue Value: Petals vs. Whole plant
  misc_feature: MA Experiment ID: 20001450 Result: Down-regulated in Transcription
  misc_feature: MA Experiment 20001450 PARAMETER Experiment Name: At_Far-red-induction_P Parameter: Age (day) Value: 7
  misc_feature: MA Experiment 20001450 PARAMETER Experiment Name: At_Far-red-induction_P Parameter: Light Value: Far-red vs. White
  misc_feature: MA Experiment 20001450 PARAMETER Experiment Name: At_Far-red-induction_P Parameter: Organism Value: A. thaliana
  misc_feature: MA Experiment 20001450 PARAMETER Experiment Name: At_Far-red-induction_P Parameter: Plant Line Value: Columbia
  misc_feature: MA Experiment 20001450 PARAMETER Experiment Name: At_Far-red-induction_P Parameter: Timepoint (hr) Value: 8
  misc_feature: MA Experiment 20001450 PARAMETER Experiment Name: At_Far-red-induction_P Parameter: Tissue Value: Whole Plant
  misc_feature: MA Experiment ID: 20001451 Result: Down-regulated in Transcription
  misc_feature: MA Experiment 20001451 PARAMETER Experiment Name: At_Far-red-induction_P Parameter: Age (day) Value: 7
  misc_feature: MA Experiment 20001451 PARAMETER Experiment Name: At_Far-red-induction_P Parameter: Light Value: Far-red vs. White
  misc_feature: MA Experiment 20001451 PARAMETER Experiment Name: At_Far-red-induction_P Parameter: Organism Value: A. thaliana
  misc_feature: MA Experiment 20001451 PARAMETER Experiment Name: At_Far-red-induction_P Parameter: Plant Line Value: Columbia
  misc_feature: MA Experiment 20001451 PARAMETER Experiment Name: At_Far-red-induction_P Parameter: Timepoint (hr) Value: 24
  misc_feature: MA Experiment 20001451 PARAMETER Experiment Name: At_Far-red-induction_P Parameter: Tissue Value: Whole Plant
  misc_feature: MA Experiment ID: 20001558 Result: Up-regulated in Transcription
  misc_feature: MA Experiment 20001558 PARAMETER Experiment Name: At_Drought_Soil_Dry_P Parameter: Age (day) Value: 27
  misc_feature: MA Experiment 20001558 PARAMETER Experiment Name: At_Drought_Soil_Dry_P Parameter: Organism Value: A. thaliana
  misc_feature: MA Experiment 20001558 PARAMETER Experiment Name: At_Drought_Soil_Dry_P Parameter: Plant Line Value: WS
  misc_feature: MA Experiment 20001558 PARAMETER Experiment Name: At_Drought_Soil_Dry_P Parameter: Post Timepoint (hr) Value: 6
  misc_feature: MA Experiment 20001558 PARAMETER Experiment Name: At_Drought_Soil_Dry_P Parameter: Post-Treatment Value: Re-Water vs. No Drought
  misc_feature: MA Experiment 20001558 PARAMETER Experiment Name: At_Drought_Soil_Dry_P Parameter: Timepoint (day) Value: 13
  misc_feature: MA Experiment 20001558 PARAMETER Experiment Name: At_Drought_Soil_Dry_P Parameter: Treatment Value: Drought vs. No Drought
  misc_feature: MA Experiment ID: 20001560 Result: Up-regulated in Transcription
  misc_feature: MA Experiment 20001560 PARAMETER Experiment Name: At_Drought_Soil_Dry_P Parameter: Age (day) Value: 28
  misc_feature: MA Experiment 20001560 PARAMETER Experiment Name: At_Drought_Soil_Dry_P Parameter: Organism Value: A. thaliana
  misc_feature: MA Experiment 20001560 PARAMETER Experiment Name: At_Drought_Soil_Dry_P Parameter: Plant Line Value: WS
  misc_feature: MA Experiment 20001560 PARAMETER Experiment Name: At_Drought_Soil_Dry_P Parameter: Post Timepoint (hr) Value: None
  misc_feature: MA Experiment 20001560 PARAMETER Experiment Name: At_Drought_Soil_Dry_P Parameter: Post-Treatment Value: None
  misc_feature: MA Experiment 20001560 PARAMETER Experiment Name: At_Drought_Soil_Dry_P Parameter: Timepoint (day) Value: 14
  misc_feature: MA Experiment 20001560 PARAMETER Experiment Name: At_Drought_Soil_Dry_P Parameter: Treatment Value: Drought vs. No Drought
  misc_feature: MA Experiment ID: 20001757 Result: Up-regulated in Transcription
  misc_feature: MA Experiment 20001757 PARAMETER Experiment Name: At_50mM_NH4NO3_L-to-H_P Parameter: Timepoint (hr) Value: 6
  misc_feature: MA Experiment 20001757 PARAMETER Experiment Name: At_50mM_NH4NO3_L-to-H_P Parameter: Tissue Value: Leaf
  misc_feature: MA Experiment 20001757 PARAMETER Experiment Name: At_50mM_NH4NO3_L-to-H_P Parameter: Treatment Value: 50mM NH4NO3 vs 100mM Mannitol
  misc_feature: MA Experiment ID: 20001905 Result: Down-regulated in Transcription
  misc_feature: MA Experiment 20001905 PARAMETER Experiment Name: At_Drought_Reproduction_P Parameter: Age (day) Value: 40
  misc_feature: MA Experiment 20001905 PARAMETER Experiment Name: At_Drought_Reproduction_P Parameter: Organism Value: A. thaliana
  misc_feature: MA Experiment 20001905 PARAMETER Experiment Name: At_Drought_Reproduction_P Parameter: Plant Line Value: WS
  misc_feature: MA Experiment 20001905 PARAMETER Experiment Name: At_Drought_Reproduction_P Parameter: Timepoint (day) Value: 10
  misc_feature: MA Experiment 20001905 PARAMETER Experiment Name: At_Drought_Reproduction_P Parameter: Tissue Value: Rosettes
  misc_feature: MA Experiment 20001905 PARAMETER Experiment Name: At_Drought_Reproduction_P Parameter: Treatment Value: Drought vs. No Drought
  misc_feature: MA Experiment ID: 20001911 Result: Down-regulated in Transcription
  misc_feature: MA Experiment 20001911 PARAMETER Experiment Name: At_Drought_Reproduction_P Parameter: Age (day) Value: 40
  misc_feature: MA Experiment 20001911 PARAMETER Experiment Name: At_Drought_Reproduction_P Parameter: Organism Value: A. thaliana
  misc_feature: MA Experiment 20001911 PARAMETER Experiment Name: At_Drought_Reproduction_P Parameter: Plant Line Value: WS
  misc_feature: MA Experiment 20001911 PARAMETER Experiment Name: At_Drought_Reproduction_P Parameter: Timepoint (day) Value: 10
  misc_feature: MA Experiment 20001911 PARAMETER Experiment Name: At_Drought_Reproduction_P Parameter: Tissue Value: Flowers
  misc_feature: MA Experiment 20001911 PARAMETER Experiment Name: At_Drought_Reproduction_P Parameter: Treatment Value: Drought vs. No Drought
atacttgtaaaagctagagtcaacgccgttcagtctcagaccagacgaaacaacgatgcttaactctatcactttaacccgggaaccaccactcccgttcaactctgttgggttttcaggtaatcgctcttcgtcttttggtcgaagaactataacggaaggtagttcgagcaaggctctttcgtttgggtacaaaaatgttggttcactgaagtgtggtcggagcaattggccggggcgttctgggactgcgtttgggcatctagtccgggtctctgcggtcccaggtgggaattcaggtggctctggcgggttaggtggttcaggcggtggtggtggtggttccggcggcggtggtggtgatggaagcgacggaaaaggaaagaagtggtcacttctctcatggtaccaggctcttctctcaaactctcctgttttgaccaaagctgtgaccgcagcacttttgaacctcgttggagatttgatctgtcagcttactatcaacaagacctcatcgctggacaagaagaggacactcacctttaccttcttgggcttagggctagtcggtccaacattgcatttctggtatttgtatttgagcaaagtggtgacagcttctggattatcaggcgcagttatacgacttctactggatcagtttgtttttgctcctatttttgttggagttttcttatcagcagttgtgacacttgaaggaaaaccatcaaatgtcataccgaagctacaacaggagtggactggtgcaatgatagcaaattggcagctatggataccatttcagtttcttaacttcagatttgttccacagaactaccaggtacttgcttcaaacgtagtggctttggcttggaatgtgattttatcattcaaagctcacaaagaagttgttgcaaagtagacatgtttcttacctggagcctagaggtggttgctggattgttatcggcagagttttggggaaacggtcttgtctgctgatgcaaatgtttggtgtttcgaaacaattatttgggaaccctgcacttgacattttcttagagttgaaacaagcttttcttcaagcacttcaaatatttccccatcatcaatgtttcatatatttattgtttcctcattcagagaatttttttagttcgtatgaag

SEQ ID NO: 27621 - protein, 288 aa, Arabidopsis thaliana
  peptide (1)..(288): Ceres Seq. ID no. 13497462
  misc_feature (220)..(286): Pfam Name: Mpv17 / PMP22 family Pfam Description: Mpv17 / PMP22 family
  misc_feature (118)..(283): Homolog of NCBI NO: 6678926 NR Description: Mpv17 transgene, kidney disease mutant [Mus
  misc_feature (102)..(284): Homolog of NCBI NO: 15226016 NR Description: peroxisomal membrane protein, putative (22 kDa)
  misc_feature (115)..(278): Homolog of NCBI NO: 6679577 NR Description: peroxisomal membrane protein 2
  misc_feature (118)..(283): Homolog of NCBI NO: 34783266 NR Description: MPV17 protein [Homo sapiens]
  misc_feature (118)..(283): Homolog of NCBI NO: 4505241 NR Description: MpV17 transgene, murine homolog,
  misc_feature (115)..(278): Homolog of NCBI NO: 10954089 NR Description: 22 kDa peroxisomal membrane protein PMP22 [Mus
  misc_feature (122)..(283): Homolog of NCBI NO: 32766323 NR Description: Unknown (protein for MGC:63573) [Danio rerio]
  misc_feature (1)..(288): Homolog of NCBI NO: 21594286 NR Description: unknown [Arabidopsis thaliana]
  misc_feature (1)..(288): Homolog of NCBI NO: 15241166 NR Description: expressed protein [Arabidopsis thaliana]
  misc_feature (1)..(288): Homolog of NCBI NO: 16648746 NR Description: AT5g19750/T29J13_170 [Arabidopsis thaliana]
MLNSITLTREPPLPFNSVGFSGNRSSSFGRRTITEGSSSKALSFGYKNVGSLKCGRSNWPGRSGTAFGHLVRVSAVPGGNSGGSGGLGGSGGGGGGSGGGGGDGSDGKGKKWSLLSWYQALLSNSPVLTKAVTAALLNLVGDLICQLTINKTSSLDKKRTLTFTFLGLGLVGPTLHFWYLYLSKVVTASGLSGAVIRLLLDQFVFAPIFVGVFLSAVVTLEGKPSNVIPKLQQEWTGAMIANWQLWIPFQFLNFRFVPQNYQVLASNVVALAWNVILSFKAHKEVVAK

SEQ ID NO: 27622 - DNA, 1588 bp, Arabidopsis thaliana
  misc_feature (1)..(1588): Ceres Seq. ID no. 12335467
  misc_feature: MA Experiment ID: 20000087 Result: Down-regulated in Transcription
  misc_feature: MA Experiment 20000087 PARAMETER Experiment Name: At_100uM_ABA_Mutants_cDNA_P Parameter: Plant Line Value: WS
  misc_feature: MA Experiment 20000087 PARAMETER Experiment Name: At_100uM_ABA_Mutants_cDNA_P Parameter: Timepoint (hr) Value: 6
  misc_feature: MA Experiment 20000087 PARAMETER Experiment Name: At_100uM_ABA_Mutants_cDNA_P Parameter: Tissue Value: Aerial
  misc_feature: MA Experiment 20000087 PARAMETER Experiment Name: At_100uM_ABA_Mutants_cDNA_P Parameter: Treatment Value: 100uM ABA vs. No Treatment
  misc_feature: MA Experiment ID: 20000089 Result: Down-regulated in Transcription
  misc_feature: MA Experiment ID: 20000227 Result: Down-regulated in Transcription
  misc_feature: MA Experiment 20000227 PARAMETER Experiment Name: At_Root-Tips-vs-Tops_P Parameter: Tissue Value: Root Tips vs. Root Tops
  misc_feature: MA Experiment ID: 20001557 Result: Down-regulated in Transcription
  misc_feature: MA Experiment 20001557 PARAMETER Experiment Name: At_Drought_Soil_Dry_P Parameter: Age (day) Value: 27
  misc_feature: MA Experiment 20001557 PARAMETER Experiment Name: At_Drought_Soil_Dry_P Parameter: Organism Value: A. thaliana
  misc_feature: MA Experiment 20001557 PARAMETER Experiment Name: At_Drought_Soil_Dry_P Parameter: Plant Line Value: WS
  misc_feature: MA Experiment 20001557 PARAMETER Experiment Name: At_Drought_Soil_Dry_P Parameter: Post Timepoint (hr) Value: 3
  misc_feature: MA Experiment 20001557 PARAMETER Experiment Name: At_Drought_Soil_Dry_P Parameter: Post-Treatment Value: Re-Water vs. No Drought
  misc_feature: MA Experiment 20001557 PARAMETER Experiment Name: At_Drought_Soil_Dry_P Parameter: Timepoint (day) Value: 13
  misc_feature: MA Experiment 20001557 PARAMETER Experiment Name: At_Drought_Soil_Dry_P Parameter: Treatment Value: Drought vs. No Drought
  misc_feature: MA Experiment ID: 20001560 Result: Down-regulated in Transcription
  misc_feature: MA Experiment 20001560 PARAMETER Experiment Name: At_Drought_Soil_Dry_P Parameter: Age (day) Value: 28
  misc_feature: MA Experiment 20001560 PARAMETER Experiment Name: At_Drought_Soil_Dry_P Parameter: Organism Value: A. thaliana
  misc_feature: MA Experiment 20001560 PARAMETER Experiment Name: At_Drought_Soil_Dry_P Parameter: Plant Line Value: WS
  misc_feature: MA Experiment 20001560 PARAMETER Experiment Name: At_Drought_Soil_Dry_P Parameter: Post Timepoint (hr) Value: None
  misc_feature: MA Experiment 20001560 PARAMETER Experiment Name: At_Drought_Soil_Dry_P Parameter: Post-Treatment Value: None
  misc_feature: MA Experiment 20001560 PARAMETER Experiment Name: At_Drought_Soil_Dry_P Parameter: Timepoint (day) Value: 14
  misc_feature: MA Experiment 20001560 PARAMETER Experiment Name: At_Drought_Soil_Dry_P Parameter: Treatment Value: Drought vs. No Drought
attactagatttatagatttgattctttctctctcagaatttttgtcgaccgaatttcatattcatatatagttttattaaataatctggttagatgaagatgcaagattcggcagctcaagaaccggaaattgctataatcgtgggagattcttcttcttcttctcttcattcttcttctcaggtaacagaaaaatctactgaagatgtgccgagctgctctcacttggatctttcaatacaaataccttccagatcacttccattcggtaacggccgtaacccaaagggttcattgaagtccactccttcattcaaaagtggcactacatcctcaccaagaggaatcttgcggaatttaagcttgaaaaagaaagttatttctcaacccgaaagcgagagaagctccttactatctcctggtctcatggaaaccgctaaaaagcctaatgctactggttccacaacttctccatattggaaaagatgcttatcgcttcctagtagacaagctgcaaaactgtctcctgtggtttctacacaactttcagctggggtgcctggtgacccgcctaataaagattattcaaggtccttgtccatgcccggaagaaacaaagttattgtgcgatccatatcttttgacaaccacaaagcccgtgtttccagtgaaacaagtgcagatcaagtctcttccgttcctcctgaagaaactgatgaagaaattcccgaagaagaagccgtgtgcaggatctgtctggacgtgtgcgaagaaggaaatactttgaaaatggaatgcagctgcaaaggtgatctcagacttgttcatgaagcttgtgcaatgaaatggtttagtacaaagggaacaagaacctgtgacgtctgtagacaagtagtacagaacttaccagttacattggttcgtgtgcccacacctaatcaacaaaacaacagacgtggtagcagtcaacagaatatgccgtcacaaaccgttagtgcttggcaagagtttgtggtgctagttctaatcagcacagtctgctacttcttcttcctcgagcaattactgattcgtgacttgaacaaacaagctatttacatcgcagcaccattttcacttacgttaggcctcttagcatccatttttgccattgttctcgctatcagagaatacatatggacatacgcagcactcgagtttgcgcttgtgggcatgttggttcatatattctatgctacagttagactatcggcgacctattctatactctttgcagggattcttggttttgggatagccgtgtgcctaaactcgttgtaccttcattatttcgcttggcgtgtacgcgttgcacaaaattcaagtcctgtatgaaatctgttttcctttgtttctcgttcttcctttgtgtatgtattatgaaagaagaagttgttagtgaagagattcatcagcttcagcagtttcctgtaaaatgtaaatatgtacactcttcctcgaaaatgttgctgaagttttgttttgtacccacccctacgtgtttttccggagcacgatgatgatttgtgaaagagaagacatttgtgt

SEQ ID NO: 27623 - protein, 426 aa, Arabidopsis thaliana
  peptide (1)..(426): Ceres Seq. ID no. 12335468
  misc_feature (218)..(264): Pfam Name: Zinc finger, C3HC4 type (RING finger) Pfam Description: Zinc finger, C3HC4 type (RING finger)
  misc_feature (194)..(416): Homolog of NCBI NO: 9757769 NR Description: gene_id:MOK16.9~unknown protein [Arabidopsis
  misc_feature (194)..(416): Homolog of NCBI NO: 11290062 NR Description: hypothetical protein F15A17.210 - Arabidopsis
  misc_feature (70)..(416): Homolog of NCBI NO: 18398630 NR Description: expressed protein
  misc_feature (27)..(425): Homolog of NCBI NO: 32489688 NR Description: OSJNBb0004G23.1 [Oryza sativa (japonica
  misc_feature (126)..(418): Homolog of NCBI NO: 30697388 NR Description: zinc finger (C3HC4-type RING finger) protein
  misc_feature (54)..(418): Homolog of NCBI NO: 18424371 NR Description: putative protein
  misc_feature (3)..(426): Homolog of NCBI NO: 26452687 NR Description: unknown protein [Arabidopsis thaliana]
  misc_feature (3)..(426): Homolog of NCBI NO: 30686985 NR Description: zinc finger (C3HC4-type RING finger) protein
  misc_feature (3)..(426): Homolog of NCBI NO: 21594296 NR Description: unknown [Arabidopsis thaliana]
  misc_feature (1)..(426): Homolog of NCBI NO: 18397535 NR Description: expressed protein
MKMQDSAAQEPEIAIIVGDSSSSSLHSSSQVTEKSTEDVPSCSHLDLSIQIPSRSLPFGNGRNPKGSLKSTPSFKSGTTSSPRGILRNLSLKKKVISQPESERSSLLSPGLMETAKKPNATGSTTSPYWKRCLSLPSRQAAKLSPVVSTQLSAGVPGDPPNKDYSRSLSMPGRNKVIVRSISFDNHKARVSSETSADQVSSVPPEETDEEIPEEEAVCRICLDVCEEGNTLKMECSCKGDLRLVHEACAMKWFSTKGTRTCDVCRQVVQNLPVTLVRVPTPNQQNNRRGSSQQNMPSQTVSAWQEFVVLVLISTVCYFFFLEQLLIRDLNKQAIYIAAPFSLTLGLLASIFAIVLAIREYIWTYAALEFALVGMLVHIFYATVRLSATYSILFAGILGFGIAVCLNSLYLHYFAWRVRVAQNSSPV

SEQ ID NO: 27624 - protein, 424 aa, Arabidopsis thaliana
  peptide (1)..(424): Ceres Seq. ID no. 12335469
  misc_feature (216)..(262): Pfam Name: Zinc finger, C3HC4 type (RING finger) Pfam Description: Zinc finger, C3HC4 type (RING finger)
  misc_feature (192)..(414): Homolog of NCBI NO: 9757769 NR Description: gene_id:MOK16.9~unknown protein [Arabidopsis
  misc_feature (192)..(414): Homolog of NCBI NO: 11290062 NR Description: hypothetical protein F15A17.210 - Arabidopsis
  misc_feature (68)..(414): Homolog of NCBI NO: 18398630 NR Description: expressed protein
  misc_feature (25)..(423): Homolog of NCBI NO: 32489688 NR Description: OSJNBb0004G23.1 [Oryza sativa (japonica
  misc_feature (124)..(416): Homolog of NCBI NO: 30697388 NR Description: zinc finger (C3HC4-type RING finger) protein
  misc_feature (52)..(416): Homolog of NCBI NO: 18424371 NR Description: putative protein
  misc_feature (1)..(424): Homolog of NCBI NO: 26452687 NR Description: unknown protein [Arabidopsis thaliana]
  misc_feature (1)..(424): Homolog of NCBI NO: 30686985 NR Description: zinc finger (C3HC4-type RING finger) protein
  misc_feature (1)..(424): Homolog of NCBI NO: 21594296 NR Description: unknown [Arabidopsis thaliana]
  misc_feature (1)..(424): Homolog of NCBI NO: 18397535 NR Description: expressed protein
MQDSAAQEPEIAIIVGDSSSSSLHSSSQVTEKSTEDVPSCSHLDLSIQIPSRSLPFGNGRNPKGSLKSTPSFKSGTTSSPRGILRNLSLKKKVISQPESERSSLLSPGLMETAKKPNATGSTTSPYWKRCLSLPSRQAAKLSPVVSTQLSAGVPGDPPNKDYSRSLSMPGRNKVIVRSISFDNHKARVSSETSADQVSSVPPEETDEEIPEEEAVCRICLDVCEEGNTLKMECSCKGDLRLVHEACAMKWFSTKGTRTCDVCRQVVQNLPVTLVRVPTPNQQNNRRGSSQQNMPSQTVSAWQEFVVLVLISTVCYFFFLEQLLIRDLNKQAIYIAAPFSLTLGLLASIFAIVLAIREYIWTYAALEFALVGMLVHIFYATVRLSATYSILFAGILGFGIAVCLNSLYLHYFAWRVRVAQNSSPV

SEQ ID NO: 27625 - protein, 315 aa, Arabidopsis thaliana
  peptide (1)..(315): Ceres Seq. ID no. 12335470
  misc_feature (107)..(153): Pfam Name: Zinc finger, C3HC4 type (RING finger) Pfam Description: Zinc finger, C3HC4 type (RING finger)
  misc_feature (83)..(305): Homolog of NCBI NO: 9757769 NR Description: gene_id:MOK16.9~unknown protein [Arabidopsis
  misc_feature (83)..(305): Homolog of NCBI NO: 11290062 NR Description: hypothetical protein F15A17.210 - Arabidopsis
  misc_feature (1)..(305): Homolog of NCBI NO: 18398630 NR Description: expressed protein
  misc_feature (1)..(314): Homolog of NCBI NO: 32489688 NR Description: OSJNBb0004G23.1 [Oryza sativa (japonica
  misc_feature (15)..(307): Homolog of NCBI NO: 30697388 NR Description: zinc finger (C3HC4-type RING finger) protein
  misc_feature (1)..(307): Homolog of NCBI NO: 18424371 NR Description: putative protein
  misc_feature (1)..(315): Homolog of NCBI NO: 26452687 NR Description: unknown protein [Arabidopsis thaliana]
  misc_feature (1)..(315): Homolog of NCBI NO: 30686985 NR Description: zinc finger (C3HC4-type RING finger) protein
  misc_feature (1)..(315): Homolog of NCBI NO: 21594296 NR Description: unknown [Arabidopsis thaliana]
  misc_feature (1)..(315): Homolog of NCBI NO: 18397535 NR Description: expressed protein
METAKKPNATGSTTSPYWKRCLSLPSRQAAKLSPVVSTQLSAGVPGDPPNKDYSRSLSMPGRNKVIVRSISFDNHKARVSSETSADQVSSVPPEETDEEIPEEEAVCRICLDVCEEGNTLKMECSCKGDLRLVHEACAMKWFSTKGTRTCDVCRQVVQNLPVTLVRVPTPNQQNNRRGSSQQNMPSQTVSAWQEFVVLVLISTVCYFFFLEQLLIRDLNKQAIYIAAPFSLTLGLLASIFAIVLAIREYIWTYAALEFALVGMLVHIFYATVRLSATYSILFAGILGFGIAVCLNSLYLHYFAWRVRVAQNSSPV

SEQ ID NO: 27626 - DNA, 1086 bp, Arabidopsis thaliana
  misc_feature (1)..(1086): Ceres Seq. ID no. 12335862
  misc_feature: MA Experiment ID: 108462 Result: Down-regulated in Transcription
  misc_feature: MA Experiment 108462 PARAMETER Experiment Name: At_Germinating_Seeds_cDNA_P Parameter: Age (day) Value: 2 vs. 0
  misc_feature: MA Experiment 108462 PARAMETER Experiment Name: At_Germinating_Seeds_cDNA_P Parameter: Tissue Value: Germinating Seeds
  misc_feature: MA Experiment ID: 108463 Result: Down-regulated in Transcription
  misc_feature: MA Experiment 108463 PARAMETER Experiment Name: At_Germinating_Seeds_cDNA_P Parameter: Age (day) Value: 3 vs. 0
  misc_feature: MA Experiment 108463 PARAMETER Experiment Name: At_Germinating_Seeds_cDNA_P Parameter: Tissue Value: Germinating Seeds
  misc_feature: MA Experiment ID: 108464 Result: Down-regulated in Transcription
  misc_feature: MA Experiment 108464 PARAMETER Experiment Name: At_Germinating_Seeds_cDNA_P Parameter: Age (day) Value: 4 vs. 0
  misc_feature: MA Experiment 108464 PARAMETER Experiment Name: At_Germinating_Seeds_cDNA_P Parameter: Tissue Value: Germinating Seeds
  misc_feature: MA Experiment ID: 20000113 Result: Up-regulated in Transcription
  misc_feature: MA Experiment 20000113 PARAMETER Experiment Name: At_42deg_Heat_cDNA_P Parameter: Temperature (deg C) Value: 42 vs. 22
  misc_feature: MA Experiment 20000113 PARAMETER Experiment Name: At_42deg_Heat_cDNA_P Parameter: Timepoint (hr) Value: 8
  misc_feature: MA Experiment 20000113 PARAMETER Experiment Name: At_42deg_Heat_cDNA_P Parameter: Tissue Value: Aerial
  misc_feature: MA Experiment ID: 20000144 Result: Up-regulated in Transcription
  misc_feature: MA Experiment 20000144 PARAMETER Experiment Name: At_42deg_Heat_cDNA_P Parameter: Temperature (deg C) Value: 42 vs. 22
  misc_feature: MA Experiment 20000144 PARAMETER Experiment Name: At_42deg_Heat_cDNA_P Parameter: Timepoint (hr) Value: 1
  misc_feature: MA Experiment 20000144 PARAMETER Experiment Name: At_42deg_Heat_cDNA_P Parameter: Tissue Value: Aerial
  misc_feature: MA Experiment ID: 20000171 Result: Up-regulated in Transcription
  misc_feature: MA Experiment 20000171 PARAMETER Experiment Name: At_42deg_Heat_P Parameter: Age (day) Value: 14
  misc_feature: MA Experiment 20000171 PARAMETER Experiment Name: At_42deg_Heat_P Parameter: Organism Value: A. thaliana
  misc_feature: MA Experiment 20000171 PARAMETER Experiment Name: At_42deg_Heat_P Parameter: Plant Line Value: WS
  misc_feature: MA Experiment 20000171 PARAMETER Experiment Name: At_42deg_Heat_P Parameter: Temperature (deg C) Value: 42 vs. 22
  misc_feature: MA Experiment 20000171 PARAMETER Experiment Name: At_42deg_Heat_P Parameter: Timepoint (hr) Value: 1
  misc_feature: MA Experiment 20000171 PARAMETER Experiment Name: At_42deg_Heat_P Parameter: Tissue Value: Aerial
  misc_feature: MA Experiment ID: 20000173 Result: Up-regulated in Transcription
  misc_feature: MA Experiment 20000173 PARAMETER Experiment Name: At_42deg_Heat_P Parameter: Age (day) Value: 14
  misc_feature: MA Experiment 20000173 PARAMETER Experiment Name: At_42deg_Heat_P Parameter: Organism Value: A. thaliana
  misc_feature: MA Experiment 20000173 PARAMETER Experiment Name: At_42deg_Heat_P Parameter: Plant Line Value: WS
  misc_feature: MA Experiment 20000173 PARAMETER Experiment Name: At_42deg_Heat_P Parameter: Temperature (deg C) Value: 42 vs. 22
  misc_feature: MA Experiment 20000173 PARAMETER Experiment Name: At_42deg_Heat_P Parameter: Timepoint (hr) Value: 6
  misc_feature: MA Experiment 20000173 PARAMETER Experiment Name: At_42deg_Heat_P Parameter: Tissue Value: Aerial
  misc_feature: MA Experiment ID: 20000224 Result: Down-regulated in Transcription
  misc_feature: MA Experiment ID: 20000794 Result: Down-regulated in Transcription
  misc_feature: MA Experiment 20000794 PARAMETER Experiment Name: At_Petals_P Parameter: Age (day) Value: 23-25 days
  misc_feature: MA Experiment 20000794 PARAMETER Experiment Name: At_Petals_P Parameter: Plant Line Value: WS
  misc_feature: MA Experiment 20000794 PARAMETER Experiment Name: At_Petals_P Parameter: Tissue Value: Petals vs. Whole plant
  misc_feature: MA Experiment ID: 20001560 Result: Up-regulated in Transcription
  misc_feature: MA Experiment 20001560 PARAMETER Experiment Name: At_Drought_Soil_Dry_P Parameter: Age (day) Value: 28
  misc_feature: MA Experiment 20001560 PARAMETER Experiment Name: At_Drought_Soil_Dry_P Parameter: Organism Value: A. thaliana
  misc_feature: MA Experiment 20001560 PARAMETER Experiment Name: At_Drought_Soil_Dry_P Parameter: Plant Line Value: WS
  misc_feature: MA Experiment 20001560 PARAMETER Experiment Name: At_Drought_Soil_Dry_P Parameter: Post Timepoint (hr) Value: None
  misc_feature: MA Experiment 20001560 PARAMETER Experiment Name: At_Drought_Soil_Dry_P Parameter: Post-Treatment Value: None
  misc_feature: MA Experiment 20001560 PARAMETER Experiment Name: At_Drought_Soil_Dry_P Parameter: Timepoint (day) Value: 14
  misc_feature: MA Experiment 20001560 PARAMETER Experiment Name: At_Drought_Soil_Dry_P Parameter: Treatment Value: Drought vs. No Drought
atttctcatttcggcaaccaaaccaaacattcagagagacacaacacaaccacatcatcacacgtttctctctctctctttcctctccgtcgtctctctctctctagccaccaccaaaatccttaaaacctagacttttctcttccatcgatggcggctaataacagatccgatcatgggtcagacgaaaacacaagactttacaatccttaccaaaactacgaagtcccaatcaacaaatctcagtacctttacaagcttcctacctcccctgagtttctcttcacggaggaggctttaaggcaacgtagatcttggggtgagaatctcactttctacaccggaacagcttacctcggtggctccgttgccggagcttctgttggagtcatcactggagtcaaaagcttcgaatctggcgacactactaagctcaaaatcaacaggatcttgaactcttctggtcaaactggtcgaacttggggtaatcggattggtatcattggattggtttacgcagggatcgagagtggtattgtggctgccacggatagagatgatgtttggaccagtgtggtggctggtcttggaaccggagctgtttgtagagcggcgagaggagtgagatctgcagctgtagctggtgctcttggtggacttgcggctggagctgttgtagctgggaagcaaattgtgaagcggtatgtgcccatttgaagactgcaagagtctaattggcagactctttttcgggtcgttgttgaaatttttgataggggaaatggtgagaatttgataggtttggtatgtcttggaatcataaaaatgaaaactttatttggtttctagaggtacaacaagtctgtatgtcaagtcataatgcagtttcactttgaagaataacctgcaaacctttttcttatattcatactgattaaatgttttgccgattggtaatttaatttgtcatgagtgtgtttgttctagttagtgttttatgtttctgtttttgatcaatgttaactctttcttgattcgttgagaaactgatgtgttgtattacatttgaaaatgaagctcttctcg

SEQ ID NO: 27627 - protein, 188 aa, Arabidopsis thaliana
  peptide (1)..(188): Ceres Seq. ID no. 12335863
  misc_feature (49)..(182): Pfam Name: Tim17/Tim22/Tim23 family Pfam Description: Tim17/Tim22/Tim23 family
  misc_feature (124)..(187): Homolog of NCBI NO: 12039278 NR Description: putative inner mitochondrial membrane protein
  misc_feature (1)..(96): Homolog of NCBI NO: 38344267 NR Description: OSJNBa0005N02.5 [Oryza sativa (japonica
  misc_feature (88)..(187): Homolog of NCBI NO: 34394286 NR Description: hypothetical protein [Oryza sativa (japonica
  misc_feature (1)..(184): Homolog of NCBI NO: 19075496 NR Description: putative mitochondrial import inner membrane
  misc_feature (4)..(188): Homolog of NCBI NO: 15229350 NR Description: putative inner mitochondrial membrane protein
  misc_feature (2)..(187): Homolog of NCBI NO: 37536126 NR Description: putaive mitochondrial inner membrane protein
  misc_feature (1)..(187): Homolog of NCBI NO: 34902184 NR Description: Putative mitochondrial inner membrane protein
  misc_feature (1)..(188): Homolog of NCBI NO: 13641346 NR Description: translocase of inner mitochondrial membrane TIM23
  misc_feature (1)..(188): Homolog of NCBI NO: 18394498 NR Description: inner mitochondrial membrane protein, putative
  misc_feature (1)..(188): Homolog of NCBI NO: 15218593 NR Description: inner mitochondrial membrane protein
MAANNRSDHGSDENTRLYNPYQNYEVPINKSQYLYKLPTSPEFLFTEEALRQRRSWGENLTFYTGTAYLGGSVAGASVGVITGVKSFESGDTTKLKINRILNSSGQTGRTWGNRIGIIGLVYAGIESGIVAATDRDDVWTSVVAGLGTGAVCRAARGVRSAAVAGALGGLAAGAVVAGKQIVKRYVPI

SEQ ID NO: 27628 - DNA, 1579 bp, Arabidopsis thaliana
  misc_feature (1)..(1579): Ceres Seq. ID no. 12335129
  misc_feature: MA Experiment ID: 20000166 Result: Down-regulated in Transcription
  misc_feature: MA Experiment 20000166 PARAMETER Experiment Name: At_100uM_ABA_P Parameter: Age (day) Value: 14
  misc_feature: MA Experiment 20000166 PARAMETER Experiment Name: At_100uM_ABA_P Parameter: Organism Value: A. thaliana
  misc_feature: MA Experiment 20000166 PARAMETER Experiment Name: At_100uM_ABA_P Parameter: Plant Line Value: WS
  misc_feature: MA Experiment 20000166 PARAMETER Experiment Name: At_100uM_ABA_P Parameter: Timepoint (hr) Value: 1
  misc_feature: MA Experiment 20000166 PARAMETER Experiment Name: At_100uM_ABA_P Parameter: Tissue Value: Aerial
  misc_feature: MA Experiment 20000166 PARAMETER Experiment Name: At_100uM_ABA_P Parameter: Treatment Value: 100uM ABA vs. No Treatment
  misc_feature: MA Experiment ID: 20000173 Result: Down-regulated in Transcription
  misc_feature: MA Experiment 20000173 PARAMETER Experiment Name: At_42deg_Heat_P Parameter: Age (day) Value: 14
  misc_feature: MA Experiment 20000173 PARAMETER Experiment Name: At_42deg_Heat_P Parameter: Organism Value: A. thaliana
  misc_feature: MA Experiment 20000173 PARAMETER Experiment Name: At_42deg_Heat_P Parameter: Plant Line Value: WS
  misc_feature: MA Experiment 20000173 PARAMETER Experiment Name: At_42deg_Heat_P Parameter: Temperature (deg C) Value: 42 vs. 22
  misc_feature: MA Experiment 20000173 PARAMETER Experiment Name: At_42deg_Heat_P Parameter: Timepoint (hr) Value: 6
  misc_feature: MA Experiment 20000173 PARAMETER Experiment Name: At_42deg_Heat_P Parameter: Tissue Value: Aerial
  misc_feature: MA Experiment ID: 20000179 Result: Down-regulated in Transcription
  misc_feature: MA Experiment 20000179 PARAMETER Experiment Name: At_Germinating_Seeds_P Parameter: Age (hr) Value: 6 vs. 0
  misc_feature: MA Experiment 20000179 PARAMETER Experiment Name: At_Germinating_Seeds_P Parameter: Tissue Value: Germinating Seeds
  misc_feature: MA Experiment ID: 20000184 Result: Down-regulated in Transcription
  misc_feature: MA Experiment 20000184 PARAMETER Experiment Name: At_Shoots__P Parameter: Age (day) Value: 7
  misc_feature: MA Experiment 20000184 PARAMETER Experiment Name: At_Shoots__P Parameter: Tissue Value: Shoots vs. Whole Plant
  misc_feature: MA Experiment ID: 20000227 Result: Down-regulated in Transcription
  misc_feature: MA Experiment 20000227 PARAMETER Experiment Name: At_Root-Tips-vs-Tops_P Parameter: Tissue Value: Root Tips vs. Root Tops
  misc_feature: MA Experiment ID: 20000234 Result: Down-regulated in Transcription
  misc_feature: MA Experiment 20000234 PARAMETER Experiment Name: At_Siliques_P Parameter: Age (day) Value: 21
  misc_feature: MA Experiment 20000234 PARAMETER Experiment Name: At_Siliques_P Parameter: Organism Value: A. thaliana
  misc_feature: MA Experiment 20000234 PARAMETER Experiment Name: At_Siliques_P Parameter: Plant Line Value: WS
  misc_feature: MA Experiment 20000234 PARAMETER Experiment Name: At_Siliques_P Parameter: Tissue Value: Less Than 5mm Siliques vs. Whole Plant
  misc_feature: MA Experiment ID: 20000235 Result: Down-regulated in Transcription
  misc_feature: MA Experiment 20000235 PARAMETER Experiment Name: At_Siliques_P Parameter: Age (day) Value: 21
  misc_feature: MA Experiment 20000235 PARAMETER Experiment Name: At_Siliques_P Parameter: Organism Value: A. thaliana
  misc_feature: MA Experiment 20000235 PARAMETER Experiment Name: At_Siliques_P Parameter: Plant Line Value: WS
  misc_feature: MA Experiment 20000235 PARAMETER Experiment Name: At_Siliques_P Parameter: Tissue Value: 5-10mm Siliques vs. Whole Plant
  misc_feature: MA Experiment ID: 20000264 Result: Down-regulated in Transcription
  misc_feature: MA Experiment 20000264 PARAMETER Experiment Name: At_Open_Flower_P Parameter: Age (day) Value: 21
  misc_feature: MA Experiment 20000264 PARAMETER Experiment Name: At_Open_Flower_P Parameter: Plant Line Value: WS
  misc_feature: MA Experiment 20000264 PARAMETER Experiment Name: At_Open_Flower_P Parameter: Tissue Value: Open Flower vs. Whole Plant
  misc_feature: MA Experiment ID: 20000265 Result: Down-regulated in Transcription
  misc_feature: MA Experiment 20000265 PARAMETER Experiment Name: At_Open_Flower_P Parameter: Age (day) Value: 21
  misc_feature: MA Experiment 20000265 PARAMETER Experiment Name: At_Open_Flower_P Parameter: Plant Line Value: WS
  misc_feature: MA Experiment 20000265 PARAMETER Experiment Name: At_Open_Flower_P Parameter: Tissue Value: Closed Flower vs. Whole Plant
  misc_feature: MA Experiment ID: 20000286 Result: Down-regulated in Transcription
  misc_feature: MA Experiment 20000286 PARAMETER Experiment Name: At_Open_Flower_P Parameter: Age (day) Value: 21
  misc_feature: MA Experiment 20000286 PARAMETER Experiment Name: At_Open_Flower_P Parameter: Plant Line Value: WS
  misc_feature: MA Experiment 20000286 PARAMETER Experiment Name: At_Open_Flower_P Parameter: Tissue Value: Half Open vs. Whole Plant
  misc_feature: MA Experiment ID: 20000438 Result: Down-regulated in Transcription
  misc_feature: MA Experiment 20000438 PARAMETER Experiment Name: At_Shoots__P Parameter: Age (day) Value: 14
  misc_feature: MA Experiment 20000438 PARAMETER Experiment Name: At_Shoots__P Parameter: Tissue Value: Shoots vs. Whole Plant
  misc_feature: MA Experiment ID: 20001248 Result: Up-regulated in Transcription
  misc_feature: MA Experiment 20001248 PARAMETER Experiment Name: At_Far-red-induction_P Parameter: Age (day) Value: 7
  misc_feature: MA Experiment 20001248 PARAMETER Experiment Name: At_Far-red-induction_P Parameter: Light Value: Far-red vs. White
  misc_feature: MA Experiment 20001248 PARAMETER Experiment Name: At_Far-red-induction_P Parameter: Organism Value: A. thaliana
  misc_feature: MA Experiment 20001248 PARAMETER Experiment Name: At_Far-red-induction_P Parameter: Plant Line Value: Columbia
  misc_feature: MA Experiment 20001248 PARAMETER Experiment Name: At_Far-red-induction_P Parameter: Timepoint (hr) Value: 4
  misc_feature: MA Experiment 20001248 PARAMETER Experiment Name: At_Far-red-induction_P Parameter: Tissue Value: Whole Plant
  misc_feature: MA Experiment ID: 20001905 Result: Down-regulated in Transcription
  misc_feature: MA Experiment 20001905 PARAMETER Experiment Name: At_Drought_Reproduction_P Parameter: Age (day) Value: 40
  misc_feature: MA Experiment 20001905 PARAMETER Experiment Name: At_Drought_Reproduction_P Parameter: Organism Value: A. thaliana
  misc_feature: MA Experiment 20001905 PARAMETER Experiment Name: At_Drought_Reproduction_P Parameter: Plant Line Value: WS
  misc_feature: MA Experiment 20001905 PARAMETER Experiment Name: At_Drought_Reproduction_P Parameter: Timepoint (day) Value: 10
  misc_feature: MA Experiment 20001905 PARAMETER Experiment Name: At_Drought_Reproduction_P Parameter: Tissue Value: Rosettes
  misc_feature: MA Experiment 20001905 PARAMETER Experiment Name: At_Drought_Reproduction_P Parameter: Treatment Value: Drought vs. No Drought
aaagaaaaaaaagtaaagagatgaagacagcagagctcatattcgttcctctgccggagaccggccatctcttgtcaacgatcgagtttggaaagcgtctactcaatctagaccgtcggatttctatgattacaatcctctccatgaatcttccttacgctcctcacgccgacgcttctcttgcttcgctaacagcctccgagcctggtatccgaatcatcagtctcccggagatccacgatccacctccgatcaagcttcttgacacttcctccgagacttacatcctcgatttcatccataaaaacataccttgtctcagaaaaaccatccaagatttagtctcatcatcatcatcttccggaggtggtagtagtcatgtcgccggcttgattcttgatttcttctgcgttggtttgatcgacatcggccgtgaggtaaaccttccttcctatatcttcatgacttccaactttggtttcttaggggttctacagtatctcccggaacgacaacgtttgactccgtcggagttcgatgagagctccggcgaggaagagttacatattccggcgtttgtgaaccgtgttcccgccaaggttctgccgccaggtgtgttcgataaactctcttacgggtctctggtcaaaatcggcgagcgattacatgaagccaagggtattttggttaattcatttacccaagtggagccttatgctgctgaacatttttctcaaggacgagattaccctcacgtgtatcctgttgggccggttctcaacttaacgggccgtacaaatccgggtctagcttcggcccaatataaagagatgatgaagtggcttgacgagcaaccagactcgtcggttttgttcctgtgtttcgggagcatgggagtcttccctgcacctcagatcacagagattgctcacgcgctcgagcttatcgggtgcaggttcatctgggcgatccgtacgaacatggcgggagatggcgatcctcaggagccgcttccagaaggatttgtcgatcgaacaatgggccgtggaattgtgtgtagttgggctccacaagtggatatcttggcccacaaggcaacaggtggattcgtttctcactgcgggtggaattccgtccaagagagtctatggtacggtgtacctattgcaacgtggccaatgtatgcggagcaacaactgaacgcatttgagatggtgaaggagttgggcttagcagtggagataaggcttgactacgtggcggatggtgatagggttactttggagatcgtgtcagccgatgaaatagccacagccgtccgatcattgatggatagtgataaccccgtgagaaagaaggttatagaaaaatcttcagtggcgaggaaagctgttggtgatggtgggtcttctacggtggccacatgtaattttatcaaagatattcttggggatcacttttgagttttgaccatttcactttcagagcaagataattttgtaatttgtaataaaaataaacaaatgttatcaatttattatggactaaatgttaatcaacgccatttgtgcttgaagac

SEQ ID NO: 27629 - protein, 486 aa, Arabidopsis thaliana
  peptide (1)..(486): Ceres Seq. ID no. 12335130
  misc_feature (5)..(482): Homolog of NCBI NO: 20146091 NR Description: glucosyltransferase NTGT3 [Nicotiana tabacum]
  misc_feature (7)..(483): Homolog of NCBI NO: 21555082 NR Description: putative flavonol 3-O-glucosyltransferase
  misc_feature (7)..(483): Homolog of NCBI NO: 15227606 NR Description: putative flavonol 3-O-glucosyltransferase
  misc_feature (7)..(483): Homolog of NCBI NO: 15227610 NR Description: putative flavonol 3-O-glucosyltransferase
  misc_feature (6)..(478): Homolog of NCBI NO: 15227613 NR Description: putative flavonol 3-O-glucosyltransferase
  misc_feature (6)..(482): Homolog of NCBI NO: 15227616 NR Description: UDP-glycosyltransferase family; protein id:
  misc_feature (23)..(484): Homolog of NCBI NO: 21954072 NR Description: putative UDP-glucose glucosyltransferase
  misc_feature (7)..(483): Homolog of NCBI NO: 15222348 NR Description: UDP-glucose glucosyltransferase, putative
  misc_feature (7)..(484): Homolog of NCBI NO: 30680040 NR Description: glycosyltransferase family [Arabidopsis thaliana]
  misc_feature (7)..(486): Homolog of NCBI NO: 15222344 NR Description: UDP-glucose glucosyltransferase, putative
RKKSKEMKTAELIFVPLPETGHLLSTIEFGKRLLNLDRRISMITILSMNLPYAPHADASLASLTASEPGIRIISLPEIHDPPPIKLLDTSSETYILDFIHKNIPCLRKTIQDLVSSSSSSGGGSSHVAGLILDFFCVGLIDIGREVNLPSYIFMTSNFGFLGVLQYLPERQRLTPSEFDESSGEEELHIPAFVNRVPAKVLPPGVFDKLSYGSLVKIGERLHEAKGILVNSFTQVEPYAAEHFSQGRDYPHVYPVGPVLNLTGRTNPGLASAQYKEMMKWLDEQPDSSVLFLCFGSMGVFPAPQITEIAHALELIGCRFIWAIRTNMAGDGDPQEPLPEGFVDRTMGRGIVCSWAPQVDILAHKATGGFVSHCGWNSVQESLWYGVPIATWPMYAEQQLNAFEMVKELGLAVEIRLDYVADGDRVTLEIVSADEIATAVRSLMDSDNPVRKKVIEKSSVARKAVGDGGSSTVATCNFIKDILGDHF

SEQ ID NO: 27630 - protein, 480 aa, Arabidopsis thaliana
  peptide (1)..(480): Ceres Seq. ID no. 12335131
  misc_feature (1)..(476): Homolog of NCBI NO: 20146091 NR Description: glucosyltransferase NTGT3 [Nicotiana tabacum]
  misc_feature (1)..(477): Homolog of NCBI NO: 21555082 NR Description: putative flavonol 3-O-glucosyltransferase
  misc_feature (1)..(477): Homolog of NCBI NO: 15227606 NR Description: putative flavonol 3-O-glucosyltransferase
  misc_feature (1)..(477): Homolog of NCBI NO: 15227610 NR Description: putative flavonol 3-O-glucosyltransferase
  misc_feature (1)..(472): Homolog of NCBI NO: 15227613 NR Description: putative flavonol 3-O-glucosyltransferase
  misc_feature (1)..(476): Homolog of NCBI NO: 15227616 NR Description: UDP-glycosyltransferase family; protein id:
  misc_feature (17)..(478): Homolog of NCBI NO: 21954072 NR Description: putative UDP-glucose glucosyltransferase
  misc_feature (1)..(477): Homolog of NCBI NO: 15222348 NR Description: UDP-glucose glucosyltransferase, putative
  misc_feature (1)..(478): Homolog of NCBI NO: 30680040 NR Description: glycosyltransferase family [Arabidopsis thaliana]
  misc_feature (1)..(480): Homolog of NCBI NO: 15222344 NR Description: UDP-glucose glucosyltransferase, putative
MKTAELIFVPLPETGHLLSTIEFGKRLLNLDRRISMITILSMNLPYAPHADASLASLTASEPGIRIISLPEIHDPPPIKLLDTSSETYILDFIHKNIPCLRKTIQDLVSSSSSSGGGSSHVAGLILDFFCVGLIDIGREVNLPSYIFMTSNFGFLGVLQYLPERQRLTPSEFDESSGEEELHIPAFVNRVPAKVLPPGVFDKLSYGSLVKIGERLHEAKGILVNSFTQVEPYAAEHFSQGRDYPHVYPVGPVLNLTGRTNPGLASAQYKEMMKWLDEQPDSSVLFLCFGSMGVFPAPQITEIAHALELIGCRFIWAIRTNMAGDGDPQEPLPEGFVDRTMGRGIVCSWAPQVDILAHKATGGFVSHCGWNSVQESLWYGVPIATWPMYAEQQLNAFEMVKELGLAVEIRLDYVADGDRVTLEIVSADEIATAVRSLMDSDNPVRKKVIEKSSVARKAVGDGGSSTVATCNFIKDILGDHF

SEQ ID NO: 27631 - protein, 445 aa, Arabidopsis thaliana
  peptide (1)..(445): Ceres Seq. ID no. 12335132
  misc_feature (1)..(441): Homolog of NCBI NO: 20146091 NR Description: glucosyltransferase NTGT3 [Nicotiana tabacum]
  misc_feature (1)..(442): Homolog of NCBI NO: 21555082 NR Description: putative flavonol 3-O-glucosyltransferase
  misc_feature (1)..(442): Homolog of NCBI NO: 15227606 NR Description: putative flavonol 3-O-glucosyltransferase
  misc_feature (1)..(442): Homolog of NCBI NO: 15227610 NR Description: putative flavonol 3-O-glucosyltransferase
  misc_feature (1)..(437): Homolog of NCBI NO: 15227613 NR Description: putative flavonol 3-O-glucosyltransferase
  misc_feature (1)..(441): Homolog of NCBI NO: 15227616 NR Description: UDP-glycosyltransferase family; protein id:
  misc_feature (1)..(443): Homolog of NCBI NO: 21954072 NR Description: putative UDP-glucose glucosyltransferase
  misc_feature (1)..(442): Homolog of NCBI NO: 15222348 NR Description: UDP-glucose glucosyltransferase, putative
  misc_feature (1)..(443): Homolog of NCBI NO: 30680040 NR Description: glycosyltransferase family [Arabidopsis thaliana]
  misc_feature (1)..(445): Homolog of NCBI NO: 15222344 NR Description: UDP-glucose glucosyltransferase, putative
MITILSMNLPYAPHADASLASLTASEPGIRIISLPEIHDPPPIKLLDTSSETYILDFIHKNIPCLRKTIQDLVSSSSSSGGGSSHVAGLILDFFCVGLIDIGREVNLPSYIFMTSNFGFLGVLQYLPERQRLTPSEFDESSGEEELHIPAFVNRVPAKVLPPGVFDKLSYGSLVKIGERLHEAKGILVNSFTQVEPYAAEHFSQGRDYPHVYPVGPVLNLTGRTNPGLASAQYKEMMKWLDEQPDSSVLFLCFGSMGVFPAPQITEIAHALELIGCRFIWAIRTNMAGDGDPQEPLPEGFVDRTMGRGIVCSWAPQVDILAHKATGGFVSHCGWNSVQESLWYGVPIATWPMYAEQQLNAFEMVKELGLAVEIRLDYVADGDRVTLEIVSADEIATAVRSLMDSDNPVRKKVIEKSSVARKAVGDGGSSTVATCNFIKDILGDHF

SEQ ID NO: 27632 - DNA, 1310 bp, Arabidopsis thaliana
  misc_feature (1)..(1310): Ceres Seq. ID no. 12332629
  misc_feature: MA Experiment ID: 20000111 Result: Down-regulated in Transcription
  misc_feature: MA Experiment 20000111 PARAMETER Experiment Name: At_42deg_Heat_cDNA_P Parameter: Temperature (deg C) Value: 42 vs. 22
  misc_feature: MA Experiment 20000111 PARAMETER Experiment Name: At_42deg_Heat_cDNA_P Parameter: Timepoint (hr) Value: 6
  misc_feature: MA Experiment 20000111 PARAMETER Experiment Name: At_42deg_Heat_cDNA_P Parameter: Tissue Value: Aerial
  misc_feature: MA Experiment ID: 20000173 Result: Down-regulated in Transcription
  misc_feature: MA Experiment 20000173 PARAMETER Experiment Name: At_42deg_Heat_P Parameter: Age (day) Value: 14
  misc_feature: MA Experiment 20000173 PARAMETER Experiment Name: At_42deg_Heat_P Parameter: Organism Value: A. thaliana
  misc_feature: MA Experiment 20000173 PARAMETER Experiment Name: At_42deg_Heat_P Parameter: Plant Line Value: WS
  misc_feature: MA Experiment 20000173 PARAMETER Experiment Name: At_42deg_Heat_P Parameter: Temperature (deg C) Value: 42 vs. 22
  misc_feature: MA Experiment 20000173 PARAMETER Experiment Name: At_42deg_Heat_P Parameter: Timepoint (hr) Value: 6
  misc_feature: MA Experiment 20000173 PARAMETER Experiment Name: At_42deg_Heat_P Parameter: Tissue Value: Aerial
  misc_feature: MA Experiment ID: 20000184 Result: Down-regulated in Transcription
  misc_feature: MA Experiment 20000184 PARAMETER Experiment Name: At_Shoots__P Parameter: Age (day) Value: 7
  misc_feature: MA Experiment 20000184 PARAMETER Experiment Name: At_Shoots__P Parameter: Tissue Value: Shoots vs. Whole Plant
  misc_feature: MA Experiment ID: 20000224 Result: Up-regulated in Transcription
  misc_feature: MA Experiment ID: 20000264 Result: Up-regulated in Transcription
  misc_feature: MA Experiment 20000264 PARAMETER Experiment Name: At_Open_Flower_P Parameter: Age (day) Value: 21
  misc_feature: MA Experiment 20000264 PARAMETER Experiment Name: At_Open_Flower_P Parameter: Plant Line Value: WS
  misc_feature: MA Experiment 20000264 PARAMETER Experiment Name: At_Open_Flower_P Parameter: Tissue Value: Open Flower vs. Whole Plant
  misc_feature: MA Experiment ID: 20000794 Result: Up-regulated in Transcription
  misc_feature: MA Experiment 20000794 PARAMETER Experiment Name: At_Petals_P Parameter: Age (day) Value: 23-25 days
  misc_feature: MA Experiment 20000794 PARAMETER Experiment Name: At_Petals_P Parameter: Plant Line Value: WS
  misc_feature: MA Experiment 20000794 PARAMETER Experiment Name: At_Petals_P Parameter: Tissue Value: Petals vs. Whole plant
  misc_feature: MA Experiment ID: 20001557 Result: Down-regulated in Transcription
  misc_feature: MA Experiment 20001557 PARAMETER Experiment Name: At_Drought_Soil_Dry_P Parameter: Age (day) Value: 27
  misc_feature: MA Experiment 20001557 PARAMETER Experiment Name: At_Drought_Soil_Dry_P Parameter: Organism Value: A. thaliana
  misc_feature: MA Experiment 20001557 PARAMETER Experiment Name: At_Drought_Soil_Dry_P Parameter: Plant Line Value: WS
  misc_feature: MA Experiment 20001557 PARAMETER Experiment Name: At_Drought_Soil_Dry_P Parameter: Post Timepoint (hr) Value: 3
  misc_feature: MA Experiment 20001557 PARAMETER Experiment Name: At_Drought_Soil_Dry_P Parameter: Post-Treatment Value: Re-Water vs. No Drought
  misc_feature: MA Experiment 20001557 PARAMETER Experiment Name: At_Drought_Soil_Dry_P Parameter: Timepoint (day) Value: 13
  misc_feature: MA Experiment 20001557 PARAMETER Experiment Name: At_Drought_Soil_Dry_P Parameter: Treatment Value: Drought vs. No Drought
gtagaagaagaagaagaagagtgatactgagaagatctgtgagattattatattcgattttgatcagtttctaaaaagctttcaacaatggattcgtcttcaaatttgaatcctcttcgtgaagatacctcagaggaacatttagaacccatagaagctccggcgtctgtcttcgccgctcgtcctcttcgtcctccttctacgaattcgtcggagaagtattcgcctgtagaatggaaaagctattttgataaagaagatgatatatcaatcactggctctgatgatgtgtttcatgtgtatatggcaggaaatgaaggacctgttgtcttttgtctccatggtggtggctactctgggctctcgttttctatagtagcaagtaaaattaaggagaaagcacgtgtggttgcgatggacttgagagggcacggtaaatcggtttcggagaacgaattggagttatcgcttgagacaatgagcaatgatgttttggctgtcattaaggaattgtatggagactctcctccagctattgtgctagttggtcacagcatgggaggttcggtcgctgtgcaagttgctgcaaacaaaacattgcctagcttggctgggcttgtcgttgtggatgttgttgagggtactgctatttcctcattgattcacatgcagaaaattctttcaaacagaatgcaacattttcccagcatcgaaaaagcaattgaatacagcgttagaggagggtcattaagaaacattgattcagcccgtgtctctatccccacaactctcaaatatgatgattcaaagcattgctacgtttaccgaacacgtctagaggaaacagagcaatattggaaaggctggtacgatggtctctcagagaagtttttgtcatccccagttccgaaactcttgctattagctggaactgataggttggacaggaccctcacaattggtcaaatgcaaggaaagtttcagatgattgtggtcaaacacaccggacatgccatacaggaagatgtaccggaggagtttgcgaatctagttctgaatttcatatcacgtaacagaattggtcctcatggtgttgagataccaggaatgtggaaaccttcacaacagactaagacttgaagcagccatcactggacaatgccaaagtcgtcgtgtggctctactcacttgtttcgctttgtccgtttatgaataaacagaattaacaaactctagctcgtgttaaggagttggcaatacaagaagaaaacagagtaaaaagattaaaatcactttctatatttttccat

SEQ ID NO: 27633 - protein, 350 aa, Arabidopsis thaliana
  peptide (1)..(350): Ceres Seq. ID no. 12332630
  misc_feature (105)..(324): Pfam Name: alpha/beta hydrolase fold Pfam Description: alpha/beta hydrolase fold
  misc_feature (230)..(335): Homolog of NCBI NO: 34858774 NR Description: similar to Protein phosphatase methylesterase 1
  misc_feature (45)..(236): Homolog of NCBI NO: 34858774 NR Description: similar to Protein phosphatase methylesterase 1
  misc_feature (230)..(335): Homolog of NCBI NO: 7706645 NR Description: protein phosphatase methylesterase-1 [Homo
  misc_feature (45)..(236): Homolog of NCBI NO: 7706645 NR Description: protein phosphatase methylesterase-1 [Homo
  misc_feature (230)..(335): Homolog of NCBI NO: 30794138 NR Description: protein phosphatase methylesterase 1 [Mus
  misc_feature (45)..(236): Homolog of NCBI NO: 30794138 NR Description: protein phosphatase methylesterase 1 [Mus
  misc_feature (310)..(340): Homolog of NCBI NO: 7487732 NR Description: hypothetical protein T5L19.180 - Arabidopsis
  misc_feature (212)..(261): Homolog of NCBI NO: 7487732 NR Description: hypothetical protein T5L19.180 - Arabidopsis
  misc_feature (1)..(184): Homolog of NCBI NO: 7487732 NR Description: hypothetical protein T5L19.180 - Arabidopsis
  misc_feature (1)..(350): Homolog of NCBI NO: 18413291 NR Description: lipase-like protein
MDSSSNLNPLREDTSEEHLEPIEAPASVFAARPLRPPSTNSSEKYSPVEWKSYFDKEDDISITGSDDVFHVYMAGNEGPVVFCLHGGGYSGLSFSIVASKIKEKARVVAMDLRGHGKSVSENELELSLETMSNDVLAVIKELYGDSPPAIVLVGHSMGGSVAVQVAANKTLPSLAGLVVVDVVEGTAISSLIHMQKILSNRMQHFPSIEKAIEYSVRGGSLRNIDSARVSIPTTLKYDDSKHCYVYRTRLEETEQYWKGWYDGLSEKFLSSPVPKLLLLAGTDRLDRTLTIGQMQGKFQMIVVKHTGHAIQEDVPEEFANLVLNFISRNRIGPHGVEIPGMWKPSQQTKT

SEQ ID NO: 27634 - protein, 278 aa, Arabidopsis thaliana
  peptide (1)..(278): Ceres Seq. ID no. 12332631
  misc_feature (33)..(252): Pfam Name: alpha/beta hydrolase fold Pfam Description: alpha/beta hydrolase fold
  misc_feature (158)..(263): Homolog of NCBI NO: 34858774 NR Description: similar to Protein phosphatase methylesterase 1
  misc_feature (1)..(164): Homolog of NCBI NO: 34858774 NR Description: similar to Protein phosphatase methylesterase 1
  misc_feature (158)..(263): Homolog of NCBI NO: 7706645 NR Description: protein phosphatase methylesterase-1 [Homo
  misc_feature (1)..(164): Homolog of NCBI NO: 7706645 NR Description: protein phosphatase methylesterase-1 [Homo
  misc_feature (158)..(263): Homolog of NCBI NO: 30794138 NR Description: protein phosphatase methylesterase 1 [Mus
  misc_feature (1)..(164): Homolog of NCBI NO: 30794138 NR Description: protein phosphatase methylesterase 1 [Mus
  misc_feature (238)..(268): Homolog of NCBI NO: 7487732 NR Description: hypothetical protein T5L19.180 - Arabidopsis
  misc_feature (140)..(189): Homolog of NCBI NO: 7487732 NR Description: hypothetical protein T5L19.180 - Arabidopsis
  misc_feature (1)..(112): Homolog of NCBI NO: 7487732 NR Description: hypothetical protein T5L19.180 - Arabidopsis
  misc_feature (1)..(278): Homolog of NCBI NO: 18413291 NR Description: lipase-like protein
MAGNEGPVVFCLHGGGYSGLSFSIVASKIKEKARVVAMDLRGHGKSVSENELELSLETMSNDVLAVIKELYGDSPPAIVLVGHSMGGSVAVQVAANKTLPSLAGLVVVDVVEGTAISSLIHMQKILSNRMQHFPSIEKAIEYSVRGGSLRNIDSARVSIPTTLKYDDSKHCYVYRTRLEETEQYWKGWYDGLSEKFLSSPVPKLLLLAGTDRLDRTLTIGQMQGKFQMIVVKHTGHAIQEDVPEEFANLVLNFISRNRIGPHGVEIPGMWKPSQQTKT

SEQ ID NO: 27635 - protein, 241 aa, Arabidopsis thaliana
  peptide (1)..(241): Ceres Seq. ID no. 12332632
  misc_feature (1)..(215): Pfam Name: alpha/beta hydrolase fold Pfam Description: alpha/beta hydrolase fold
  misc_feature (121)..(226): Homolog of NCBI NO: 34858774 NR Description: similar to Protein phosphatase methylesterase 1
  misc_feature (1)..(127): Homolog of NCBI NO: 34858774 NR Description: similar to Protein phosphatase methylesterase 1
  misc_feature (121)..(226): Homolog of NCBI NO: 7706645 NR Description: protein phosphatase methylesterase-1 [Homo
  misc_feature (1)..(127): Homolog of NCBI NO: 7706645 NR Description: protein phosphatase methylesterase-1 [Homo
  misc_feature (121)..(226): Homolog of NCBI NO: 30794138 NR Description: protein phosphatase methylesterase 1 [Mus
  misc_feature (1)..(127): Homolog of NCBI NO: 30794138 NR Description: protein phosphatase methylesterase 1 [Mus
  misc_feature (201)..(231): Homolog of NCBI NO: 7487732 NR Description: hypothetical protein T5L19.180 - Arabidopsis
  misc_feature (103)..(152): Homolog of NCBI NO: 7487732 NR Description: hypothetical protein T5L19.180 - Arabidopsis
  misc_feature (1)..(75): Homolog of NCBI NO: 7487732 NR Description: hypothetical protein T5L19.180 - Arabidopsis
  misc_feature (1)..(241): Homolog of NCBI NO: 18413291 NR Description: lipase-like protein
MDLRGHGKSVSENELELSLETMSNDVLAVIKELYGDSPPAIVLVGHSMGGSVAVQVAANKTLPSLAGLVVVDVVEGTAISSLIHMQKILSNRMQHFPSIEKAIEYSVRGGSLRNIDSARVSIPTTLKYDDSKHCYVYRTRLEETEQYWKGWYDGLSEKFLSSPVPKLLLLAGTDRLDRTLTIGQMQGKFQMIVVKHTGHAIQEDVPEEFANLVLNFISRNRIGPHGVEIPGMWKPSQQTKT

SEQ ID NO: 27636 - DNA, 1210 bp, Arabidopsis thaliana
  misc_feature (1)..(1210): Ceres Seq. ID no. 12482774
  misc_feature: MA Experiment ID: 108434 Result: Up-regulated in Transcription
  misc_feature: MA Experiment 108434 PARAMETER Experiment Name: At_Root_Tips_cDNA_P Parameter: Tissue Value: Root Tips
  misc_feature: MA Experiment ID: 108461 Result: Up-regulated in Transcription
  misc_feature: MA Experiment 108461 PARAMETER Experiment Name: At_Germinating_Seeds_cDNA_P Parameter: Age (day) Value: 1 vs. 0
  misc_feature: MA Experiment 108461 PARAMETER Experiment Name: At_Germinating_Seeds_cDNA_P Parameter: Tissue Value: Germinating Seeds
  misc_feature: MA Experiment ID: 108462 Result: Up-regulated in Transcription
  misc_feature: MA Experiment 108462 PARAMETER Experiment Name: At_Germinating_Seeds_cDNA_P Parameter: Age (day) Value: 2 vs. 0
  misc_feature: MA Experiment 108462 PARAMETER Experiment Name: At_Germinating_Seeds_cDNA_P Parameter: Tissue Value: Germinating Seeds
  misc_feature: MA Experiment ID: 108579 Result: Down-regulated in Transcription
  misc_feature: MA Experiment 108579 PARAMETER Experiment Name: At_4deg_Cold_cDNA_P Parameter: Temperature (deg C) Value: 4 vs. 22
  misc_feature: MA Experiment 108579 PARAMETER Experiment Name: At_4deg_Cold_cDNA_P Parameter: Timepoint (hr) Value: 6
  misc_feature: MA Experiment 108579 PARAMETER Experiment Name: At_4deg_Cold_cDNA_P Parameter: Tissue Value: Aerial
  misc_feature: MA Experiment ID: 20000224 Result: Down-regulated in Transcription
agaaggcgttgaatcctttcgttttccgattccatttttgggatctcttgtttcgttttcttctctttggatccattccattcccatgttccccaatttctttaatcggtgttgcttccacaaggcttcatgagcttgtataacaagtttctctaggaggtgttaaagagccagatcaagctttcagaagagattttcttagggtggttgagagctgaaagttttgatatttagtcaactttgttccactgaaccttctaggaagctacctcaagtagacagctttgttgacgggcttcaagccagtggtaaagatatgcttctgtagaagggttaatcttgagcattaaaggacatggctttctactctgaagacgacaagagcgaagactacctctttaagattgttctaatcggtgattctgctgtcgggaaatcaaatttacttgccagatttgcgagggatgagttctatcccaattcaaagtcgacgattggagtggagtttcagacacagaagatggatataaacgggaaggagatcaaagcacagatatgggacacagcaggtcaagaacgttttagagcagtcacttctgcatattaccgaggtgcagttggagctcttctggtttacgatatcagcagacggcagacttttcacagcattggtagatggctcaacgagctacacacacactctgatatgaatgttgtgacgatcctggtgggcaacaagtcggatctgaaggacttgagagaagtgtcaacagcggaagggaaggcattggctgaagcacaaggtcttttcttcatggagacatcggctttggactcatcaaacgtggcagctgcatttgagacggttgtgaaggagatatacaacatactgagcaggaaagtgatgagctcacaggagctaaacaagcaagaccctgcttcactgagcaatggcaagaaagttgtgataccatcagacgggcagggcgagtccaagaaaggtggatgttgttcttcttgatagaaaactgaaattgtagagagcttaaaaaggaagactattgatcatctgtttgattgtttatgttgtccacgttgccatgaatgttgaaatttgagatgggcttgtgttgtggtgtggaagtgtttaggtgtagtagcaatctgtaaattttctattgcagaagcttttatgagactcacactaccc

SEQ ID NO: 27637 - protein, 221 aa, Arabidopsis thaliana
  peptide (1)..(221): Ceres Seq. ID no. 12482775
  misc_feature (16)..(177): Pfam Name: Ras family Pfam Description: Ras family
  misc_feature (6)..(220): Homolog of NCBI NO: 15224226 NR Description: Ras-related GTP-binding protein (ARA-4)
  misc_feature (5)..(221): Homolog of NCBI NO: 15225121 NR Description: GTP-binding protein, putative
  misc_feature (7)..(219): Homolog of NCBI NO: 29647488 NR Description: putative GTP-binding protein Rab11e
  misc_feature (1)..(221): Homolog of NCBI NO: 34913324 NR Description: putative Rab GTP-binding protein Rab11a
  misc_feature (1)..(221): Homolog of NCBI NO: 5714660 NR Description: Rab GTP-binding protein Rab11b [Gossypium
  misc_feature (1)..(221): Homolog of NCBI NO: 5714658 NR Description: Rab GTP-binding protein Rab11a [Gossypium
  misc_feature (1)..(221): Homolog of NCBI NO: 541980 NR Description: GTP-binding protein, ras-like (clone vfa-yptx) -
  misc_feature (1)..(221): Homolog of NCBI NO: 560504 NR Description: guanine nucleotide regulatory protein [Vicia
  misc_feature (1)..(221): Homolog of NCBI NO: 1370160 NR Description: RAB11J [Lotus japonicus]
  misc_feature (1)..(221): Homolog of NCBI NO: 15238115 NR Description: GTP-binding protein, putative; protein id:
MAFYSEDDKSEDYLFKIVLIGDSAVGKSNLLARFARDEFYPNSKSTIGVEFQTQKMDINGKEIKAQIWDTAGQERFRAVTSAYYRGAVGALLVYDISRRQTFHSIGRWLNELHTHSDMNVVTILVGNKSDLKDLREVSTAEGKALAEAQGLFFMETSALDSSNVAAAFETVVKEIYNILSRKVMSSQELNKQDPASLSNGKKVVIPSDGQGESKKGGCCSS

SEQ ID NO: 27638 - protein, 166 aa, Arabidopsis thaliana
  peptide (1)..(166): Ceres Seq. ID no. 12482776
  misc_feature (1)..(122): Pfam Name: Ras family Pfam Description: Ras family
  misc_feature (1)..(165): Homolog of NCBI NO: 15224226 NR Description: Ras-related GTP-binding protein (ARA-4)
  misc_feature (1)..(166): Homolog of NCBI NO: 15225121 NR Description: GTP-binding protein, putative
  misc_feature (1)..(164): Homolog of NCBI NO: 29647488 NR Description: putative GTP-binding protein Rab11e
  misc_feature (1)..(166): Homolog of NCBI NO: 34913324 NR Description: putative Rab GTP-binding protein Rab11a
  misc_feature (1)..(166): Homolog of NCBI NO: 5714660 NR Description: Rab GTP-binding protein Rab11b [Gossypium
  misc_feature (1)..(166): Homolog of NCBI NO: 5714658 NR Description: Rab GTP-binding protein Rab11a [Gossypium
  misc_feature (1)..(166): Homolog of NCBI NO: 541980 NR Description: GTP-binding protein, ras-like (clone vfa-yptx) -
  misc_feature (1)..(166): Homolog of NCBI NO: 560504 NR Description: guanine nucleotide regulatory protein [Vicia
  misc_feature (1)..(166): Homolog of NCBI NO: 1370160 NR Description: RAB11J [Lotus japonicus]
  misc_feature (1)..(166): Homolog of NCBI NO: 15238115 NR Description: GTP-binding protein, putative; protein id:
MDINGKEIKAQIWDTAGQERFRAVTSAYYRGAVGALLVYDISRRQTFHSIGRWLNELHTHSDMNVVTILVGNKSDLKDLREVSTAEGKALAEAQGLFFMETSALDSSNVAAAFETVVKEIYNILSRKVMSSQELNKQDPASLSNGKKVVIPSDGQGESKKGGCCSS

SEQ ID NO: 27639 - DNA, 1264 bp, Arabidopsis thaliana
  misc_feature (1)..(1264): Ceres Seq. ID no. 13487494
  misc_feature: MA Experiment ID: 20000030 Result: Up-regulated in Transcription
  misc_feature: MA Experiment 20000030 PARAMETER Experiment Name: At_CS6630_Roots_cDNA_P Parameter: Plant Line Value: CS6630 vs. WS
  misc_feature: MA Experiment 20000030 PARAMETER Experiment Name: At_CS6630_Roots_cDNA_P Parameter: Tissue Value: Roots
  misc_feature: MA Experiment ID: 20000184 Result: Up-regulated in Transcription
  misc_feature: MA Experiment 20000184 PARAMETER Experiment Name: At_Shoots__P Parameter: Age (day) Value: 7
  misc_feature: MA Experiment 20000184 PARAMETER Experiment Name: At_Shoots__P Parameter: Tissue Value: Shoots vs. Whole Plant
  misc_feature: MA Experiment ID: 20000286 Result: Down-regulated in Transcription
  misc_feature: MA Experiment 20000286 PARAMETER Experiment Name: At_Open_Flower_P Parameter: Age (day) Value: 21
  misc_feature: MA Experiment 20000286 PARAMETER Experiment Name: At_Open_Flower_P Parameter: Plant Line Value: WS
  misc_feature: MA Experiment 20000286 PARAMETER Experiment Name: At_Open_Flower_P Parameter: Tissue Value: Half Open vs. Whole Plant
  misc_feature: MA Experiment ID: 20000437 Result: Down-regulated in Transcription
  misc_feature: MA Experiment 20000437 PARAMETER Experiment Name: At_Drought_P Parameter: Age (day) Value: 8
  misc_feature: MA Experiment 20000437 PARAMETER Experiment Name: At_Drought_P Parameter: Organism Value: A. thaliana
  misc_feature: MA Experiment 20000437 PARAMETER Experiment Name: At_Drought_P Parameter: Plant Line Value: WS
  misc_feature: MA Experiment 20000437 PARAMETER Experiment Name: At_Drought_P Parameter: Timepoint (hr) Value: 24
  misc_feature: MA Experiment 20000437 PARAMETER Experiment Name: At_Drought_P Parameter: Tissue Value: Whole Plant
  misc_feature: MA Experiment 20000437 PARAMETER Experiment Name: At_Drought_P Parameter: Treatment Value: Drought vs. No Drought
  misc_feature: MA Experiment ID: 20000438 Result: Up-regulated in Transcription
  misc_feature: MA Experiment 20000438 PARAMETER Experiment Name: At_Shoots__P Parameter: Age (day) Value: 14
  misc_feature: MA Experiment 20000438 PARAMETER Experiment Name: At_Shoots__P Parameter: Tissue Value: Shoots vs. Whole Plant
  misc_feature: MA Experiment ID: 20000451 Result: Up-regulated in Transcription
  misc_feature: MA Experiment 20000451 PARAMETER Experiment Name: At_CS6879_Shoots-Roots_P Parameter: Age (day) Value: 14
  misc_feature: MA Experiment 20000451 PARAMETER Experiment Name: At_CS6879_Shoots-Roots_P Parameter: Organism Value: A. thaliana
  misc_feature: MA Experiment 20000451 PARAMETER Experiment Name: At_CS6879_Shoots-Roots_P Parameter: Plant Line Value: CS6879 vs. WS
  misc_feature: MA Experiment 20000451 PARAMETER Experiment Name: At_CS6879_Shoots-Roots_P Parameter: Tissue Value: Roots
  misc_feature: MA Experiment ID: 20000452 Result: Up-regulated in Transcription
  misc_feature: MA Experiment 20000452 PARAMETER Experiment Name: At_CS6879_Shoots-Roots_P Parameter: Age (day) Value: 14
  misc_feature: MA Experiment 20000452 PARAMETER Experiment Name: At_CS6879_Shoots-Roots_P Parameter: Organism Value: A. thaliana
  misc_feature: MA Experiment 20000452 PARAMETER Experiment Name: At_CS6879_Shoots-Roots_P Parameter: Plant Line Value: CS6879 vs. WS
  misc_feature: MA Experiment 20000452 PARAMETER Experiment Name: At_CS6879_Shoots-Roots_P Parameter: Tissue Value: Shoots
  misc_feature: MA Experiment ID: 20000573 Result: Down-regulated in Transcription
  misc_feature: MA Experiment 20000573 PARAMETER Experiment Name: At_100uM_ABA_Mutants__P Parameter: Organism Value: A. thaliana
  misc_feature: MA Experiment 20000573 PARAMETER Experiment Name: At_100uM_ABA_Mutants__P Parameter: Plant Line Value: CS22 vs. Ler wt
  misc_feature: MA Experiment 20000573 PARAMETER Experiment Name: At_100uM_ABA_Mutants__P Parameter: Timepoint (hr) Value: N/A
  misc_feature: MA Experiment 20000573 PARAMETER Experiment Name: At_100uM_ABA_Mutants__P Parameter: Tissue Value: Whole Plant
  misc_feature: MA Experiment 20000573 PARAMETER Experiment Name: At_100uM_ABA_Mutants__P Parameter: Treatment Value: None
  misc_feature: MA Experiment ID: 20000574 Result: Down-regulated in Transcription
  misc_feature: MA Experiment 20000574 PARAMETER Experiment Name: At_100uM_ABA_Mutants__P Parameter: Organism Value: A. thaliana
  misc_feature: MA Experiment 20000574 PARAMETER Experiment Name: At_100uM_ABA_Mutants__P Parameter: Plant Line Value: CS23 vs. Ler wt
  misc_feature: MA Experiment 20000574 PARAMETER Experiment Name: At_100uM_ABA_Mutants__P Parameter: Timepoint (hr) Value: N/A
  misc_feature: MA Experiment 20000574 PARAMETER Experiment Name: At_100uM_ABA_Mutants__P Parameter: Tissue Value: Whole Plant
  misc_feature: MA Experiment 20000574 PARAMETER Experiment Name: At_100uM_ABA_Mutants__P Parameter: Treatment Value: None
  misc_feature: MA Experiment ID: 20001450 Result: Up-regulated in Transcription
  misc_feature: MA Experiment 20001450 PARAMETER Experiment Name: At_Far-red-induction_P Parameter: Age (day) Value: 7
  misc_feature: MA Experiment 20001450 PARAMETER Experiment Name: At_Far-red-induction_P Parameter: Light Value: Far-red vs. White
  misc_feature: MA Experiment 20001450 PARAMETER Experiment Name: At_Far-red-induction_P Parameter: Organism Value: A. thaliana
  misc_feature: MA Experiment 20001450 PARAMETER Experiment Name: At_Far-red-induction_P Parameter: Plant Line Value: Columbia
  misc_feature: MA Experiment 20001450 PARAMETER Experiment Name: At_Far-red-induction_P Parameter: Timepoint (hr) Value: 8
  misc_feature: MA Experiment 20001450 PARAMETER Experiment Name: At_Far-red-induction_P Parameter: Tissue Value: Whole Plant
  misc_feature: MA Experiment ID: 20001451 Result: Up-regulated in Transcription
  misc_feature: MA Experiment 20001451 PARAMETER Experiment Name: At_Far-red-induction_P Parameter: Age (day) Value: 7
  misc_feature: MA Experiment 20001451 PARAMETER Experiment Name: At_Far-red-induction_P Parameter: Light Value: Far-red vs. White
  misc_feature: MA Experiment 20001451 PARAMETER Experiment Name: At_Far-red-induction_P Parameter: Organism Value: A. thaliana
  misc_feature: MA Experiment 20001451 PARAMETER Experiment Name: At_Far-red-induction_P Parameter: Plant Line Value: Columbia
  misc_feature: MA Experiment 20001451 PARAMETER Experiment Name: At_Far-red-induction_P Parameter: Timepoint (hr) Value: 24
  misc_feature: MA Experiment 20001451 PARAMETER Experiment Name: At_Far-red-induction_P Parameter: Tissue Value: Whole Plant
  misc_feature: MA Experiment ID: 20001557 Result: Down-regulated in Transcription
  misc_feature: MA Experiment 20001557 PARAMETER Experiment Name: At_Drought_Soil_Dry_P Parameter: Age (day) Value: 27
  misc_feature: MA Experiment 20001557 PARAMETER Experiment Name: At_Drought_Soil_Dry_P Parameter: Organism Value: A. thaliana
  misc_feature: MA Experiment 20001557 PARAMETER Experiment Name: At_Drought_Soil_Dry_P Parameter: Plant Line Value: WS
  misc_feature: MA Experiment 20001557 PARAMETER Experiment Name: At_Drought_Soil_Dry_P Parameter: Post Timepoint (hr) Value: 3
  misc_feature: MA Experiment 20001557 PARAMETER Experiment Name: At_Drought_Soil_Dry_P Parameter: Post-Treatment Value: Re-Water vs. No Drought
  misc_feature: MA Experiment 20001557 PARAMETER Experiment Name: At_Drought_Soil_Dry_P Parameter: Timepoint (day) Value: 13
  misc_feature: MA Experiment 20001557 PARAMETER Experiment Name: At_Drought_Soil_Dry_P Parameter: Treatment Value: Drought vs. No Drought
  misc_feature: MA Experiment ID: 20001558 Result: Down-regulated in Transcription
  misc_feature: MA Experiment 20001558 PARAMETER Experiment Name: At_Drought_Soil_Dry_P Parameter: Age (day) Value: 27
  misc_feature: MA Experiment 20001558 PARAMETER Experiment Name: At_Drought_Soil_Dry_P Parameter: Organism Value: A. thaliana
  misc_feature: MA Experiment 20001558 PARAMETER Experiment Name: At_Drought_Soil_Dry_P Parameter: Plant Line Value: WS
  misc_feature: MA Experiment 20001558 PARAMETER Experiment Name: At_Drought_Soil_Dry_P Parameter: Post Timepoint (hr) Value: 6
  misc_feature: MA Experiment 20001558 PARAMETER Experiment Name: At_Drought_Soil_Dry_P Parameter: Post-Treatment Value: Re-Water vs. No Drought
  misc_feature: MA Experiment 20001558 PARAMETER Experiment Name: At_Drought_Soil_Dry_P Parameter: Timepoint (day) Value: 13
  misc_feature: MA Experiment 20001558 PARAMETER Experiment Name: At_Drought_Soil_Dry_P Parameter: Treatment Value: Drought vs. No Drought
  misc_feature: MA Experiment ID: 20001757 Result: Up-regulated in Transcription
  misc_feature: MA Experiment 20001757 PARAMETER Experiment Name: At_50mM_NH4NO3_L-to-H_P Parameter: Timepoint (hr) Value: 6
  misc_feature: MA Experiment 20001757 PARAMETER Experiment Name: At_50mM_NH4NO3_L-to-H_P Parameter: Tissue Value: Leaf
  misc_feature: MA Experiment 20001757 PARAMETER Experiment Name: At_50mM_NH4NO3_L-to-H_P Parameter: Treatment Value: 50mM NH4NO3 vs 100mM Mannitol
aaatccacagagattttctctctttgatcacaattcaatcatacactctattctcatctcttactcaggtcaaaactctctaaagttggaatcttgatttggtttttaaggtaagattagctcaaaatgagtttaggtgctttgatggaagagaagagaagagcaacaacttcatcttcttcttctcaggtacatatgtcaaatgatatagattggcaaatgcttgataaatcgaggtttttcttcctcggtgctgctcttttctccggtgtatccactgctctttaccctattgtagttctcaaaacaaggcaacaagtctctccgactcgtgtctcatgtgccaacatttctctggctattgctagacttgaaggtcttaaagggttttacaagggttttggaacatctttgcttggaaccatcccggctcgtgctctctatatgactgctctagagattacaaagagtagtgtaggtcaagcaactgttaggttaggattgtctgatactacgtctttggctgttgctaatggtgcagctggtttgacctcggctgtggctgcccagactgtctggactccgattgatattgtgagtcaagggcttatggttcaaggcgatgtctccttgagtaagcatcttcctggagtgatgaactcttgcagatacagaaatgggtttgatgcttttagaaagattctttacacagatggaccaagagggttctacagaggatttgggatctcgatcttgacttacgcaccttccaacgcggtttggtgggcgtcttattctttggctcaaaaatcaatttggtctcgatacaagcactcctacaaccacaaggaagatgctggtggctcagtggtggttcaagcgttgagtgcagctacagcaagcggttgctcggctttagtaactatgccagtagacacaatcaagacgcggttgcaagtcttagacgcagaagagaacgggaggagacgagcaatgacagtgatgcagtcagtgaagagcttgatgaaggaaggaggagttggtgcttgttacagaggattaggaccaagatgggtctcaatgtcgatgtccgcaacaacgatgatcacaacctacgagttcttgaagcgcctagcaacaaagaagcagaaatgatatattgataaaaccttgttgtgttaagactaaccaaaatacttttgattgagtttgaagaatgttaataaacaaacataaaacagagcaaaagatcattacccctaat

SEQ ID NO: 27640 - protein, 342 aa, Arabidopsis thaliana
  peptide (1)..(342): Ceres Seq. ID no. 13487495
  misc_feature (27)..(231): Homolog of NCBI NO: 11358653 NR Description: probable mitochondrial carrier protein -
  misc_feature (27)..(336): Homolog of NCBI NO: 18417739 NR Description: mitochondrial carrier protein family [Arabidopsis
  misc_feature (13)..(342): Homolog of NCBI NO: 18496651 NR Description: putative mitochondrial carrier protein [Triticum
  misc_feature (14)..(342): Homolog of NCBI NO: 12061241 NR Description: 36I5.1 [Oryza sativa (japonica cultivar-group)]
  misc_feature (14)..(342): Homolog of NCBI NO: 21326111 NR Description: putative mitochondrial carrier protein [Sorghum
  misc_feature (1)..(280): Homolog of NCBI NO: 37534064 NR Description: putative Tricarboxylate transport protein,
  misc_feature (1)..(342): Homolog of NCBI NO: 18410193 NR Description: mitochondrial carrier protein family [Arabidopsis
  misc_feature (7)..(342): Homolog of NCBI NO: 7486721 NR Description: hypothetical protein F9D12.12 - Arabidopsis
  misc_feature (1)..(342): Homolog of NCBI NO: 21594326 NR Description: mitochondrial carrier-like protein [Arabidopsis
  misc_feature (1)..(342): Homolog of NCBI NO: 15239622 NR Description: mitochondrial carrier protein family [Arabidopsis
MSLGALMEEKRRATTSSSSSQVHMSNDIDWQMLDKSRFFFLGAALFSGVSTALYPIVVLKTRQQVSPTRVSCANISLAIARLEGLKGFYKGFGTSLLGTIPARALYMTALEITKSSVGQATVRLGLSDTTSLAVANGAAGLTSAVAAQTVWTPIDIVSQGLMVQGDVSLSKHLPGVMNSCRYRNGFDAFRKILYTDGPRGFYRGFGISILTYAPSNAVWWASYSLAQKSIWSRYKHSYNHKEDAGGSVVVQALSAATASGCSALVTMPVDTIKTRLQVLDAEENGRRRAMTVMQSVKSLMKEGGVGACYRGLGPRWVSMSMSATTMITTYEFLKRLATKKQK

SEQ ID NO: 27641 - protein, 336 aa, Arabidopsis thaliana
  peptide (1)..(336): Ceres Seq. ID no. 13487496
  misc_feature (21)..(225): Homolog of NCBI NO: 11358653 NR Description: probable mitochondrial carrier protein -
  misc_feature (21)..(330): Homolog of NCBI NO: 18417739 NR Description: mitochondrial carrier protein family [Arabidopsis
  misc_feature (7)..(336): Homolog of NCBI NO: 18496651 NR Description: putative mitochondrial carrier protein [Triticum
  misc_feature (8)..(336): Homolog of NCBI NO: 12061241 NR Description: 36I5.1 [Oryza sativa (japonica cultivar-group)]
  misc_feature (8)..(336): Homolog of NCBI NO: 21326111 NR Description: putative mitochondrial carrier protein [Sorghum
  misc_feature (1)..(274): Homolog of NCBI NO: 37534064 NR Description: putative Tricarboxylate transport protein,
  misc_feature (1)..(336): Homolog of NCBI NO: 18410193 NR Description: mitochondrial carrier protein family [Arabidopsis
  misc_feature (1)..(336): Homolog of NCBI NO: 7486721 NR Description: hypothetical protein F9D12.12 - Arabidopsis
  misc_feature (1)..(336): Homolog of NCBI NO: 21594326 NR Description: mitochondrial carrier-like protein [Arabidopsis
  misc_feature (1)..(336): Homolog of NCBI NO: 15239622 NR Description: mitochondrial carrier protein family [Arabidopsis
MEEKRRATTSSSSSQVHMSNDIDWQMLDKSRFFFLGAALFSGVSTALYPIVVLKTRQQVSPTRVSCANISLAIARLEGLKGFYKGFGTSLLGTIPARALYMTALEITKSSVGQATVRLGLSDTTSLAVANGAAGLTSAVAAQTVWTPIDIVSQGLMVQGDVSLSKHLPGVMNSCRYRNGFDAFRKILYTDGPRGFYRGFGISILTYAPSNAVWWASYSLAQKSIWSRYKHSYNHKEDAGGSVVVQALSAATASGCSALVTMPVDTIKTRLQVLDAEENGRRRAMTVMQSVKSLMKEGGVGACYRGLGPRWVSMSMSATTMITTYEFLKRLATKKQK

SEQ ID NO: 27642 - protein, 319 aa, Arabidopsis thaliana
  peptide (1)..(319): Ceres Seq. ID no. 13487497
  misc_feature (4)..(208): Homolog of NCBI NO: 11358653 NR Description: probable mitochondrial carrier protein -
  misc_feature (4)..(313): Homolog of NCBI NO: 18417739 NR Description: mitochondrial carrier protein family [Arabidopsis
  misc_feature (1)..(319): Homolog of NCBI NO: 18496651 NR Description: putative mitochondrial carrier protein [Triticum
  misc_feature (1)..(319): Homolog of NCBI NO: 12061241 NR Description: 36I5.1 [Oryza sativa (japonica cultivar-group)]
  misc_feature (1)..(319): Homolog of NCBI NO: 21326111 NR Description: putative mitochondrial carrier protein [Sorghum
  misc_feature (1)..(257): Homolog of NCBI NO: 37534064 NR Description: putative Tricarboxylate transport protein,
  misc_feature (1)..(319): Homolog of NCBI NO: 18410193 NR Description: mitochondrial carrier protein family [Arabidopsis
  misc_feature (1)..(319): Homolog of NCBI NO: 7486721 NR Description: hypothetical protein F9D12.12 - Arabidopsis
  misc_feature (1)..(319): Homolog of NCBI NO: 21594326 NR Description: mitochondrial carrier-like protein [Arabidopsis
  misc_feature (1)..(319): Homolog of NCBI NO: 15239622 NR Description: mitochondrial carrier protein family [Arabidopsis
MSNDIDWQMLDKSRFFFLGAALFSGVSTALYPIVVLKTRQQVSPTRVSCANISLAIARLEGLKGFYKGFGTSLLGTIPARALYMTALEITKSSVGQATVRLGLSDTTSLAVANGAAGLTSAVAAQTVWTPIDIVSQGLMVQGDVSLSKHLPGVMNSCRYRNGFDAFRKILYTDGPRGFYRGFGISILTYAPSNAVWWASYSLAQKSIWSRYKHSYNHKEDAGGSVVVQALSAATASGCSALVTMPVDTIKTRLQVLDAEENGRRRAMTVMQSVKSLMKEGGVGACYRGLGPRWVSMSMSATTMITTYEFLKRLATKKQK

SEQ ID NO: 27643 - DNA, 926 bp, Arabidopsis thaliana
  misc_feature (1)..(926): Ceres Seq. ID no. 12338033
  misc_feature: MA Experiment ID: 20000180 Result: Up-regulated in Transcription
  misc_feature: MA Experiment 20000180 PARAMETER Experiment Name: At_Germinating_Seeds_P Parameter: Age (hr) Value: 24 vs. 0
  misc_feature: MA Experiment 20000180 PARAMETER Experiment Name: At_Germinating_Seeds_P Parameter: Tissue Value: Germinating Seeds
  misc_feature: MA Experiment ID: 20000185 Result: Down-regulated in Transcription
  misc_feature: MA Experiment 20000185 PARAMETER Experiment Name: At_Roots__P Parameter: Age (day) Value: 7 vs. 21
  misc_feature: MA Experiment 20000185 PARAMETER Experiment Name: At_Roots__P Parameter: Organism Value: A. thaliana
  misc_feature: MA Experiment 20000185 PARAMETER Experiment Name: At_Roots__P Parameter: Tissue Value: Roots vs. Whole Plant
aaaattccgaaattgtttcgaaaaatcctgaagaagaagaggtctttgaatcaacaacagttccatgttgtgcccaacgtatacaccaagtgtttaccattttcaaacgcaaaagccagttttccggaaacagaggtttcgggtttgttcatctacttctggtggtgagaatgatagattcaaagtagagtacactccttggcttatcgttgggttgggcaatccaggaaacaagtatcatggaacaagacacaatgttggtttcgagatgatcgatgtgttggctagaaaagaaggggtgttgatgaacactatacagtccaaagctctaatcggaatagtacaggtgctattgaagatgtacctatcttgttggctaaacctcagacttatatgaacttcagcggcgaatcggttggatctctagcttcacactatcgagtaccattgcgccacattttaatgatttacgatgagatggctttaccaaatggggttttgagacttcaaccgaaaggaggtcaaggctatcacaacggagtgaagagtgtaatggggcatttggatggtcgtcgaaactttcctcgtttaagcataggcattggtaaaccacctggaaacatggatatgaaagcttttcttcttcagaagtttagtccattggaacagaaacagatcgaggaagcactcgagcaaggaagtgaagcagtgaagactcttgtgcttaatggcttcaatcaaggaatttcgagatttaatcttgtgcagaaatataaattccataaagtatagactccgatttgcaacaaaagcaatcatgtagagattggtttagcactatcattttatcgtctcaagagacactctttcgttacgaagtgtatgaagtttcttagattaatataattcagtctcgagaaactatc

SEQ ID NO: 27644 - protein, 132 aa, Arabidopsis thaliana
  peptide (1)..(132): Ceres Seq. ID no. 12338034
  misc_feature (1)..(122): Homolog of NCBI NO: 26453108 NR Description: unknown protein [Arabidopsis thaliana]
  misc_feature (1)..(122): Homolog of NCBI NO: 30685853 NR Description: expressed protein [Arabidopsis thaliana]
  misc_feature (1)..(131): Homolog of NCBI NO: 30687503 NR Description: expressed protein [Arabidopsis thaliana]
  misc_feature (1)..(130): Homolog of NCBI NO: 40889732 NR Description: Chain A, Structure Of The Chloroplast Group Ii
  misc_feature (1)..(132): Homolog of NCBI NO: 40889731 NR Description: Chain A, Structure Of The Group Ii Intron
  misc_feature (1)..(132): Homolog of NCBI NO: 40889730 NR Description: Chain A, Crystal Structure Of The Chloroplast
  misc_feature (1)..(132): Homolog of NCBI NO: 6752919 NR Description: CRS2 [Zea mays]
  misc_feature (1)..(132): Homolog of NCBI NO: 26451849 NR Description: putative CRS2 [Arabidopsis thaliana]
  misc_feature (1)..(132): Homolog of NCBI NO: 15240875 NR Description: CRS2 -like protein; protein id: At5g38290.1
  misc_feature (1)..(132): Homolog of NCBI NO: 15237280 NR Description: CRS2-like protein; protein id: At5g16140.1
MNFSGESVGSLASHYRVPLRHILMIYDEMALPNGVLRLQPKGGQGYHNGVKSVMGHLDGRRNFPRLSIGIGKPPGNMDMKAFLLQKFSPLEQKQIEEALEQGSEAVKTLVLNGFNQGISRFNLVQKYKFHKV

SEQ ID NO: 27645 - protein, 110 aa, Arabidopsis thaliana
  peptide (1)..(110): Ceres Seq. ID no. 12338035
  misc_feature (45)..(91): Homolog of NCBI NO: 26453108 NR Description: unknown protein [Arabidopsis thaliana]
  misc_feature (45)..(91): Homolog of NCBI NO: 30685853 NR Description: expressed protein [Arabidopsis thaliana]
  misc_feature (43)..(91): Homolog of NCBI NO: 30687503 NR Description: expressed protein [Arabidopsis thaliana]
  misc_feature (41)..(91): Homolog of NCBI NO: 40889732 NR Description: Chain A, Structure Of The Chloroplast Group Ii
  misc_feature (41)..(92): Homolog of NCBI NO: 40889731 NR Description: Chain A, Structure Of The Group Ii Intron
  misc_feature (41)..(92): Homolog of NCBI NO: 40889730 NR Description: Chain A, Crystal Structure Of The Chloroplast
  misc_feature (41)..(92): Homolog of NCBI NO: 6752919 NR Description: CRS2 [Zea mays]
  misc_feature (1)..(95): Homolog of NCBI NO: 26451849 NR Description: putative CRS2 [Arabidopsis thaliana]
  misc_feature (1)..(95): Homolog of NCBI NO: 15240875 NR Description: CRS2 -like protein; protein id: At5g38290.1
  misc_feature (1)..(92): Homolog of NCBI NO: 15237280 NR Description: CRS2-like protein; protein id: At5g16140.1
MLCPTYTPSVYHFQTQKPVFRKQRFRVCSSTSGGENDRFKVEYTPWLIVGLGNPGNKYHGTRHNVGFEMIDVLARKEGVLMNTIQSKALIGIVQVLLKMYLSCWLNLRLI

SEQ ID NO: 27646 - protein, 109 aa, Arabidopsis thaliana
  peptide (1)..(109): Ceres Seq. ID no. 12338036
  misc_feature (1)..(99): Homolog of NCBI NO: 26453108 NR Description: unknown protein [Arabidopsis thaliana]
  misc_feature (1)..(99): Homolog of NCBI NO: 30685853 NR Description: expressed protein [Arabidopsis thaliana]
  misc_feature (1)..(108): Homolog of NCBI NO: 30687503 NR Description: expressed protein [Arabidopsis thaliana]
  misc_feature (1)..(107): Homolog of NCBI NO: 40889732 NR Description: Chain A, Structure Of The Chloroplast Group Ii
  misc_feature (1)..(109): Homolog of NCBI NO: 40889731 NR Description: Chain A, Structure Of The Group Ii Intron
  misc_feature (1)..(109): Homolog of NCBI NO: 40889730 NR Description: Chain A, Crystal Structure Of The Chloroplast
  misc_feature (1)..(109): Homolog of NCBI NO: 6752919 NR Description: CRS2 [Zea mays]
  misc_feature (1)..(109): Homolog of NCBI NO: 26451849 NR Description: putative CRS2 [Arabidopsis thaliana]
  misc_feature (1)..(109): Homolog of NCBI NO: 15240875 NR Description: CRS2 -like protein; protein id: At5g38290.1
  misc_feature (1)..(109): Homolog of NCBI NO: 15237280 NR Description: CRS2-like protein; protein id: At5g16140.1
MIYDEMALPNGVLRLQPKGGQGYHNGVKSVMGHLDGRRNFPRLSIGIGKPPGNMDMKAFLLQKFSPLEQKQIEEALEQGSEAVKTLVLNGFNQGISRFNLVQKYKFHKV

SEQ ID NO: 27647 - DNA, 1318 bp, Arabidopsis thaliana
  misc_feature (1)..(1318): Ceres Seq. ID no. 13490280
  misc_feature: MA Experiment ID: 20000173 Result: Down-regulated in Transcription
  misc_feature: MA Experiment 20000173 PARAMETER Experiment Name: At_42deg_Heat_P Parameter: Age (day) Value: 14
  misc_feature: MA Experiment 20000173 PARAMETER Experiment Name: At_42deg_Heat_P Parameter: Organism Value: A. thaliana
  misc_feature: MA Experiment 20000173 PARAMETER Experiment Name: At_42deg_Heat_P Parameter: Plant Line Value: WS
  misc_feature: MA Experiment 20000173 PARAMETER Experiment Name: At_42deg_Heat_P Parameter: Temperature (deg C) Value: 42 vs. 22
  misc_feature: MA Experiment 20000173 PARAMETER Experiment Name: At_42deg_Heat_P Parameter: Timepoint (hr) Value: 6
  misc_feature: MA Experiment 20000173 PARAMETER Experiment Name: At_42deg_Heat_P Parameter: Tissue Value: Aerial
  misc_feature: MA Experiment ID: 20000179 Result: Up-regulated in Transcription
  misc_feature: MA Experiment 20000179 PARAMETER Experiment Name: At_Germinating_Seeds_P Parameter: Age (hr) Value: 6 vs. 0
  misc_feature: MA Experiment 20000179 PARAMETER Experiment Name: At_Germinating_Seeds_P Parameter: Tissue Value: Germinating Seeds
  misc_feature: MA Experiment ID: 20000180 Result: Up-regulated in Transcription
  misc_feature: MA Experiment 20000180 PARAMETER Experiment Name: At_Germinating_Seeds_P Parameter: Age (hr) Value: 24 vs. 0
  misc_feature: MA Experiment 20000180 PARAMETER Experiment Name: At_Germinating_Seeds_P Parameter: Tissue Value: Germinating Seeds
  misc_feature: MA Experiment ID: 20000184 Result: Down-regulated in Transcription
  misc_feature: MA Experiment 20000184 PARAMETER Experiment Name: At_Shoots__P Parameter: Age (day) Value: 7
  misc_feature: MA Experiment 20000184 PARAMETER Experiment Name: At_Shoots__P Parameter: Tissue Value: Shoots vs. Whole Plant
  misc_feature: MA Experiment ID: 20000495 Result: Up-regulated in Transcription
  misc_feature: MA Experiment 20000495 PARAMETER Experiment Name: At_Guard_Cells_P Parameter: Harvest Date Value: 8/2/2002
  misc_feature: MA Experiment 20000495 PARAMETER Experiment Name: At_Guard_Cells_P Parameter: Organism Value: A. thaliana
  misc_feature: MA Experiment 20000495 PARAMETER Experiment Name: At_Guard_Cells_P Parameter: Tissue Value: Guard Cells vs. Leaves
  misc_feature: MA Experiment ID: 20001248 Result: Up-regulated in Transcription
  misc_feature: MA Experiment 20001248 PARAMETER Experiment Name: At_Far-red-induction_P Parameter: Age (day) Value: 7
  misc_feature: MA Experiment 20001248 PARAMETER Experiment Name: At_Far-red-induction_P Parameter: Light Value: Far-red vs. White
  misc_feature: MA Experiment 20001248 PARAMETER Experiment Name: At_Far-red-induction_P Parameter: Organism Value: A. thaliana
  misc_feature: MA Experiment 20001248 PARAMETER Experiment Name: At_Far-red-induction_P Parameter: Plant Line Value: Columbia
  misc_feature: MA Experiment 20001248 PARAMETER Experiment Name: At_Far-red-induction_P Parameter: Timepoint (hr) Value: 4
  misc_feature: MA Experiment 20001248 PARAMETER Experiment Name: At_Far-red-induction_P Parameter: Tissue Value: Whole Plant
  misc_feature: MA Experiment ID: 20001450 Result: Up-regulated in Transcription
  misc_feature: MA Experiment 20001450 PARAMETER Experiment Name: At_Far-red-induction_P Parameter: Age (day) Value: 7
  misc_feature: MA Experiment 20001450 PARAMETER Experiment Name: At_Far-red-induction_P Parameter: Light Value: Far-red vs. White
  misc_feature: MA Experiment 20001450 PARAMETER Experiment Name: At_Far-red-induction_P Parameter: Organism Value: A. thaliana
  misc_feature: MA Experiment 20001450 PARAMETER Experiment Name: At_Far-red-induction_P Parameter: Plant Line Value: Columbia
  misc_feature: MA Experiment 20001450 PARAMETER Experiment Name: At_Far-red-induction_P Parameter: Timepoint (hr) Value: 8
  misc_feature: MA Experiment 20001450 PARAMETER Experiment Name: At_Far-red-induction_P Parameter: Tissue Value: Whole Plant
  misc_feature: MA Experiment ID: 20001557 Result: Down-regulated in Transcription
  misc_feature: MA Experiment 20001557 PARAMETER Experiment Name: At_Drought_Soil_Dry_P Parameter: Age (day) Value: 27
  misc_feature: MA Experiment 20001557 PARAMETER Experiment Name: At_Drought_Soil_Dry_P Parameter: Organism Value: A. thaliana
  misc_feature: MA Experiment 20001557 PARAMETER Experiment Name: At_Drought_Soil_Dry_P Parameter: Plant Line Value: WS
  misc_feature: MA Experiment 20001557 PARAMETER Experiment Name: At_Drought_Soil_Dry_P Parameter: Post Timepoint (hr) Value: 3
  misc_feature: MA Experiment 20001557 PARAMETER Experiment Name: At_Drought_Soil_Dry_P Parameter: Post-Treatment Value: Re-Water vs. No Drought
  misc_feature: MA Experiment 20001557 PARAMETER Experiment Name: At_Drought_Soil_Dry_P Parameter: Timepoint (day) Value: 13
  misc_feature: MA Experiment 20001557 PARAMETER Experiment Name: At_Drought_Soil_Dry_P Parameter: Treatment Value: Drought vs. No Drought
tactcatgtcccacttacgacgacgtcgttttaaactctctctctgtgctcttccagtctctatcgatcgccttctgaattttccggcggaaaagcaaatgtccgttaacgacagtatcgatcctcggttcgtattccacgttgaagatgaatctttgcgtttccgtgtgggagattcaggtactaagatccgggagctcgaaaccgtcggcgatcgccatttcagaacccagcaaggtttctgcggaaatagaattgagaaagatgaaaccatgtattccgatggagatgatgaagagtacgacgtttctatccgaagacgaactgctctgattcagcctggtattgattccggtaacaattatgattctgctgcagctgaagaaaccaacagagaaagtaaaaatccagttggttgggaactggttgtgagagaagatggggaaggtaattcaacgattgatcgacatgaaatggagtttaaggtgaggatcactaaaccagatggtaacgtatctaattcccaccgtaacacgcaacaaaagcgagattttgcttctgtggagaaggagagagtcactactactagtgtcagctcttgggagtctctcaaggccatcctctctgatcctgtcaccggagccttgatgaatgatgctaccatactgccttgtggacattcttttggcgccgggggattaaaagaagttaaaaaaatgaaagcatgtttcacatgttcccaacctactttagaaggatcagaaaagccaaatctctctctcagaattgtagttcatgctttccgccaagaagaagattcagatcatattcacacgctgaaaagaaggaaagaaaggtcggatcagaagagaagtttctgtatcccaaacatcactgaaactcctaagagtagccgaggcatacagtttcctttctccattggagatcatattatcatagagggaaacaaaaggacgcctccaaggtttgtcggacgcatagctgttataatgacacaatgcttaaatggatggtacgttgtgaagacagtggacaattcagagtctatcaagttacaacattgctcacttgccaagatttcagacaattcatctacgaaggtaacagtagctgaaatgccaccgtcttggctctaactcgtagaaagcaaatatctgtggctgcagaaatcagcatctgtaattttttcattcagagaaagtagttactacgtttcattatgtaatataggaacgagacaacaattttctgtactaaatccagtgttttcattcatacaaggaaactttgctcatcg

SEQ ID NO: 27648 - protein, 384 aa, Arabidopsis thaliana
  peptide (1)..(384): Ceres Seq. ID no. 13490281
  misc_feature (189)..(288): Homolog of NCBI NO: 20453175 NR Description: At3g19895 [Arabidopsis thaliana]
  misc_feature (47)..(239): Homolog of NCBI NO: 30680842 NR Description: expressed protein [Arabidopsis thaliana]
  misc_feature (47)..(239): Homolog of NCBI NO: 10176735 NR Description: gene_id:K18I23.3~unknown protein [Arabidopsis
  misc_feature (211)..(369): Homolog of NCBI NO: 11994201 NR Description: gb|AAF35943.1~gene_id:MPN9.14~similar to unknown
  misc_feature (189)..(369): Homolog of NCBI NO: 30685540 NR Description: expressed protein [Arabidopsis thaliana]
  misc_feature (94)..(384): Homolog of NCBI NO: 28876015 NR Description: hypothetical protein [Oryza sativa (japonica
  misc_feature (33)..(212): Homolog of NCBI NO: 25370811 NR Description: hypothetical protein At2g40640 [imported] -
  misc_feature (2)..(344): Homolog of NCBI NO: 30688358 NR Description: expressed protein [Arabidopsis thaliana]
  misc_feature (2)..(384): Homolog of NCBI NO: 27413505 NR Description: hypothetical protein [Arabidopsis thaliana]
  misc_feature (2)..(384): Homolog of NCBI NO: 30688352 NR Description: expressed protein [Arabidopsis thaliana]
LMSHLRRRRFKLSLCALPVSIDRLLNFPAEKQMSVNDSIDPRFVFHVEDESLRFRVGDSGTKIRELETVGDRHFRTQQGFCGNRIEKDETMYSDGDDEEYDVSIRRRTALIQPGIDSGNNYDSAAAEETNRESKNPVGWELVVREDGEGNSTIDRHEMEFKVRITKPDGNVSNSHRNTQQKRDFASVEKERVTTTSVSSWESLKAILSDPVTGALMNDATILPCGHSFGAGGLKEVKKMKACFTCSQPTLEGSEKPNLSLRIVVHAFRQEEDSDHIHTLKRRKERSDQKRSFCIPNITETPKSSRGIQFPFSIGDHIIIEGNKRTPPRFVGRIAVIMTQCLNGWYVVKTVDNSESIKLQHCSLAKISDNSSTKVTVAEMPPSWL

SEQ ID NO: 27649 - protein, 383 aa, Arabidopsis thaliana
  peptide (1)..(383): Ceres Seq. ID no. 13490282
  misc_feature (188)..(287): Homolog of NCBI NO: 20453175 NR Description: At3g19895 [Arabidopsis thaliana]
  misc_feature (46)..(238): Homolog of NCBI NO: 30680842 NR Description: expressed protein [Arabidopsis thaliana]
  misc_feature (46)..(238): Homolog of NCBI NO: 10176735 NR Description: gene_id:K18I23.3~unknown protein [Arabidopsis
  misc_feature (210)..(368): Homolog of NCBI NO: 11994201 NR Description: gb|AAF35943.1~gene_id:MPN9.14~similar to unknown
  misc_feature (188)..(368): Homolog of NCBI NO: 30685540 NR Description: expressed protein [Arabidopsis thaliana]
  misc_feature (93)..(383): Homolog of NCBI NO: 28876015 NR Description: hypothetical protein [Oryza sativa (japonica
  misc_feature (32)..(211): Homolog of NCBI NO: 25370811 NR Description: hypothetical protein At2g40640 [imported] -
  misc_feature (1)..(343): Homolog of NCBI NO: 30688358 NR Description: expressed protein [Arabidopsis thaliana]
  misc_feature (1)..(383): Homolog of NCBI NO: 27413505 NR Description: hypothetical protein [Arabidopsis thaliana]
  misc_feature (1)..(383): Homolog of NCBI NO: 30688352 NR Description: expressed protein [Arabidopsis thaliana]
MSHLRRRRFKLSLCALPVSIDRLLNFPAEKQMSVNDSIDPRFVFHVEDESLRFRVGDSGTKIRELETVGDRHFRTQQGFCGNRIEKDETMYSDGDDEEYDVSIRRRTALIQPGIDSGNNYDSAAAEETNRESKNPVGWELVVREDGEGNSTIDRHEMEFKVRITKPDGNVSNSHRNTQQKRDFASVEKERVTTTSVSSWESLKAILSDPVTGALMNDATILPCGHSFGAGGLKEVKKMKACFTCSQPTLEGSEKPNLSLRIVVHAFRQEEDSDHIHTLKRRKERSDQKRSFCIPNITETPKSSRGIQFPFSIGDHIIIEGNKRTPPRFVGRIAVIMTQCLNGWYVVKTVDNSESIKLQHCSLAKISDNSSTKVTVAEMPPSWL

SEQ ID NO: 27650 - protein, 352 aa, Arabidopsis thaliana
  peptide (1)..(352): Ceres Seq. ID no. 13490283
  misc_feature (157)..(256): Homolog of NCBI NO: 20453175 NR Description: At3g19895 [Arabidopsis thaliana]
  misc_feature (15)..(207): Homolog of NCBI NO: 30680842 NR Description: expressed protein [Arabidopsis thaliana]
  misc_feature (15)..(207): Homolog of NCBI NO: 10176735 NR Description: gene_id:K18I23.3~unknown protein [Arabidopsis
  misc_feature (179)..(337): Homolog of NCBI NO: 11994201 NR Description: gb|AAF35943.1~gene_id:MPN9.14~similar to unknown
  misc_feature (157)..(337): Homolog of NCBI NO: 30685540 NR Description: expressed protein [Arabidopsis thaliana]
  misc_feature (62)..(352): Homolog of NCBI NO: 28876015 NR Description: hypothetical protein [Oryza sativa (japonica
  misc_feature (1)..(180): Homolog of NCBI NO: 25370811 NR Description: hypothetical protein At2g40640 [imported] -
  misc_feature (1)..(312): Homolog of NCBI NO: 30688358 NR Description: expressed protein [Arabidopsis thaliana]
  misc_feature (1)..(352): Homolog of NCBI NO: 27413505 NR Description: hypothetical protein [Arabidopsis thaliana]
  misc_feature (1)..(352): Homolog of NCBI NO: 30688352 NR Description: expressed protein [Arabidopsis thaliana]
MSVNDSIDPRFVFHVEDESLRFRVGDSGTKIRELETVGDRHFRTQQGFCGNRIEKDETMYSDGDDEEYDVSIRRRTALIQPGIDSGNNYDSAAAEETNRESKNPVGWELVVREDGEGNSTIDRHEMEFKVRITKPDGNVSNSHRNTQQKRDFASVEKERVTTTSVSSWESLKAILSDPVTGALMNDATILPCGHSFGAGGLKEVKKMKACFTCSQPTLEGSEKPNLSLRIVVHAFRQEEDSDHIHTLKRRKERSDQKRSFCIPNITETPKSSRGIQFPFSIGDHIIIEGNKRTPPRFVGRIAVIMTQCLNGWYVVKTVDNSESIKLQHCSLAKISDNSSTKVTVAEMPPSWL

SEQ ID NO: 27651 - DNA, 835 bp, Arabidopsis thaliana
  misc_feature (1)..(835): Ceres Seq. ID no. 12421619
  misc_feature: MA Experiment ID: 20000227 Result: Down-regulated in Transcription
  misc_feature: MA Experiment 20000227 PARAMETER Experiment Name: At_Root-Tips-vs-Tops_P Parameter: Tissue Value: Root Tips vs. Root Tops
  misc_feature: MA Experiment ID: 20000495 Result: Down-regulated in Transcription
  misc_feature: MA Experiment 20000495 PARAMETER Experiment Name: At_Guard_Cells_P Parameter: Harvest Date Value: 8/2/2002
  misc_feature: MA Experiment 20000495 PARAMETER Experiment Name: At_Guard_Cells_P Parameter: Organism Value: A. thaliana
  misc_feature: MA Experiment 20000495 PARAMETER Experiment Name: At_Guard_Cells_P Parameter: Tissue Value: Guard Cells vs. Leaves
  misc_feature: MA Experiment ID: 20000496 Result: Down-regulated in Transcription
  misc_feature: MA Experiment 20000496 PARAMETER Experiment Name: At_Guard_Cells_P Parameter: Harvest Date Value: 7/19/2002
  misc_feature: MA Experiment 20000496 PARAMETER Experiment Name: At_Guard_Cells_P Parameter: Organism Value: Canola
  misc_feature: MA Experiment 20000496 PARAMETER Experiment Name: At_Guard_Cells_P Parameter: Tissue Value: Guard Cells vs. Leaves
attttcagctaaaagcaatggagtcatcacttccccaagttgctgcacttgatcgttcaactctactcaaagctttcgacgagactaaaaccggcgtgaaaggccttatcgacgccggaatcacagagattccttcgatatttcgtgcacctccggctactttaacaagtccaaaaccaccttcctcctctgatttctccatccccacaatcgatctcaaaggaggtggcacggactcgatcacgcggcggagcttggtggagaagatcggagacgcggcagagaaatggggatttttccaggtgatcaaccacgggatcccgatggatgtgttggagaagatgatagatgggattcgtgagtttcacgagcaagacactgaagtgaagaaagggttttactctcgagtccagctagtaagatggtatacagcagcaacttcgatctgtttagctcaccggcggcgaattggagagatacacttggttgttatacagcaccagatcccccgagaccggaggacttacccgccacttgtggggagatgatgattgagtactcaaaggaagtgatgaaattgggtaaattactcttcgagcttctctcggaagctctagggttaaacactaatcacctcaaggacatggattgcactaactccttgctgttgctcggccattattacccgccatgtccccaacccgaccttactctaggcttaacgaaacactccgacaactcttttctcactattcttcttcaagaccatatcggagggcttcaagttcttcatgaccaatattgggttgatgttcctcctgtccctggagctctt

SEQ ID NO: 27652 - protein, 181 aa, Arabidopsis thaliana
  peptide (1)..(181): Ceres Seq. ID no. 12421620
  misc_feature (17)..(135): Homolog of NCBI NO: 13878119 NR Description: putative oxidoreductase [Arabidopsis thaliana]
  misc_feature (17)..(135): Homolog of NCBI NO: 15224575 NR Description: putative dioxygenase; protein id: At2g30830.1
  misc_feature (8)..(135): Homolog of NCBI NO: 5031283 NR Description: unknown [Prunus armeniaca]
  misc_feature (14)..(135): Homolog of NCBI NO: 15224576 NR Description: putative dioxygenase; protein id: At2g30840.1
  misc_feature (17)..(135): Homolog of NCBI NO: 15218794 NR Description: putative 1-aminocyclopropane-1-carboxylate oxidase
  misc_feature (17)..(135): Homolog of NCBI NO: 15218795 NR Description: putative 1-aminocyclopropane-1-carboxylate oxidase
  misc_feature (15)..(135): Homolog of NCBI NO: 15233096 NR Description: 1-aminocyclopropane-1-carboxylate oxidase-like
  misc_feature (17)..(135): Homolog of NCBI NO: 9280671 NR Description: F21B7.3 [Arabidopsis thaliana]
  misc_feature (6)..(135): Homolog of NCBI NO: 25406927 NR Description: protein F12K11.6 [imported] - Arabidopsis
  misc_feature (6)..(135): Homolog of NCBI NO: 30679748 NR Description: 2-oxoglutarate-dependent dioxygenase, putative
FQLKAMESSLPQVAALDRSTLLKAFDETKTGVKGLIDAGITEIPSIFRAPPATLTSPKPPSSSDFSIPTIDLKGGGTDSITRRSLVEKIGDAAEKWGFFQVINHGIPMDVLEKMIDGIREFHEQDTEVKKGFYSRVQLVRWYTAATSICLAHRRRIGEIHLVVIQHQIPRDRRTYPPLVGR

SEQ ID NO: 27653 - protein, 176 aa, Arabidopsis thaliana
  peptide (1)..(176): Ceres Seq. ID no. 12421621
  misc_feature (12)..(130): Homolog of NCBI NO: 13878119 NR Description: putative oxidoreductase [Arabidopsis thaliana]
  misc_feature (12)..(130): Homolog of NCBI NO: 15224575 NR Description: putative dioxygenase; protein id: At2g30830.1
  misc_feature (3)..(130): Homolog of NCBI NO: 5031283 NR Description: unknown [Prunus armeniaca]
  misc_feature (9)..(130): Homolog of NCBI NO: 15224576 NR Description: putative dioxygenase; protein id: At2g30840.1
  misc_feature (12)..(130): Homolog of NCBI NO: 15218794 NR Description: putative 1-aminocyclopropane-1-carboxylate oxidase
  misc_feature (12)..(130): Homolog of NCBI NO: 15218795 NR Description: putative 1-aminocyclopropane-1-carboxylate oxidase
  misc_feature (10)..(130): Homolog of NCBI NO: 15233096 NR Description: 1-aminocyclopropane-1-carboxylate oxidase-like
  misc_feature (12)..(130): Homolog of NCBI NO: 9280671 NR Description: F21B7.3 [Arabidopsis thaliana]
  misc_feature (1)..(130): Homolog of NCBI NO: 25406927 NR Description: protein F12K11.6 [imported] - Arabidopsis
  misc_feature (1)..(130): Homolog of NCBI NO: 30679748 NR Description: 2-oxoglutarate-dependent dioxygenase, putative
MESSLPQVAALDRSTLLKAFDETKTGVKGLIDAGITEIPSIFRAPPATLTSPKPPSSSDFSIPTIDLKGGGTDSITRRSLVEKIGDAAEKWGFFQVINHGIPMDVLEKMIDGIREFHEQDTEVKKGFYSRVQLVRWYTAATSICLAHRRRIGEIHLVVIQHQIPRDRRTYPPLVGR

SEQ ID NO: 27654 - protein, 138 aa, Arabidopsis thaliana
  peptide (1)..(138): Ceres Seq. ID no. 12421622
  misc_feature (79)..(129): Pfam Name: 2OG-Fe(II) oxygenase superfamily Pfam Description: 2OG-Fe(II) oxygenase superfamily
  misc_feature (1)..(137): Homolog of NCBI NO: 15218794 NR Description: putative 1-aminocyclopropane-1-carboxylate oxidase
  misc_feature (1)..(137): Homolog of NCBI NO: 15218795 NR Description: putative 1-aminocyclopropane-1-carboxylate oxidase
  misc_feature (1)..(137): Homolog of NCBI NO: 9280671 NR Description: F21B7.3 [Arabidopsis thaliana]
  misc_feature (1)..(137): Homolog of NCBI NO: 15233096 NR Description: 1-aminocyclopropane-1-carboxylate oxidase-like
  misc_feature (1)..(137): Homolog of NCBI NO: 9280671 NR Description: F21B7.3 [Arabidopsis thaliana]
  misc_feature (41)..(137): Homolog of NCBI NO: 25406927 NR Description: protein F12K11.6 [imported] - Arabidopsis
  misc_feature (41)..(129): Homolog of NCBI NO: 25406927 NR Description: protein F12K11.6 [imported] - Arabidopsis
  misc_feature (1)..(137): Homolog of NCBI NO: 25406927 NR Description: protein F12K11.6 [imported] - Arabidopsis
  misc_feature (1)..(137): Homolog of NCBI NO: 25406927 NR Description: protein F12K11.6 [imported] - Arabidopsis
  misc_feature (1)..(137): Homolog of NCBI NO: 30679748 NR Description: 2-oxoglutarate-dependent dioxygenase, putative
MVYSSNFDLFSSPAANWRDTLGCYTAPDPPRPEDLPATCGEMMIEYSKEVMKLGKLLFELLSEALGLNTNHLKDMDCTNSLLLLGHYYPPCPQPDLTLGLTKHSDNSFLTILLQDHIGGLQVLHDQYWVDVPPVPGAL

SEQ ID NO: 27655 - DNA, 1510 bp, Arabidopsis thaliana
  misc_feature (1)..(1510): Ceres Seq. ID no. 12370594
  misc_feature: MA Experiment ID: 20000182 Result: Up-regulated in Transcription
  misc_feature: MA Experiment 20000182 PARAMETER Experiment Name: At_2mM_SA_P Parameter: Age (day) Value: 14
  misc_feature: MA Experiment 20000182 PARAMETER Experiment Name: At_2mM_SA_P Parameter: Organism Value: A. thaliana
  misc_feature: MA Experiment 20000182 PARAMETER Experiment Name: At_2mM_SA_P Parameter: Plant Line Value: WS
  misc_feature: MA Experiment 20000182 PARAMETER Experiment Name: At_2mM_SA_P Parameter: Timepoint (hr) Value: 6
  misc_feature: MA Experiment 20000182 PARAMETER Experiment Name: At_2mM_SA_P Parameter: Tissue Value: Aerial
  misc_feature: MA Experiment 20000182 PARAMETER Experiment Name: At_2mM_SA_P Parameter: Treatment Value: 2mM SA vs. No Treatment
  misc_feature: MA Experiment ID: 20000184 Result: Down-regulated in Transcription
  misc_feature: MA Experiment 20000184 PARAMETER Experiment Name: At_Shoots__P Parameter: Age (day) Value: 7
  misc_feature: MA Experiment 20000184 PARAMETER Experiment Name: At_Shoots__P Parameter: Tissue Value: Shoots vs. Whole Plant
  misc_feature: MA Experiment ID: 20000234 Result: Down-regulated in Transcription
  misc_feature: MA Experiment 20000234 PARAMETER Experiment Name: At_Siliques_P Parameter: Age (day) Value: 21
  misc_feature: MA Experiment 20000234 PARAMETER Experiment Name: At_Siliques_P Parameter: Organism Value: A. thaliana
  misc_feature: MA Experiment 20000234 PARAMETER Experiment Name: At_Siliques_P Parameter: Plant Line Value: WS
  misc_feature: MA Experiment 20000234 PARAMETER Experiment Name: At_Siliques_P Parameter: Tissue Value: Less Than 5mm Siliques vs. Whole Plant
  misc_feature: MA Experiment ID: 20000264 Result: Down-regulated in Transcription
  misc_feature: MA Experiment 20000264 PARAMETER Experiment Name: At_Open_Flower_P Parameter: Age (day) Value: 21
  misc_feature: MA Experiment 20000264 PARAMETER Experiment Name: At_Open_Flower_P Parameter: Plant Line Value: WS
  misc_feature: MA Experiment 20000264 PARAMETER Experiment Name: At_Open_Flower_P Parameter: Tissue Value: Open Flower vs. Whole Plant
  misc_feature: MA Experiment ID: 20000265 Result: Down-regulated in Transcription
  misc_feature: MA Experiment 20000265 PARAMETER Experiment Name: At_Open_Flower_P Parameter: Age (day) Value: 21
  misc_feature: MA Experiment 20000265 PARAMETER Experiment Name: At_Open_Flower_P Parameter: Plant Line Value: WS
  misc_feature: MA Experiment 20000265 PARAMETER Experiment Name: At_Open_Flower_P Parameter: Tissue Value: Closed Flower vs. Whole Plant
  misc_feature: MA Experiment ID: 20000267 Result: Up-regulated in Transcription
  misc_feature: MA Experiment 20000267 PARAMETER Experiment Name: At_Drought_P Parameter: Age (day) Value: 7
  misc_feature: MA Experiment 20000267 PARAMETER Experiment Name: At_Drought_P Parameter: Organism Value: A. thaliana
  misc_feature: MA Experiment 20000267 PARAMETER Experiment Name: At_Drought_P Parameter: Plant Line Value: WS
  misc_feature: MA Experiment 20000267 PARAMETER Experiment Name: At_Drought_P Parameter: Timepoint (hr) Value: 6
  misc_feature: MA Experiment 20000267 PARAMETER Experiment Name: At_Drought_P Parameter: Tissue Value: Whole Plant
  misc_feature: MA Experiment 20000267 PARAMETER Experiment Name: At_Drought_P Parameter: Treatment Value: Drought vs. No Drought
  misc_feature: MA Experiment ID: 20000286 Result: Down-regulated in Transcription
  misc_feature: MA Experiment 20000286 PARAMETER Experiment Name: At_Open_Flower_P Parameter: Age (day) Value: 21
  misc_feature: MA Experiment 20000286 PARAMETER Experiment Name: At_Open_Flower_P Parameter: Plant Line Value: WS
  misc_feature: MA Experiment 20000286 PARAMETER Experiment Name: At_Open_Flower_P Parameter: Tissue Value: Half Open vs. Whole Plant
  misc_feature: MA Experiment ID: 20000436 Result: Up-regulated in Transcription
  misc_feature: MA Experiment 20000436 PARAMETER Experiment Name: At_Drought_P Parameter: Age (day) Value: 7
  misc_feature: MA Experiment 20000436 PARAMETER Experiment Name: At_Drought_P Parameter: Organism Value: A. thaliana
  misc_feature: MA Experiment 20000436 PARAMETER Experiment Name: At_Drought_P Parameter: Plant Line Value: WS
  misc_feature: MA Experiment 20000436 PARAMETER Experiment Name: At_Drought_P Parameter: Timepoint (hr) Value: 12
  misc_feature: MA Experiment 20000436 PARAMETER Experiment Name: At_Drought_P Parameter: Tissue Value: Whole Plant
  misc_feature: MA Experiment 20000436 PARAMETER Experiment Name: At_Drought_P Parameter: Treatment Value: Drought vs. No Drought
  misc_feature: MA Experiment ID: 20000437 Result: Up-regulated in Transcription
  misc_feature: MA Experiment 20000437 PARAMETER Experiment Name: At_Drought_P Parameter: Age (day) Value: 8
  misc_feature: MA Experiment 20000437 PARAMETER Experiment Name: At_Drought_P Parameter: Organism Value: A. thaliana
  misc_feature: MA Experiment 20000437 PARAMETER Experiment Name: At_Drought_P Parameter: Plant Line Value: WS
  misc_feature: MA Experiment 20000437 PARAMETER Experiment Name: At_Drought_P Parameter: Timepoint (hr) Value: 24
  misc_feature: MA Experiment 20000437 PARAMETER Experiment Name: At_Drought_P Parameter: Tissue Value: Whole Plant
  misc_feature: MA Experiment 20000437 PARAMETER Experiment Name: At_Drought_P Parameter: Treatment Value: Drought vs. No Drought
  misc_feature: MA Experiment ID: 20000438 Result: Down-regulated in Transcription
  misc_feature: MA Experiment 20000438 PARAMETER Experiment Name: At_Shoots__P Parameter: Age (day) Value: 14
  misc_feature: MA Experiment 20000438 PARAMETER Experiment Name: At_Shoots__P Parameter: Tissue Value: Shoots vs. Whole Plant
  misc_feature: MA Experiment ID: 20000445 Result: Up-regulated in Transcription
  misc_feature: MA Experiment 20000445 PARAMETER Experiment Name: At_100uM_NAA__P Parameter: Age (day) Value: 14
  misc_feature: MA Experiment 20000445 PARAMETER Experiment Name: At_100uM_NAA__P Parameter: Organism Value: A. thaliana
  misc_feature: MA Experiment 20000445 PARAMETER Experiment Name: At_100uM_NAA__P Parameter: Plant Line Value: WS
  misc_feature: MA Experiment 20000445 PARAMETER Experiment Name: At_100uM_NAA__P Parameter: Timepoint (hr) Value: 6
  misc_feature: MA Experiment 20000445 PARAMETER Experiment Name: At_100uM_NAA__P Parameter: Tissue Value: Aerial
  misc_feature: MA Experiment 20000445 PARAMETER Experiment Name: At_100uM_NAA__P Parameter: Treatment Value: 100uM NAA vs. No Treatment
  misc_feature: MA Experiment ID: 20000453 Result: Up-regulated in Transcription
  misc_feature: MA Experiment 20000453 PARAMETER Experiment Name: At_100uM_ABA_P Parameter: Age (day) Value: 15
  misc_feature: MA Experiment 20000453 PARAMETER Experiment Name: At_100uM_ABA_P Parameter: Organism Value: A. thaliana
  misc_feature: MA Experiment 20000453 PARAMETER Experiment Name: At_100uM_ABA_P Parameter: Plant Line Value: WS
  misc_feature: MA Experiment 20000453 PARAMETER Experiment Name: At_100uM_ABA_P Parameter: Timepoint (hr) Value: 24
  misc_feature: MA Experiment 20000453 PARAMETER Experiment Name: At_100uM_ABA_P Parameter: Tissue Value: Aerial
  misc_feature: MA Experiment 20000453 PARAMETER Experiment Name: At_100uM_ABA_P Parameter: Treatment Value: 100uM ABA vs. No Treatment
  misc_feature: MA Experiment ID: 20000460 Result: Up-regulated in Transcription
  misc_feature: MA Experiment 20000460 PARAMETER Experiment Name: At_10percent_PEG_P Parameter: Age (day) Value: 12
  misc_feature: MA Experiment 20000460 PARAMETER Experiment Name: At_10percent_PEG_P Parameter: Organism Value: A. thaliana
  misc_feature: MA Experiment 20000460 PARAMETER Experiment Name: At_10percent_PEG_P Parameter: Plant Line Value: WS
  misc_feature: MA Experiment 20000460 PARAMETER Experiment Name: At_10percent_PEG_P Parameter: Timepoint (day) Value: 12
  misc_feature: MA Experiment 20000460 PARAMETER Experiment Name: At_10percent_PEG_P Parameter: Tissue Value: Whole Plant
  misc_feature: MA Experiment 20000460 PARAMETER Experiment Name: At_10percent_PEG_P Parameter: Treatment Value: 10percent PEG vs. No Treatment
  misc_feature: MA Experiment ID: 20000573 Result: Down-regulated in Transcription
  misc_feature: MA Experiment 20000573 PARAMETER Experiment Name: At_100uM_ABA_Mutants__P Parameter: Organism Value: A. thaliana
  misc_feature: MA Experiment 20000573 PARAMETER Experiment Name: At_100uM_ABA_Mutants__P Parameter: Plant Line Value: CS22 vs. Ler wt
  misc_feature: MA Experiment 20000573 PARAMETER Experiment Name: At_100uM_ABA_Mutants__P Parameter: Timepoint (hr) Value: N/A
  misc_feature: MA Experiment 20000573 PARAMETER Experiment Name: At_100uM_ABA_Mutants__P Parameter: Tissue Value: Whole Plant
  misc_feature: MA Experiment 20000573 PARAMETER Experiment Name: At_100uM_ABA_Mutants__P Parameter: Treatment Value: None
  misc_feature: MA Experiment ID: 20000574 Result: Down-regulated in Transcription
  misc_feature: MA Experiment 20000574 PARAMETER Experiment Name: At_100uM_ABA_Mutants__P Parameter: Organism Value: A. thaliana
  misc_feature: MA Experiment 20000574 PARAMETER Experiment Name: At_100uM_ABA_Mutants__P Parameter: Plant Line Value: CS23 vs. Ler wt
  misc_feature: MA Experiment 20000574 PARAMETER Experiment Name: At_100uM_ABA_Mutants__P Parameter: Timepoint (hr) Value: N/A
  misc_feature: MA Experiment 20000574 PARAMETER Experiment Name: At_100uM_ABA_Mutants__P Parameter: Tissue Value: Whole Plant
  misc_feature: MA Experiment 20000574 PARAMETER Experiment Name: At_100uM_ABA_Mutants__P Parameter: Treatment Value: None
  misc_feature: MA Experiment ID: 20001554 Result: Up-regulated in Transcription
  misc_feature: MA Experiment 20001554 PARAMETER Experiment Name: At_Drought_Soil_Dry_P Parameter: Age (day) Value: 21
  misc_feature: MA Experiment 20001554 PARAMETER Experiment Name: At_Drought_Soil_Dry_P Parameter: Organism Value: A. thaliana
  misc_feature: MA Experiment 20001554 PARAMETER Experiment Name: At_Drought_Soil_Dry_P Parameter: Plant Line Value: WS
  misc_feature: MA Experiment 20001554 PARAMETER Experiment Name: At_Drought_Soil_Dry_P Parameter: Post Timepoint (hr) Value: None
  misc_feature: MA Experiment 20001554 PARAMETER Experiment Name: At_Drought_Soil_Dry_P Parameter: Post-Treatment Value: None
  misc_feature: MA Experiment 20001554 PARAMETER Experiment Name: At_Drought_Soil_Dry_P Parameter: Timepoint (day) Value: 7
  misc_feature: MA Experiment 20001554 PARAMETER Experiment Name: At_Drought_Soil_Dry_P Parameter: Treatment Value: Drought vs. No Drought
  misc_feature: MA Experiment ID: 20001555 Result: Up-regulated in Transcription
  misc_feature: MA Experiment 20001555 PARAMETER Experiment Name: At_Drought_Soil_Dry_P Parameter: Age (day) Value: 24
  misc_feature: MA Experiment 20001555 PARAMETER Experiment Name: At_Drought_Soil_Dry_P Parameter: Organism Value: A. thaliana
  misc_feature: MA Experiment 20001555 PARAMETER Experiment Name: At_Drought_Soil_Dry_P Parameter: Plant Line Value: WS
  misc_feature: MA Experiment 20001555 PARAMETER Experiment Name: At_Drought_Soil_Dry_P Parameter: Post Timepoint (hr) Value: None
  misc_feature: MA Experiment 20001555 PARAMETER Experiment Name: At_Drought_Soil_Dry_P Parameter: Post-Treatment Value: None
  misc_feature: MA Experiment 20001555 PARAMETER Experiment Name: At_Drought_Soil_Dry_P Parameter: Timepoint (day) Value: 10
  misc_feature: MA Experiment 20001555 PARAMETER Experiment Name: At_Drought_Soil_Dry_P Parameter: Treatment Value: Drought vs. No Drought
  misc_feature: MA Experiment ID: 20001560 Result: Down-regulated in Transcription
  misc_feature: MA Experiment 20001560 PARAMETER Experiment Name: At_Drought_Soil_Dry_P Parameter: Age (day) Value: 28
  misc_feature: MA Experiment 20001560 PARAMETER Experiment Name: At_Drought_Soil_Dry_P Parameter: Organism Value: A. thaliana
  misc_feature: MA Experiment 20001560 PARAMETER Experiment Name: At_Drought_Soil_Dry_P Parameter: Plant Line Value: WS
  misc_feature: MA Experiment 20001560 PARAMETER Experiment Name: At_Drought_Soil_Dry_P Parameter: Post Timepoint (hr) Value: None
  misc_feature: MA Experiment 20001560 PARAMETER Experiment Name: At_Drought_Soil_Dry_P Parameter: Post-Treatment Value: None
  misc_feature: MA Experiment 20001560 PARAMETER Experiment Name: At_Drought_Soil_Dry_P Parameter: Timepoint (day) Value: 14
  misc_feature: MA Experiment 20001560 PARAMETER Experiment Name: At_Drought_Soil_Dry_P Parameter: Treatment Value: Drought vs. No Drought
  misc_feature: MA Experiment ID: 20001905 Result: Up-regulated in Transcription
  misc_feature: MA Experiment 20001905 PARAMETER Experiment Name: At_Drought_Reproduction_P Parameter: Age (day) Value: 40
  misc_feature: MA Experiment 20001905 PARAMETER Experiment Name: At_Drought_Reproduction_P Parameter: Organism Value: A. thaliana
  misc_feature: MA Experiment 20001905 PARAMETER Experiment Name: At_Drought_Reproduction_P Parameter: Plant Line Value: WS
  misc_feature: MA Experiment 20001905 PARAMETER Experiment Name: At_Drought_Reproduction_P Parameter: Timepoint (day) Value: 10
  misc_feature: MA Experiment 20001905 PARAMETER Experiment Name: At_Drought_Reproduction_P Parameter: Tissue Value: Rosettes
  misc_feature: MA Experiment 20001905 PARAMETER Experiment Name: At_Drought_Reproduction_P Parameter: Treatment Value: Drought vs. No Drought
  misc_feature: MA Experiment ID: 20001911 Result: Up-regulated in Transcription
  misc_feature: MA Experiment 20001911 PARAMETER Experiment Name: At_Drought_Reproduction_P Parameter: Age (day) Value: 40
  misc_feature: MA Experiment 20001911 PARAMETER Experiment Name: At_Drought_Reproduction_P Parameter: Organism Value: A. thaliana
  misc_feature: MA Experiment 20001911 PARAMETER Experiment Name: At_Drought_Reproduction_P Parameter: Plant Line Value: WS
  misc_feature: MA Experiment 20001911 PARAMETER Experiment Name: At_Drought_Reproduction_P Parameter: Timepoint (day) Value: 10
  misc_feature: MA Experiment 20001911 PARAMETER Experiment Name: At_Drought_Reproduction_P Parameter: Tissue Value: Flowers
  misc_feature: MA Experiment 20001911 PARAMETER Experiment Name: At_Drought_Reproduction_P Parameter: Treatment Value: Drought vs. No Drought
aatatttctcacccatttttcaccaatttctctccacttaaaaccaaccccaattctcaccaaaaatcgcaaaaaagatttcaactttcgataaacccagatcgaaaaatcagatttttccagatcaatcagagagttagagatggagtataataacaacaatcagcaatctttttggcagttcagcgaccagctgagagttcagacaccgaatctagcgaatctgtctctcaacgactcgatctggagcacaaactctgtcttcaaagagcgtcgaaacttagacatagccgccaccaccgacaagaacaacaaccagatcgactattatcagaagaagacaacttccgacaacatcaattccaactggaactggaagtcttctggttcaaacaacgacatgggtttaggattcggacctgtgggttcaaaatccaccgtcgatttaaacccaatcgacaaattcaactcaccgttcaacgacacgtggaaattcaactcagtcaacgttaacgttaacggttactcaccgtcaagcgccgttaacggagatttcaacaaaggggtttacacgtcgatgaagaagtatgggtacaacgtcaatctaaagaacaacaacaagaacaaaggaatcgatgaagatcatcagattcagaaaggtgggaagaagaacagaaagaatcagcagaacaataataaccagaggaacgaagacgacaagaacaatggtttggacaagaggtttaagactcttcctccagcagaagctttgccaagaaacgaaaccattggtggttacatctttgtctgcaacaacgataccatggaagagaatctcaaacgccagcttttcggattgccaccaagatacagggactcggttagagcgataactccaggacttcctctgtttctttacaactactccactcaccaacttcatggaatctacgaggcagctagcttcggaggaacaaacattgagttgaatgcttttgaagacaagaaatgtcctggcgaatctcgtttccctgctcaggtgagggccataacgaggaaagtatgtttgccactggaagaagattctttccgacccattttgcaccactacgacggtcctaagttccgactcgaactcagtgtccctgaggtgctttctctattggacatttttgctgaccaaaacccttgaattgggtaataccaatgaagaacacaaaacagtggtttgttacttcaaatccagaaagagagagataccccattatacatatatgattataaggaggagtattaataataattgtctgaagaaatggtattttactagtttatacagtttctttcttaagtatattcccaggagatatgggataaatagaagatgtgctatttttgtgtgggtggatgaagaatagatctcatctccgcgcttttttctttttgtaaattatataaaataacatatgtacaaccccaaaaatagggagaaatgagatgatgaactctt

SEQ ID NO: 27656 - protein, 349 aa, Arabidopsis thaliana
  peptide (1)..(349): Ceres Seq. ID no. 12370595
  misc_feature (289)..(348): Homolog of NCBI NO: 13161401 NR Description: CPRD48 [Vigna unguiculata]
  misc_feature (228)..(312): Homolog of NCBI NO: 7488804 NR Description: gda-1 protein - garden pea
  misc_feature (145)..(343): Homolog of NCBI NO: 21665866 NR Description: GDA2 protein [Pisum sativum]
  misc_feature (96)..(343): Homolog of NCBI NO: 21592623 NR Description: gda-1, putative [Arabidopsis thaliana]
  misc_feature (96)..(343): Homolog of NCBI NO: 15232081 NR Description: gda-1, putative
  misc_feature (96)..(343): Homolog of NCBI NO: 2369766 NR Description: hypothetical protein [Citrus x paradisi]
  misc_feature (157)..(346): Homolog of NCBI NO: 584825 NR Description: B2 PROTEIN
  misc_feature (9)..(336): Homolog of NCBI NO: 34913876 NR Description: B1156H12.22 [Oryza sativa (japonica
  misc_feature (146)..(349): Homolog of NCBI NO: 9757950 NR Description: gene_id:MJC20.15~similar to unknown
  misc_feature (1)..(349): Homolog of NCBI NO: 18422167 NR Description: putative protein
MEYNNNNQQSFWQFSDQLRVQTPNLANLSLNDSIWSTNSVFKERRNLDIAATTDKNNNQIDYYQKKTTSDNINSNWNWKSSGSNNDMGLGFGPVGSKSTVDLNPIDKFNSPFNDTWKFNSVNVNVNGYSPSSAVNGDFNKGVYTSMKKYGYNVNLKNNNKNKGIDEDHQIQKGGKKNRKNQQNNNNQRNEDDKNNGLDKRFKTLPPAEALPRNETIGGYIFVCNNDTMEENLKRQLFGLPPRYRDSVRAITPGLPLFLYNYSTHQLHGIYEAASFGGTNIELNAFEDKKCPGESRFPAQVRAITRKVCLPLEEDSFRPILHHYDGPKFRLELSVPEVLSLLDIFADQNP

SEQ ID NO: 27657 - protein, 263 aa, Arabidopsis thaliana
  peptide (1)..(263): Ceres Seq. ID no. 12370596
  misc_feature (203)..(262): Homolog of NCBI NO: 13161401 NR Description: CPRD48 [Vigna unguiculata]
  misc_feature (142)..(226): Homolog of NCBI NO: 7488804 NR Description: gda-1 protein - garden pea
  misc_feature (59)..(257): Homolog of NCBI NO: 21665866 NR Description: GDA2 protein [Pisum sativum]
  misc_feature (10)..(257): Homolog of NCBI NO: 21592623 NR Description: gda-1, putative [Arabidopsis thaliana]
  misc_feature (10)..(257): Homolog of NCBI NO: 15232081 NR Description: gda-1, putative
  misc_feature (10)..(257): Homolog of NCBI NO: 2369766 NR Description: hypothetical protein [Citrus x paradisi]
  misc_feature (71)..(260): Homolog of NCBI NO: 584825 NR Description: B2 PROTEIN
  misc_feature (1)..(250): Homolog of NCBI NO: 34913876 NR Description: B1156H12.22 [Oryza sativa (japonica
  misc_feature (60)..(263): Homolog of NCBI NO: 9757950 NR Description: gene_id:MJC20.15~similar to unknown
  misc_feature (1)..(263): Homolog of NCBI NO: 18422167 NR Description: putative protein
MGLGFGPVGSKSTVDLNPIDKFNSPFNDTWKFNSVNVNVNGYSPSSAVNGDFNKGVYTSMKKYGYNVNLKNNNKNKGIDEDHQIQKGGKKNRKNQQNNNNQRNEDDKNNGLDKRFKTLPPAEALPRNETIGGYIFVCNNDTMEENLKRQLFGLPPRYRDSVRAITPGLPLFLYNYSTHQLHGIYEAASFGGTNIELNAFEDKKCPGESRFPAQVRAITRKVCLPLEEDSFRPILHHYDGPKFRLELSVPEVLSLLDIFADQNP

SEQ ID NO: 27658 - protein, 204 aa, Arabidopsis thaliana
  peptide (1)..(204): Ceres Seq. ID no. 12370597
  misc_feature (144)..(203): Homolog of NCBI NO: 13161401 NR Description: CPRD48 [Vigna unguiculata]
  misc_feature (83)..(167): Homolog of NCBI NO: 7488804 NR Description: gda-1 protein - garden pea
  misc_feature (1)..(198): Homolog of NCBI NO: 21665866 NR Description: GDA2 protein [Pisum sativum]
  misc_feature (1)..(198): Homolog of NCBI NO: 21592623 NR Description: gda-1, putative [Arabidopsis thaliana]
  misc_feature (1)..(198): Homolog of NCBI NO: 15232081 NR Description: gda-1, putative
  misc_feature (1)..(198): Homolog of NCBI NO: 2369766 NR Description: hypothetical protein [Citrus x paradisi]
  misc_feature (12)..(201): Homolog of NCBI NO: 584825 NR Description: B2 PROTEIN
  misc_feature (1)..(191): Homolog of NCBI NO: 34913876 NR Description: B1156H12.22 [Oryza sativa (japonica
  misc_feature (1)..(204): Homolog of NCBI NO: 9757950 NR Description: gene_id:MJC20.15~similar to unknown
  misc_feature (1)..(204): Homolog of NCBI NO: 18422167 NR Description: putative protein
MKKYGYNVNLKNNNKNKGIDEDHQIQKGGKKNRKNQQNNNNQRNEDDKNNGLDKRFKTLPPAEALPRNETIGGYIFVCNNDTMEENLKRQLFGLPPRYRDSVRAITPGLPLFLYNYSTHQLHGIYEAASFGGTNIELNAFEDKKCPGESRFPAQVRAITRKVCLPLEEDSFRPILHHYDGPKFRLELSVPEVLSLLDIFADQNP

SEQ ID NO: 27659 - DNA, 1219 bp, Arabidopsis thaliana
  misc_feature (1)..(1219): Ceres Seq. ID no. 12562073
  misc_feature: MA Experiment ID: 20000173 Result: Down-regulated in Transcription
  misc_feature: MA Experiment 20000173 PARAMETER Experiment Name: At_42deg_Heat_P Parameter: Age (day) Value: 14
  misc_feature: MA Experiment 20000173 PARAMETER Experiment Name: At_42deg_Heat_P Parameter: Organism Value: A. thaliana
  misc_feature: MA Experiment 20000173 PARAMETER Experiment Name: At_42deg_Heat_P Parameter: Plant Line Value: WS
  misc_feature: MA Experiment 20000173 PARAMETER Experiment Name: At_42deg_Heat_P Parameter: Temperature (deg C) Value: 42 vs. 22
  misc_feature: MA Experiment 20000173 PARAMETER Experiment Name: At_42deg_Heat_P Parameter: Timepoint (hr) Value: 6
  misc_feature: MA Experiment 20000173 PARAMETER Experiment Name: At_42deg_Heat_P Parameter: Tissue Value: Aerial
  misc_feature: MA Experiment ID: 20000179 Result: Down-regulated in Transcription
  misc_feature: MA Experiment 20000179 PARAMETER Experiment Name: At_Germinating_Seeds_P Parameter: Age (hr) Value: 6 vs. 0
  misc_feature: MA Experiment 20000179 PARAMETER Experiment Name: At_Germinating_Seeds_P Parameter: Tissue Value: Germinating Seeds
  misc_feature: MA Experiment ID: 20000185 Result: Up-regulated in Transcription
  misc_feature: MA Experiment 20000185 PARAMETER Experiment Name: At_Roots__P Parameter: Age (day) Value: 7 vs. 21
  misc_feature: MA Experiment 20000185 PARAMETER Experiment Name: At_Roots__P Parameter: Organism Value: A. thaliana
  misc_feature: MA Experiment 20000185 PARAMETER Experiment Name: At_Roots__P Parameter: Tissue Value: Roots vs. Whole Plant
  misc_feature: MA Experiment ID: 20000234 Result: Up-regulated in Transcription
  misc_feature: MA Experiment 20000234 PARAMETER Experiment Name: At_Siliques_P Parameter: Age (day) Value: 21
  misc_feature: MA Experiment 20000234 PARAMETER Experiment Name: At_Siliques_P Parameter: Organism Value: A. thaliana
  misc_feature: MA Experiment 20000234 PARAMETER Experiment Name: At_Siliques_P Parameter: Plant Line Value: WS
  misc_feature: MA Experiment 20000234 PARAMETER Experiment Name: At_Siliques_P Parameter: Tissue Value: Less Than 5mm Siliques vs. Whole Plant
  misc_feature: MA Experiment ID: 20000235 Result: Up-regulated in Transcription
  misc_feature: MA Experiment 20000235 PARAMETER Experiment Name: At_Siliques_P Parameter: Age (day) Value: 21
  misc_feature: MA Experiment 20000235 PARAMETER Experiment Name: At_Siliques_P Parameter: Organism Value: A. thaliana
  misc_feature: MA Experiment 20000235 PARAMETER Experiment Name: At_Siliques_P Parameter: Plant Line Value: WS
  misc_feature: MA Experiment 20000235 PARAMETER Experiment Name: At_Siliques_P Parameter: Tissue Value: 5-10mm Siliques vs. Whole Plant
  misc_feature: MA Experiment ID: 20000264 Result: Up-regulated in Transcription
  misc_feature: MA Experiment 20000264 PARAMETER Experiment Name: At_Open_Flower_P Parameter: Age (day) Value: 21
  misc_feature: MA Experiment 20000264 PARAMETER Experiment Name: At_Open_Flower_P Parameter: Plant Line Value: WS
  misc_feature: MA Experiment 20000264 PARAMETER Experiment Name: At_Open_Flower_P Parameter: Tissue Value: Open Flower vs. Whole Plant
  misc_feature: MA Experiment ID: 20000794 Result: Up-regulated in Transcription
  misc_feature: MA Experiment 20000794 PARAMETER Experiment Name: At_Petals_P Parameter: Age (day) Value: 23-25 days
  misc_feature: MA Experiment 20000794 PARAMETER Experiment Name: At_Petals_P Parameter: Plant Line Value: WS
  misc_feature: MA Experiment 20000794 PARAMETER Experiment Name: At_Petals_P Parameter: Tissue Value: Petals vs. Whole plant
aaaaaaacttgcaaaactctcgtccgagatatatcgactccgcgaccctccactactcttctgctgatctacacacacacacacaaaaaaaaaaaaactcaatcgccagcaacaatggcgaagctcacacttctcttcttcctttcctttctcatcttctcctcatccatcgctttccaatcagacgagctcctcgttgacgacgacgaatttggtctagaaggagcaaagccccgctccaccgatctttacacatcttcttcttcttcgccacagcagcagcaacagactccaactatccggagaagatactcagatcctaccgatttggattcaaaagtccaatttactctcgaacatgccttcggtgactctgatttctcccccgccggtactttctccgctcgtctcaaaacctggagtcatggcggaaagacattaacgaagctgcgattctctaggaatgatttttctgctaaagagaaagatgcattcaagaatctgctgaaaggagatgacttttatcggattcggcttccatctaatgtggttagtccaccagggagagagtttgtgattgcatcagtgagagctagatgtctaccacgggatggcttggatgagcatttcattatacacatggaaggtgctaacatcttggcagttagttatggttctcctggggcgtgtcaatatcctcgccaattgaaacttccagcaaaatggtcgtttaactctcacacaattctgaaaagcagtgagcaggcgccaagaactccaatattcactgaggagattctaggcagtgagaatgtagagggagaagttgaaccaccaccagagagatcattttgggcgaaatattggatgtatttgataccgctgggactcgtagtgatgaatgccgttacacaagcatcaaacatggctgaagaacccgcgggtggacaggcaggaggggcacaagtgcaaccagctgccaggagaagatgattccacttttacttctcccaaagcaatgaaagctgcagctggttagagatgatgattcaacagatcttcatgtaaaccatcttgccatcatttggttttatgtaacctttaattttaatcctcgatcggtgtgtttttgtactcaccaatcgggaaatcaaaaatcttgtcttcatgacatatcaagaacaaagacatttagcagcttccatatcttgttttgatc

SEQ ID NO: 27660 - protein, 330 aa, Arabidopsis thaliana
  peptide (1)..(330): Ceres Seq. ID no. 12562074
  misc_feature (114)..(320): Homolog of NCBI NO: 34856025 NR Description: similar to 2310044H10Rik protein [Rattus
  misc_feature (150)..(320): Homolog of NCBI NO: 13543832 NR Description: Unknown (protein for IMAGE:3591916) [Mus musculus]
  misc_feature (114)..(320): Homolog of NCBI NO: 37574074 NR Description: RIKEN cDNA 2310044H10 [Mus musculus]
  misc_feature (96)..(320): Homolog of NCBI NO: 38181935 NR Description: Unknown (protein for MGC:76288) [Silurana
  misc_feature (96)..(322): Homolog of NCBI NO: 27503262 NR Description: Unknown (protein for IMAGE:5570892) [Xenopus
  misc_feature (39)..(330): Homolog of NCBI NO: 18408239 NR Description: expressed protein
  misc_feature (39)..(330): Homolog of NCBI NO: 21594383 NR Description: unknown [Arabidopsis thaliana]
KKTCKTLVRDISTPRPSTTLLLIYTHTHKKKKTQSPATMAKLTLLFFLSFLIFSSSIAFQSDELLVDDDEFGLEGAKPRSTDLYTSSSSSPQQQQQTPTIRRRYSDPTDLDSKVQFTLEHAFGDSDFSPAGTFSARLKTWSHGGKTLTKLRFSRNDFSAKEKDAFKNLLKGDDFYRIRLPSNVVSPPGREFVIASVRARCLPRDGLDEHFIIHMEGANILAVSYGSPGACQYPRQLKLPAKWSFNSHTILKSSEQAPRTPIFTEEILGSENVEGEVEPPPERSFWAKYWMYLIPLGLVVMNAVTQASNMAEEPAGGQAGGAQVQPAARRR

SEQ ID NO: 27661 - protein, 292 aa, Arabidopsis thaliana
  peptide (1)..(292): Ceres Seq. ID no. 12562075
  misc_feature (76)..(282): Homolog of NCBI NO: 34856025 NR Description: similar to 2310044H10Rik protein [Rattus
  misc_feature (112)..(282): Homolog of NCBI NO: 13543832 NR Description: Unknown (protein for IMAGE:3591916) [Mus musculus]
  misc_feature (76)..(282): Homolog of NCBI NO: 37574074 NR Description: RIKEN cDNA 2310044H10 [Mus musculus]
  misc_feature (58)..(282): Homolog of NCBI NO: 38181935 NR Description: Unknown (protein for MGC:76288) [Silurana
  misc_feature (58)..(284): Homolog of NCBI NO: 27503262 NR Description: Unknown (protein for IMAGE:5570892) [Xenopus
  misc_feature (1)..(292): Homolog of NCBI NO: 18408239 NR Description: expressed protein
  misc_feature (1)..(292): Homolog of NCBI NO: 21594383 NR Description: unknown [Arabidopsis thaliana]
MAKLTLLFFLSFLIFSSSIAFQSDELLVDDDEFGLEGAKPRSTDLYTSSSSSPQQQQQTPTIRRRYSDPTDLDSKVQFTLEHAFGDSDFSPAGTFSARLKTWSHGGKTLTKLRFSRNDFSAKEKDAFKNLLKGDDFYRIRLPSNVVSPPGREFVIASVRARCLPRDGLDEHFIIHMEGANILAVSYGSPGACQYPRQLKLPAKWSFNSHTILKSSEQAPRTPIFTEEILGSENVEGEVEPPPERSFWAKYWMYLIPLGLVVMNAVTQASNMAEEPAGGQAGGAQVQPAARRR

SEQ ID NO: 27662 - DNA, 1302 bp, Arabidopsis thaliana
  misc_feature (1)..(1302): Ceres Seq. ID no. 12333724
  misc_feature: MA Experiment ID: 20000171 Result: Down-regulated in Transcription
  misc_feature: MA Experiment 20000171 PARAMETER Experiment Name: At_42deg_Heat_P Parameter: Age (day) Value: 14
  misc_feature: MA Experiment 20000171 PARAMETER Experiment Name: At_42deg_Heat_P Parameter: Organism Value: A. thaliana
  misc_feature: MA Experiment 20000171 PARAMETER Experiment Name: At_42deg_Heat_P Parameter: Plant Line Value: WS
  misc_feature: MA Experiment 20000171 PARAMETER Experiment Name: At_42deg_Heat_P Parameter: Temperature (deg C) Value: 42 vs. 22
  misc_feature: MA Experiment 20000171 PARAMETER Experiment Name: At_42deg_Heat_P Parameter: Timepoint (hr) Value: 1
  misc_feature: MA Experiment 20000171 PARAMETER Experiment Name: At_42deg_Heat_P Parameter: Tissue Value: Aerial
  misc_feature: MA Experiment ID: 20000173 Result: Down-regulated in Transcription
  misc_feature: MA Experiment 20000173 PARAMETER Experiment Name: At_42deg_Heat_P Parameter: Age (day) Value: 14
  misc_feature: MA Experiment 20000173 PARAMETER Experiment Name: At_42deg_Heat_P Parameter: Organism Value: A. thaliana
  misc_feature: MA Experiment 20000173 PARAMETER Experiment Name: At_42deg_Heat_P Parameter: Plant Line Value: WS
  misc_feature: MA Experiment 20000173 PARAMETER Experiment Name: At_42deg_Heat_P Parameter: Temperature (deg C) Value: 42 vs. 22
  misc_feature: MA Experiment 20000173 PARAMETER Experiment Name: At_42deg_Heat_P Parameter: Timepoint (hr) Value: 6
  misc_feature: MA Experiment 20000173 PARAMETER Experiment Name: At_42deg_Heat_P Parameter: Tissue Value: Aerial
  misc_feature: MA Experiment ID: 20000185 Result: Up-regulated in Transcription
  misc_feature: MA Experiment 20000185 PARAMETER Experiment Name: At_Roots__P Parameter: Age (day) Value: 7 vs. 21
  misc_feature: MA Experiment 20000185 PARAMETER Experiment Name: At_Roots__P Parameter: Organism Value: A. thaliana
  misc_feature: MA Experiment 20000185 PARAMETER Experiment Name: At_Roots__P Parameter: Tissue Value: Roots vs. Whole Plant
  misc_feature: MA Experiment ID: 20000227 Result: Up-regulated in Transcription
  misc_feature: MA Experiment 20000227 PARAMETER Experiment Name: At_Root-Tips-vs-Tops_P Parameter: Tissue Value: Root Tips vs. Root Tops
  misc_feature: MA Experiment ID: 20000234 Result: Up-regulated in Transcription
  misc_feature: MA Experiment 20000234 PARAMETER Experiment Name: At_Siliques_P Parameter: Age (day) Value: 21
  misc_feature: MA Experiment 20000234 PARAMETER Experiment Name: At_Siliques_P Parameter: Organism Value: A. thaliana
  misc_feature: MA Experiment 20000234 PARAMETER Experiment Name: At_Siliques_P Parameter: Plant Line Value: WS
  misc_feature: MA Experiment 20000234 PARAMETER Experiment Name: At_Siliques_P Parameter: Tissue Value: Less Than 5mm Siliques vs. Whole Plant
  misc_feature: MA Experiment ID: 20000235 Result: Up-regulated in Transcription
  misc_feature: MA Experiment 20000235 PARAMETER Experiment Name: At_Siliques_P Parameter: Age (day) Value: 21
  misc_feature: MA Experiment 20000235 PARAMETER Experiment Name: At_Siliques_P Parameter: Organism Value: A. thaliana
  misc_feature: MA Experiment 20000235 PARAMETER Experiment Name: At_Siliques_P Parameter: Plant Line Value: WS
  misc_feature: MA Experiment 20000235 PARAMETER Experiment Name: At_Siliques_P Parameter: Tissue Value: 5-10mm Siliques vs. Whole Plant
  misc_feature: MA Experiment ID: 20000437 Result: Down-regulated in Transcription
  misc_feature: MA Experiment 20000437 PARAMETER Experiment Name: At_Drought_P Parameter: Age (day) Value: 8
  misc_feature: MA Experiment 20000437 PARAMETER Experiment Name: At_Drought_P Parameter: Organism Value: A. thaliana
  misc_feature: MA Experiment 20000437 PARAMETER Experiment Name: At_Drought_P Parameter: Plant Line Value: WS
  misc_feature: MA Experiment 20000437 PARAMETER Experiment Name: At_Drought_P Parameter: Timepoint (hr) Value: 24
  misc_feature: MA Experiment 20000437 PARAMETER Experiment Name: At_Drought_P Parameter: Tissue Value: Whole Plant
  misc_feature: MA Experiment 20000437 PARAMETER Experiment Name: At_Drought_P Parameter: Treatment Value: Drought vs. No Drought
  misc_feature: MA Experiment ID: 20000439 Result: Up-regulated in Transcription
  misc_feature: MA Experiment 20000439 PARAMETER Experiment Name: At_Roots__P Parameter: Age (day) Value: 14 vs. 21
  misc_feature: MA Experiment 20000439 PARAMETER Experiment Name: At_Roots__P Parameter: Organism Value: A. thaliana
  misc_feature: MA Experiment 20000439 PARAMETER Experiment Name: At_Roots__P Parameter: Tissue Value: Roots vs. Whole Plant
  misc_feature: MA Experiment ID: 20000445 Result: Up-regulated in Transcription
  misc_feature: MA Experiment 20000445 PARAMETER Experiment Name: At_100uM_NAA__P Parameter: Age (day) Value: 14
  misc_feature: MA Experiment 20000445 PARAMETER Experiment Name: At_100uM_NAA__P Parameter: Organism Value: A. thaliana
  misc_feature: MA Experiment 20000445 PARAMETER Experiment Name: At_100uM_NAA__P Parameter: Plant Line Value: WS
  misc_feature: MA Experiment 20000445 PARAMETER Experiment Name: At_100uM_NAA__P Parameter: Timepoint (hr) Value: 6
  misc_feature: MA Experiment 20000445 PARAMETER Experiment Name: At_100uM_NAA__P Parameter: Tissue Value: Aerial
  misc_feature: MA Experiment 20000445 PARAMETER Experiment Name: At_100uM_NAA__P Parameter: Treatment Value: 100uM NAA vs. No Treatment
  misc_feature: MA Experiment ID: 20000573 Result: Down-regulated in Transcription
  misc_feature: MA Experiment 20000573 PARAMETER Experiment Name: At_100uM_ABA_Mutants__P Parameter: Organism Value: A. thaliana
  misc_feature: MA Experiment 20000573 PARAMETER Experiment Name: At_100uM_ABA_Mutants__P Parameter: Plant Line Value: CS22 vs. Ler wt
  misc_feature: MA Experiment 20000573 PARAMETER Experiment Name: At_100uM_ABA_Mutants__P Parameter: Timepoint (hr) Value: N/A
  misc_feature: MA Experiment 20000573 PARAMETER Experiment Name: At_100uM_ABA_Mutants__P Parameter: Tissue Value: Whole Plant
  misc_feature: MA Experiment 20000573 PARAMETER Experiment Name: At_100uM_ABA_Mutants__P Parameter: Treatment Value: None
  misc_feature: MA Experiment ID: 20001248 Result: Up-regulated in Transcription
  misc_feature: MA Experiment 20001248 PARAMETER Experiment Name: At_Far-red-induction_P Parameter: Age (day) Value: 7
  misc_feature: MA Experiment 20001248 PARAMETER Experiment Name: At_Far-red-induction_P Parameter: Light Value: Far-red vs. White
  misc_feature: MA Experiment 20001248 PARAMETER Experiment Name: At_Far-red-induction_P Parameter: Organism Value: A. thaliana
  misc_feature: MA Experiment 20001248 PARAMETER Experiment Name: At_Far-red-induction_P Parameter: Plant Line Value: Columbia
  misc_feature: MA Experiment 20001248 PARAMETER Experiment Name: At_Far-red-induction_P Parameter: Timepoint (hr) Value: 4
  misc_feature: MA Experiment 20001248 PARAMETER Experiment Name: At_Far-red-induction_P Parameter: Tissue Value: Whole Plant
  misc_feature: MA Experiment ID: 20001450 Result: Up-regulated in Transcription
  misc_feature: MA Experiment 20001450 PARAMETER Experiment Name: At_Far-red-induction_P Parameter: Age (day) Value: 7
  misc_feature: MA Experiment 20001450 PARAMETER Experiment Name: At_Far-red-induction_P Parameter: Light Value: Far-red vs. White
  misc_feature: MA Experiment 20001450 PARAMETER Experiment Name: At_Far-red-induction_P Parameter: Organism Value: A. thaliana
  misc_feature: MA Experiment 20001450 PARAMETER Experiment Name: At_Far-red-induction_P Parameter: Plant Line Value: Columbia
  misc_feature: MA Experiment 20001450 PARAMETER Experiment Name: At_Far-red-induction_P Parameter: Timepoint (hr) Value: 8
  misc_feature: MA Experiment 20001450 PARAMETER Experiment Name: At_Far-red-induction_P Parameter: Tissue Value: Whole Plant
  misc_feature: MA Experiment ID: 20001556 Result: Down-regulated in Transcription
  misc_feature: MA Experiment 20001556 PARAMETER Experiment Name: At_Drought_Soil_Dry_P Parameter: Age (day) Value: 26
  misc_feature: MA Experiment 20001556 PARAMETER Experiment Name: At_Drought_Soil_Dry_P Parameter: Organism Value: A. thaliana
  misc_feature: MA Experiment 20001556 PARAMETER Experiment Name: At_Drought_Soil_Dry_P Parameter: Plant Line Value: WS
  misc_feature: MA Experiment 20001556 PARAMETER Experiment Name: At_Drought_Soil_Dry_P Parameter: Post Timepoint (hr) Value: None
  misc_feature: MA Experiment 20001556 PARAMETER Experiment Name: At_Drought_Soil_Dry_P Parameter: Post-Treatment Value: None
  misc_feature: MA Experiment 20001556 PARAMETER Experiment Name: At_Drought_Soil_Dry_P Parameter: Timepoint (day) Value: 12
  misc_feature: MA Experiment 20001556 PARAMETER Experiment Name: At_Drought_Soil_Dry_P Parameter: Treatment Value: Drought vs. No Drought
  misc_feature: MA Experiment ID: 20001557 Result: Up-regulated in Transcription
  misc_feature: MA Experiment 20001557 PARAMETER Experiment Name: At_Drought_Soil_Dry_P Parameter: Age (day) Value: 27
  misc_feature: MA Experiment 20001557 PARAMETER Experiment Name: At_Drought_Soil_Dry_P Parameter: Organism Value: A. thaliana
  misc_feature: MA Experiment 20001557 PARAMETER Experiment Name: At_Drought_Soil_Dry_P Parameter: Plant Line Value: WS
  misc_feature: MA Experiment 20001557 PARAMETER Experiment Name: At_Drought_Soil_Dry_P Parameter: Post Timepoint (hr) Value: 3
  misc_feature: MA Experiment 20001557 PARAMETER Experiment Name: At_Drought_Soil_Dry_P Parameter: Post-Treatment Value: Re-Water vs. No Drought
  misc_feature: MA Experiment 20001557 PARAMETER Experiment Name: At_Drought_Soil_Dry_P Parameter: Timepoint (day) Value: 13
  misc_feature: MA Experiment 20001557 PARAMETER Experiment Name: At_Drought_Soil_Dry_P Parameter: Treatment Value: Drought vs. No Drought
  misc_feature: MA Experiment ID: 20001560 Result: Up-regulated in Transcription
  misc_feature: MA Experiment 20001560 PARAMETER Experiment Name: At_Drought_Soil_Dry_P Parameter: Age (day) Value: 28
  misc_feature: MA Experiment 20001560 PARAMETER Experiment Name: At_Drought_Soil_Dry_P Parameter: Organism Value: A. thaliana
  misc_feature: MA Experiment 20001560 PARAMETER Experiment Name: At_Drought_Soil_Dry_P Parameter: Plant Line Value: WS
  misc_feature: MA Experiment 20001560 PARAMETER Experiment Name: At_Drought_Soil_Dry_P Parameter: Post Timepoint (hr) Value: None
  misc_feature: MA Experiment 20001560 PARAMETER Experiment Name: At_Drought_Soil_Dry_P Parameter: Post-Treatment Value: None
  misc_feature: MA Experiment 20001560 PARAMETER Experiment Name: At_Drought_Soil_Dry_P Parameter: Timepoint (day) Value: 14
  misc_feature: MA Experiment 20001560 PARAMETER Experiment Name: At_Drought_Soil_Dry_P Parameter: Treatment Value: Drought vs. No Drought
gttgtatttttgatagggaagaaacaaaaacacaaaagcggcgttgatttttttagattttccgacaagatttctcgtgagaagatttgtctgaatctttctttcgaagaggttttgagttaatttcaaaatggttttggagaaaaaatctgcattgttggaagatttgataaagaaatgcggcggttgtgcggtggtcgacggtggtttcgctacccagcttgagattcacggcgccgccattaacgaccctttgtggagtgctgtttctctcatcaaaaatcctgagctcatcaaaagggttcacatggaatatttggaagctggtgcagacattgtggttacttcatcttatcaggctacgatcccggggtttctttctagaggtttatcaatagaagagagcgagtctttgcttcaaaagagtgtagaattagctgttgaagctcgtgatagattctgggagaaagtgagcaaggtttcaggacatagctataacagagctcttgtagctgcatctattggaagctatggtgcttatcttgctgatggctctgagtacagtggtcactatggtgagaatgtaagtttggataaactaaaggactttcacaggagaagacttcaagtcttagtggaagctggtcctgatcttcttgcttttgaaaccataccgaataaactcgaagctcaggcttgcgttgagcttttggaggaagagaaagtgcaaatcccagcatggatctgcttcacatctgtagatggtgagaaagctccatcaggagagagctttgaggaatgtcttgaacctcttaacaaaagcaacaatatttacgcagttggtattaactgcgcacctcctcaattcatcgaaaatctgattcgcaaattcgccaagctgacgaagaaagcaatcgttgtttacccgaatagcggagaggtttgggatggaaaagctaaacaatggctgccatcacaatgctttggtgatgatgaatttgagatgtttgcaacgaaatggcgtgaccttggagctaaactcatcggaggatgttgcaggactacaccttccaccattaacgctatctccagagatttgaaacgaagatgatttttcttcagggagaaaagactgaagattctttttcaactttttaactagcttgaccattgttagggctatctatctgttttctgttgttttcttgttgttcacgttttctttgtggtttgatgatatgtattcgtaaactaggccttgggcgttttcaatgtaatggcccataaaatattttctttatc

SEQ ID NO: 27663 - protein, 326 aa, Arabidopsis thaliana
  peptide (1)..(326): Ceres Seq. ID no. 12333725
  misc_feature (20)..(325): Pfam Name: Homocysteine S-methyltransferase Pfam Description: Homocysteine S-methyltransferase
  misc_feature (10)..(324): Homolog of NCBI NO: 10732791 NR Description: homocysteine S-methyltransferase-4 [Zea mays]
  misc_feature (14)..(325): Homolog of NCBI NO: 10732789 NR Description: homocysteine S-methyltransferase-3 [Zea mays]
  misc_feature (14)..(325): Homolog of NCBI NO: 10732787 NR Description: homocysteine S-methyltransferase-2 [Zea mays]
  misc_feature (10)..(326): Homolog of NCBI NO: 25453566 NR Description: homocysteine S-methyltransferase (EC 2.1.1.10)
  misc_feature (10)..(326): Homolog of NCBI NO: 15229396 NR Description: homocysteine S-methyltransferase AtHMT-2
  misc_feature (2)..(323): Homolog of NCBI NO: 21593147 NR Description: putative selenocysteine methyltransferase
  misc_feature (2)..(323): Homolog of NCBI NO: 18403505 NR Description: putative selenocysteine methyltransferase
  misc_feature (9)..(326): Homolog of NCBI NO: 10732785 NR Description: homocysteine S-methyltransferase-1 [Zea mays]
  misc_feature (10)..(324): Homolog of NCBI NO: 22748320 NR Description: Putative homocysteine S-methyltransferase-1
  misc_feature (1)..(326): Homolog of NCBI NO: 15230929 NR Description: homocysteine S-methyltransferase AtHMT-1
MVLEKKSALLEDLIKKCGGCAVVDGGFATQLEIHGAAINDPLWSAVSLIKNPELIKRVHMEYLEAGADIVVTSSYQATIPGFLSRGLSIEESESLLQKSVELAVEARDRFWEKVSKVSGHSYNRALVAASIGSYGAYLADGSEYSGHYGENVSLDKLKDFHRRRLQVLVEAGPDLLAFETIPNKLEAQACVELLEEEKVQIPAWICFTSVDGEKAPSGESFEECLEPLNKSNNIYAVGINCAPPQFIENLIRKFAKLTKKAIVVYPNSGEVWDGKAKQWLPSQCFGDDEFEMFATKWRDLGAKLIGGCCRTTPSTINAISRDLKRR

SEQ ID NO: 27664 - protein, 267 aa, Arabidopsis thaliana
  peptide (1)..(267): Ceres Seq. ID no. 12333726
  misc_feature (1)..(266): Pfam Name: Homocysteine S-methyltransferase Pfam Description: Homocysteine S-methyltransferase
  misc_feature (1)..(265): Homolog of NCBI NO: 10732791 NR Description: homocysteine S-methyltransferase-4 [Zea mays]
  misc_feature (1)..(266): Homolog of NCBI NO: 10732789 NR Description: homocysteine S-methyltransferase-3 [Zea mays]
  misc_feature (1)..(266): Homolog of NCBI NO: 10732787 NR Description: homocysteine S-methyltransferase-2 [Zea mays]
  misc_feature (1)..(267): Homolog of NCBI NO: 25453566 NR Description: homocysteine S-methyltransferase (EC 2.1.1.10)
  misc_feature (1)..(267): Homolog of NCBI NO: 15229396 NR Description: homocysteine S-methyltransferase AtHMT-2
  misc_feature (1)..(264): Homolog of NCBI NO: 21593147 NR Description: putative selenocysteine methyltransferase
  misc_feature (1)..(264): Homolog of NCBI NO: 18403505 NR Description: putative selenocysteine methyltransferase
  misc_feature (1)..(267): Homolog of NCBI NO: 10732785 NR Description: homocysteine S-methyltransferase-1 [Zea mays]
  misc_feature (1)..(265): Homolog of NCBI NO: 22748320 NR Description: Putative homocysteine S-methyltransferase-1
  misc_feature (1)..(267): Homolog of NCBI NO: 15230929 NR Description: homocysteine S-methyltransferase AtHMT-1
MEYLEAGADIVVTSSYQATIPGFLSRGLSIEESESLLQKSVELAVEARDRFWEKVSKVSGHSYNRALVAASIGSYGAYLADGSEYSGHYGENVSLDKLKDFHRRRLQVLVEAGPDLLAFETIPNKLEAQACVELLEEEKVQIPAWICFTSVDGEKAPSGESFEECLEPLNKSNNIYAVGINCAPPQFIENLIRKFAKLTKKAIVVYPNSGEVWDGKAKQWLPSQCFGDDEFEMFATKWRDLGAKLIGGCCRTTPSTINAISRDLKRR

SEQ ID NO: 27665 - DNA, 827 bp, Arabidopsis thaliana
  misc_feature (1)..(827): Ceres Seq. ID no. 12370590
  misc_feature: MA Experiment ID: 20000173 Result: Down-regulated in Transcription
  misc_feature: MA Experiment 20000173 PARAMETER Experiment Name: At_42deg_Heat_P Parameter: Age (day) Value: 14
  misc_feature: MA Experiment 20000173 PARAMETER Experiment Name: At_42deg_Heat_P Parameter: Organism Value: A. thaliana
  misc_feature: MA Experiment 20000173 PARAMETER Experiment Name: At_42deg_Heat_P Parameter: Plant Line Value: WS
  misc_feature: MA Experiment 20000173 PARAMETER Experiment Name: At_42deg_Heat_P Parameter: Temperature (deg C) Value: 42 vs. 22
  misc_feature: MA Experiment 20000173 PARAMETER Experiment Name: At_42deg_Heat_P Parameter: Timepoint (hr) Value: 6
  misc_feature: MA Experiment 20000173 PARAMETER Experiment Name: At_42deg_Heat_P Parameter: Tissue Value: Aerial
  misc_feature: MA Experiment ID: 20000184 Result: Up-regulated in Transcription
  misc_feature: MA Experiment 20000184 PARAMETER Experiment Name: At_Shoots__P Parameter: Age (day) Value: 7
  misc_feature: MA Experiment 20000184 PARAMETER Experiment Name: At_Shoots__P Parameter: Tissue Value: Shoots vs. Whole Plant
  misc_feature: MA Experiment ID: 20000265 Result: Down-regulated in Transcription
  misc_feature: MA Experiment 20000265 PARAMETER Experiment Name: At_Open_Flower_P Parameter: Age (day) Value: 21
  misc_feature: MA Experiment 20000265 PARAMETER Experiment Name: At_Open_Flower_P Parameter: Plant Line Value: WS
  misc_feature: MA Experiment 20000265 PARAMETER Experiment Name: At_Open_Flower_P Parameter: Tissue Value: Closed Flower vs. Whole Plant
  misc_feature: MA Experiment ID: 20000286 Result: Down-regulated in Transcription
  misc_feature: MA Experiment 20000286 PARAMETER Experiment Name: At_Open_Flower_P Parameter: Age (day) Value: 21
  misc_feature: MA Experiment 20000286 PARAMETER Experiment Name: At_Open_Flower_P Parameter: Plant Line Value: WS
  misc_feature: MA Experiment 20000286 PARAMETER Experiment Name: At_Open_Flower_P Parameter: Tissue Value: Half Open vs. Whole Plant
  misc_feature: MA Experiment ID: 20000439 Result: Down-regulated in Transcription
  misc_feature: MA Experiment 20000439 PARAMETER Experiment Name: At_Roots__P Parameter: Age (day) Value: 14 vs. 21
  misc_feature: MA Experiment 20000439 PARAMETER Experiment Name: At_Roots__P Parameter: Organism Value: A. thaliana
  misc_feature: MA Experiment 20000439 PARAMETER Experiment Name: At_Roots__P Parameter: Tissue Value: Roots vs. Whole Plant
  misc_feature: MA Experiment ID: 20000794 Result: Down-regulated in Transcription
  misc_feature: MA Experiment 20000794 PARAMETER Experiment Name: At_Petals_P Parameter: Age (day) Value: 23-25 days
  misc_feature: MA Experiment 20000794 PARAMETER Experiment Name: At_Petals_P Parameter: Plant Line Value: WS
  misc_feature: MA Experiment 20000794 PARAMETER Experiment Name: At_Petals_P Parameter: Tissue Value: Petals vs. Whole plant
  misc_feature: MA Experiment ID: 20001248 Result: Down-regulated in Transcription
  misc_feature: MA Experiment 20001248 PARAMETER Experiment Name: At_Far-red-induction_P Parameter: Age (day) Value: 7
  misc_feature: MA Experiment 20001248 PARAMETER Experiment Name: At_Far-red-induction_P Parameter: Light Value: Far-red vs. White
  misc_feature: MA Experiment 20001248 PARAMETER Experiment Name: At_Far-red-induction_P Parameter: Organism Value: A. thaliana
  misc_feature: MA Experiment 20001248 PARAMETER Experiment Name: At_Far-red-induction_P Parameter: Plant Line Value: Columbia
  misc_feature: MA Experiment 20001248 PARAMETER Experiment Name: At_Far-red-induction_P Parameter: Timepoint (hr) Value: 4
  misc_feature: MA Experiment 20001248 PARAMETER Experiment Name: At_Far-red-induction_P Parameter: Tissue Value: Whole Plant
  misc_feature: MA Experiment ID: 20001557 Result: Up-regulated in Transcription
  misc_feature: MA Experiment 20001557 PARAMETER Experiment Name: At_Drought_Soil_Dry_P Parameter: Age (day) Value: 27
  misc_feature: MA Experiment 20001557 PARAMETER Experiment Name: At_Drought_Soil_Dry_P Parameter: Organism Value: A. thaliana
  misc_feature: MA Experiment 20001557 PARAMETER Experiment Name: At_Drought_Soil_Dry_P Parameter: Plant Line Value: WS
  misc_feature: MA Experiment 20001557 PARAMETER Experiment Name: At_Drought_Soil_Dry_P Parameter: Post Timepoint (hr) Value: 3
  misc_feature: MA Experiment 20001557 PARAMETER Experiment Name: At_Drought_Soil_Dry_P Parameter: Post-Treatment Value: Re-Water vs. No Drought
  misc_feature: MA Experiment 20001557 PARAMETER Experiment Name: At_Drought_Soil_Dry_P Parameter: Timepoint (day) Value: 13
  misc_feature: MA Experiment 20001557 PARAMETER Experiment Name: At_Drought_Soil_Dry_P Parameter: Treatment Value: Drought vs. No Drought
  misc_feature: MA Experiment ID: 20001558 Result: Up-regulated in Transcription
  misc_feature: MA Experiment 20001558 PARAMETER Experiment Name: At_Drought_Soil_Dry_P Parameter: Age (day) Value: 27
  misc_feature: MA Experiment 20001558 PARAMETER Experiment Name: At_Drought_Soil_Dry_P Parameter: Organism Value: A. thaliana
  misc_feature: MA Experiment 20001558 PARAMETER Experiment Name: At_Drought_Soil_Dry_P Parameter: Plant Line Value: WS
  misc_feature: MA Experiment 20001558 PARAMETER Experiment Name: At_Drought_Soil_Dry_P Parameter: Post Timepoint (hr) Value: 6
  misc_feature: MA Experiment 20001558 PARAMETER Experiment Name: At_Drought_Soil_Dry_P Parameter: Post-Treatment Value: Re-Water vs. No Drought
  misc_feature: MA Experiment 20001558 PARAMETER Experiment Name: At_Drought_Soil_Dry_P Parameter: Timepoint (day) Value: 13
  misc_feature: MA Experiment 20001558 PARAMETER Experiment Name: At_Drought_Soil_Dry_P Parameter: Treatment Value: Drought vs. No Drought
tgattccgaattgtttgtttcgtgttggtggttcggcgattttgttgtcgaacaaggggaaagatcgtagacggtctaagtataagcttgttcataccgttaggactcataaaggagctgttgagaaggctttcaactgtgtttaccaagagcaagatgataatgggaagaccggggtttcgttgtcgaaagatcttatggctatagctggtgaagctcttaaggcgaatatcactactttaggtcctttggttcttcctataagtgagcagattctgtttttcatgactttggttacgaagaaactgtttaactcgaagctgaagccgtatattccggatttcaagcttgcgtttgatcatttctgtatccatgctggtggtagagctgtgattgatgagcttgagaagaatctgcagctttcgcagactcatgtcgaggcatcgagaatgacactgcatagatttggaaacacttcttcgagctcgatttggtatgaactggcttacatagaggctaaaggtaggatgaagaaaggaaaccgggtttggcagattgcttttggaagtgggtttaagtgtaacagtgcagtttggatggctctaaacaatgtcaagccttcggttagtagtccgtgggaacactgcatcgaccgatatccggttaagctcgacttctgatttaatgaaaaaccatttgtttggttagtcctagtcttactagactctgccttgtttatttttcttcttttctggttaagctcttgtactcttaatgtgacgcttcttgattattactctcgcgttttatgctatggcatctttatc

SEQ ID NO: 27666 - protein, 225 aa, Arabidopsis thaliana
  peptide (1)..(225): Ceres Seq. ID no. 12370591
  misc_feature (59)..(202): Pfam Name: Chalcone and stilbene synthases, C-terminal domain Pfam Description: Chalcone and stilbene synthases, C-terminal
  misc_feature (1)..(224): Homolog of NCBI NO: 14495235 NR Description: beta-ketoacyl-CoA synthase [Brassica napus]
  misc_feature (1)..(224): Homolog of NCBI NO: 19919732 NR Description: 3-ketoacyl-CoA synthase [Brassica napus]
  misc_feature (1)..(224): Homolog of NCBI NO: 30424122 NR Description: beta-ketoacyl-CoA synthase FAE1.2 [Brassica
  misc_feature (1)..(224): Homolog of NCBI NO: 19919736 NR Description: 3-ketoacyl-CoA synthase [Brassica rapa]
  misc_feature (1)..(224): Homolog of NCBI NO: 30424120 NR Description: beta-ketoacyl-CoA synthase FAE1.1 [Brassica
  misc_feature (1)..(224): Homolog of NCBI NO: 19919734 NR Description: 3-ketoacyl-CoA synthase [Brassica oleracea]
  misc_feature (1)..(223): Homolog of NCBI NO: 32172502 NR Description: FAE1 [Marchantia polymorpha]
  misc_feature (1)..(224): Homolog of NCBI NO: 15236133 NR Description: putative ketoacyl-CoA synthase; protein id:
  misc_feature (1)..(225): Homolog of NCBI NO: 15223556 NR Description: very-long-chain fatty acid condensing enzyme
  misc_feature (1)..(225): Homolog of NCBI NO: 15226724 NR Description: putative beta-ketoacyl-CoA synthase; protein id:
IPNCLFRVGGSAILLSNKGKDRRRSKYKLVHTVRTHKGAVEKAFNCVYQEQDDNGKTGVSLSKDLMAIAGEALKANITTLGPLVLPISEQILFFMTLVTKKLFNSKLKPYIPDFKLAFDHFCIHAGGRAVIDELEKNLQLSQTHVEASRMTLHRFGNTSSSSIWYELAYIEAKGRMKKGNRVWQIAFGSGFKCNSAVWMALNNVKPSVSSPWEHCIDRYPVKLDF

SEQ ID NO: 27667 - protein, 160 aa, Arabidopsis thaliana
  peptide (1)..(160): Ceres Seq. ID no. 12370592
  misc_feature (1)..(137): Pfam Name: Chalcone and stilbene synthases, C-terminal domain Pfam Description: Chalcone and stilbene synthases, C-terminal
  misc_feature (1)..(159): Homolog of NCBI NO: 14495235 NR Description: beta-ketoacyl-CoA synthase [Brassica napus]
  misc_feature (1)..(159): Homolog of NCBI NO: 19919732 NR Description: 3-ketoacyl-CoA synthase [Brassica napus]
  misc_feature (1)..(159): Homolog of NCBI NO: 30424122 NR Description: beta-ketoacyl-CoA synthase FAE1.2 [Brassica
  misc_feature (1)..(159): Homolog of NCBI NO: 19919736 NR Description: 3-ketoacyl-CoA synthase [Brassica rapa]
  misc_feature (1)..(159): Homolog of NCBI NO: 30424120 NR Description: beta-ketoacyl-CoA synthase FAE1.1 [Brassica
  misc_feature (1)..(159): Homolog of NCBI NO: 19919734 NR Description: 3-ketoacyl-CoA synthase [Brassica oleracea]
  misc_feature (1)..(158): Homolog of NCBI NO: 32172502 NR Description: FAE1 [Marchantia polymorpha]
  misc_feature (1)..(159): Homolog of NCBI NO: 15236133 NR Description: putative ketoacyl-CoA synthase; protein id:
  misc_feature (1)..(160): Homolog of NCBI NO: 15223556 NR Description: very-long-chain fatty acid condensing enzyme
  misc_feature (1)..(160): Homolog of NCBI NO: 15226724 NR Description: putative beta-ketoacyl-CoA synthase; protein id:
MAIAGEALKANITTLGPLVLPISEQILFFMTLVTKKLFNSKLKPYIPDFKLAFDHFCIHAGGRAVIDELEKNLQLSQTHVEASRMTLHRFGNTSSSSIWYELAYIEAKGRMKKGNRVWQIAFGSGFKCNSAVWMALNNVKPSVSSPWEHCIDRYPVKLDF

SEQ ID NO: 27668 - protein, 131 aa, Arabidopsis thaliana
  peptide (1)..(131): Ceres Seq. ID no. 12370593
  misc_feature (1)..(108): Pfam Name: Chalcone and stilbene synthases, C-terminal domain Pfam Description: Chalcone and stilbene synthases, C-terminal
  misc_feature (1)..(130): Homolog of NCBI NO: 14495235 NR Description: beta-ketoacyl-CoA synthase [Brassica napus]
  misc_feature (1)..(130): Homolog of NCBI NO: 19919732 NR Description: 3-ketoacyl-CoA synthase [Brassica napus]
  misc_feature (1)..(130): Homolog of NCBI NO: 30424122 NR Description: beta-ketoacyl-CoA synthase FAE1.2 [Brassica
  misc_feature (1)..(130): Homolog of NCBI NO: 30424120 NR Description: beta-ketoacyl-CoA synthase FAE1.1 [Brassica
  misc_feature (1)..(130): Homolog of NCBI NO: 19919736 NR Description: 3-ketoacyl-CoA synthase [Brassica rapa]
  misc_feature (1)..(130): Homolog of NCBI NO: 19919734 NR Description: 3-ketoacyl-CoA synthase [Brassica oleracea]
  misc_feature (1)..(129): Homolog of NCBI NO: 32172502 NR Description: FAE1 [Marchantia polymorpha]
  misc_feature (1)..(130): Homolog of NCBI NO: 15236133 NR Description: putative ketoacyl-CoA synthase; protein id:
  misc_feature (1)..(131): Homolog of NCBI NO: 15223556 NR Description: very-long-chain fatty acid condensing enzyme
  misc_feature (1)..(131): Homolog of NCBI NO: 15226724 NR Description: putative beta-ketoacyl-CoA synthase; protein id:
MTLVTKKLFNSKLKPYIPDFKLAFDHFCIHAGGRAVIDELEKNLQLSQTHVEASRMTLHRFGNTSSSSIWYELAYIEAKGRMKKGNRVWQIAFGSGFKCNSAVWMALNNVKPSVSSPWEHCIDRYPVKLDF

SEQ ID NO: 27669 - DNA, 1117 bp, Arabidopsis thaliana
  misc_feature (1)..(1117): Ceres Seq. ID no. 12357628
  misc_feature: MA Experiment ID: 20000171 Result: Up-regulated in Transcription
  misc_feature: MA Experiment 20000171 PARAMETER Experiment Name: At_42deg_Heat_P Parameter: Age (day) Value: 14
  misc_feature: MA Experiment 20000171 PARAMETER Experiment Name: At_42deg_Heat_P Parameter: Organism Value: A. thaliana
  misc_feature: MA Experiment 20000171 PARAMETER Experiment Name: At_42deg_Heat_P Parameter: Plant Line Value: WS
  misc_feature: MA Experiment 20000171 PARAMETER Experiment Name: At_42deg_Heat_P Parameter: Temperature (deg C) Value: 42 vs. 22
  misc_feature: MA Experiment 20000171 PARAMETER Experiment Name: At_42deg_Heat_P Parameter: Timepoint (hr) Value: 1
  misc_feature: MA Experiment 20000171 PARAMETER Experiment Name: At_42deg_Heat_P Parameter: Tissue Value: Aerial
  misc_feature: MA Experiment ID: 20000173 Result: Up-regulated in Transcription
  misc_feature: MA Experiment 20000173 PARAMETER Experiment Name: At_42deg_Heat_P Parameter: Age (day) Value: 14
  misc_feature: MA Experiment 20000173 PARAMETER Experiment Name: At_42deg_Heat_P Parameter: Organism Value: A. thaliana
  misc_feature: MA Experiment 20000173 PARAMETER Experiment Name: At_42deg_Heat_P Parameter: Plant Line Value: WS
  misc_feature: MA Experiment 20000173 PARAMETER Experiment Name: At_42deg_Heat_P Parameter: Temperature (deg C) Value: 42 vs. 22
  misc_feature: MA Experiment 20000173 PARAMETER Experiment Name: At_42deg_Heat_P Parameter: Timepoint (hr) Value: 6
  misc_feature: MA Experiment 20000173 PARAMETER Experiment Name: At_42deg_Heat_P Parameter: Tissue Value: Aerial
  misc_feature: MA Experiment ID: 20001557 Result: Up-regulated in Transcription
  misc_feature: MA Experiment 20001557 PARAMETER Experiment Name: At_Drought_Soil_Dry_P Parameter: Age (day) Value: 27
  misc_feature: MA Experiment 20001557 PARAMETER Experiment Name: At_Drought_Soil_Dry_P Parameter: Organism Value: A. thaliana
  misc_feature: MA Experiment 20001557 PARAMETER Experiment Name: At_Drought_Soil_Dry_P Parameter: Plant Line Value: WS
  misc_feature: MA Experiment 20001557 PARAMETER Experiment Name: At_Drought_Soil_Dry_P Parameter: Post Timepoint (hr) Value: 3
  misc_feature: MA Experiment 20001557 PARAMETER Experiment Name: At_Drought_Soil_Dry_P Parameter: Post-Treatment Value: Re-Water vs. No Drought
  misc_feature: MA Experiment 20001557 PARAMETER Experiment Name: At_Drought_Soil_Dry_P Parameter: Timepoint (day) Value: 13
  misc_feature: MA Experiment 20001557 PARAMETER Experiment Name: At_Drought_Soil_Dry_P Parameter: Treatment Value: Drought vs. No Drought
agttcttcagtggggcggcttgtggcttctttttcatttttccagaaaaccccataaacctctcgctctcgggaatttgattgattcccacgaggaaaaatcaatcttcccggaaaatggcagctaggttattgttccgtcgaagttctcaaatcctccgatcaattcaacgaaatcctcaaatctcatcgtcattcgaatcaccaccttgcccgatttttcactcattgaccaccgcctcaccagatccatcgcgattatcatccttaaccttcctccgatctctctccatcgctcgtcgcggtccaacacgtcctaagaaaatcgacatcggagccaaagcgcgtcagatgcagaatcgccgtttatggacctacgcgctaaccttcagctgcatcgccggattcgtagttatcgtccttaaccaatttcaggatcagcttgtcttctacctaacgccatcagacgctatggagaaattcgcagagaatccaacaaagaacaaattcagactcggtggtttggttctagaaggtagcgttgcgcagccggcggcgtcacaggagatggagtttgtgatcactgatctgatcactgatattttggttaggtataaaggatctttgccggatctgtttagggaaggtcattcagttgtggttgaaggattcattaagccgtatacagatgaagtaaggaaggaagtttctacaaaacctatttcgaagaaagctaggaacctcgattgtttcttctcggcgactgaagttttggctaagcatgatgagaagtatatgccacaggaagttgcggcggcgattgagaagaataagaagattattgaagcggcggcgactgaacatgctgctgaacaagctgctgaagttgcggcttcttagattggtataaacttcattctttttaagttaatcaaaattttccccaagttcgagcttttggtgagtattgttcatcttataaggttatatttgattatagtttctggaaaagagtaggaagattggaatgttatattcctggaaaacagagatttgatttttgagtctatttgagaattaagtggagaaatgtgatacactatacaatagctttgttc

SEQ ID NO: 27670 - protein, 260 aa, Arabidopsis thaliana
  peptide (1)..(260): Ceres Seq. ID no. 12357629
  misc_feature (64)..(230): Pfam Name: CcmE Pfam Description: CcmE
  misc_feature (213)..(240): Homolog of NCBI NO: 24461536 NR Description: putative cytochrome C-type biogenesis protein
  misc_feature (80)..(184): Homolog of NCBI NO: 24461536 NR Description: putative cytochrome C-type biogenesis protein
  misc_feature (213)..(251): Homolog of NCBI NO: 22965493 NR Description: hypothetical protein [Rhodospirillum rubrum]
  misc_feature (80)..(184): Homolog of NCBI NO: 22965493 NR Description: hypothetical protein [Rhodospirillum rubrum]
  misc_feature (210)..(253): Homolog of NCBI NO: 38637881 NR Description: cytochrome C-type biogenesis protein [Ralstonia
  misc_feature (80)..(200): Homolog of NCBI NO: 38637881 NR Description: cytochrome C-type biogenesis protein [Ralstonia
  misc_feature (210)..(240): Homolog of NCBI NO: 30248771 NR Description: CcmE/CycJ proteins [Nitrosomonas europaea ATCC
  misc_feature (80)..(193): Homolog of NCBI NO: 30248771 NR Description: CcmE/CycJ proteins [Nitrosomonas europaea ATCC
  misc_feature (10)..(260): Homolog of NCBI NO: 37536592 NR Description: putative cytochrome c-type biogenesis protein
  misc_feature (1)..(255): Homolog of NCBI NO: 15231037 NR Description: putative transmembrane protein G1p
MAARLLFRRSSQILRSIQRNPQISSSFESPPCPIFHSLTTASPDPSRLSSLTFLRSLSIARRGPTRPKKIDIGAKARQMQNRRLWTYALTFSCIAGFVVIVLNQFQDQLVFYLTPSDAMEKFAENPTKNKFRLGGLVLEGSVAQPAASQEMEFVITDLITDILVRYKGSLPDLFREGHSVVVEGFIKPYTDEVRKEVSTKPISKKARNLDCFFSATEVLAKHDEKYMPQEVAAAIEKNKKIIEAAATEHAAEQAAEVAAS

SEQ ID NO: 27671 - protein, 182 aa, Arabidopsis thaliana
  peptide (1)..(182): Ceres Seq. ID no. 12357630
  misc_feature (1)..(152): Pfam Name: CcmE Pfam Description: CcmE
  misc_feature (135)..(162): Homolog of NCBI NO: 24461536 NR Description: putative cytochrome C-type biogenesis protein
  misc_feature (2)..(106): Homolog of NCBI NO: 24461536 NR Description: putative cytochrome C-type biogenesis protein
  misc_feature (135)..(173): Homolog of NCBI NO: 22965493 NR Description: hypothetical protein [Rhodospirillum rubrum]
  misc_feature (2)..(106): Homolog of NCBI NO: 22965493 NR Description: hypothetical protein [Rhodospirillum rubrum]
  misc_feature (132)..(175): Homolog of NCBI NO: 38637881 NR Description: cytochrome C-type biogenesis protein [Ralstonia
  misc_feature (2)..(122): Homolog of NCBI NO: 38637881 NR Description: cytochrome C-type biogenesis protein [Ralstonia
  misc_feature (132)..(162): Homolog of NCBI NO: 30248771 NR Description: CcmE/CycJ proteins [Nitrosomonas europaea ATCC
  misc_feature (2)..(115): Homolog of NCBI NO: 30248771 NR Description: CcmE/CycJ proteins [Nitrosomonas europaea ATCC
  misc_feature (1)..(182): Homolog of NCBI NO: 37536592 NR Description: putative cytochrome c-type biogenesis protein
  misc_feature (1)..(177): Homolog of NCBI NO: 15231037 NR Description: putative transmembrane protein G1p
MQNRRLWTYALTFSCIAGFVVIVLNQFQDQLVFYLTPSDAMEKFAENPTKNKFRLGGLVLEGSVAQPAASQEMEFVITDLITDILVRYKGSLPDLFREGHSVVVEGFIKPYTDEVRKEVSTKPISKKARNLDCFFSATEVLAKHDEKYMPQEVAAAIEKNKKIIEAAATEHAAEQAAEVAAS

SEQ ID NO: 27672 - protein, 142 aa, Arabidopsis thaliana
  peptide (1)..(142): Ceres Seq. ID no. 12357631
  misc_feature (1)..(112): Pfam Name: CcmE Pfam Description: CcmE
  misc_feature (95)..(122): Homolog of NCBI NO: 24461536 NR Description: putative cytochrome C-type biogenesis protein
  misc_feature (1)..(66): Homolog of NCBI NO: 24461536 NR Description: putative cytochrome C-type biogenesis protein
  misc_feature (95)..(133): Homolog of NCBI NO: 22965493 NR Description: hypothetical protein [Rhodospirillum rubrum]
  misc_feature (1)..(66): Homolog of NCBI NO: 22965493 NR Description: hypothetical protein [Rhodospirillum rubrum]
  misc_feature (92)..(135): Homolog of NCBI NO: 38637881 NR Description: cytochrome C-type biogenesis protein [Ralstonia
  misc_feature (1)..(82): Homolog of NCBI NO: 38637881 NR Description: cytochrome C-type biogenesis protein [Ralstonia
  misc_feature (92)..(122): Homolog of NCBI NO: 30248771 NR Description: CcmE/CycJ proteins [Nitrosomonas europaea ATCC
  misc_feature (1)..(75): Homolog of NCBI NO: 30248771 NR Description: CcmE/CycJ proteins [Nitrosomonas europaea ATCC
  misc_feature (1)..(142): Homolog of NCBI NO: 37536592 NR Description: putative cytochrome c-type biogenesis protein
  misc_feature (1)..(137): Homolog of NCBI NO: 15231037 NR Description: putative transmembrane protein G1p
MEKFAENPTKNKFRLGGLVLEGSVAQPAASQEMEFVITDLITDILVRYKGSLPDLFREGHSVVVEGFIKPYTDEVRKEVSTKPISKKARNLDCFFSATEVLAKHDEKYMPQEVAAAIEKNKKIIEAAATEHAAEQAAEVAAS

SEQ ID NO: 27673 - DNA, 1272 bp, Arabidopsis thaliana
  misc_feature (1)..(1272): Ceres Seq. ID no. 12324965
  misc_feature: MA Experiment ID: 108434 Result: Down-regulated in Transcription
  misc_feature: MA Experiment 108434 PARAMETER Experiment Name: At_Root_Tips_cDNA_P Parameter: Tissue Value: Root Tips
  misc_feature: MA Experiment ID: 108462 Result: Up-regulated in Transcription
  misc_feature: MA Experiment 108462 PARAMETER Experiment Name: At_Germinating_Seeds_cDNA_P Parameter: Age (day) Value: 2 vs. 0
  misc_feature: MA Experiment 108462 PARAMETER Experiment Name: At_Germinating_Seeds_cDNA_P Parameter: Tissue Value: Germinating Seeds
  misc_feature: MA Experiment ID: 108463 Result: Up-regulated in Transcription
  misc_feature: MA Experiment 108463 PARAMETER Experiment Name: At_Germinating_Seeds_cDNA_P Parameter: Age (day) Value: 3 vs. 0
  misc_feature: MA Experiment 108463 PARAMETER Experiment Name: At_Germinating_Seeds_cDNA_P Parameter: Tissue Value: Germinating Seeds
  misc_feature: MA Experiment ID: 108464 Result: Up-regulated in Transcription
  misc_feature: MA Experiment 108464 PARAMETER Experiment Name: At_Germinating_Seeds_cDNA_P Parameter: Age (day) Value: 4 vs. 0
  misc_feature: MA Experiment 108464 PARAMETER Experiment Name: At_Germinating_Seeds_cDNA_P Parameter: Tissue Value: Germinating Seeds
  misc_feature: MA Experiment ID: 108573 Result: Up-regulated in Transcription
  misc_feature: MA Experiment 108573 PARAMETER Experiment Name: At_Drought_cDNA_P Parameter: Timepoint (hr) Value: 6
  misc_feature: MA Experiment 108573 PARAMETER Experiment Name: At_Drought_cDNA_P Parameter: Tissue Value: Aerial
  misc_feature: MA Experiment 108573 PARAMETER Experiment Name: At_Drought_cDNA_P Parameter: Treatment Value: Drought vs. No Drought
  misc_feature: MA Experiment ID: 108579 Result: Down-regulated in Transcription
  misc_feature: MA Experiment 108579 PARAMETER Experiment Name: At_4deg_Cold_cDNA_P Parameter: Temperature (deg C) Value: 4 vs. 22
  misc_feature: MA Experiment 108579 PARAMETER Experiment Name: At_4deg_Cold_cDNA_P Parameter: Timepoint (hr) Value: 6
  misc_feature: MA Experiment 108579 PARAMETER Experiment Name: At_4deg_Cold_cDNA_P Parameter: Tissue Value: Aerial
  misc_feature: MA Experiment ID: 108595 Result: Down-regulated in Transcription
  misc_feature: MA Experiment 108595 PARAMETER Experiment Name: At_Ler-pi_Ovule_cDNA_P Parameter: Plant Line Value: null
  misc_feature: MA Experiment ID: 20000214 Result: Down-regulated in Transcription
  misc_feature: MA Experiment 20000214 PARAMETER Experiment Name: At_4deg_Cold_P Parameter: Timepoint (hr) Value: 6
  misc_feature: MA Experiment ID: 20000224 Result: Down-regulated in Transcription
  misc_feature: MA Experiment ID: 20000234 Result: Down-regulated in Transcription
  misc_feature: MA Experiment 20000234 PARAMETER Experiment Name: At_Siliques_P Parameter: Age (day) Value: 21
  misc_feature: MA Experiment 20000234 PARAMETER Experiment Name: At_Siliques_P Parameter: Organism Value: A. thaliana
  misc_feature: MA Experiment 20000234 PARAMETER Experiment Name: At_Siliques_P Parameter: Plant Line Value: WS
  misc_feature: MA Experiment 20000234 PARAMETER Experiment Name: At_Siliques_P Parameter: Tissue Value: Less Than 5mm Siliques vs. Whole Plant
  misc_feature: MA Experiment ID: 20000264 Result: Down-regulated in Transcription
  misc_feature: MA Experiment 20000264 PARAMETER Experiment Name: At_Open_Flower_P Parameter: Age (day) Value: 21
  misc_feature: MA Experiment 20000264 PARAMETER Experiment Name: At_Open_Flower_P Parameter: Plant Line Value: WS
  misc_feature: MA Experiment 20000264 PARAMETER Experiment Name: At_Open_Flower_P Parameter: Tissue Value: Open Flower vs. Whole Plant
  misc_feature: MA Experiment ID: 20000265 Result: Down-regulated in Transcription
  misc_feature: MA Experiment 20000265 PARAMETER Experiment Name: At_Open_Flower_P Parameter: Age (day) Value: 21
  misc_feature: MA Experiment 20000265 PARAMETER Experiment Name: At_Open_Flower_P Parameter: Plant Line Value: WS
  misc_feature: MA Experiment 20000265 PARAMETER Experiment Name: At_Open_Flower_P Parameter: Tissue Value: Closed Flower vs. Whole Plant
  misc_feature: MA Experiment ID: 20000286 Result: Down-regulated in Transcription
  misc_feature: MA Experiment 20000286 PARAMETER Experiment Name: At_Open_Flower_P Parameter: Age (day) Value: 21
  misc_feature: MA Experiment 20000286 PARAMETER Experiment Name: At_Open_Flower_P Parameter: Plant Line Value: WS
  misc_feature: MA Experiment 20000286 PARAMETER Experiment Name: At_Open_Flower_P Parameter: Tissue Value: Half Open vs. Whole Plant
  misc_feature: MA Experiment ID: 20001557 Result: Down-regulated in Transcription
  misc_feature: MA Experiment 20001557 PARAMETER Experiment Name: At_Drought_Soil_Dry_P Parameter: Age (day) Value: 27
  misc_feature: MA Experiment 20001557 PARAMETER Experiment Name: At_Drought_Soil_Dry_P Parameter: Organism Value: A. thaliana
  misc_feature: MA Experiment 20001557 PARAMETER Experiment Name: At_Drought_Soil_Dry_P Parameter: Plant Line Value: WS
  misc_feature: MA Experiment 20001557 PARAMETER Experiment Name: At_Drought_Soil_Dry_P Parameter: Post Timepoint (hr) Value: 3
  misc_feature: MA Experiment 20001557 PARAMETER Experiment Name: At_Drought_Soil_Dry_P Parameter: Post-Treatment Value: Re-Water vs. No Drought
  misc_feature: MA Experiment 20001557 PARAMETER Experiment Name: At_Drought_Soil_Dry_P Parameter: Timepoint (day) Value: 13
  misc_feature: MA Experiment 20001557 PARAMETER Experiment Name: At_Drought_Soil_Dry_P Parameter: Treatment Value: Drought vs. No Drought
  misc_feature: MA Experiment ID: 20001559 Result: Down-regulated in Transcription
  misc_feature: MA Experiment 20001559 PARAMETER Experiment Name: At_Drought_Soil_Dry_P Parameter: Age (day) Value: 28
  misc_feature: MA Experiment 20001559 PARAMETER Experiment Name: At_Drought_Soil_Dry_P Parameter: Organism Value: A. thaliana
  misc_feature: MA Experiment 20001559 PARAMETER Experiment Name: At_Drought_Soil_Dry_P Parameter: Plant Line Value: WS
  misc_feature: MA Experiment 20001559 PARAMETER Experiment Name: At_Drought_Soil_Dry_P Parameter: Post Timepoint (hr) Value: 29
  misc_feature: MA Experiment 20001559 PARAMETER Experiment Name: At_Drought_Soil_Dry_P Parameter: Post-Treatment Value: Re-Water vs. No Drought
  misc_feature: MA Experiment 20001559 PARAMETER Experiment Name: At_Drought_Soil_Dry_P Parameter: Timepoint (day) Value: 14
  misc_feature: MA Experiment 20001559 PARAMETER Experiment Name: At_Drought_Soil_Dry_P Parameter: Treatment Value: Drought vs. No Drought
  misc_feature: MA Experiment ID: 20001560 Result: Down-regulated in Transcription
  misc_feature: MA Experiment 20001560 PARAMETER Experiment Name: At_Drought_Soil_Dry_P Parameter: Age (day) Value: 28
  misc_feature: MA Experiment 20001560 PARAMETER Experiment Name: At_Drought_Soil_Dry_P Parameter: Organism Value: A. thaliana
  misc_feature: MA Experiment 20001560 PARAMETER Experiment Name: At_Drought_Soil_Dry_P Parameter: Plant Line Value: WS
  misc_feature: MA Experiment 20001560 PARAMETER Experiment Name: At_Drought_Soil_Dry_P Parameter: Post Timepoint (hr) Value: None
  misc_feature: MA Experiment 20001560 PARAMETER Experiment Name: At_Drought_Soil_Dry_P Parameter: Post-Treatment Value: None
  misc_feature: MA Experiment 20001560 PARAMETER Experiment Name: At_Drought_Soil_Dry_P Parameter: Timepoint (day) Value: 14
  misc_feature: MA Experiment 20001560 PARAMETER Experiment Name: At_Drought_Soil_Dry_P Parameter: Treatment Value: Drought vs. No Drought
agataagagcgaaacaaattacaaaattgaattacacaataatgtcctctaagcgacgactactggtgaaatattttataagaaaacaaaaacaataattaacaaacaaaggcgacacctttagattcgacaagacgaccattttagaaaaagcttctcaaattctctccttatccccaaaaattcaaacttttttctctttggaaaattctgaggcaaaaatgcggcgtaattgctgccatgtttcatttgcttcaaccctcaagatccttaattttgtccaagctttcattggtgtttcgatcattatctactccatatggatgctccatgaatacagccgtcaccttcccgtggacccgcctccgtcagcttcatcaagctccggaaccgagatcgctactagtgtatctgagcccttgaagaatcctattgattttgtggcgagtatcattctcgggtctaatggtggtgatcatgggtttaacctacgctcgttggaccttcctgctccatggttcatctactctttcatggcggttggtatattggtctgcattgttaccttcattggtttcatagcagctgaagcaatcaatggctgttgcttgtgtttttactctattctcaaaactctgctcattctacttgaagctgcacttgttgcatacatcgctattgaccgtcactgggaaaaggatcttccgtatgatccaactggagaacttagtagtcttagggctttcattgaagaaaacatcgatatatgcaaatgggtggggattgctgtggtagcagtccagctactgtcattgctactagccatggttctcagagcgatggtttcaaccccgaaacccgaacttgacgaagaggaagatgatgagaacccaaggagtagaacttgggacccacttcttggtccgcaaggaaaccaagcgcctgctggctcaagcaagattgaaaactggagctcccgaatcagagaaaagtatggtttgaaccagagtccaccggtgaacccgaaaggttgatgaagccaaataatcatgtttctaaaactgcatgtgtccatatggtctctgtgaagctctctttctctatgttttgctctttgcaacttctcgagtgtgcataaacatttactcaaaacagtgctgtattgtgtttacacaaacggcataagcatcttcgtttgtgtgtttgcttgtacaaacaatcctgtgaacagtttgaagttagcatttccactataacgtttcgattcaattt

SEQ ID NO: 27674 - protein, 270 aa, Arabidopsis thaliana
  peptide (1)..(270): Ceres Seq. ID no. 12324966
  misc_feature (14)..(194): Pfam Name: Tetraspanin family Pfam Description: Tetraspanin family
  misc_feature (142)..(222): Homolog of NCBI NO: 25411991 NR Description: hypothetical protein At2g20740 [imported] -
  misc_feature (95)..(257): Homolog of NCBI NO: 32487399 NR Description: OSJNBb0017I01.13 [Oryza sativa (japonica
  misc_feature (6)..(268): Homolog of NCBI NO: 18398417 NR Description: expressed protein
  misc_feature (94)..(222): Homolog of NCBI NO: 30681117 NR Description: expressed protein [Arabidopsis thaliana]
  misc_feature (1)..(268): Homolog of NCBI NO: 15235419 NR Description: putative protein
  misc_feature (35)..(270): Homolog of NCBI NO: 25360978 NR Description: hypothetical protein At2g20230 [imported] -
  misc_feature (1)..(270): Homolog of NCBI NO: 18399283 NR Description: expressed protein
MRRNCCHVSFASTLKILNFVQAFIGVSIIIYSIWMLHEYSRHLPVDPPPSASSSSGTEIATSVSEPLKNPIDFVASIILGSNGGDHGFNLRSLDLPAPWFIYSFMAVGILVCIVTFIGFIAAEAINGCCLCFYSILKTLLILLEAALVAYIAIDRHWEKDLPYDPTGELSSLRAFIEENIDICKWVGIAVVAVQLLSLLLAMVLRAMVSTPKPELDEEEDDENPRSRTWDPLLGPQGNQAPAGSSKIENWSSRIREKYGLNQSPPVNPKG

SEQ ID NO: 27675 - protein, 236 aa, Arabidopsis thaliana
  peptide (1)..(236): Ceres Seq. ID no. 12324967
  misc_feature (1)..(160): Pfam Name: Tetraspanin family Pfam Description: Tetraspanin family
  misc_feature (108)..(188): Homolog of NCBI NO: 25411991 NR Description: hypothetical protein At2g20740 [imported] -
  misc_feature (61)..(223): Homolog of NCBI NO: 32487399 NR Description: OSJNBb0017I01.13 [Oryza sativa (japonica
  misc_feature (1)..(234): Homolog of NCBI NO: 18398417 NR Description: expressed protein
  misc_feature (60)..(188): Homolog of NCBI NO: 30681117 NR Description: expressed protein [Arabidopsis thaliana]
  misc_feature (1)..(234): Homolog of NCBI NO: 15235419 NR Description: putative protein
  misc_feature (1)..(236): Homolog of NCBI NO: 25360978 NR Description: hypothetical protein At2g20230 [imported] -
  misc_feature (1)..(236): Homolog of NCBI NO: 18399283 NR Description: expressed protein
MLHEYSRHLPVDPPPSASSSSGTEIATSVSEPLKNPIDFVASIILGSNGGDHGFNLRSLDLPAPWFIYSFMAVGILVCIVTFIGFIAAEAINGCCLCFYSILKTLLILLEAALVAYIAIDRHWEKDLPYDPTGELSSLRAFIEENIDICKWVGIAVVAVQLLSLLLAMVLRAMVSTPKPELDEEEDDENPRSRTWDPLLGPQGNQAPAGSSKIENWSSRIREKYGLNQSPPVNPKG

SEQ ID NO: 27676 - protein, 166 aa, Arabidopsis thaliana
  peptide (1)..(166): Ceres Seq. ID no. 12324968
  misc_feature (1)..(90): Pfam Name: Tetraspanin family Pfam Description: Tetraspanin family
  misc_feature (38)..(118): Homolog of NCBI NO: 25411991 NR Description: hypothetical protein At2g20740 [imported] -
  misc_feature (1)..(153): Homolog of NCBI NO: 32487399 NR Description: OSJNBb0017I01.13 [Oryza sativa (japonica
  misc_feature (1)..(164): Homolog of NCBI NO: 18398417 NR Description: expressed protein
  misc_feature (1)..(118): Homolog of NCBI NO: 30681117 NR Description: expressed protein [Arabidopsis thaliana]
  misc_feature (1)..(164): Homolog of NCBI NO: 15235419 NR Description: putative protein
  misc_feature (1)..(166): Homolog of NCBI NO: 25360978 NR Description: hypothetical protein At2g20230 [imported] -
  misc_feature (1)..(166): Homolog of NCBI NO: 18399283 NR Description: expressed protein
MAVGILVCIVTFIGFIAAEAINGCCLCFYSILKTLLILLEAALVAYIAIDRHWEKDLPYDPTGELSSLRAFIEENIDICKWVGIAVVAVQLLSLLLAMVLRAMVSTPKPELDEEEDDENPRSRTWDPLLGPQGNQAPAGSSKIENWSSRIREKYGLNQSPPVNPKG

SEQ ID NO: 27677 - DNA, 742 bp, Arabidopsis thaliana
  misc_feature (1)..(742): Ceres Seq. ID no. 13621920
  misc_feature: MA Experiment ID: 108488 Result: Down-regulated in Transcription
  misc_feature: MA Experiment ID: 108573 Result: Down-regulated in Transcription
  misc_feature: MA Experiment 108573 PARAMETER Experiment Name: At_Drought_cDNA_P Parameter: Timepoint (hr) Value: 6
  misc_feature: MA Experiment 108573 PARAMETER Experiment Name: At_Drought_cDNA_P Parameter: Tissue Value: Aerial
  misc_feature: MA Experiment 108573 PARAMETER Experiment Name: At_Drought_cDNA_P Parameter: Treatment Value: Drought vs. No Drought
  misc_feature: MA Experiment ID: 108595 Result: Up-regulated in Transcription
  misc_feature: MA Experiment 108595 PARAMETER Experiment Name: At_Ler-pi_Ovule_cDNA_P Parameter: Plant Line Value: null
  misc_feature: MA Experiment ID: 20000069 Result: Up-regulated in Transcription
  misc_feature: MA Experiment 20000069 PARAMETER Experiment Name: At_100uM_ABA_Mutants_cDNA_P Parameter: Plant Line Value: CS23
  misc_feature: MA Experiment 20000069 PARAMETER Experiment Name: At_100uM_ABA_Mutants_cDNA_P Parameter: Timepoint (hr) Value: 6
  misc_feature: MA Experiment 20000069 PARAMETER Experiment Name: At_100uM_ABA_Mutants_cDNA_P Parameter: Tissue Value: Aerial
  misc_feature: MA Experiment 20000069 PARAMETER Experiment Name: At_100uM_ABA_Mutants_cDNA_P Parameter: Treatment Value: 100uM ABA vs. No Treatment
  misc_feature: MA Experiment ID: 20000070 Result: Up-regulated in Transcription
  misc_feature: MA Experiment 20000070 PARAMETER Experiment Name: At_100uM_ABA_Mutants_cDNA_P Parameter: Plant Line Value: CS24
  misc_feature: MA Experiment 20000070 PARAMETER Experiment Name: At_100uM_ABA_Mutants_cDNA_P Parameter: Timepoint (hr) Value: 6
  misc_feature: MA Experiment 20000070 PARAMETER Experiment Name: At_100uM_ABA_Mutants_cDNA_P Parameter: Tissue Value: Aerial
  misc_feature: MA Experiment 20000070 PARAMETER Experiment Name: At_100uM_ABA_Mutants_cDNA_P Parameter: Treatment Value: 100uM ABA vs. No Treatment
  misc_feature: MA Experiment ID: 20000071 Result: Up-regulated in Transcription
  misc_feature: MA Experiment 20000071 PARAMETER Experiment Name: At_100uM_ABA_Mutants_cDNA_P Parameter: Plant Line Value: CS8104
  misc_feature: MA Experiment 20000071 PARAMETER Experiment Name: At_100uM_ABA_Mutants_cDNA_P Parameter: Timepoint (hr) Value: 6
  misc_feature: MA Experiment 20000071 PARAMETER Experiment Name: At_100uM_ABA_Mutants_cDNA_P Parameter: Tissue Value: Aerial
  misc_feature: MA Experiment 20000071 PARAMETER Experiment Name: At_100uM_ABA_Mutants_cDNA_P Parameter: Treatment Value: 100uM ABA vs. No Treatment
  misc_feature: MA Experiment ID: 20000086 Result: Up-regulated in Transcription
  misc_feature: MA Experiment 20000086 PARAMETER Experiment Name: At_100uM_ABA_Mutants_cDNA_P Parameter: Plant Line Value: CS22
  misc_feature: MA Experiment 20000086 PARAMETER Experiment Name: At_100uM_ABA_Mutants_cDNA_P Parameter: Timepoint (hr) Value: 6
  misc_feature: MA Experiment 20000086 PARAMETER Experiment Name: At_100uM_ABA_Mutants_cDNA_P Parameter: Tissue Value: Aerial
  misc_feature: MA Experiment 20000086 PARAMETER Experiment Name: At_100uM_ABA_Mutants_cDNA_P Parameter: Treatment Value: 100uM ABA vs. No Treatment
  misc_feature: MA Experiment ID: 20000087 Result: Up-regulated in Transcription
  misc_feature: MA Experiment 20000087 PARAMETER Experiment Name: At_100uM_ABA_Mutants_cDNA_P Parameter: Plant Line Value: WS
  misc_feature: MA Experiment 20000087 PARAMETER Experiment Name: At_100uM_ABA_Mutants_cDNA_P Parameter: Timepoint (hr) Value: 6
  misc_feature: MA Experiment 20000087 PARAMETER Experiment Name: At_100uM_ABA_Mutants_cDNA_P Parameter: Tissue Value: Aerial
  misc_feature: MA Experiment 20000087 PARAMETER Experiment Name: At_100uM_ABA_Mutants_cDNA_P Parameter: Treatment Value: 100uM ABA vs. No Treatment
  misc_feature: MA Experiment ID: 20000088 Result: Up-regulated in Transcription
  misc_feature: MA Experiment 20000088 PARAMETER Experiment Name: At_100uM_ABA_Mutants_cDNA_P Parameter: Plant Line Value: Landsberg
  misc_feature: MA Experiment 20000088 PARAMETER Experiment Name: At_100uM_ABA_Mutants_cDNA_P Parameter: Timepoint (hr) Value: 6
  misc_feature: MA Experiment 20000088 PARAMETER Experiment Name: At_100uM_ABA_Mutants_cDNA_P Parameter: Tissue Value: Aerial
  misc_feature: MA Experiment 20000088 PARAMETER Experiment Name: At_100uM_ABA_Mutants_cDNA_P Parameter: Treatment Value: 100uM ABA vs. No Treatment
  misc_feature: MA Experiment ID: 20000089 Result: Up-regulated in Transcription
  misc_feature: MA Experiment ID: 20000090 Result: Up-regulated in Transcription
  misc_feature: MA Experiment ID: 20000117 Result: Up-regulated in Transcription
  misc_feature: MA Experiment 20000117 PARAMETER Experiment Name: At_100uM_ABA_Mutants_cDNA_P Parameter: Plant Line Value: Columbia
  misc_feature: MA Experiment 20000117 PARAMETER Experiment Name: At_100uM_ABA_Mutants_cDNA_P Parameter: Timepoint (hr) Value: 6
  misc_feature: MA Experiment 20000117 PARAMETER Experiment Name: At_100uM_ABA_Mutants_cDNA_P Parameter: Tissue Value: Aerial
  misc_feature: MA Experiment 20000117 PARAMETER Experiment Name: At_100uM_ABA_Mutants_cDNA_P Parameter: Treatment Value: 100uM ABA vs. No Treatment
  misc_feature: MA Experiment ID: 20000184 Result: Down-regulated in Transcription
  misc_feature: MA Experiment 20000184 PARAMETER Experiment Name: At_Shoots__P Parameter: Age (day) Value: 7
  misc_feature: MA Experiment 20000184 PARAMETER Experiment Name: At_Shoots__P Parameter: Tissue Value: Shoots vs. Whole Plant
  misc_feature: MA Experiment ID: 20000438 Result: Down-regulated in Transcription
  misc_feature: MA Experiment 20000438 PARAMETER Experiment Name: At_Shoots__P Parameter: Age (day) Value: 14
  misc_feature: MA Experiment 20000438 PARAMETER Experiment Name: At_Shoots__P Parameter: Tissue Value: Shoots vs. Whole Plant
ggacttcctgaaaaaaaaaaaatcatttcttctctgaaacgaaaaaccaaagaaacgagaagaagaagctatggcggatcagctaactgatgaacagatctctgagtttaaggaagcttttagcctcttcgacaaagatggagatggttgcatcaccacaaaggagctgggaacagtgatgcggtcactagggcagaacccaacagaagctgagctacaagacatgatcaacgaggttgacgctgatggaaacggaaccattgacttccctgagttcttaaacctaatggctaaaaagatgaaggacacagactcggaggaagagctgaaagaagctttcagggtgttcgacaaagaccagaacggtttcatatccgctgcagagcttcgccatgtgatgacgaatctaggtgagaaactgactgatgaagaggtcgaggagatgattcgtgaagcagatgttgatggagatggtcagataaactacgaggagtttgtcaagattatgatggctaagtgatgatgataagaaaaaaatgaagaataaaagtggtgatgtgatgaccttttaggcttttactatctacaaaagaatgattcgacctttaatgtcttgggtttgatttgagcctagtagtttcttaaggttttaacagactgaatttgtgacttatctttttttattttgttggtttctttctcgttggcataatggcatgtttagatttcggtaaaaaaaacc

SEQ ID NO: 27678 - protein, 149 aa, Arabidopsis thaliana
  peptide (1)..(149): Ceres Seq. ID no. 13621921
  misc_feature (12)..(40): Pfam Name: EF hand Pfam Description: EF hand
  misc_feature (1)..(149): Homolog of NCBI NO: 3121848 NR Description: CALMODULIN
  misc_feature (1)..(149): Homolog of NCBI NO: 30683369 NR Description: calmodulin [Arabidopsis thaliana]
  misc_feature (1)..(149): Homolog of NCBI NO: 1076793 NR Description: calmodulin cam2 - maize
  misc_feature (1)..(149): Homolog of NCBI NO: 34304715 NR Description: calmodulin 4 [Daucus carota]
  misc_feature (1)..(149): Homolog of NCBI NO: 15229784 NR Description: calmodulin [Arabidopsis thaliana]
  misc_feature (1)..(149): Homolog of NCBI NO: 20186 NR Description: calmodulin [Oryza sativa]
  misc_feature (1)..(149): Homolog of NCBI NO: 2809481 NR Description: calmodulin [Oryza sativa]
  misc_feature (1)..(149): Homolog of NCBI NO: 115515 NR Description: Calmodulin
  misc_feature (1)..(149): Homolog of NCBI NO: 479693 NR Description: calmodulin 4 - Arabidopsis thaliana
  misc_feature (1)..(149): Homolog of NCBI NO: 15219652 NR Description: calmodulin 4 [Arabidopsis thaliana]
MADQLTDEQISEFKEAFSLFDKDGDGCITTKELGTVMRSLGQNPTEAELQDMINEVDADGNGTIDFPEFLNLMAKKMKDTDSEEELKEAFRVFDKDQNGFISAAELRHVMTNLGEKLTDEEVEEMIREADVDGDGQINYEEFVKIMMAK

SEQ ID NO: 27679 - protein, 113 aa, Arabidopsis thaliana
  peptide (1)..(113): Ceres Seq. ID no. 13621922
  misc_feature (1)..(113): Homolog of NCBI NO: 3121848 NR Description: CALMODULIN
  misc_feature (1)..(113): Homolog of NCBI NO: 30683369 NR Description: calmodulin [Arabidopsis thaliana]
  misc_feature (1)..(113): Homolog of NCBI NO: 1076793 NR Description: calmodulin cam2 - maize
  misc_feature (1)..(113): Homolog of NCBI NO: 34304715 NR Description: calmodulin 4 [Daucus carota]
  misc_feature (1)..(113): Homolog of NCBI NO: 15229784 NR Description: calmodulin [Arabidopsis thaliana]
  misc_feature (1)..(113): Homolog of NCBI NO: 20186 NR Description: calmodulin [Oryza sativa]
  misc_feature (1)..(113): Homolog of NCBI NO: 2809481 NR Description: calmodulin [Oryza sativa]
  misc_feature (1)..(113): Homolog of NCBI NO: 115515 NR Description: Calmodulin
  misc_feature (1)..(113): Homolog of NCBI NO: 479693 NR Description: calmodulin 4 - Arabidopsis thaliana
  misc_feature (1)..(113): Homolog of NCBI NO: 15219652 NR Description: calmodulin 4 [Arabidopsis thaliana]
MRSLGQNPTEAELQDMINEVDADGNGTIDFPEFLNLMAKKMKDTDSEEELKEAFRVFDKDQNGFISAAELRHVMTNLGEKLTDEEVEEMIREADVDGDGQINYEEFVKIMMAK

SEQ ID NO: 27680 - protein, 98 aa, Arabidopsis thaliana
  peptide (1)..(98): Ceres Seq. ID no. 13621923
  misc_feature (1)..(98): Homolog of NCBI NO: 30683369 NR Description: calmodulin [Arabidopsis thaliana]
  misc_feature (1)..(98): Homolog of NCBI NO: 3121848 NR Description: CALMODULIN
  misc_feature (1)..(98): Homolog of NCBI NO: 1076793 NR Description: calmodulin cam2 - maize
  misc_feature (1)..(98): Homolog of NCBI NO: 34304715 NR Description: calmodulin 4 [Daucus carota]
  misc_feature (1)..(98): Homolog of NCBI NO: 15229784 NR Description: calmodulin [Arabidopsis thaliana]
  misc_feature (1)..(98): Homolog of NCBI NO: 20186 NR Description: calmodulin [Oryza sativa]
  misc_feature (1)..(98): Homolog of NCBI NO: 2809481 NR Description: calmodulin [Oryza sativa]
  misc_feature (1)..(98): Homolog of NCBI NO: 115515 NR Description: Calmodulin
  misc_feature (1)..(98): Homolog of NCBI NO: 479693 NR Description: calmodulin 4 - Arabidopsis thaliana
  misc_feature (1)..(98): Homolog of NCBI NO: 15219652 NR Description: calmodulin 4 [Arabidopsis thaliana]
MINEVDADGNGTIDFPEFLNLMAKKMKDTDSEEELKEAFRVFDKDQNGFISAAELRHVMTNLGEKLTDEEVEEMIREADVDGDGQINYEEFVKIMMAK

SEQ ID NO: 27681 - DNA, 514 bp, Arabidopsis thaliana
  misc_feature (1)..(514): Ceres Seq. ID no. 12335955
  misc_feature: MA Experiment ID: 108434 Result: Down-regulated in Transcription
  misc_feature: MA Experiment 108434 PARAMETER Experiment Name: At_Root_Tips_cDNA_P Parameter: Tissue Value: Root Tips
  misc_feature: MA Experiment ID: 108462 Result: Up-regulated in Transcription
  misc_feature: MA Experiment 108462 PARAMETER Experiment Name: At_Germinating_Seeds_cDNA_P Parameter: Age (day) Value: 2 vs. 0
  misc_feature: MA Experiment 108462 PARAMETER Experiment Name: At_Germinating_Seeds_cDNA_P Parameter: Tissue Value: Germinating Seeds
  misc_feature: MA Experiment ID: 108464 Result: Up-regulated in Transcription
  misc_feature: MA Experiment 108464 PARAMETER Experiment Name: At_Germinating_Seeds_cDNA_P Parameter: Age (day) Value: 4 vs. 0
  misc_feature: MA Experiment 108464 PARAMETER Experiment Name: At_Germinating_Seeds_cDNA_P Parameter: Tissue Value: Germinating Seeds
  misc_feature: MA Experiment ID: 108579 Result: Up-regulated in Transcription
  misc_feature: MA Experiment 108579 PARAMETER Experiment Name: At_4deg_Cold_cDNA_P Parameter: Temperature (deg C) Value: 4 vs. 22
  misc_feature: MA Experiment 108579 PARAMETER Experiment Name: At_4deg_Cold_cDNA_P Parameter: Timepoint (hr) Value: 6
  misc_feature: MA Experiment 108579 PARAMETER Experiment Name: At_4deg_Cold_cDNA_P Parameter: Tissue Value: Aerial
  misc_feature: MA Experiment ID: 108594 Result: Down-regulated in Transcription
  misc_feature: MA Experiment 108594 PARAMETER Experiment Name: At_Ler-rhl_Root_cDNA_P Parameter: Plant Line Value: null
  misc_feature: MA Experiment ID: 108595 Result: Up-regulated in Transcription
  misc_feature: MA Experiment 108595 PARAMETER Experiment Name: At_Ler-pi_Ovule_cDNA_P Parameter: Plant Line Value: null
  misc_feature: MA Experiment ID: 20000069 Result: Up-regulated in Transcription
  misc_feature: MA Experiment 20000069 PARAMETER Experiment Name: At_100uM_ABA_Mutants_cDNA_P Parameter: Plant Line Value: CS23
  misc_feature: MA Experiment 20000069 PARAMETER Experiment Name: At_100uM_ABA_Mutants_cDNA_P Parameter: Timepoint (hr) Value: 6
  misc_feature: MA Experiment 20000069 PARAMETER Experiment Name: At_100uM_ABA_Mutants_cDNA_P Parameter: Tissue Value: Aerial
  misc_feature: MA Experiment 20000069 PARAMETER Experiment Name: At_100uM_ABA_Mutants_cDNA_P Parameter: Treatment Value: 100uM ABA vs. No Treatment
  misc_feature: MA Experiment ID: 20000070 Result: Up-regulated in Transcription
  misc_feature: MA Experiment 20000070 PARAMETER Experiment Name: At_100uM_ABA_Mutants_cDNA_P Parameter: Plant Line Value: CS24
  misc_feature: MA Experiment 20000070 PARAMETER Experiment Name: At_100uM_ABA_Mutants_cDNA_P Parameter: Timepoint (hr) Value: 6
  misc_feature: MA Experiment 20000070 PARAMETER Experiment Name: At_100uM_ABA_Mutants_cDNA_P Parameter: Tissue Value: Aerial
  misc_feature: MA Experiment 20000070 PARAMETER Experiment Name: At_100uM_ABA_Mutants_cDNA_P Parameter: Treatment Value: 100uM ABA vs. No Treatment
  misc_feature: MA Experiment ID: 20000072 Result: Up-regulated in Transcription
  misc_feature: MA Experiment 20000072 PARAMETER Experiment Name: At_100uM_ABA_Mutants_cDNA_P Parameter: Plant Line Value: CS8105
  misc_feature: MA Experiment 20000072 PARAMETER Experiment Name: At_100uM_ABA_Mutants_cDNA_P Parameter: Timepoint (hr) Value: 6
  misc_feature: MA Experiment 20000072 PARAMETER Experiment Name: At_100uM_ABA_Mutants_cDNA_P Parameter: Tissue Value: Aerial
  misc_feature: MA Experiment 20000072 PARAMETER Experiment Name: At_100uM_ABA_Mutants_cDNA_P Parameter: Treatment Value: 100uM ABA vs. No Treatment
  misc_feature: MA Experiment ID: 20000086 Result: Up-regulated in Transcription
  misc_feature: MA Experiment 20000086 PARAMETER Experiment Name: At_100uM_ABA_Mutants_cDNA_P Parameter: Plant Line Value: CS22
  misc_feature: MA Experiment 20000086 PARAMETER Experiment Name: At_100uM_ABA_Mutants_cDNA_P Parameter: Timepoint (hr) Value: 6
  misc_feature: MA Experiment 20000086 PARAMETER Experiment Name: At_100uM_ABA_Mutants_cDNA_P Parameter: Tissue Value: Aerial
  misc_feature: MA Experiment 20000086 PARAMETER Experiment Name: At_100uM_ABA_Mutants_cDNA_P Parameter: Treatment Value: 100uM ABA vs. No Treatment
  misc_feature: MA Experiment ID: 20000087 Result: Up-regulated in Transcription
  misc_feature: MA Experiment 20000087 PARAMETER Experiment Name: At_100uM_ABA_Mutants_cDNA_P Parameter: Plant Line Value: WS
  misc_feature: MA Experiment 20000087 PARAMETER Experiment Name: At_100uM_ABA_Mutants_cDNA_P Parameter: Timepoint (hr) Value: 6
  misc_feature: MA Experiment 20000087 PARAMETER Experiment Name: At_100uM_ABA_Mutants_cDNA_P Parameter: Tissue Value: Aerial
  misc_feature: MA Experiment 20000087 PARAMETER Experiment Name: At_100uM_ABA_Mutants_cDNA_P Parameter: Treatment Value: 100uM ABA vs. No Treatment
  misc_feature: MA Experiment ID: 20000088 Result: Up-regulated in Transcription
  misc_feature: MA Experiment 20000088 PARAMETER Experiment Name: At_100uM_ABA_Mutants_cDNA_P Parameter: Plant Line Value: Landsberg
  misc_feature: MA Experiment 20000088 PARAMETER Experiment Name: At_100uM_ABA_Mutants_cDNA_P Parameter: Timepoint (hr) Value: 6
  misc_feature: MA Experiment 20000088 PARAMETER Experiment Name: At_100uM_ABA_Mutants_cDNA_P Parameter: Tissue Value: Aerial
  misc_feature: MA Experiment 20000088 PARAMETER Experiment Name: At_100uM_ABA_Mutants_cDNA_P Parameter: Treatment Value: 100uM ABA vs. No Treatment
  misc_feature: MA Experiment ID: 20000089 Result: Up-regulated in Transcription
  misc_feature: MA Experiment ID: 20000090 Result: Up-regulated in Transcription
  misc_feature: MA Experiment ID: 20000111 Result: Down-regulated in Transcription
  misc_feature: MA Experiment 20000111 PARAMETER Experiment Name: At_42deg_Heat_cDNA_P Parameter: Temperature (deg C) Value: 42 vs. 22
  misc_feature: MA Experiment 20000111 PARAMETER Experiment Name: At_42deg_Heat_cDNA_P Parameter: Timepoint (hr) Value: 6
  misc_feature: MA Experiment 20000111 PARAMETER Experiment Name: At_42deg_Heat_cDNA_P Parameter: Tissue Value: Aerial
  misc_feature: MA Experiment ID: 20000117 Result: Up-regulated in Transcription
  misc_feature: MA Experiment 20000117 PARAMETER Experiment Name: At_100uM_ABA_Mutants_cDNA_P Parameter: Plant Line Value: Columbia
  misc_feature: MA Experiment 20000117 PARAMETER Experiment Name: At_100uM_ABA_Mutants_cDNA_P Parameter: Timepoint (hr) Value: 6
  misc_feature: MA Experiment 20000117 PARAMETER Experiment Name: At_100uM_ABA_Mutants_cDNA_P Parameter: Tissue Value: Aerial
  misc_feature: MA Experiment 20000117 PARAMETER Experiment Name: At_100uM_ABA_Mutants_cDNA_P Parameter: Treatment Value: 100uM ABA vs. No Treatment
  misc_feature: MA Experiment ID: 20000179 Result: Up-regulated in Transcription
  misc_feature: MA Experiment 20000179 PARAMETER Experiment Name: At_Germinating_Seeds_P Parameter: Age (hr) Value: 6 vs. 0
  misc_feature: MA Experiment 20000179 PARAMETER Experiment Name: At_Germinating_Seeds_P Parameter: Tissue Value: Germinating Seeds
  misc_feature: MA Experiment ID: 20000227 Result: Down-regulated in Transcription
  misc_feature: MA Experiment 20000227 PARAMETER Experiment Name: At_Root-Tips-vs-Tops_P Parameter: Tissue Value: Root Tips vs. Root Tops
  misc_feature: MA Experiment ID: 20000265 Result: Up-regulated in Transcription
  misc_feature: MA Experiment 20000265 PARAMETER Experiment Name: At_Open_Flower_P Parameter: Age (day) Value: 21
  misc_feature: MA Experiment 20000265 PARAMETER Experiment Name: At_Open_Flower_P Parameter: Plant Line Value: WS
  misc_feature: MA Experiment 20000265 PARAMETER Experiment Name: At_Open_Flower_P Parameter: Tissue Value: Closed Flower vs. Whole Plant
  misc_feature: MA Experiment ID: 20000286 Result: Up-regulated in Transcription
  misc_feature: MA Experiment 20000286 PARAMETER Experiment Name: At_Open_Flower_P Parameter: Age (day) Value: 21
  misc_feature: MA Experiment 20000286 PARAMETER Experiment Name: At_Open_Flower_P Parameter: Plant Line Value: WS
  misc_feature: MA Experiment 20000286 PARAMETER Experiment Name: At_Open_Flower_P Parameter: Tissue Value: Half Open vs. Whole Plant
  misc_feature: MA Experiment ID: 20001248 Result: Up-regulated in Transcription
  misc_feature: MA Experiment 20001248 PARAMETER Experiment Name: At_Far-red-induction_P Parameter: Age (day) Value: 7
  misc_feature: MA Experiment 20001248 PARAMETER Experiment Name: At_Far-red-induction_P Parameter: Light Value: Far-red vs. White
  misc_feature: MA Experiment 20001248 PARAMETER Experiment Name: At_Far-red-induction_P Parameter: Organism Value: A. thaliana
  misc_feature: MA Experiment 20001248 PARAMETER Experiment Name: At_Far-red-induction_P Parameter: Plant Line Value: Columbia
  misc_feature: MA Experiment 20001248 PARAMETER Experiment Name: At_Far-red-induction_P Parameter: Timepoint (hr) Value: 4
  misc_feature: MA Experiment 20001248 PARAMETER Experiment Name: At_Far-red-induction_P Parameter: Tissue Value: Whole Plant
  misc_feature: MA Experiment ID: 20001560 Result: Up-regulated in Transcription
  misc_feature: MA Experiment 20001560 PARAMETER Experiment Name: At_Drought_Soil_Dry_P Parameter: Age (day) Value: 28
  misc_feature: MA Experiment 20001560 PARAMETER Experiment Name: At_Drought_Soil_Dry_P Parameter: Organism Value: A. thaliana
  misc_feature: MA Experiment 20001560 PARAMETER Experiment Name: At_Drought_Soil_Dry_P Parameter: Plant Line Value: WS
  misc_feature: MA Experiment 20001560 PARAMETER Experiment Name: At_Drought_Soil_Dry_P Parameter: Post Timepoint (hr) Value: None
  misc_feature: MA Experiment 20001560 PARAMETER Experiment Name: At_Drought_Soil_Dry_P Parameter: Post-Treatment Value: None
  misc_feature: MA Experiment 20001560 PARAMETER Experiment Name: At_Drought_Soil_Dry_P Parameter: Timepoint (day) Value: 14
  misc_feature: MA Experiment 20001560 PARAMETER Experiment Name: At_Drought_Soil_Dry_P Parameter: Treatment Value: Drought vs. No Drought
  misc_feature: MA Experiment ID: 20001908 Result: Up-regulated in Transcription
  misc_feature: MA Experiment 20001908 PARAMETER Experiment Name: At_Drought_Reproduction_P Parameter: Age (day) Value: 40
  misc_feature: MA Experiment 20001908 PARAMETER Experiment Name: At_Drought_Reproduction_P Parameter: Organism Value: A. thaliana
  misc_feature: MA Experiment 20001908 PARAMETER Experiment Name: At_Drought_Reproduction_P Parameter: Plant Line Value: WS
  misc_feature: MA Experiment 20001908 PARAMETER Experiment Name: At_Drought_Reproduction_P Parameter: Timepoint (day) Value: 10
  misc_feature: MA Experiment 20001908 PARAMETER Experiment Name: At_Drought_Reproduction_P Parameter: Tissue Value: Siliques
  misc_feature: MA Experiment 20001908 PARAMETER Experiment Name: At_Drought_Reproduction_P Parameter: Treatment Value: Drought vs. No Drought
gccattttcctcactagcagcaacacacttgaacactactttcgaactctctctttatctctcttgcaatgaagctctctatgcgtttgatctcagctgttctcatcatgttcatgatattcgtcgccactgggatgggaccagtcactgtggaggcacgcacttgtgagtcgcagagccataggttcaagggtacatgcgtgagtgcatcaaactgcgccaacgtgtgccacaacgaaggctttgtcggaggtaactgccgtggattccgtcgtcgttgcttctgcaccagacattgctgatctacccattctcatgcataattcaagctttgatccatcgtcgtgtgtcacttctttcttatctaatcttccgtacagtaccatgaagtaccgtacattagtgtgttctcaaataagtctttggatttgtgtgtttccggtttaaatgtaatgttaaatcaactaatggctttgagcctttgactagtaataatcaaaatctatgttctgat

SEQ ID NO: 27682 - protein, 77 aa, Arabidopsis thaliana
  peptide (1)..(77): Ceres Seq. ID no. 12335956
  misc_feature (31)..(77): Pfam Name: Gamma-thionins family Pfam Description: Gamma-thionins family
  misc_feature (1)..(77): Homolog of NCBI NO: 22330359 NR Description: plant defensin protein, putative (PDF2.4)
  misc_feature (1)..(77): Homolog of NCBI NO: 3915102 NR Description: Gamma-thionin homolog PPT precursor
  misc_feature (1)..(77): Homolog of NCBI NO: 21553559 NR Description: protease inhibitor II [Arabidopsis thaliana]
  misc_feature (1)..(77): Homolog of NCBI NO: 16225423 NR Description: putative gamma-thionin [Castanea sativa]
  misc_feature (1)..(77): Homolog of NCBI NO: 11387188 NR Description: Flower-specific gamma-thionin precursor (Defensin
  misc_feature (1)..(77): Homolog of NCBI NO: 28624546 NR Description: defensin protein 1 [Prunus persica]
  misc_feature (1)..(77): Homolog of NCBI NO: 15226876 NR Description: plant defensin protein, putative (PDF2.1)
  misc_feature (1)..(77): Homolog of NCBI NO: 15226878 NR Description: plant defensin protein, putative (PDF2.3)
  misc_feature (1)..(77): Homolog of NCBI NO: 7488534 NR Description: proteinase inhibitor II - turnip
  misc_feature (1)..(77): Homolog of NCBI NO: 15226872 NR Description: plant defensin protein, putative (PDF2.2)
MKLSMRLISAVLIMFMIFVATGMGPVTVEARTCESQSHRFKGTCVSASNCANVCHNEGFVGGNCRGFRRRCFCTRHC

SEQ ID NO: 27683 - protein, 73 aa, Arabidopsis thaliana
  peptide (1)..(73): Ceres Seq. ID no. 12335957
  misc_feature (27)..(73): Pfam Name: Gamma-thionins family Pfam Description: Gamma-thionins family
  misc_feature (1)..(73): Homolog of NCBI NO: 22330359 NR Description: plant defensin protein, putative (PDF2.4)
  misc_feature (1)..(73): Homolog of NCBI NO: 3915102 NR Description: Gamma-thionin homolog PPT precursor
  misc_feature (1)..(73): Homolog of NCBI NO: 21553559 NR Description: protease inhibitor II [Arabidopsis thaliana]
  misc_feature (1)..(73): Homolog of NCBI NO: 16225423 NR Description: putative gamma-thionin [Castanea sativa]
  misc_feature (1)..(73): Homolog of NCBI NO: 11387188 NR Description: Flower-specific gamma-thionin precursor (Defensin
  misc_feature (1)..(73): Homolog of NCBI NO: 28624546 NR Description: defensin protein 1 [Prunus persica]
  misc_feature (1)..(73): Homolog of NCBI NO: 15226876 NR Description: plant defensin protein, putative (PDF2.1)
  misc_feature (1)..(73): Homolog of NCBI NO: 15226878 NR Description: plant defensin protein, putative (PDF2.3)
  misc_feature (1)..(73): Homolog of NCBI NO: 7488534 NR Description: proteinase inhibitor II - turnip
  misc_feature (1)..(73): Homolog of NCBI NO: 15226872 NR Description: plant defensin protein, putative (PDF2.2)
MRLISAVLIMFMIFVATGMGPVTVEARTCESQSHRFKGTCVSASNCANVCHNEGFVGGNCRGFRRRCFCTRHC

SEQ ID NO: 27684 - protein, 64 aa, Arabidopsis thaliana
  peptide (1)..(64): Ceres Seq. ID no. 12335958
  misc_feature (18)..(64): Pfam Name: Gamma-thionins family Pfam Description: Gamma-thionins family
  misc_feature (1)..(64): Homolog of NCBI NO: 22330359 NR Description: plant defensin protein, putative (PDF2.4)
  misc_feature (1)..(64): Homolog of NCBI NO: 3915102 NR Description: Gamma-thionin homolog PPT precursor
  misc_feature (1)..(64): Homolog of NCBI NO: 21553559 NR Description: protease inhibitor II [Arabidopsis thaliana]
  misc_feature (1)..(64): Homolog of NCBI NO: 16225423 NR Description: putative gamma-thionin [Castanea sativa]
  misc_feature (1)..(64): Homolog of NCBI NO: 11387188 NR Description: Flower-specific gamma-thionin precursor (Defensin
  misc_feature (1)..(64): Homolog of NCBI NO: 28624546 NR Description: defensin protein 1 [Prunus persica]
  misc_feature (1)..(64): Homolog of NCBI NO: 15226876 NR Description: plant defensin protein, putative (PDF2.1)
  misc_feature (1)..(64): Homolog of NCBI NO: 15226878 NR Description: plant defensin protein, putative (PDF2.3)
  misc_feature (1)..(64): Homolog of NCBI NO: 7488534 NR Description: proteinase inhibitor II - turnip
  misc_feature (1)..(64): Homolog of NCBI NO: 15226872 NR Description: plant defensin protein, putative (PDF2.2)
MFMIFVATGMGPVTVEARTCESQSHRFKGTCVSASNCANVCHNEGFVGGNCRGFRRRCFCTRHC

SEQ ID NO: 27685 - protein, 55 aa, Arabidopsis thaliana
  peptide (1)..(55): Ceres Seq. ID no. 12335959
PFSSLAATHLNTTFELSLYLSCNEALYAFDLSCSHHVHDIRRHWDGTSHCGGTHL

SEQ ID NO: 27686 - DNA, 795 bp, Arabidopsis thaliana
  misc_feature (1)..(795): Ceres Seq. ID no. 12321153
  misc_feature: MA Experiment ID: 108561 Result: Down-regulated in Transcription
  misc_feature: MA Experiment 108561 PARAMETER Experiment Name: At_100uM_ABA_cDNA_P Parameter: Timepoint (hr) Value: 6
  misc_feature: MA Experiment 108561 PARAMETER Experiment Name: At_100uM_ABA_cDNA_P Parameter: Tissue Value: Aerial
  misc_feature: MA Experiment 108561 PARAMETER Experiment Name: At_100uM_ABA_cDNA_P Parameter: Treatment Value: 100uM ABA vs. No Treatment
  misc_feature: MA Experiment ID: 108573 Result: Down-regulated in Transcription
  misc_feature: MA Experiment 108573 PARAMETER Experiment Name: At_Drought_cDNA_P Parameter: Timepoint (hr) Value: 6
  misc_feature: MA Experiment 108573 PARAMETER Experiment Name: At_Drought_cDNA_P Parameter: Tissue Value: Aerial
  misc_feature: MA Experiment 108573 PARAMETER Experiment Name: At_Drought_cDNA_P Parameter: Treatment Value: Drought vs. No Drought
  misc_feature: MA Experiment ID: 20000087 Result: Up-regulated in Transcription
  misc_feature: MA Experiment 20000087 PARAMETER Experiment Name: At_100uM_ABA_Mutants_cDNA_P Parameter: Plant Line Value: WS
  misc_feature: MA Experiment 20000087 PARAMETER Experiment Name: At_100uM_ABA_Mutants_cDNA_P Parameter: Timepoint (hr) Value: 6
  misc_feature: MA Experiment 20000087 PARAMETER Experiment Name: At_100uM_ABA_Mutants_cDNA_P Parameter: Tissue Value: Aerial
  misc_feature: MA Experiment 20000087 PARAMETER Experiment Name: At_100uM_ABA_Mutants_cDNA_P Parameter: Treatment Value: 100uM ABA vs. No Treatment
aaaggagaaggaacattcactctcacgcgcttcaactttctccagaaacaagaaaatttcacagcaaaatttttctcgagaaaatccgaagaagacaaaatggcggatcagctaaccgatgaccagatctccgagttcaaggaagcttttagcctattcgacaaagacggagatggttgtatcaccacaaaggagcttgggactgtgatgagatcacttgggcagaacccgacagaagccgagctccaggatatgatcaatgaagtggatgcagacgggaacgggacaatagatttccctgagttcctgaacctaatggcacgtaagatgaaagacactgattcagaggaagagcttaaggaagccttcagggtttttgacaaggaccagaacggtttcatctcggcggctgagcttcgtcacgtgatgacaaatcttggggagaagttgacggatgaggaagtcgatgagatgatccgagaggctgatgtcgatggtgatggtcagatcaactatgaagagttcgtcaaagtcatgatggcaaagtgagattcttcttatccctcgaaatcctaagcatgtttttcttttacatctttaaaactgagaaaagtaatttattgaaccaaaagaaacagagagatttgcttccttgtttgttttgttggtcgtgattttttggtaacgttgcttcttctttgccttttggttttgttattgtccgtgacgtttgcactcatcatttgctttagtctcgagtcttgaccatttgataatattattttctcttttctc

SEQ ID NO: 27687 - protein, 182 aa, Arabidopsis thaliana
  peptide (1)..(182): Ceres Seq. ID no. 12321154
  misc_feature (45)..(73): Pfam Name: EF hand Pfam Description: EF hand
  misc_feature (34)..(182): Homolog of NCBI NO: 289525 NR Description: calmodulin
  misc_feature (34)..(182): Homolog of NCBI NO: 30688187 NR Description: calmodulin-6 (CAM6) [Arabidopsis thaliana]
  misc_feature (34)..(182): Homolog of NCBI NO: 3121849 NR Description: CALMODULIN
  misc_feature (34)..(182): Homolog of NCBI NO: 115515 NR Description: Calmodulin
  misc_feature (34)..(182): Homolog of NCBI NO: 34903134 NR Description: unnamed protein product [Oryza sativa (japonica
  misc_feature (34)..(182): Homolog of NCBI NO: 30683369 NR Description: calmodulin [Arabidopsis thaliana]
  misc_feature (34)..(182): Homolog of NCBI NO: 15225840 NR Description: calmodulin; protein id: At2g27030.1, supported by
  misc_feature (34)..(182): Homolog of NCBI NO: 3121848 NR Description: CALMODULIN
  misc_feature (34)..(182): Homolog of NCBI NO: 34304715 NR Description: calmodulin 4 [Daucus carota]
  misc_feature (34)..(182): Homolog of NCBI NO: 15229784 NR Description: calmodulin 7
KGEGTFTLTRFNFLQKQENFTAKFFSRKSEEDKMADQLTDDQISEFKEAFSLFDKDGDGCITTKELGTVMRSLGQNPTEAELQDMINEVDADGNGTIDFPEFLNLMARKMKDTDSEEELKEAFRVFDKDQNGFISAAELRHVMTNLGEKLTDEEVDEMIREADVDGDGQINYEEFVKVMMAK

SEQ ID NO: 27688 - protein, 149 aa, Arabidopsis thaliana
  peptide (1)..(149): Ceres Seq. ID no. 12321155
  misc_feature (12)..(40): Pfam Name: EF hand Pfam Description: EF hand
  misc_feature (1)..(149): Homolog of NCBI NO: 289525 NR Description: calmodulin
  misc_feature (1)..(149): Homolog of NCBI NO: 30688187 NR Description: calmodulin-6 (CAM6) [Arabidopsis thaliana]
  misc_feature (1)..(149): Homolog of NCBI NO: 3121849 NR Description: CALMODULIN
  misc_feature (1)..(149): Homolog of NCBI NO: 115515 NR Description: Calmodulin
  misc_feature (1)..(149): Homolog of NCBI NO: 34903134 NR Description: unnamed protein product [Oryza sativa (japonica
  misc_feature (1)..(149): Homolog of NCBI NO: 30683369 NR Description: calmodulin [Arabidopsis thaliana]
  misc_feature (1)..(149): Homolog of NCBI NO: 15225840 NR Description: calmodulin; protein id: At2g27030.1, supported by
  misc_feature (1)..(149): Homolog of NCBI NO: 3121848 NR Description: CALMODULIN
  misc_feature (1)..(149): Homolog of NCBI NO: 34304715 NR Description: calmodulin 4 [Daucus carota]
  misc_feature (1)..(149): Homolog of NCBI NO: 15229784 NR Description: calmodulin 7
MADQLTDDQISEFKEAFSLFDKDGDGCITTKELGTVMRSLGQNPTEAELQDMINEVDADGNGTIDFPEFLNLMARKMKDTDSEEELKEAFRVFDKDQNGFISAAELRHVMTNLGEKLTDEEVDEMIREADVDGDGQINYEEFVKVMMAK

SEQ ID NO: 27689 - protein, 113 aa, Arabidopsis thaliana
  peptide (1)..(113): Ceres Seq. ID no. 12321156
  misc_feature (1)..(113): Homolog of NCBI NO: 289525 NR Description: calmodulin
  misc_feature (1)..(113): Homolog of NCBI NO: 30688187 NR Description: calmodulin-6 (CAM6) [Arabidopsis thaliana]
  misc_feature (1)..(113): Homolog of NCBI NO: 3121849 NR Description: CALMODULIN
  misc_feature (1)..(113): Homolog of NCBI NO: 115515 NR Description: Calmodulin
  misc_feature (1)..(113): Homolog of NCBI NO: 34903134 NR Description: unnamed protein product [Oryza sativa (japonica
  misc_feature (1)..(113): Homolog of NCBI NO: 30683369 NR Description: calmodulin [Arabidopsis thaliana]
  misc_feature (1)..(113): Homolog of NCBI NO: 15225840 NR Description: calmodulin; protein id: At2g27030.1, supported by
  misc_feature (1)..(113): Homolog of NCBI NO: 3121848 NR Description: CALMODULIN
  misc_feature (1)..(113): Homolog of NCBI NO: 34304715 NR Description: calmodulin 4 [Daucus carota]
  misc_feature (1)..(113): Homolog of NCBI NO: 15229784 NR Description: calmodulin 7
MRSLGQNPTEAELQDMINEVDADGNGTIDFPEFLNLMARKMKDTDSEEELKEAFRVFDKDQNGFISAAELRHVMTNLGEKLTDEEVDEMIREADVDGDGQINYEEFVKVMMAK

SEQ ID NO: 27690 - DNA, 1298 bp, Arabidopsis thaliana
  misc_feature (1)..(1298): Ceres Seq. ID no. 12600704
  misc_feature: MA Experiment ID: 108434 Result: Up-regulated in Transcription
  misc_feature: MA Experiment 108434 PARAMETER Experiment Name: At_Root_Tips_cDNA_P Parameter: Tissue Value: Root Tips
  misc_feature: MA Experiment ID: 108462 Result: Down-regulated in Transcription
  misc_feature: MA Experiment 108462 PARAMETER Experiment Name: At_Germinating_Seeds_cDNA_P Parameter: Age (day) Value: 2 vs. 0
  misc_feature: MA Experiment 108462 PARAMETER Experiment Name: At_Germinating_Seeds_cDNA_P Parameter: Tissue Value: Germinating Seeds
  misc_feature: MA Experiment ID: 108463 Result: Down-regulated in Transcription
  misc_feature: MA Experiment 108463 PARAMETER Experiment Name: At_Germinating_Seeds_cDNA_P Parameter: Age (day) Value: 3 vs. 0
  misc_feature: MA Experiment 108463 PARAMETER Experiment Name: At_Germinating_Seeds_cDNA_P Parameter: Tissue Value: Germinating Seeds
  misc_feature: MA Experiment ID: 108464 Result: Down-regulated in Transcription
  misc_feature: MA Experiment 108464 PARAMETER Experiment Name: At_Germinating_Seeds_cDNA_P Parameter: Age (day) Value: 4 vs. 0
  misc_feature: MA Experiment 108464 PARAMETER Experiment Name: At_Germinating_Seeds_cDNA_P Parameter: Tissue Value: Germinating Seeds
  misc_feature: MA Experiment ID: 108573 Result: Up-regulated in Transcription
  misc_feature: MA Experiment 108573 PARAMETER Experiment Name: At_Drought_cDNA_P Parameter: Timepoint (hr) Value: 6
  misc_feature: MA Experiment 108573 PARAMETER Experiment Name: At_Drought_cDNA_P Parameter: Tissue Value: Aerial
  misc_feature: MA Experiment 108573 PARAMETER Experiment Name: At_Drought_cDNA_P Parameter: Treatment Value: Drought vs. No Drought
  misc_feature: MA Experiment ID: 108585 Result: Up-regulated in Transcription
  misc_feature: MA Experiment 108585 PARAMETER Experiment Name: At_5mM_NaNP_cDNA_P Parameter: Timepoint (hr) Value: 6
  misc_feature: MA Experiment 108585 PARAMETER Experiment Name: At_5mM_NaNP_cDNA_P Parameter: Tissue Value: Aerial
  misc_feature: MA Experiment 108585 PARAMETER Experiment Name: At_5mM_NaNP_cDNA_P Parameter: Treatment Value: null
  misc_feature: MA Experiment ID: 108595 Result: Down-regulated in Transcription
  misc_feature: MA Experiment 108595 PARAMETER Experiment Name: At_Ler-pi_Ovule_cDNA_P Parameter: Plant Line Value: null
  misc_feature: MA Experiment ID: 20000069 Result: Down-regulated in Transcription
  misc_feature: MA Experiment 20000069 PARAMETER Experiment Name: At_100uM_ABA_Mutants_cDNA_P Parameter: Plant Line Value: CS23
  misc_feature: MA Experiment 20000069 PARAMETER Experiment Name: At_100uM_ABA_Mutants_cDNA_P Parameter: Timepoint (hr) Value: 6
  misc_feature: MA Experiment 20000069 PARAMETER Experiment Name: At_100uM_ABA_Mutants_cDNA_P Parameter: Tissue Value: Aerial
  misc_feature: MA Experiment 20000069 PARAMETER Experiment Name: At_100uM_ABA_Mutants_cDNA_P Parameter: Treatment Value: 100uM ABA vs. No Treatment
  misc_feature: MA Experiment ID: 20000087 Result: Down-regulated in Transcription
  misc_feature: MA Experiment 20000087 PARAMETER Experiment Name: At_100uM_ABA_Mutants_cDNA_P Parameter: Plant Line Value: WS
  misc_feature: MA Experiment 20000087 PARAMETER Experiment Name: At_100uM_ABA_Mutants_cDNA_P Parameter: Timepoint (hr) Value: 6
  misc_feature: MA Experiment 20000087 PARAMETER Experiment Name: At_100uM_ABA_Mutants_cDNA_P Parameter: Tissue Value: Aerial
  misc_feature: MA Experiment 20000087 PARAMETER Experiment Name: At_100uM_ABA_Mutants_cDNA_P Parameter: Treatment Value: 100uM ABA vs. No Treatment
  misc_feature: MA Experiment ID: 20000184 Result: Up-regulated in Transcription
  misc_feature: MA Experiment 20000184 PARAMETER Experiment Name: At_Shoots__P Parameter: Age (day) Value: 7
  misc_feature: MA Experiment 20000184 PARAMETER Experiment Name: At_Shoots__P Parameter: Tissue Value: Shoots vs. Whole Plant
  misc_feature: MA Experiment ID: 20000437 Result: Down-regulated in Transcription
  misc_feature: MA Experiment 20000437 PARAMETER Experiment Name: At_Drought_P Parameter: Age (day) Value: 8
  misc_feature: MA Experiment 20000437 PARAMETER Experiment Name: At_Drought_P Parameter: Organism Value: A. thaliana
  misc_feature: MA Experiment 20000437 PARAMETER Experiment Name: At_Drought_P Parameter: Plant Line Value: WS
  misc_feature: MA Experiment 20000437 PARAMETER Experiment Name: At_Drought_P Parameter: Timepoint (hr) Value: 24
  misc_feature: MA Experiment 20000437 PARAMETER Experiment Name: At_Drought_P Parameter: Tissue Value: Whole Plant
  misc_feature: MA Experiment 20000437 PARAMETER Experiment Name: At_Drought_P Parameter: Treatment Value: Drought vs. No Drought
  misc_feature: MA Experiment ID: 20000794 Result: Down-regulated in Transcription
  misc_feature: MA Experiment 20000794 PARAMETER Experiment Name: At_Petals_P Parameter: Age (day) Value: 23-25 days
  misc_feature: MA Experiment 20000794 PARAMETER Experiment Name: At_Petals_P Parameter: Plant Line Value: WS
  misc_feature: MA Experiment 20000794 PARAMETER Experiment Name: At_Petals_P Parameter: Tissue Value: Petals vs. Whole plant
  misc_feature: MA Experiment ID: 20001558 Result: Up-regulated in Transcription
  misc_feature: MA Experiment 20001558 PARAMETER Experiment Name: At_Drought_Soil_Dry_P Parameter: Age (day) Value: 27
  misc_feature: MA Experiment 20001558 PARAMETER Experiment Name: At_Drought_Soil_Dry_P Parameter: Organism Value: A. thaliana
  misc_feature: MA Experiment 20001558 PARAMETER Experiment Name: At_Drought_Soil_Dry_P Parameter: Plant Line Value: WS
  misc_feature: MA Experiment 20001558 PARAMETER Experiment Name: At_Drought_Soil_Dry_P Parameter: Post Timepoint (hr) Value: 6
  misc_feature: MA Experiment 20001558 PARAMETER Experiment Name: At_Drought_Soil_Dry_P Parameter: Post-Treatment Value: Re-Water vs. No Drought
  misc_feature: MA Experiment 20001558 PARAMETER Experiment Name: At_Drought_Soil_Dry_P Parameter: Timepoint (day) Value: 13
  misc_feature: MA Experiment 20001558 PARAMETER Experiment Name: At_Drought_Soil_Dry_P Parameter: Treatment Value: Drought vs. No Drought
  misc_feature: MA Experiment ID: 20001757 Result: Up-regulated in Transcription
  misc_feature: MA Experiment 20001757 PARAMETER Experiment Name: At_50mM_NH4NO3_L-to-H_P Parameter: Timepoint (hr) Value: 6
  misc_feature: MA Experiment 20001757 PARAMETER Experiment Name: At_50mM_NH4NO3_L-to-H_P Parameter: Tissue Value: Leaf
  misc_feature: MA Experiment 20001757 PARAMETER Experiment Name: At_50mM_NH4NO3_L-to-H_P Parameter: Treatment Value: 50mM NH4NO3 vs 100mM Mannitol
aatccatttttagtttctatcatataaatagcttcttgtgtttttcacgcccttcttctttgtatttccgcctcccccgagaaaacgaaaaccctagtttcagaggcatctccagacaccgaaaatggcggaaggactcgttttgaagggcaccatgcgtgcacacactgacatggtgacggcaatcgccaccccaatcgataacgcagacatcatcgtctcagcttcccgcgacaaatccatcattttgtggaaactcaccaaggacgacaaagcctacggtgtagctcagaggcgtctcactggtcactctcacttcgttgaggatgttgttctctcctccgatggacaattcgcgctttccggcagctgggacggcgagctccgtctttgggatcttgctgctggtgtctccactcgtagattcgttggacacaccaaggacgtgctctccgtcgccttctcactcgacaaccgtcagatcgtctctgcatctcgtgaccgtacgatcaagctgtggaacactcttggtgagtgcaagtacaccatttcagaaggtggtgagggacaccgtgattgggttagctgcgtcagattcagccctaacacgcttcagccgacgattgtatctgcttcgtgggacaagaccgtgaaagtgtggaacctttcgaactgcaagctcagatcgactcttgctggtcacaccggttacgtgagcactgtggctgtatcacctgatggttctctttgtgcaagtggaggcaaagacggtgttgttttgctgtgggatttggctgaggggaagaagctttactctcttgaagctaactctgtgatccatgctctttgcttcagtcccaacaggtactggctctgtgctgcaactgaacatggtattaagatttgggaccttgagagcaagagcattgttgaggatttgaaggttgatctcaaggctgaggctgaaaaggctgacaacagtggtcctgctgccaccaagaggaaggttatttactgcacaagccttaactggagcgctgatggaagcaccctcttcagtggttacaccgatggagtcattagagtttggggtattggtcgttactagtaatctcatcacttgtgctgtcgttgctctctgctatctgcttgttggttttatctatcacttatgtttttatcgacaactcatgaagtaccttgaggtttttggaaggatgtttgttttcttgtcaatctaggtttttgcttctttatcttatcgttcgagatcttggtttttagagttacttctcccg

SEQ ID NO: 27691 - protein, 327 aa, Arabidopsis thaliana
  peptide (1)..(327): Ceres Seq. ID no. 12600705
  misc_feature (1)..(327): Homolog of NCBI NO: 3023847 NR Description: GUANINE NUCLEOTIDE-BINDING PROTEIN BETA
  misc_feature (1)..(327): Homolog of NCBI NO: 21593440 NR Description: guanine nucleotide-binding protein, putative
  misc_feature (1)..(327): Homolog of NCBI NO: 15229589 NR Description: protein kinase C-receptor/G-protein, putative
  misc_feature (1)..(327): Homolog of NCBI NO: 15221916 NR Description: guanine nucleotide-binding protein, putative
  misc_feature (1)..(327): Homolog of NCBI NO: 3023857 NR Description: GUANINE NUCLEOTIDE-BINDING PROTEIN BETA
  misc_feature (1)..(327): Homolog of NCBI NO: 2289095 NR Description: WD-40 repeat protein [Arabidopsis thaliana]
  misc_feature (1)..(327): Homolog of NCBI NO: 15220941 NR Description: G-protein beta family
  misc_feature (1)..(327): Homolog of NCBI NO: 3023847 NR Description: GUANINE NUCLEOTIDE-BINDING PROTEIN BETA
  misc_feature (1)..(327): Homolog of NCBI NO: 21593440 NR Description: guanine nucleotide-binding protein, putative
  misc_feature (1)..(327): Homolog of NCBI NO: 15229589 NR Description: protein kinase C-receptor/G-protein, putative
  misc_feature (1)..(327): Homolog of NCBI NO: 15221916 NR Description: guanine nucleotide-binding protein, putative
  misc_feature (1)..(327): Homolog of NCBI NO: 3023857 NR Description: GUANINE NUCLEOTIDE-BINDING PROTEIN BETA
  misc_feature (1)..(327): Homolog of NCBI NO: 2289095 NR Description: WD-40 repeat protein [Arabidopsis thaliana]
  misc_feature (1)..(327): Homolog of NCBI NO: 15220941 NR Description: G-protein beta family
MAEGLVLKGTMRAHTDMVTAIATPIDNADIIVSASRDKSIILWKLTKDDKAYGVAQRRLTGHSHFVEDVVLSSDGQFALSGSWDGELRLWDLAAGVSTRRFVGHTKDVLSVAFSLDNRQIVSASRDRTIKLWNTLGECKYTISEGGEGHRDWVSCVRFSPNTLQPTIVSASWDKTVKVWNLSNCKLRSTLAGHTGYVSTVAVSPDGSLCASGGKDGVVLLWDLAEGKKLYSLEANSVIHALCFSPNRYWLCAATEHGIKIWDLESKSIVEDLKVDLKAEAEKADNSGPAATKRKVIYCTSLNWSADGSTLFSGYTDGVIRVWGIGRY

SEQ ID NO: 27692 - protein, 317 aa, Arabidopsis thaliana
  peptide (1)..(317): Ceres Seq. ID no. 12600706
  misc_feature (1)..(317): Homolog of NCBI NO: 3023847 NR Description: GUANINE NUCLEOTIDE-BINDING PROTEIN BETA
  misc_feature (1)..(317): Homolog of NCBI NO: 21593440 NR Description: guanine nucleotide-binding protein, putative
  misc_feature (1)..(317): Homolog of NCBI NO: 15229589 NR Description: protein kinase C-receptor/G-protein, putative
  misc_feature (1)..(317): Homolog of NCBI NO: 15221916 NR Description: guanine nucleotide-binding protein, putative
  misc_feature (1)..(317): Homolog of NCBI NO: 3023857 NR Description: GUANINE NUCLEOTIDE-BINDING PROTEIN BETA
  misc_feature (1)..(317): Homolog of NCBI NO: 2289095 NR Description: WD-40 repeat protein [Arabidopsis thaliana]
  misc_feature (1)..(317): Homolog of NCBI NO: 15220941 NR Description: G-protein beta family
  misc_feature (1)..(317): Homolog of NCBI NO: 3023847 NR Description: GUANINE NUCLEOTIDE-BINDING PROTEIN BETA
  misc_feature (1)..(317): Homolog of NCBI NO: 21593440 NR Description: guanine nucleotide-binding protein, putative
  misc_feature (1)..(317): Homolog of NCBI NO: 15229589 NR Description: protein kinase C-receptor/G-protein, putative
  misc_feature (1)..(317): Homolog of NCBI NO: 15221916 NR Description: guanine nucleotide-binding protein, putative
  misc_feature (1)..(317): Homolog of NCBI NO: 3023857 NR Description: GUANINE NUCLEOTIDE-BINDING PROTEIN BETA
  misc_feature (1)..(317): Homolog of NCBI NO: 2289095 NR Description: WD-40 repeat protein [Arabidopsis thaliana]
  misc_feature (1)..(317): Homolog of NCBI NO: 15220941 NR Description: G-protein beta family
MRAHTDMVTAIATPIDNADIIVSASRDKSIILWKLTKDDKAYGVAQRRLTGHSHFVEDVVLSSDGQFALSGSWDGELRLWDLAAGVSTRRFVGHTKDVLSVAFSLDNRQIVSASRDRTIKLWNTLGECKYTISEGGEGHRDWVSCVRFSPNTLQPTIVSASWDKTVKVWNLSNCKLRSTLAGHTGYVSTVAVSPDGSLCASGGKDGVVLLWDLAEGKKLYSLEANSVIHALCFSPNRYWLCAATEHGIKIWDLESKSIVEDLKVDLKAEAEKADNSGPAATKRKVIYCTSLNWSADGSTLFSGYTDGVIRVWGIGRY

SEQ ID NO: 27693 - protein, 311 aa, Arabidopsis thaliana
  peptide (1)..(311): Ceres Seq. ID no. 12600707
  misc_feature (1)..(311): Homolog of NCBI NO: 3023847 NR Description: GUANINE NUCLEOTIDE-BINDING PROTEIN BETA
  misc_feature (1)..(311): Homolog of NCBI NO: 21593440 NR Description: guanine nucleotide-binding protein, putative
  misc_feature (1)..(311): Homolog of NCBI NO: 15229589 NR Description: protein kinase C-receptor/G-protein, putative
  misc_feature (1)..(311): Homolog of NCBI NO: 15221916 NR Description: guanine nucleotide-binding protein, putative
  misc_feature (1)..(311): Homolog of NCBI NO: 3023857 NR Description: GUANINE NUCLEOTIDE-BINDING PROTEIN BETA
  misc_feature (1)..(311): Homolog of NCBI NO: 2289095 NR Description: WD-40 repeat protein [Arabidopsis thaliana]
  misc_feature (1)..(311): Homolog of NCBI NO: 15220941 NR Description: G-protein beta family
  misc_feature (1)..(311): Homolog of NCBI NO: 3023847 NR Description: GUANINE NUCLEOTIDE-BINDING PROTEIN BETA
  misc_feature (1)..(311): Homolog of NCBI NO: 21593440 NR Description: guanine nucleotide-binding protein, putative
  misc_feature (1)..(311): Homolog of NCBI NO: 15229589 NR Description: protein kinase C-receptor/G-protein, putative
  misc_feature (1)..(311): Homolog of NCBI NO: 15221916 NR Description: guanine nucleotide-binding protein, putative
  misc_feature (1)..(311): Homolog of NCBI NO: 3023857 NR Description: GUANINE NUCLEOTIDE-BINDING PROTEIN BETA
  misc_feature (1)..(311): Homolog of NCBI NO: 2289095 NR Description: WD-40 repeat protein [Arabidopsis thaliana]
  misc_feature (1)..(311): Homolog of NCBI NO: 15220941 NR Description: G-protein beta family
MVTAIATPIDNADIIVSASRDKSIILWKLTKDDKAYGVAQRRLTGHSHFVEDVVLSSDGQFALSGSWDGELRLWDLAAGVSTRRFVGHTKDVLSVAFSLDNRQIVSASRDRTIKLWNTLGECKYTISEGGEGHRDWVSCVRFSPNTLQPTIVSASWDKTVKVWNLSNCKLRSTLAGHTGYVSTVAVSPDGSLCASGGKDGVVLLWDLAEGKKLYSLEANSVIHALCFSPNRYWLCAATEHGIKIWDLESKSIVEDLKVDLKAEAEKADNSGPAATKRKVIYCTSLNWSADGSTLFSGYTDGVIRVWGIGRY

SEQ ID NO: 27694 - DNA, 982 bp, Arabidopsis thaliana
  misc_feature (1)..(982): Ceres Seq. ID no. 12738229
  misc_feature: MA Experiment ID: 108462 Result: Up-regulated in Transcription
  misc_feature: MA Experiment 108462 PARAMETER Experiment Name: At_Germinating_Seeds_cDNA_P Parameter: Age (day) Value: 2 vs. 0
  misc_feature: MA Experiment 108462 PARAMETER Experiment Name: At_Germinating_Seeds_cDNA_P Parameter: Tissue Value: Germinating Seeds
  misc_feature: MA Experiment ID: 108463 Result: Up-regulated in Transcription
  misc_feature: MA Experiment 108463 PARAMETER Experiment Name: At_Germinating_Seeds_cDNA_P Parameter: Age (day) Value: 3 vs. 0
  misc_feature: MA Experiment 108463 PARAMETER Experiment Name: At_Germinating_Seeds_cDNA_P Parameter: Tissue Value: Germinating Seeds
  misc_feature: MA Experiment ID: 108464 Result: Up-regulated in Transcription
  misc_feature: MA Experiment 108464 PARAMETER Experiment Name: At_Germinating_Seeds_cDNA_P Parameter: Age (day) Value: 4 vs. 0
  misc_feature: MA Experiment 108464 PARAMETER Experiment Name: At_Germinating_Seeds_cDNA_P Parameter: Tissue Value: Germinating Seeds
  misc_feature: MA Experiment ID: 108573 Result: Up-regulated in Transcription
  misc_feature: MA Experiment 108573 PARAMETER Experiment Name: At_Drought_cDNA_P Parameter: Timepoint (hr) Value: 6
  misc_feature: MA Experiment 108573 PARAMETER Experiment Name: At_Drought_cDNA_P Parameter: Tissue Value: Aerial
  misc_feature: MA Experiment 108573 PARAMETER Experiment Name: At_Drought_cDNA_P Parameter: Treatment Value: Drought vs. No Drought
  misc_feature: MA Experiment ID: 108595 Result: Down-regulated in Transcription
  misc_feature: MA Experiment 108595 PARAMETER Experiment Name: At_Ler-pi_Ovule_cDNA_P Parameter: Plant Line Value: null
  misc_feature: MA Experiment ID: 20000087 Result: Down-regulated in Transcription
  misc_feature: MA Experiment 20000087 PARAMETER Experiment Name: At_100uM_ABA_Mutants_cDNA_P Parameter: Plant Line Value: WS
  misc_feature: MA Experiment 20000087 PARAMETER Experiment Name: At_100uM_ABA_Mutants_cDNA_P Parameter: Timepoint (hr) Value: 6
  misc_feature: MA Experiment 20000087 PARAMETER Experiment Name: At_100uM_ABA_Mutants_cDNA_P Parameter: Tissue Value: Aerial
  misc_feature: MA Experiment 20000087 PARAMETER Experiment Name: At_100uM_ABA_Mutants_cDNA_P Parameter: Treatment Value: 100uM ABA vs. No Treatment
  misc_feature: MA Experiment ID: 20000090 Result: Down-regulated in Transcription
  misc_feature: MA Experiment ID: 20000224 Result: Down-regulated in Transcription
  misc_feature: MA Experiment ID: 20000234 Result: Down-regulated in Transcription
  misc_feature: MA Experiment 20000234 PARAMETER Experiment Name: At_Siliques_P Parameter: Age (day) Value: 21
  misc_feature: MA Experiment 20000234 PARAMETER Experiment Name: At_Siliques_P Parameter: Organism Value: A. thaliana
  misc_feature: MA Experiment 20000234 PARAMETER Experiment Name: At_Siliques_P Parameter: Plant Line Value: WS
  misc_feature: MA Experiment 20000234 PARAMETER Experiment Name: At_Siliques_P Parameter: Tissue Value: Less Than 5mm Siliques vs. Whole Plant
  misc_feature: MA Experiment ID: 20000495 Result: Down-regulated in Transcription
  misc_feature: MA Experiment 20000495 PARAMETER Experiment Name: At_Guard_Cells_P Parameter: Harvest Date Value: 8/2/2002
  misc_feature: MA Experiment 20000495 PARAMETER Experiment Name: At_Guard_Cells_P Parameter: Organism Value: A. thaliana
  misc_feature: MA Experiment 20000495 PARAMETER Experiment Name: At_Guard_Cells_P Parameter: Tissue Value: Guard Cells vs. Leaves
  misc_feature: MA Experiment ID: 20000794 Result: Down-regulated in Transcription
  misc_feature: MA Experiment 20000794 PARAMETER Experiment Name: At_Petals_P Parameter: Age (day) Value: 23-25 days
  misc_feature: MA Experiment 20000794 PARAMETER Experiment Name: At_Petals_P Parameter: Plant Line Value: WS
  misc_feature: MA Experiment 20000794 PARAMETER Experiment Name: At_Petals_P Parameter: Tissue Value: Petals vs. Whole plant
  misc_feature: MA Experiment ID: 20001247 Result: Up-regulated in Transcription
  misc_feature: MA Experiment 20001247 PARAMETER Experiment Name: At_Far-red-induction_P Parameter: Age (day) Value: 7
  misc_feature: MA Experiment 20001247 PARAMETER Experiment Name: At_Far-red-induction_P Parameter: Light Value: Far-red vs. White
  misc_feature: MA Experiment 20001247 PARAMETER Experiment Name: At_Far-red-induction_P Parameter: Organism Value: A. thaliana
  misc_feature: MA Experiment 20001247 PARAMETER Experiment Name: At_Far-red-induction_P Parameter: Plant Line Value: Columbia
  misc_feature: MA Experiment 20001247 PARAMETER Experiment Name: At_Far-red-induction_P Parameter: Timepoint (hr) Value: 1
  misc_feature: MA Experiment 20001247 PARAMETER Experiment Name: At_Far-red-induction_P Parameter: Tissue Value: Whole Plant
atagagagaagaaaaagaagaggtttagagagagaaaaatggcgtcaaagctctgcgattcgtgcaaatcagcgacggcggcgttatactgccgaccagacgcagcgtttctatgcttaagctgcgattcaaaagtccacgcggcgaacaaactcgcgtcacgacacgcgcgcgtgtggatgtgtgaagtgtgcgagcaagcaccggcacacgtcacgtgcaaagcagacgcggccgcgttatgcgtcacgtgcgaccgtgatatccactcggctaatccgttagctcgccgtcacgaacgcgttcccgttactccgttttacgattccgtctctagtgacggttccgttaaacacaccgccgttaatttccttgacgactgttacttctccgatatagatggtaacggaagccgtgaagaagaggaggaagaagctgcttcgtggctgttacttcccaatccaaagactacaacgacggcgacggcggggatcgttgctgttacttcagctgaggaagttccgggagatagtccggagatgaacactggtcaacagtatttgttctcggatccggatccgtatctggatctggattatggaaatgttgatccgaaggtggaatcgttagagcagaatagctccggtactgatggtgttgttccggtggagaatcggacggttagaatcccgacggtgaacgagaattgctttgaaatggattttaccggaggatctaaaggctttgcttatggaggtggttacaattgcatcagtcacagcgtgtcatcatcgtcgatggaagtgggagtggtgccagatggtggttcggtggctgatgtatcgtatccttacggtggtcctgcaaccagtggagctgatccggggacacagcgggctgttccgctgacttcagctgagagagaagcgagggtaatgaggtacagagagaagaggaagaacaggaagtttgagaagactat

SEQ ID NO: 27695 - protein, 326 aa, Arabidopsis thaliana
  peptide (1)..(326): Ceres Seq. ID no. 12738230
  misc_feature (13)..(60): Pfam Name: B-box zinc finger Pfam Description: B-box zinc finger
  misc_feature (232)..(325): Homolog of NCBI NO: 15224620 NR Description: CONSTANS B-box zinc finger family protein
  misc_feature (14)..(198): Homolog of NCBI NO: 15224620 NR Description: CONSTANS B-box zinc finger family protein
  misc_feature (232)..(325): Homolog of NCBI NO: 21553854 NR Description: zinc finger protein constans-like 8 [Arabidopsis
  misc_feature (14)..(198): Homolog of NCBI NO: 21553854 NR Description: zinc finger protein constans-like 8 [Arabidopsis
  misc_feature (232)..(325): Homolog of NCBI NO: 7488604 NR Description: CONSTANS protein homolog COL1 - radish
  misc_feature (13)..(203): Homolog of NCBI NO: 7488604 NR Description: CONSTANS protein homolog COL1 - radish
  misc_feature (13)..(277): Homolog of NCBI NO: 4091806 NR Description: CONSTANS-like protein 2 [Malus x domestica]
  misc_feature (13)..(325): Homolog of NCBI NO: 4091804 NR Description: CONSTANS-like protein 1 [Malus x domestica]
  misc_feature (13)..(241): Homolog of NCBI NO: 15450659 NR Description: AT5g24930/F6A4_140 [Arabidopsis thaliana]
  misc_feature (1)..(325): Homolog of NCBI NO: 30689668 NR Description: CONSTANS B-box zinc finger family protein
REKKKKRFRERKMASKLCDSCKSATAALYCRPDAAFLCLSCDSKVHAANKLASRHARVWMCEVCEQAPAHVTCKADAAALCVTCDRDIHSANPLARRHERVPVTPFYDSVSSDGSVKHTAVNFLDDCYFSDIDGNGSREEEEEEAASWLLLPNPKTTTTATAGIVAVTSAEEVPGDSPEMNTGQQYLFSDPDPYLDLDYGNVDPKVESLEQNSSGTDGVVPVENRTVRIPTVNENCFEMDFTGGSKGFAYGGGYNCISHSVSSSSMEVGVVPDGGSVADVSYPYGGPATSGADPGTQRAVPLTSAEREARVMRYREKRKNRKFEKT

SEQ ID NO: 27696 - protein, 314 aa, Arabidopsis thaliana
  peptide (1)..(314): Ceres Seq. ID no. 12738231
  misc_feature (1)..(48): Pfam Name: B-box zinc finger Pfam Description: B-box zinc finger
  misc_feature (220)..(313): Homolog of NCBI NO: 15224620 NR Description: CONSTANS B-box zinc finger family protein
  misc_feature (2)..(186): Homolog of NCBI NO: 15224620 NR Description: CONSTANS B-box zinc finger family protein
  misc_feature (220)..(313): Homolog of NCBI NO: 21553854 NR Description: zinc finger protein constans-like 8 [Arabidopsis
  misc_feature (2)..(186): Homolog of NCBI NO: 21553854 NR Description: zinc finger protein constans-like 8 [Arabidopsis
  misc_feature (220)..(313): Homolog of NCBI NO: 7488604 NR Description: CONSTANS protein homolog COL1 - radish
  misc_feature (1)..(191): Homolog of NCBI NO: 7488604 NR Description: CONSTANS protein homolog COL1 - radish
  misc_feature (1)..(265): Homolog of NCBI NO: 4091806 NR Description: CONSTANS-like protein 2 [Malus x domestica]
  misc_feature (1)..(313): Homolog of NCBI NO: 4091804 NR Description: CONSTANS-like protein 1 [Malus x domestica]
  misc_feature (1)..(229): Homolog of NCBI NO: 15450659 NR Description: AT5g24930/F6A4_140 [Arabidopsis thaliana]
  misc_feature (1)..(313): Homolog of NCBI NO: 30689668 NR Description: CONSTANS B-box zinc finger family protein
MASKLCDSCKSATAALYCRPDAAFLCLSCDSKVHAANKLASRHARVWMCEVCEQAPAHVTCKADAAALCVTCDRDIHSANPLARRHERVPVTPFYDSVSSDGSVKHTAVNFLDDCYFSDIDGNGSREEEEEEAASWLLLPNPKTTTTATAGIVAVTSAEEVPGDSPEMNTGQQYLFSDPDPYLDLDYGNVDPKVESLEQNSSGTDGVVPVENRTVRIPTVNENCFEMDFTGGSKGFAYGGGYNCISHSVSSSSMEVGVVPDGGSVADVSYPYGGPATSGADPGTQRAVPLTSAEREARVMRYREKRKNRKFEKT

SEQ ID NO: 27697 - protein, 267 aa, Arabidopsis thaliana
  peptide (1)..(267): Ceres Seq. ID no. 12738232
  misc_feature (173)..(266): Homolog of NCBI NO: 15224620 NR Description: CONSTANS B-box zinc finger family protein
  misc_feature (1)..(139): Homolog of NCBI NO: 15224620 NR Description: CONSTANS B-box zinc finger family protein
  misc_feature (173)..(266): Homolog of NCBI NO: 21553854 NR Description: zinc finger protein constans-like 8 [Arabidopsis
  misc_feature (1)..(139): Homolog of NCBI NO: 21553854 NR Description: zinc finger protein constans-like 8 [Arabidopsis
  misc_feature (173)..(266): Homolog of NCBI NO: 7488604 NR Description: CONSTANS protein homolog COL1 - radish
  misc_feature (1)..(144): Homolog of NCBI NO: 7488604 NR Description: CONSTANS protein homolog COL1 - radish
  misc_feature (1)..(218): Homolog of NCBI NO: 4091806 NR Description: CONSTANS-like protein 2 [Malus x domestica]
  misc_feature (1)..(266): Homolog of NCBI NO: 4091804 NR Description: CONSTANS-like protein 1 [Malus x domestica]
  misc_feature (1)..(182): Homolog of NCBI NO: 15450659 NR Description: AT5g24930/F6A4_140 [Arabidopsis thaliana]
  misc_feature (1)..(266): Homolog of NCBI NO: 30689668 NR Description: CONSTANS B-box zinc finger family protein
MCEVCEQAPAHVTCKADAAALCVTCDRDIHSANPLARRHERVPVTPFYDSVSSDGSVKHTAVNFLDDCYFSDIDGNGSREEEEEEAASWLLLPNPKTTTTATAGIVAVTSAEEVPGDSPEMNTGQQYLFSDPDPYLDLDYGNVDPKVESLEQNSSGTDGVVPVENRTVRIPTVNENCFEMDFTGGSKGFAYGGGYNCISHSVSSSSMEVGVVPDGGSVADVSYPYGGPATSGADPGTQRAVPLTSAEREARVMRYREKRKNRKFEKT

SEQ ID NO: 27698 - DNA, 2020 bp, Arabidopsis thaliana
  misc_feature (1)..(2020): Ceres Seq. ID no. 12370951
  misc_feature: MA Experiment ID: 108474 Result: Up-regulated in Transcription
  misc_feature: MA Experiment 108474 PARAMETER Experiment Name: At_Drought_Flowers_cDNA_P Parameter: Timepoint (hr) Value: null
  misc_feature: MA Experiment 108474 PARAMETER Experiment Name: At_Drought_Flowers_cDNA_P Parameter: Treatment Value: Drought vs. No Drought
  misc_feature: MA Experiment ID: 108488 Result: Up-regulated in Transcription
  misc_feature: MA Experiment ID: 108576 Result: Down-regulated in Transcription
  misc_feature: MA Experiment 108576 PARAMETER Experiment Name: At_42deg_Heat_cDNA_P Parameter: Temperature (deg C) Value: 42 vs. 22
  misc_feature: MA Experiment 108576 PARAMETER Experiment Name: At_42deg_Heat_cDNA_P Parameter: Timepoint (hr) Value: 1
  misc_feature: MA Experiment 108576 PARAMETER Experiment Name: At_42deg_Heat_cDNA_P Parameter: Tissue Value: Aerial
  misc_feature: MA Experiment ID: 108577 Result: Down-regulated in Transcription
  misc_feature: MA Experiment 108577 PARAMETER Experiment Name: At_42deg_Heat_cDNA_P Parameter: Temperature (deg C) Value: 42 vs. 22
  misc_feature: MA Experiment 108577 PARAMETER Experiment Name: At_42deg_Heat_cDNA_P Parameter: Timepoint (hr) Value: 6
  misc_feature: MA Experiment 108577 PARAMETER Experiment Name: At_42deg_Heat_cDNA_P Parameter: Tissue Value: Aerial
  misc_feature: MA Experiment ID: 108668 Result: Down-regulated in Transcription
  misc_feature: MA Experiment 108668 PARAMETER Experiment Name: At_2mM_SA_cDNA_P Parameter: Plant Line Value: WS
  misc_feature: MA Experiment 108668 PARAMETER Experiment Name: At_2mM_SA_cDNA_P Parameter: Timepoint (hr) Value: 6
  misc_feature: MA Experiment 108668 PARAMETER Experiment Name: At_2mM_SA_cDNA_P Parameter: Treatment Value: 2mM SA vs. No Treatment
  misc_feature: MA Experiment ID: 20000072 Result: Down-regulated in Transcription
  misc_feature: MA Experiment 20000072 PARAMETER Experiment Name: At_100uM_ABA_Mutants_cDNA_P Parameter: Plant Line Value: CS8105
  misc_feature: MA Experiment 20000072 PARAMETER Experiment Name: At_100uM_ABA_Mutants_cDNA_P Parameter: Timepoint (hr) Value: 6
  misc_feature: MA Experiment 20000072 PARAMETER Experiment Name: At_100uM_ABA_Mutants_cDNA_P Parameter: Tissue Value: Aerial
  misc_feature: MA Experiment 20000072 PARAMETER Experiment Name: At_100uM_ABA_Mutants_cDNA_P Parameter: Treatment Value: 100uM ABA vs. No Treatment
  misc_feature: MA Experiment ID: 20000087 Result: Down-regulated in Transcription
  misc_feature: MA Experiment 20000087 PARAMETER Experiment Name: At_100uM_ABA_Mutants_cDNA_P Parameter: Plant Line Value: WS
  misc_feature: MA Experiment 20000087 PARAMETER Experiment Name: At_100uM_ABA_Mutants_cDNA_P Parameter: Timepoint (hr) Value: 6
  misc_feature: MA Experiment 20000087 PARAMETER Experiment Name: At_100uM_ABA_Mutants_cDNA_P Parameter: Tissue Value: Aerial
  misc_feature: MA Experiment 20000087 PARAMETER Experiment Name: At_100uM_ABA_Mutants_cDNA_P Parameter: Treatment Value: 100uM ABA vs. No Treatment
  misc_feature: MA Experiment ID: 20000113 Result: Down-regulated in Transcription
  misc_feature: MA Experiment 20000113 PARAMETER Experiment Name: At_42deg_Heat_cDNA_P Parameter: Temperature (deg C) Value: 42 vs. 22
  misc_feature: MA Experiment 20000113 PARAMETER Experiment Name: At_42deg_Heat_cDNA_P Parameter: Timepoint (hr) Value: 8
  misc_feature: MA Experiment 20000113 PARAMETER Experiment Name: At_42deg_Heat_cDNA_P Parameter: Tissue Value: Aerial
  misc_feature: MA Experiment ID: 20000173 Result: Down-regulated in Transcription
  misc_feature: MA Experiment 20000173 PARAMETER Experiment Name: At_42deg_Heat_P Parameter: Age (day) Value: 14
  misc_feature: MA Experiment 20000173 PARAMETER Experiment Name: At_42deg_Heat_P Parameter: Organism Value: A. thaliana
  misc_feature: MA Experiment 20000173 PARAMETER Experiment Name: At_42deg_Heat_P Parameter: Plant Line Value: WS
  misc_feature: MA Experiment 20000173 PARAMETER Experiment Name: At_42deg_Heat_P Parameter: Temperature (deg C) Value: 42 vs. 22
  misc_feature: MA Experiment 20000173 PARAMETER Experiment Name: At_42deg_Heat_P Parameter: Timepoint (hr) Value: 6
  misc_feature: MA Experiment 20000173 PARAMETER Experiment Name: At_42deg_Heat_P Parameter: Tissue Value: Aerial
  misc_feature: MA Experiment ID: 20000224 Result: Up-regulated in Transcription
  misc_feature: MA Experiment ID: 20000496 Result: Up-regulated in Transcription
  misc_feature: MA Experiment 20000496 PARAMETER Experiment Name: At_Guard_Cells_P Parameter: Harvest Date Value: 7/19/2002
  misc_feature: MA Experiment 20000496 PARAMETER Experiment Name: At_Guard_Cells_P Parameter: Organism Value: Canola
  misc_feature: MA Experiment 20000496 PARAMETER Experiment Name: At_Guard_Cells_P Parameter: Tissue Value: Guard Cells vs. Leaves
  misc_feature: MA Experiment ID: 20000573 Result: Down-regulated in Transcription
  misc_feature: MA Experiment 20000573 PARAMETER Experiment Name: At_100uM_ABA_Mutants__P Parameter: Organism Value: A. thaliana
  misc_feature: MA Experiment 20000573 PARAMETER Experiment Name: At_100uM_ABA_Mutants__P Parameter: Plant Line Value: CS22 vs. Ler wt
  misc_feature: MA Experiment 20000573 PARAMETER Experiment Name: At_100uM_ABA_Mutants__P Parameter: Timepoint (hr) Value: N/A
  misc_feature: MA Experiment 20000573 PARAMETER Experiment Name: At_100uM_ABA_Mutants__P Parameter: Tissue Value: Whole Plant
  misc_feature: MA Experiment 20000573 PARAMETER Experiment Name: At_100uM_ABA_Mutants__P Parameter: Treatment Value: None
  misc_feature: MA Experiment ID: 20001248 Result: Down-regulated in Transcription
  misc_feature: MA Experiment 20001248 PARAMETER Experiment Name: At_Far-red-induction_P Parameter: Age (day) Value: 7
  misc_feature: MA Experiment 20001248 PARAMETER Experiment Name: At_Far-red-induction_P Parameter: Light Value: Far-red vs. White
  misc_feature: MA Experiment 20001248 PARAMETER Experiment Name: At_Far-red-induction_P Parameter: Organism Value: A. thaliana
  misc_feature: MA Experiment 20001248 PARAMETER Experiment Name: At_Far-red-induction_P Parameter: Plant Line Value: Columbia
  misc_feature: MA Experiment 20001248 PARAMETER Experiment Name: At_Far-red-induction_P Parameter: Timepoint (hr) Value: 4
  misc_feature: MA Experiment 20001248 PARAMETER Experiment Name: At_Far-red-induction_P Parameter: Tissue Value: Whole Plant
  misc_feature: MA Experiment ID: 20001905 Result: Down-regulated in Transcription
  misc_feature: MA Experiment 20001905 PARAMETER Experiment Name: At_Drought_Reproduction_P Parameter: Age (day) Value: 40
  misc_feature: MA Experiment 20001905 PARAMETER Experiment Name: At_Drought_Reproduction_P Parameter: Organism Value: A. thaliana
  misc_feature: MA Experiment 20001905 PARAMETER Experiment Name: At_Drought_Reproduction_P Parameter: Plant Line Value: WS
  misc_feature: MA Experiment 20001905 PARAMETER Experiment Name: At_Drought_Reproduction_P Parameter: Timepoint (day) Value: 10
  misc_feature: MA Experiment 20001905 PARAMETER Experiment Name: At_Drought_Reproduction_P Parameter: Tissue Value: Rosettes
  misc_feature: MA Experiment 20001905 PARAMETER Experiment Name: At_Drought_Reproduction_P Parameter: Treatment Value: Drought vs. No Drought
aacaaacactctctacaaaaacactactctttccttcttcttctctctactctattctaattctaaagagagagagaaaagctatggatggatatgaagctactaggattgtgctctctagaatccaaagcttagaccctgaaaacgcatcaaagatcatgggtcttctccttcttcaagatcacggtgagaaagagatgataaggctagcttttggtccagagactcttgttcactctgttatagtaaaagccaagaaagagttaggtctcatgaactgttcaaggtctccgtggagtcatcaagatgagttgattagccctaagaacaaccgtggctcttcactcaatccagcttctttgcccttttacgctaatggaggaagatcttctagggatttaaccaacgatttcgagctcatggatgatatgaactccagaagtactgattttttgggctctgtgcatgcgagaagcggtagctgcgttttggacggtttagggtatggtggtgattctgatttagggtttggaggtgtgccctgttcttacttcgctagaggcttctgcaaaaacggagctagctgcagattcgtccacagtgatggaggagctgatttggttggctccccaagcagaatcgaccttcttaggtctaactcggtacccccaagacttgctcaccacttcatgactcgctcttctctcccttctttttcacctaaaggtgttaacttgcagcaaaacgatgttcaaagagctgctgctgctttgatgataggagatgaattgcagaagcttggaagatggagacctgaaaggattgatctttctgctatggcttgtccagcttcaagacagatctatctgacattccctgccgacagtaggttcagggaggaagatgtgtccaattacttcagtacttttggaccagttcaagatgtgaggataccatatcagcaaaagagaatgtttggttttgtgacatttgtgtaccctgagactgttaagagcattctcgccaaagggaatcctcactttgtgtgtgattccagagttcttgtcaagccttacaaggagaaaggcaaagtccctgacaaatacagaactaaccaaacaacagagcgagaactgtccccaacaggccttgattctagccctagggacgttctaggagggagagggttttataacaacactcaagatgtgttgtggaggagtaagtttgaagaagagattcttgaacttcagagcagaaggctgatgaatctgcagcttcttgacgtcaagaagcatttccaactcaattcccctaccaacattcactctccgaatcctttcagccaatcacttatatctccacgcccattgtccgtgatcaagagagagtatgatggaggagagaaagggaaaggaagttctaaagaaggatctgatgatgatacaatgaatctaccagagaggttggaggatagcttgccagatagtccgtttgcatcgccccgctcatcatttgcttctgtttgctgattctgctgacaataacggatcggatctgtggtcgccttcttctgataatgatgataattctactccttctacactctccgactccttcaactctttcaactaccaaatgccaaggttaccggcgattggaatgttacccggtaggggtggaccaacctgtcgtgttgggatataaacaggaagtgaagtaagaaaagaaaaaaaactgataaaatagagagacccttaataaccaaaaagatgcagaggtgtaaaaaataaaaagcaggaaatttgatgtaagagatagagaagagaaagaggaagattgttgtaccatttctctagttttaatgtgttatgtgatgatggaccacacaagatgatgtaatatgatatgatatgatatatataatataggacaagaagtgtaatctctctaaagatatacaaaagaaaagagagattatcatttgagtttgaaaagtcaatatgttcttgtccgtgcc

SEQ ID NO: 27699 - protein, 509 aa, Arabidopsis thaliana
  peptide (1)..(509): Ceres Seq. ID no. 12370952
  misc_feature (299)..(355): Pfam Name: RNA recognition motif. (a.k.a. RRM, RBD, or RNP domain) Pfam Description: RNA recognition motif. (a.k.a. RRM, RBD, or RNP
  misc_feature (246)..(503): Homolog of NCBI NO: 33146675 NR Description: putative DAZ associated protein 1
  misc_feature (28)..(88): Homolog of NCBI NO: 15229435 NR Description: putative protein; protein id: At3g63450.1
  misc_feature (201)..(508): Homolog of NCBI NO: 15229435 NR Description: putative protein; protein id: At3g63450.1
  misc_feature (152)..(216): Homolog of NCBI NO: 38230504 NR Description: predicted protein [Populus alba x Populus tremula]
  misc_feature (462)..(501): Homolog of NCBI NO: 38230504 NR Description: predicted protein [Populus alba x Populus tremula]
  misc_feature (28)..(174): Homolog of NCBI NO: 38230504 NR Description: predicted protein [Populus alba x Populus tremula]
  misc_feature (203)..(451): Homolog of NCBI NO: 38230504 NR Description: predicted protein [Populus alba x Populus tremula]
  misc_feature (28)..(501): Homolog of NCBI NO: 19423979 NR Description: unknown protein [Arabidopsis thaliana]
  misc_feature (28)..(501): Homolog of NCBI NO: 15231090 NR Description: putative protein
  misc_feature (28)..(501): Homolog of NCBI NO: 21594547 NR Description: unknown [Arabidopsis thaliana]
QTLSTKTLLFPSSSLYSILILKRERKAMDGYEATRIVLSRIQSLDPENASKIMGLLLLQDHGEKEMIRLAFGPETLVHSVIVKAKKELGLMNCSRSPWSHQDELISPKNNRGSSLNPASLPFYANGGRSSRDLTNDFELMDDMNSRSTDFLGSVHARSGSCVLDGLGYGGDSDLGFGGVPCSYFARGFCKNGASCRFVHSDGGADLVGSPSRIDLLRSNSVPPRLAHHFMTRSSLPSFSPKGVNLQQNDVQRAAAALMIGDELQKLGRWRPERIDLSAMACPASRQIYLTFPADSRFREEDVSNYFSTFGPVQDVRIPYQQKRMFGFVTFVYPETVKSILAKGNPHFVCDSRVLVKPYKEKGKVPDKYRTNQTTERELSPTGLDSSPRDVLGGRGFYNNTQDVLWRSKFEEEILELQSRRLMNLQLLDVKKHFQLNSPTNIHSPNPFSQSLISPRPLSVIKREYDGGEKGKGSSKEGSDDDTMNLPERLEDSLPDSPFASPRSSFASVC

SEQ ID NO: 27700 - protein, 482 aa, Arabidopsis thaliana
  peptide (1)..(482): Ceres Seq. ID no. 12370953
  misc_feature (272)..(328): Pfam Name: RNA recognition motif. (a.k.a. RRM, RBD, or RNP domain) Pfam Description: RNA recognition motif. (a.k.a. RRM, RBD, or RNP
  misc_feature (219)..(476): Homolog of NCBI NO: 33146675 NR Description: putative DAZ associated protein 1
  misc_feature (1)..(61): Homolog of NCBI NO: 15229435 NR Description: putative protein; protein id: At3g63450.1
  misc_feature (174)..(481): Homolog of NCBI NO: 15229435 NR Description: putative protein; protein id: At3g63450.1
  misc_feature (125)..(189): Homolog of NCBI NO: 38230504 NR Description: predicted protein [Populus alba x Populus tremula]
  misc_feature (435)..(474): Homolog of NCBI NO: 38230504 NR Description: predicted protein [Populus alba x Populus tremula]
  misc_feature (1)..(147): Homolog of NCBI NO: 38230504 NR Description: predicted protein [Populus alba x Populus tremula]
  misc_feature (176)..(424): Homolog of NCBI NO: 38230504 NR Description: predicted protein [Populus alba x Populus tremula]
  misc_feature (1)..(474): Homolog of NCBI NO: 19423979 NR Description: unknown protein [Arabidopsis thaliana]
  misc_feature (1)..(474): Homolog of NCBI NO: 15231090 NR Description: putative protein
  misc_feature (1)..(474): Homolog of NCBI NO: 21594547 NR Description: unknown [Arabidopsis thaliana]
MDGYEATRIVLSRIQSLDPENASKIMGLLLLQDHGEKEMIRLAFGPETLVHSVIVKAKKELGLMNCSRSPWSHQDELISPKNNRGSSLNPASLPFYANGGRSSRDLTNDFELMDDMNSRSTDFLGSVHARSGSCVLDGLGYGGDSDLGFGGVPCSYFARGFCKNGASCRFVHSDGGADLVGSPSRIDLLRSNSVPPRLAHHFMTRSSLPSFSPKGVNLQQNDVQRAAAALMIGDELQKLGRWRPERIDLSAMACPASRQIYLTFPADSRFREEDVSNYFSTFGPVQDVRIPYQQKRMFGFVTFVYPETVKSILAKGNPHFVCDSRVLVKPYKEKGKVPDKYRTNQTTERELSPTGLDSSPRDVLGGRGFYNNTQDVLWRSKFEEEILELQSRRLMNLQLLDVKKHFQLNSPTNIHSPNPFSQSLISPRPLSVIKREYDGGEKGKGSSKEGSDDDTMNLPERLEDSLPDSPFASPRSSFASVC

SEQ ID NO: 27701 - protein, 457 aa, Arabidopsis thaliana
  peptide (1)..(457): Ceres Seq. ID no. 12370954
  misc_feature (247)..(303): Pfam Name: RNA recognition motif. (a.k.a. RRM, RBD, or RNP domain) Pfam Description: RNA recognition motif. (a.k.a. RRM, RBD, or RNP
  misc_feature (194)..(451): Homolog of NCBI NO: 33146675 NR Description: putative DAZ associated protein 1
  misc_feature (1)..(36): Homolog of NCBI NO: 15229435 NR Description: putative protein; protein id: At3g63450.1
  misc_feature (149)..(456): Homolog of NCBI NO: 15229435 NR Description: putative protein; protein id: At3g63450.1
  misc_feature (100)..(164): Homolog of NCBI NO: 38230504 NR Description: predicted protein [Populus alba x Populus tremula]
  misc_feature (410)..(449): Homolog of NCBI NO: 38230504 NR Description: predicted protein [Populus alba x Populus tremula]
  misc_feature (1)..(122): Homolog of NCBI NO: 38230504 NR Description: predicted protein [Populus alba x Populus tremula]
  misc_feature (151)..(399): Homolog of NCBI NO: 38230504 NR Description: predicted protein [Populus alba x Populus tremula]
  misc_feature (1)..(449): Homolog of NCBI NO: 19423979 NR Description: unknown protein [Arabidopsis thaliana]
  misc_feature (1)..(449): Homolog of NCBI NO: 15231090 NR Description: putative protein
  misc_feature (1)..(449): Homolog of NCBI NO: 21594547 NR Description: unknown [Arabidopsis thaliana]
MGLLLLQDHGEKEMIRLAFGPETLVHSVIVKAKKELGLMNCSRSPWSHQDELISPKNNRGSSLNPASLPFYANGGRSSRDLTNDFELMDDMNSRSTDFLGSVHARSGSCVLDGLGYGGDSDLGFGGVPCSYFARGFCKNGASCRFVHSDGGADLVGSPSRIDLLRSNSVPPRLAHHFMTRSSLPSFSPKGVNLQQNDVQRAAAALMIGDELQKLGRWRPERIDLSAMACPASRQIYLTFPADSRFREEDVSNYFSTFGPVQDVRIPYQQKRMFGFVTFVYPETVKSILAKGNPHFVCDSRVLVKPYKEKGKVPDKYRTNQTTERELSPTGLDSSPRDVLGGRGFYNNTQDVLWRSKFEEEILELQSRRLMNLQLLDVKKHFQLNSPTNIHSPNPFSQSLISPRPLSVIKREYDGGEKGKGSSKEGSDDDTMNLPERLEDSLPDSPFASPRSSFASVC

SEQ ID NO: 27702 - DNA, 1033 bp, Arabidopsis thaliana
  misc_feature (1)..(1033): Ceres Seq. ID no. 12340116
  misc_feature: MA Experiment ID: 108434 Result: Up-regulated in Transcription
  misc_feature: MA Experiment 108434 PARAMETER Experiment Name: At_Root_Tips_cDNA_P Parameter: Tissue Value: Root Tips
  misc_feature: MA Experiment ID: 108488 Result: Up-regulated in Transcription
  misc_feature: MA Experiment ID: 108573 Result: Up-regulated in Transcription
  misc_feature: MA Experiment 108573 PARAMETER Experiment Name: At_Drought_cDNA_P Parameter: Timepoint (hr) Value: 6
  misc_feature: MA Experiment 108573 PARAMETER Experiment Name: At_Drought_cDNA_P Parameter: Tissue Value: Aerial
  misc_feature: MA Experiment 108573 PARAMETER Experiment Name: At_Drought_cDNA_P Parameter: Treatment Value: Drought vs. No Drought
  misc_feature: MA Experiment ID: 108577 Result: Up-regulated in Transcription
  misc_feature: MA Experiment 108577 PARAMETER Experiment Name: At_42deg_Heat_cDNA_P Parameter: Temperature (deg C) Value: 42 vs. 22
  misc_feature: MA Experiment 108577 PARAMETER Experiment Name: At_42deg_Heat_cDNA_P Parameter: Timepoint (hr) Value: 6
  misc_feature: MA Experiment 108577 PARAMETER Experiment Name: At_42deg_Heat_cDNA_P Parameter: Tissue Value: Aerial
  misc_feature: MA Experiment ID: 20000087 Result: Down-regulated in Transcription
  misc_feature: MA Experiment 20000087 PARAMETER Experiment Name: At_100uM_ABA_Mutants_cDNA_P Parameter: Plant Line Value: WS
  misc_feature: MA Experiment 20000087 PARAMETER Experiment Name: At_100uM_ABA_Mutants_cDNA_P Parameter: Timepoint (hr) Value: 6
  misc_feature: MA Experiment 20000087 PARAMETER Experiment Name: At_100uM_ABA_Mutants_cDNA_P Parameter: Tissue Value: Aerial
  misc_feature: MA Experiment 20000087 PARAMETER Experiment Name: At_100uM_ABA_Mutants_cDNA_P Parameter: Treatment Value: 100uM ABA vs. No Treatment
  misc_feature: MA Experiment ID: 20000090 Result: Down-regulated in Transcription
  misc_feature: MA Experiment ID: 20000093 Result: Up-regulated in Transcription
  misc_feature: MA Experiment 20000093 PARAMETER Experiment Name: At_42deg_Heat_cDNA_P Parameter: Temperature (deg C) Value: 42 vs. 22
  misc_feature: MA Experiment 20000093 PARAMETER Experiment Name: At_42deg_Heat_cDNA_P Parameter: Timepoint (hr) Value: 0.5
  misc_feature: MA Experiment 20000093 PARAMETER Experiment Name: At_42deg_Heat_cDNA_P Parameter: Tissue Value: Aerial
  misc_feature: MA Experiment ID: 20000112 Result: Up-regulated in Transcription
  misc_feature: MA Experiment 20000112 PARAMETER Experiment Name: At_42deg_Heat_cDNA_P Parameter: Temperature (deg C) Value: 42 vs. 22
  misc_feature: MA Experiment 20000112 PARAMETER Experiment Name: At_42deg_Heat_cDNA_P Parameter: Timepoint (hr) Value: 2
  misc_feature: MA Experiment 20000112 PARAMETER Experiment Name: At_42deg_Heat_cDNA_P Parameter: Tissue Value: Aerial
  misc_feature: MA Experiment ID: 20000113 Result: Up-regulated in Transcription
  misc_feature: MA Experiment 20000113 PARAMETER Experiment Name: At_42deg_Heat_cDNA_P Parameter: Temperature (deg C) Value: 42 vs. 22
  misc_feature: MA Experiment 20000113 PARAMETER Experiment Name: At_42deg_Heat_cDNA_P Parameter: Timepoint (hr) Value: 8
  misc_feature: MA Experiment 20000113 PARAMETER Experiment Name: At_42deg_Heat_cDNA_P Parameter: Tissue Value: Aerial
  misc_feature: MA Experiment ID: 20000144 Result: Up-regulated in Transcription
  misc_feature: MA Experiment 20000144 PARAMETER Experiment Name: At_42deg_Heat_cDNA_P Parameter: Temperature (deg C) Value: 42 vs. 22
  misc_feature: MA Experiment 20000144 PARAMETER Experiment Name: At_42deg_Heat_cDNA_P Parameter: Timepoint (hr) Value: 1
  misc_feature: MA Experiment 20000144 PARAMETER Experiment Name: At_42deg_Heat_cDNA_P Parameter: Tissue Value: Aerial
  misc_feature: MA Experiment ID: 20000173 Result: Up-regulated in Transcription
  misc_feature: MA Experiment 20000173 PARAMETER Experiment Name: At_42deg_Heat_P Parameter: Age (day) Value: 14
  misc_feature: MA Experiment 20000173 PARAMETER Experiment Name: At_42deg_Heat_P Parameter: Organism Value: A. thaliana
  misc_feature: MA Experiment 20000173 PARAMETER Experiment Name: At_42deg_Heat_P Parameter: Plant Line Value: WS
  misc_feature: MA Experiment 20000173 PARAMETER Experiment Name: At_42deg_Heat_P Parameter: Temperature (deg C) Value: 42 vs. 22
  misc_feature: MA Experiment 20000173 PARAMETER Experiment Name: At_42deg_Heat_P Parameter: Timepoint (hr) Value: 6
  misc_feature: MA Experiment 20000173 PARAMETER Experiment Name: At_42deg_Heat_P Parameter: Tissue Value: Aerial
  misc_feature: MA Experiment ID: 20000224 Result: Down-regulated in Transcription
  misc_feature: MA Experiment ID: 20000227 Result: Up-regulated in Transcription
  misc_feature: MA Experiment 20000227 PARAMETER Experiment Name: At_Root-Tips-vs-Tops_P Parameter: Tissue Value: Root Tips vs. Root Tops
  misc_feature: MA Experiment ID: 20000286 Result: Up-regulated in Transcription
  misc_feature: MA Experiment 20000286 PARAMETER Experiment Name: At_Open_Flower_P Parameter: Age (day) Value: 21
  misc_feature: MA Experiment 20000286 PARAMETER Experiment Name: At_Open_Flower_P Parameter: Plant Line Value: WS
  misc_feature: MA Experiment 20000286 PARAMETER Experiment Name: At_Open_Flower_P Parameter: Tissue Value: Half Open vs. Whole Plant
  misc_feature: MA Experiment ID: 20000437 Result: Down-regulated in Transcription
  misc_feature: MA Experiment 20000437 PARAMETER Experiment Name: At_Drought_P Parameter: Age (day) Value: 8
  misc_feature: MA Experiment 20000437 PARAMETER Experiment Name: At_Drought_P Parameter: Organism Value: A. thaliana
  misc_feature: MA Experiment 20000437 PARAMETER Experiment Name: At_Drought_P Parameter: Plant Line Value: WS
  misc_feature: MA Experiment 20000437 PARAMETER Experiment Name: At_Drought_P Parameter: Timepoint (hr) Value: 24
  misc_feature: MA Experiment 20000437 PARAMETER Experiment Name: At_Drought_P Parameter: Tissue Value: Whole Plant
  misc_feature: MA Experiment 20000437 PARAMETER Experiment Name: At_Drought_P Parameter: Treatment Value: Drought vs. No Drought
  misc_feature: MA Experiment ID: 20001451 Result: Up-regulated in Transcription
  misc_feature: MA Experiment 20001451 PARAMETER Experiment Name: At_Far-red-induction_P Parameter: Age (day) Value: 7
  misc_feature: MA Experiment 20001451 PARAMETER Experiment Name: At_Far-red-induction_P Parameter: Light Value: Far-red vs. White
  misc_feature: MA Experiment 20001451 PARAMETER Experiment Name: At_Far-red-induction_P Parameter: Organism Value: A. thaliana
  misc_feature: MA Experiment 20001451 PARAMETER Experiment Name: At_Far-red-induction_P Parameter: Plant Line Value: Columbia
  misc_feature: MA Experiment 20001451 PARAMETER Experiment Name: At_Far-red-induction_P Parameter: Timepoint (hr) Value: 24
  misc_feature: MA Experiment 20001451 PARAMETER Experiment Name: At_Far-red-induction_P Parameter: Tissue Value: Whole Plant
  misc_feature: MA Experiment ID: 20001555 Result: Down-regulated in Transcription
  misc_feature: MA Experiment 20001555 PARAMETER Experiment Name: At_Drought_Soil_Dry_P Parameter: Age (day) Value: 24
  misc_feature: MA Experiment 20001555 PARAMETER Experiment Name: At_Drought_Soil_Dry_P Parameter: Organism Value: A. thaliana
  misc_feature: MA Experiment 20001555 PARAMETER Experiment Name: At_Drought_Soil_Dry_P Parameter: Plant Line Value: WS
  misc_feature: MA Experiment 20001555 PARAMETER Experiment Name: At_Drought_Soil_Dry_P Parameter: Post Timepoint (hr) Value: None
  misc_feature: MA Experiment 20001555 PARAMETER Experiment Name: At_Drought_Soil_Dry_P Parameter: Post-Treatment Value: None
  misc_feature: MA Experiment 20001555 PARAMETER Experiment Name: At_Drought_Soil_Dry_P Parameter: Timepoint (day) Value: 10
  misc_feature: MA Experiment 20001555 PARAMETER Experiment Name: At_Drought_Soil_Dry_P Parameter: Treatment Value: Drought vs. No Drought
  misc_feature: MA Experiment ID: 20001556 Result: Down-regulated in Transcription
  misc_feature: MA Experiment 20001556 PARAMETER Experiment Name: At_Drought_Soil_Dry_P Parameter: Age (day) Value: 26
  misc_feature: MA Experiment 20001556 PARAMETER Experiment Name: At_Drought_Soil_Dry_P Parameter: Organism Value: A. thaliana
  misc_feature: MA Experiment 20001556 PARAMETER Experiment Name: At_Drought_Soil_Dry_P Parameter: Plant Line Value: WS
  misc_feature: MA Experiment 20001556 PARAMETER Experiment Name: At_Drought_Soil_Dry_P Parameter: Post Timepoint (hr) Value: None
  misc_feature: MA Experiment 20001556 PARAMETER Experiment Name: At_Drought_Soil_Dry_P Parameter: Post-Treatment Value: None
  misc_feature: MA Experiment 20001556 PARAMETER Experiment Name: At_Drought_Soil_Dry_P Parameter: Timepoint (day) Value: 12
  misc_feature: MA Experiment 20001556 PARAMETER Experiment Name: At_Drought_Soil_Dry_P Parameter: Treatment Value: Drought vs. No Drought
  misc_feature: MA Experiment ID: 20001558 Result: Up-regulated in Transcription
  misc_feature: MA Experiment 20001558 PARAMETER Experiment Name: At_Drought_Soil_Dry_P Parameter: Age (day) Value: 27
  misc_feature: MA Experiment 20001558 PARAMETER Experiment Name: At_Drought_Soil_Dry_P Parameter: Organism Value: A. thaliana
  misc_feature: MA Experiment 20001558 PARAMETER Experiment Name: At_Drought_Soil_Dry_P Parameter: Plant Line Value: WS
  misc_feature: MA Experiment 20001558 PARAMETER Experiment Name: At_Drought_Soil_Dry_P Parameter: Post Timepoint (hr) Value: 6
  misc_feature: MA Experiment 20001558 PARAMETER Experiment Name: At_Drought_Soil_Dry_P Parameter: Post-Treatment Value: Re-Water vs. No Drought
  misc_feature: MA Experiment 20001558 PARAMETER Experiment Name: At_Drought_Soil_Dry_P Parameter: Timepoint (day) Value: 13
  misc_feature: MA Experiment 20001558 PARAMETER Experiment Name: At_Drought_Soil_Dry_P Parameter: Treatment Value: Drought vs. No Drought
  misc_feature: MA Experiment ID: 20001757 Result: Up-regulated in Transcription
  misc_feature: MA Experiment 20001757 PARAMETER Experiment Name: At_50mM_NH4NO3_L-to-H_P Parameter: Timepoint (hr) Value: 6
  misc_feature: MA Experiment 20001757 PARAMETER Experiment Name: At_50mM_NH4NO3_L-to-H_P Parameter: Tissue Value: Leaf
  misc_feature: MA Experiment 20001757 PARAMETER Experiment Name: At_50mM_NH4NO3_L-to-H_P Parameter: Treatment Value: 50mM NH4NO3 vs 100mM Mannitol
acacagcaccacaaactccatagctagctagagagtaaaaagaacaaagatgtcgaaagaagtgagcgaagaaggcaaaacccaccatggaaaagactacgtggatcctccaccagctcctcttctcgacatgggtgagctcaaatcctggtctttctacagagctctcatcgctgagttcatcgctacactcctcttcctctacgtcaccgtcgctactgtcatcggccacaagaagcaaaccggtccttgtgacggcgttggtttacttggtatcgcttgggctttcggtggtatgatcttcgtcctcgtctactgcaccgccggtatctctggtggtcacattaacccagctgtgactttcggtctgttcttggcccgtaaggtctctttggtgcgagctcttggttacatgatagctcagtgtcttggagccatttgtggtgtgggtttcgtgaaagctttcatgaaaactccttacaacactcttggtggaggagctaacaccgtagctgacggttacagcaaaggaactgctctcggagctgagattattggaactttcgttcttgtttacaccgttttctctgcaactgaccctaagagaagcgctcgtgactctcacatccccgttttggctccacttccaattggatttgctgtgttcatggtgcatttggctactatccccattactggaactggtatcaacccagctagaagctttggtgctgctgttatctacaacaacgagaaggcgtgggatgaccaatggatcttttgggttggtccgttcttgggagcactagctgcagcagcttaccaccaatacatattgagagcttcagcaattaaggccttgggctcgttccgaagcaacgcaaccaattaatgaaggctttttttaagataatgtcaagaaacaactttaagatttatatgctttaattattatttgttgttcttttgtgtgtaatgagagagatggtggattgatgttaattatgaaatggctcagtgacttctatttcct

SEQ ID NO: 27703 - protein, 280 aa, Arabidopsis thaliana; identical to SEQ ID NO: 24848
  peptide (1)..(280): Ceres Seq. ID no. 12340117
  misc_feature (1)..(280): Homolog of NCBI NO: 7441253 NR Description: probable aquaporin - spinach
  misc_feature (1)..(280): Homolog of NCBI NO: 7441276 NR Description: mipE protein - common ice plant
  misc_feature (1)..(280): Homolog of NCBI NO: 1168480 NR Description: AQUAPORIN
  misc_feature (1)..(280): Homolog of NCBI NO: 17940742 NR Description: aquaporin-like protein [Petunia x hybrida]
  misc_feature (1)..(280): Homolog of NCBI NO: 8071628 NR Description: putative aquaporin PIP2-2 [Vitis berlandieri x
  misc_feature (1)..(280): Homolog of NCBI NO: 15227302 NR Description: putative plasma membrane intrinsic protein
  misc_feature (1)..(280): Homolog of NCBI NO: 11119335 NR Description: aquaporin [Brassica oleracea]
  misc_feature (1)..(280): Homolog of NCBI NO: 2306917 NR Description: plasma membrane intrinsic protein [Arabidopsis
  misc_feature (1)..(280): Homolog of NCBI NO: 1688296 NR Description: plasma membrane intrinsic protein PIP3
  misc_feature (1)..(280): Homolog of NCBI NO: 15236267 NR Description: plasma membrane intrinsic protein (SIMIP)

SEQ ID NO: 27704 - protein, 253 aa, Arabidopsis thaliana; identical to SEQ ID NO: 24849
  peptide (1)..(253): Ceres Seq. ID no. 12340118
  misc_feature (1)..(253): Homolog of NCBI NO: 7441253 NR Description: probable aquaporin - spinach
  misc_feature (1)..(253): Homolog of NCBI NO: 7441276 NR Description: mipE protein - common ice plant
  misc_feature (1)..(253): Homolog of NCBI NO: 1168480 NR Description: AQUAPORIN
  misc_feature (1)..(253): Homolog of NCBI NO: 17940742 NR Description: aquaporin-like protein [Petunia x hybrida]
  misc_feature (1)..(253): Homolog of NCBI NO: 8071628 NR Description: putative aquaporin PIP2-2 [Vitis berlandieri x
  misc_feature (1)..(253): Homolog of NCBI NO: 15227302 NR Description: putative plasma membrane intrinsic protein
  misc_feature (1)..(253): Homolog of NCBI NO: 11119335 NR Description: aquaporin [Brassica oleracea]
  misc_feature (1)..(253): Homolog of NCBI NO: 2306917 NR Description: plasma membrane intrinsic protein [Arabidopsis
  misc_feature (1)..(253): Homolog of NCBI NO: 1688296 NR Description: plasma membrane intrinsic protein PIP3
  misc_feature (1)..(253): Homolog of NCBI NO: 15236267 NR Description: plasma membrane intrinsic protein (SIMIP)

SEQ ID NO: 27705 - protein, 198 aa, Arabidopsis thaliana; identical to SEQ ID NO: 24850
  peptide (1)..(198): Ceres Seq. ID no. 12340119
  misc_feature (1)..(198): Homolog of NCBI NO: 7441253 NR Description: probable aquaporin - spinach
  misc_feature (1)..(198): Homolog of NCBI NO: 7441276 NR Description: mipE protein - common ice plant
  misc_feature (1)..(198): Homolog of NCBI NO: 1168480 NR Description: AQUAPORIN
  misc_feature (1)..(198): Homolog of NCBI NO: 17940742 NR Description: aquaporin-like protein [Petunia x hybrida]
  misc_feature (1)..(198): Homolog of NCBI NO: 8071628 NR Description: putative aquaporin PIP2-2 [Vitis berlandieri x
  misc_feature (1)..(198): Homolog of NCBI NO: 15227302 NR Description: putative plasma membrane intrinsic protein
  misc_feature (1)..(198): Homolog of NCBI NO: 11119335 NR Description: aquaporin [Brassica oleracea]
  misc_feature (1)..(198): Homolog of NCBI NO: 2306917 NR Description: plasma membrane intrinsic protein [Arabidopsis
  misc_feature (1)..(198): Homolog of NCBI NO: 1688296 NR Description: plasma membrane intrinsic protein PIP3
  misc_feature (1)..(198): Homolog of NCBI NO: 15236267 NR Description: plasma membrane intrinsic protein (SIMIP)

SEQ ID NO: 27706 - DNA, 1789 bp, Arabidopsis thaliana
  misc_feature (1)..(1789): Ceres Seq. ID no. 13592258
  misc_feature: MA Experiment ID: 108434 Result: Down-regulated in Transcription
  misc_feature: MA Experiment 108434 PARAMETER Experiment Name: At_Root_Tips_cDNA_P Parameter: Tissue Value: Root Tips
  misc_feature: MA Experiment ID: 108461 Result: Up-regulated in Transcription
  misc_feature: MA Experiment 108461 PARAMETER Experiment Name: At_Germinating_Seeds_cDNA_P Parameter: Age (day) Value: 1 vs. 0
  misc_feature: MA Experiment 108461 PARAMETER Experiment Name: At_Germinating_Seeds_cDNA_P Parameter: Tissue Value: Germinating Seeds
  misc_feature: MA Experiment ID: 108462 Result: Up-regulated in Transcription
  misc_feature: MA Experiment 108462 PARAMETER Experiment Name: At_Germinating_Seeds_cDNA_P Parameter: Age (day) Value: 2 vs. 0
  misc_feature: MA Experiment 108462 PARAMETER Experiment Name: At_Germinating_Seeds_cDNA_P Parameter: Tissue Value: Germinating Seeds
  misc_feature: MA Experiment ID: 108463 Result: Up-regulated in Transcription
  misc_feature: MA Experiment 108463 PARAMETER Experiment Name: At_Germinating_Seeds_cDNA_P Parameter: Age (day) Value: 3 vs. 0
  misc_feature: MA Experiment 108463 PARAMETER Experiment Name: At_Germinating_Seeds_cDNA_P Parameter: Tissue Value: Germinating Seeds
  misc_feature: MA Experiment ID: 108464 Result: Up-regulated in Transcription
  misc_feature: MA Experiment 108464 PARAMETER Experiment Name: At_Germinating_Seeds_cDNA_P Parameter: Age (day) Value: 4 vs. 0
  misc_feature: MA Experiment 108464 PARAMETER Experiment Name: At_Germinating_Seeds_cDNA_P Parameter: Tissue Value: Germinating Seeds
  misc_feature: MA Experiment ID: 108488 Result: Up-regulated in Transcription
  misc_feature: MA Experiment ID: 108595 Result: Up-regulated in Transcription
  misc_feature: MA Experiment 108595 PARAMETER Experiment Name: At_Ler-pi_Ovule_cDNA_P Parameter: Plant Line Value: null
  misc_feature: MA Experiment ID: 20000069 Result: Down-regulated in Transcription
  misc_feature: MA Experiment 20000069 PARAMETER Experiment Name: At_100uM_ABA_Mutants_cDNA_P Parameter: Plant Line Value: CS23
  misc_feature: MA Experiment 20000069 PARAMETER Experiment Name: At_100uM_ABA_Mutants_cDNA_P Parameter: Timepoint (hr) Value: 6
  misc_feature: MA Experiment 20000069 PARAMETER Experiment Name: At_100uM_ABA_Mutants_cDNA_P Parameter: Tissue Value: Aerial
  misc_feature: MA Experiment 20000069 PARAMETER Experiment Name: At_100uM_ABA_Mutants_cDNA_P Parameter: Treatment Value: 100uM ABA vs. No Treatment
  misc_feature: MA Experiment ID: 20000070 Result: Down-regulated in Transcription
  misc_feature: MA Experiment 20000070 PARAMETER Experiment Name: At_100uM_ABA_Mutants_cDNA_P Parameter: Plant Line Value: CS24
  misc_feature: MA Experiment 20000070 PARAMETER Experiment Name: At_100uM_ABA_Mutants_cDNA_P Parameter: Timepoint (hr) Value: 6
  misc_feature: MA Experiment 20000070 PARAMETER Experiment Name: At_100uM_ABA_Mutants_cDNA_P Parameter: Tissue Value: Aerial
  misc_feature: MA Experiment 20000070 PARAMETER Experiment Name: At_100uM_ABA_Mutants_cDNA_P Parameter: Treatment Value: 100uM ABA vs. No Treatment
  misc_feature: MA Experiment ID: 20000071 Result: Down-regulated in Transcription
  misc_feature: MA Experiment 20000071 PARAMETER Experiment Name: At_100uM_ABA_Mutants_cDNA_P Parameter: Plant Line Value: CS8104
  misc_feature: MA Experiment 20000071 PARAMETER Experiment Name: At_100uM_ABA_Mutants_cDNA_P Parameter: Timepoint (hr) Value: 6
  misc_feature: MA Experiment 20000071 PARAMETER Experiment Name: At_100uM_ABA_Mutants_cDNA_P Parameter: Tissue Value: Aerial
  misc_feature: MA Experiment 20000071 PARAMETER Experiment Name: At_100uM_ABA_Mutants_cDNA_P Parameter: Treatment Value: 100uM ABA vs. No Treatment
  misc_feature: MA Experiment ID: 20000072 Result: Down-regulated in Transcription
  misc_feature: MA Experiment 20000072 PARAMETER Experiment Name: At_100uM_ABA_Mutants_cDNA_P Parameter: Plant Line Value: CS8105
  misc_feature: MA Experiment 20000072 PARAMETER Experiment Name: At_100uM_ABA_Mutants_cDNA_P Parameter: Timepoint (hr) Value: 6
  misc_feature: MA Experiment 20000072 PARAMETER Experiment Name: At_100uM_ABA_Mutants_cDNA_P Parameter: Tissue Value: Aerial
  misc_feature: MA Experiment 20000072 PARAMETER Experiment Name: At_100uM_ABA_Mutants_cDNA_P Parameter: Treatment Value: 100uM ABA vs. No Treatment
  misc_feature: MA Experiment ID: 20000086 Result: Down-regulated in Transcription
  misc_feature: MA Experiment 20000086 PARAMETER Experiment Name: At_100uM_ABA_Mutants_cDNA_P Parameter: Plant Line Value: CS22
  misc_feature: MA Experiment 20000086 PARAMETER Experiment Name: At_100uM_ABA_Mutants_cDNA_P Parameter: Timepoint (hr) Value: 6
  misc_feature: MA Experiment 20000086 PARAMETER Experiment Name: At_100uM_ABA_Mutants_cDNA_P Parameter: Tissue Value: Aerial
  misc_feature: MA Experiment 20000086 PARAMETER Experiment Name: At_100uM_ABA_Mutants_cDNA_P Parameter: Treatment Value: 100uM ABA vs. No Treatment
  misc_feature: MA Experiment ID: 20000087 Result: Down-regulated in Transcription
  misc_feature: MA Experiment 20000087 PARAMETER Experiment Name: At_100uM_ABA_Mutants_cDNA_P Parameter: Plant Line Value: WS
  misc_feature: MA Experiment 20000087 PARAMETER Experiment Name: At_100uM_ABA_Mutants_cDNA_P Parameter: Timepoint (hr) Value: 6
  misc_feature: MA Experiment 20000087 PARAMETER Experiment Name: At_100uM_ABA_Mutants_cDNA_P Parameter: Tissue Value: Aerial
  misc_feature: MA Experiment 20000087 PARAMETER Experiment Name: At_100uM_ABA_Mutants_cDNA_P Parameter: Treatment Value: 100uM ABA vs. No Treatment
  misc_feature: MA Experiment ID: 20000088 Result: Down-regulated in Transcription
  misc_feature: MA Experiment 20000088 PARAMETER Experiment Name: At_100uM_ABA_Mutants_cDNA_P Parameter: Plant Line Value: Landsberg
  misc_feature: MA Experiment 20000088 PARAMETER Experiment Name: At_100uM_ABA_Mutants_cDNA_P Parameter: Timepoint (hr) Value: 6
  misc_feature: MA Experiment 20000088 PARAMETER Experiment Name: At_100uM_ABA_Mutants_cDNA_P Parameter: Tissue Value: Aerial
  misc_feature: MA Experiment 20000088 PARAMETER Experiment Name: At_100uM_ABA_Mutants_cDNA_P Parameter: Treatment Value: 100uM ABA vs. No Treatment
  misc_feature: MA Experiment ID: 20000090 Result: Down-regulated in Transcription
  misc_feature: MA Experiment ID: 20000111 Result: Up-regulated in Transcription
  misc_feature: MA Experiment 20000111 PARAMETER Experiment Name: At_42deg_Heat_cDNA_P Parameter: Temperature (deg C) Value: 42 vs. 22
  misc_feature: MA Experiment 20000111 PARAMETER Experiment Name: At_42deg_Heat_cDNA_P Parameter: Timepoint (hr) Value: 6
  misc_feature: MA Experiment 20000111 PARAMETER Experiment Name: At_42deg_Heat_cDNA_P Parameter: Tissue Value: Aerial
  misc_feature: MA Experiment ID: 20000117 Result: Down-regulated in Transcription
  misc_feature: MA Experiment 20000117 PARAMETER Experiment Name: At_100uM_ABA_Mutants_cDNA_P Parameter: Plant Line Value: Columbia
  misc_feature: MA Experiment 20000117 PARAMETER Experiment Name: At_100uM_ABA_Mutants_cDNA_P Parameter: Timepoint (hr) Value: 6
  misc_feature: MA Experiment 20000117 PARAMETER Experiment Name: At_100uM_ABA_Mutants_cDNA_P Parameter: Tissue Value: Aerial
  misc_feature: MA Experiment 20000117 PARAMETER Experiment Name: At_100uM_ABA_Mutants_cDNA_P Parameter: Treatment Value: 100uM ABA vs. No Treatment
  misc_feature: MA Experiment ID: 20000179 Result: Up-regulated in Transcription
  misc_feature: MA Experiment 20000179 PARAMETER Experiment Name: At_Germinating_Seeds_P Parameter: Age (hr) Value: 6 vs. 0
  misc_feature: MA Experiment 20000179 PARAMETER Experiment Name: At_Germinating_Seeds_P Parameter: Tissue Value: Germinating Seeds
  misc_feature: MA Experiment ID: 20000180 Result: Up-regulated in Transcription
  misc_feature: MA Experiment 20000180 PARAMETER Experiment Name: At_Germinating_Seeds_P Parameter: Age (hr) Value: 24 vs. 0
  misc_feature: MA Experiment 20000180 PARAMETER Experiment Name: At_Germinating_Seeds_P Parameter: Tissue Value: Germinating Seeds
  misc_feature: MA Experiment ID: 20000185 Result: Down-regulated in Transcription
  misc_feature: MA Experiment 20000185 PARAMETER Experiment Name: At_Roots__P Parameter: Age (day) Value: 7 vs. 21
  misc_feature: MA Experiment 20000185 PARAMETER Experiment Name: At_Roots__P Parameter: Organism Value: A. thaliana
  misc_feature: MA Experiment 20000185 PARAMETER Experiment Name: At_Roots__P Parameter: Tissue Value: Roots vs. Whole Plant
  misc_feature: MA Experiment ID: 20000438 Result: Up-regulated in Transcription
  misc_feature: MA Experiment 20000438 PARAMETER Experiment Name: At_Shoots__P Parameter: Age (day) Value: 14
  misc_feature: MA Experiment 20000438 PARAMETER Experiment Name: At_Shoots__P Parameter: Tissue Value: Shoots vs. Whole Plant
  misc_feature: MA Experiment ID: 20000439 Result: Down-regulated in Transcription
  misc_feature: MA Experiment 20000439 PARAMETER Experiment Name: At_Roots__P Parameter: Age (day) Value: 14 vs. 21
  misc_feature: MA Experiment 20000439 PARAMETER Experiment Name: At_Roots__P Parameter: Organism Value: A. thaliana
  misc_feature: MA Experiment 20000439 PARAMETER Experiment Name: At_Roots__P Parameter: Tissue Value: Roots vs. Whole Plant
  misc_feature: MA Experiment ID: 20001247 Result: Up-regulated in Transcription
  misc_feature: MA Experiment 20001247 PARAMETER Experiment Name: At_Far-red-induction_P Parameter: Age (day) Value: 7
  misc_feature: MA Experiment 20001247 PARAMETER Experiment Name: At_Far-red-induction_P Parameter: Light Value: Far-red vs. White
  misc_feature: MA Experiment 20001247 PARAMETER Experiment Name: At_Far-red-induction_P Parameter: Organism Value: A. thaliana
  misc_feature: MA Experiment 20001247 PARAMETER Experiment Name: At_Far-red-induction_P Parameter: Plant Line Value: Columbia
  misc_feature: MA Experiment 20001247 PARAMETER Experiment Name: At_Far-red-induction_P Parameter: Timepoint (hr) Value: 1
  misc_feature: MA Experiment 20001247 PARAMETER Experiment Name: At_Far-red-induction_P Parameter: Tissue Value: Whole Plant
  misc_feature: MA Experiment ID: 20001450 Result: Down-regulated in Transcription
  misc_feature: MA Experiment 20001450 PARAMETER Experiment Name: At_Far-red-induction_P Parameter: Age (day) Value: 7
  misc_feature: MA Experiment 20001450 PARAMETER Experiment Name: At_Far-red-induction_P Parameter: Light Value: Far-red vs. White
  misc_feature: MA Experiment 20001450 PARAMETER Experiment Name: At_Far-red-induction_P Parameter: Organism Value: A. thaliana
  misc_feature: MA Experiment 20001450 PARAMETER Experiment Name: At_Far-red-induction_P Parameter: Plant Line Value: Columbia
  misc_feature: MA Experiment 20001450 PARAMETER Experiment Name: At_Far-red-induction_P Parameter: Timepoint (hr) Value: 8
  misc_feature: MA Experiment 20001450 PARAMETER Experiment Name: At_Far-red-induction_P Parameter: Tissue Value: Whole Plant
  misc_feature: MA Experiment ID: 20001556 Result: Down-regulated in Transcription
  misc_feature: MA Experiment 20001556 PARAMETER Experiment Name: At_Drought_Soil_Dry_P Parameter: Age (day) Value: 26
  misc_feature: MA Experiment 20001556 PARAMETER Experiment Name: At_Drought_Soil_Dry_P Parameter: Organism Value: A. thaliana
  misc_feature: MA Experiment 20001556 PARAMETER Experiment Name: At_Drought_Soil_Dry_P Parameter: Plant Line Value: WS
  misc_feature: MA Experiment 20001556 PARAMETER Experiment Name: At_Drought_Soil_Dry_P Parameter: Post Timepoint (hr) Value: None
  misc_feature: MA Experiment 20001556 PARAMETER Experiment Name: At_Drought_Soil_Dry_P Parameter: Post-Treatment Value: None
  misc_feature: MA Experiment 20001556 PARAMETER Experiment Name: At_Drought_Soil_Dry_P Parameter: Timepoint (day) Value: 12
  misc_feature: MA Experiment 20001556 PARAMETER Experiment Name: At_Drought_Soil_Dry_P Parameter: Treatment Value: Drought vs. No Drought
  misc_feature: MA Experiment ID: 20001559 Result: Down-regulated in Transcription
  misc_feature: MA Experiment 20001559 PARAMETER Experiment Name: At_Drought_Soil_Dry_P Parameter: Age (day) Value: 28
  misc_feature: MA Experiment 20001559 PARAMETER Experiment Name: At_Drought_Soil_Dry_P Parameter: Organism Value: A. thaliana
  misc_feature: MA Experiment 20001559 PARAMETER Experiment Name: At_Drought_Soil_Dry_P Parameter: Plant Line Value: WS
  misc_feature: MA Experiment 20001559 PARAMETER Experiment Name: At_Drought_Soil_Dry_P Parameter: Post Timepoint (hr) Value: 29
  misc_feature: MA Experiment 20001559 PARAMETER Experiment Name: At_Drought_Soil_Dry_P Parameter: Post-Treatment Value: Re-Water vs. No Drought
  misc_feature: MA Experiment 20001559 PARAMETER Experiment Name: At_Drought_Soil_Dry_P Parameter: Timepoint (day) Value: 14
  misc_feature: MA Experiment 20001559 PARAMETER Experiment Name: At_Drought_Soil_Dry_P Parameter: Treatment Value: Drought vs. No Drought
  misc_feature: MA Experiment ID: 20001904 Result: Down-regulated in Transcription
  misc_feature: MA Experiment 20001904 PARAMETER Experiment Name: At_Drought_Reproduction_P Parameter: Age (day) Value: 37
  misc_feature: MA Experiment 20001904 PARAMETER Experiment Name: At_Drought_Reproduction_P Parameter: Organism Value: A. thaliana
  misc_feature: MA Experiment 20001904 PARAMETER Experiment Name: At_Drought_Reproduction_P Parameter: Plant Line Value: WS
  misc_feature: MA Experiment 20001904 PARAMETER Experiment Name: At_Drought_Reproduction_P Parameter: Timepoint (day) Value: 7
  misc_feature: MA Experiment 20001904 PARAMETER Experiment Name: At_Drought_Reproduction_P Parameter: Tissue Value: Rosettes
  misc_feature: MA Experiment 20001904 PARAMETER Experiment Name: At_Drought_Reproduction_P Parameter: Treatment Value: Drought vs. No Drought
  misc_feature: MA Experiment ID: 20001905 Result: Down-regulated in Transcription
  misc_feature: MA Experiment 20001905 PARAMETER Experiment Name: At_Drought_Reproduction_P Parameter: Age (day) Value: 40
  misc_feature: MA Experiment 20001905 PARAMETER Experiment Name: At_Drought_Reproduction_P Parameter: Organism Value: A. thaliana
  misc_feature: MA Experiment 20001905 PARAMETER Experiment Name: At_Drought_Reproduction_P Parameter: Plant Line Value: WS
  misc_feature: MA Experiment 20001905 PARAMETER Experiment Name: At_Drought_Reproduction_P Parameter: Timepoint (day) Value: 10
  misc_feature: MA Experiment 20001905 PARAMETER Experiment Name: At_Drought_Reproduction_P Parameter: Tissue Value: Rosettes
  misc_feature: MA Experiment 20001905 PARAMETER Experiment Name: At_Drought_Reproduction_P Parameter: Treatment Value: Drought vs. No Drought
  misc_feature: MA Experiment ID: 20001906 Result: Down-regulated in Transcription
  misc_feature: MA Experiment 20001906 PARAMETER Experiment Name: At_Drought_Reproduction_P Parameter: Age (day) Value: 35
  misc_feature: MA Experiment 20001906 PARAMETER Experiment Name: At_Drought_Reproduction_P Parameter: Organism Value: A. thaliana
  misc_feature: MA Experiment 20001906 PARAMETER Experiment Name: At_Drought_Reproduction_P Parameter: Plant Line Value: WS
  misc_feature: MA Experiment 20001906 PARAMETER Experiment Name: At_Drought_Reproduction_P Parameter: Timepoint (day) Value: 5
  misc_feature: MA Experiment 20001906 PARAMETER Experiment Name: At_Drought_Reproduction_P Parameter: Tissue Value: Siliques
  misc_feature: MA Experiment 20001906 PARAMETER Experiment Name: At_Drought_Reproduction_P Parameter: Treatment Value: Drought vs. No Drought
aacttggccaatccgcatcgtgtggcgatcagagagttaagccttgaagacgaagagataacgaattggttgttgatcactcgctttataaatctctcagtttcttgctcacaccaacatctctctaagcttcttcttctaccaatctaattcctctcttcagcttcttgtgttgtgacgcatactcgtcgcagtcttgagatatggccgccgcagtttccaccgtcggtgccatcaacagagctccgttgagcttgaacgggtcaggatcaggagctgtatcagccccagcttcaaccttcttgggaaagaaagttgtaactgtgtcgagattcgcacagagcaacaagaagagcaacggatcattcaaggtgttggctgtgaaagaagacaaacaaaccgatggagacagatggagaggtcttgcctacgacacttctgatgatcaacaagacatcaccagaggcaagggtatggttgactctgtcttccaagctcctatgggaaccggaactcaccacgctgtccttagctcatacgaatacgttagccaaggccttaggcagtacaacttggacaacatgatggatgggttttacattgctcctgctttcatggacaagcttgttgttcacatcaccaagaacttcttgactctgcctaacatcaaggttccacttattttgggtatatggggaggcaaaggtcaaggtaaatccttccagtgtgagcttgtcatggccaagatgggtatcaacccaatcatgatgagtgctggagagcttgagagtggaaacgcaggagaacccgcaaagcttatccgtcagaggtaccgtgaggcagctgacttgatcaagaagggaaagatgtgttgtctcttcatcaacgatcttgacgctggtgcgggtcgtatgggtggtactactcagtacactgtcaacaaccagatggttaacgcaacactcatgaacattgctgataacccaaccaacgtccagctcccaggaatgtacaacaaggaagagaacgcacgtgtccccatcatttgcactggtaacgatttctccaccctatacgctcctctcatccgtgatggacgtatggagaagttctactgggccccgacccgtgaagaccgtatcggtgtctgcaagggtatcttcagaactgacaagatcaaggacgaagacattgtcacacttgttgatcagttccctggtcaatctatcgatttcttcggtgctttgagggcgagagtgtacgatgatgaagtgaggaagttcgttgagagccttggagttgagaagatcggaaagaggctggttaactcaagggaaggacctcccgtgttcgagcaacccgagatgacttatgagaagcttatggaatacggaaacatgcttgtgatggaacaagagaatgtcaagagagtccaacttgccgagacctacctcagccaggctgctttgggagacgcaaacgctgacgccatcggccgcggaactttctacggaaaaggagcccagcaagtaaacctgccagttcctgaagggtgtactgatcctgtggctgaaaactttgatccaacggctagaagtgacgatggaacctgtgtctacaacttttgagcaatattatcctgcttattaatttgctgttttactcctattgtctcttttggtttatttttctcctttgtgtaattgtggattggatcttgtcctcttttgttccctttttttttttttatgatgtacaacacattggtaatttaaaattgccttgtcat

SEQ ID NO: 27707 - protein, 474 aa, Arabidopsis thaliana
  peptide (1)..(474): Ceres Seq. ID no. 13592259
  misc_feature (160)..(358): Pfam Name: ATPase family associated with various cellular Pfam Description: ATPase family associated with various cellular
  misc_feature (160)..(358): Pfam Name: ATPase family associated with various cellular Pfam Description: ATPase family associated with various cellular
  misc_feature (23)..(474): Homolog of NCBI NO: 32481061 NR Description: Rubisco activase alpha form precursor
  misc_feature (44)..(474): Homolog of NCBI NO: 12620883 NR Description: ribulose-1,5-bisphosphate carboxylase/oxygenase
  misc_feature (23)..(474): Homolog of NCBI NO: 8918359 NR Description: RuBisCO activase large isoform precursor
  misc_feature (1)..(474): Homolog of NCBI NO: 32481065 NR Description: Rubisco activase alpha form precursor [Larrea
  misc_feature (1)..(438): Homolog of NCBI NO: 30687999 NR Description: auxin-regulated protein [Arabidopsis thaliana]
  misc_feature (23)..(474): Homolog of NCBI NO: 32481061 NR Description: Rubisco activase alpha form precursor
  misc_feature (23)..(474): Homolog of NCBI NO: 8918359 NR Description: RuBisCO activase large isoform precursor
  misc_feature (1)..(438): Homolog of NCBI NO: 30687999 NR Description: auxin-regulated protein [Arabidopsis thaliana]
  misc_feature (1)..(474): Homolog of NCBI NO: 18405145 NR Description: auxin-regulated protein [Arabidopsis thaliana]
  misc_feature (1)..(474): Homolog of NCBI NO: 15450379 NR Description: At2g39730/T5I7.3 [Arabidopsis thaliana]
  misc_feature (1)..(474): Homolog of NCBI NO: 23308421 NR Description: At2g39730/T5I7.3 [Arabidopsis thaliana]
  misc_feature (1)..(474): Homolog of NCBI NO: 81660 NR Description: ribulose-bisphosphate carboxylase activase (EC
  misc_feature (1)..(438): Homolog of NCBI NO: 30687995 NR Description: auxin-regulated protein [Arabidopsis thaliana]
  misc_feature (1)..(474): Homolog of NCBI NO: 32481065 NR Description: Rubisco activase alpha form precursor [Larrea
  misc_feature (44)..(474): Homolog of NCBI NO: 12620883 NR Description: ribulose-1,5-bisphosphate carboxylase/oxygenase
  misc_feature (1)..(438): Homolog of NCBI NO: 30687995 NR Description: auxin-regulated protein [Arabidopsis thaliana]
  misc_feature (1)..(474): Homolog of NCBI NO: 81660 NR Description: ribulose-bisphosphate carboxylase activase (EC
  misc_feature (1)..(474): Homolog of NCBI NO: 23308421 NR Description: At2g39730/T5I7.3 [Arabidopsis thaliana]
  misc_feature (1)..(474): Homolog of NCBI NO: 15450379 NR Description: At2g39730/T5I7.3 [Arabidopsis thaliana]
  misc_feature (1)..(474): Homolog of NCBI NO: 18405145 NR Description: auxin-regulated protein [Arabidopsis thaliana]
MAAAVSTVGAINRAPLSLNGSGSGAVSAPASTFLGKKVVTVSRFAQSNKKSNGSFKVLAVKEDKQTDGDRWRGLAYDTSDDQQDITRGKGMVDSVFQAPMGTGTHHAVLSSYEYVSQGLRQYNLDNMMDGFYIAPAFMDKLVVHITKNFLTLPNIKVPLILGIWGGKGQGKSFQCELVMAKMGINPIMMSAGELESGNAGEPAKLIRQRYREAADLIKKGKMCCLFINDLDAGAGRMGGTTQYTVNNQMVNATLMNIADNPTNVQLPGMYNKEENARVPIICTGNDFSTLYAPLIRDGRMEKFYWAPTREDRIGVCKGIFRTDKIKDEDIVTLVDQFPGQSIDFFGALRARVYDDEVRKFVESLGVEKIGKRLVNSREGPPVFEQPEMTYEKLMEYGNMLVMEQENVKRVQLAETYLSQAALGDANADAIGRGTFYGKGAQQVNLPVPEGCTDPVAENFDPTARSDDGTCVYNF

SEQ ID NO: 27708 - protein, 384 aa, Arabidopsis thaliana
  peptide (1)..(384): Ceres Seq. ID no. 13592260
  misc_feature (70)..(268): Pfam Name: ATPase family associated with various cellular Pfam Description: ATPase family associated with various cellular
  misc_feature (70)..(268): Pfam Name: ATPase family associated with various cellular Pfam Description: ATPase family associated with various cellular
  misc_feature (1)..(384): Homolog of NCBI NO: 32481061 NR Description: Rubisco activase alpha form precursor
  misc_feature (1)..(384): Homolog of NCBI NO: 12620883 NR Description: ribulose-1,5-bisphosphate carboxylase/oxygenase
  misc_feature (1)..(384): Homolog of NCBI NO: 8918359 NR Description: RuBisCO activase large isoform precursor
  misc_feature (1)..(384): Homolog of NCBI NO: 32481065 NR Description: Rubisco activase alpha form precursor [Larrea
  misc_feature (1)..(348): Homolog of NCBI NO: 30687999 NR Description: auxin-regulated protein [Arabidopsis thaliana]
  misc_feature (1)..(384): Homolog of NCBI NO: 32481061 NR Description: Rubisco activase alpha form precursor
  misc_feature (1)..(384): Homolog of NCBI NO: 8918359 NR Description: RuBisCO activase large isoform precursor
  misc_feature (1)..(348): Homolog of NCBI NO: 30687999 NR Description: auxin-regulated protein [Arabidopsis thaliana]
  misc_feature (1)..(384): Homolog of NCBI NO: 18405145 NR Description: auxin-regulated protein [Arabidopsis thaliana]
  misc_feature (1)..(384): Homolog of NCBI NO: 15450379 NR Description: At2g39730/T5I7.3 [Arabidopsis thaliana]
  misc_feature (1)..(384): Homolog of NCBI NO: 23308421 NR Description: At2g39730/T5I7.3 [Arabidopsis thaliana]
  misc_feature (1)..(384): Homolog of NCBI NO: 81660 NR Description: ribulose-bisphosphate carboxylase activase (EC
  misc_feature (1)..(348): Homolog of NCBI NO: 30687995 NR Description: auxin-regulated protein [Arabidopsis thaliana]
  misc_feature (1)..(384): Homolog of NCBI NO: 32481065 NR Description: Rubisco activase alpha form precursor [Larrea
  misc_feature (1)..(384): Homolog of NCBI NO: 12620883 NR Description: ribulose-1,5-bisphosphate carboxylase/oxygenase
  misc_feature (1)..(348): Homolog of NCBI NO: 30687995 NR Description: auxin-regulated protein [Arabidopsis thaliana]
  misc_feature (1)..(384): Homolog of NCBI NO: 81660 NR Description: ribulose-bisphosphate carboxylase activase (EC
  misc_feature (1)..(384): Homolog of NCBI NO: 23308421 NR Description: At2g39730/T5I7.3 [Arabidopsis thaliana]
  misc_feature (1)..(384): Homolog of NCBI NO: 15450379 NR Description: At2g39730/T5I7.3 [Arabidopsis thaliana]
  misc_feature (1)..(384): Homolog of NCBI NO: 18405145 NR Description: auxin-regulated protein [Arabidopsis thaliana]
MVDSVFQAPMGTGTHHAVLSSYEYVSQGLRQYNLDNMMDGFYIAPAFMDKLVVHITKNFLTLPNIKVPLILGIWGGKGQGKSFQCELVMAKMGINPIMMSAGELESGNAGEPAKLIRQRYREAADLIKKGKMCCLFINDLDAGAGRMGGTTQYTVNNQMVNATLMNIADNPTNVQLPGMYNKEENARVPIICTGNDFSTLYAPLIRDGRMEKFYWAPTREDRIGVCKGIFRTDKIKDEDIVTLVDQFPGQSIDFFGALRARVYDDEVRKFVESLGVEKIGKRLVNSREGPPVFEQPEMTYEKLMEYGNMLVMEQENVKRVQLAETYLSQAALGDANADAIGRGTFYGKGAQQVNLPVPEGCTDPVAENFDPTARSDDGTCVYNF

SEQ ID NO: 27709 - protein, 375 aa, Arabidopsis thaliana
  peptide (1)..(375): Ceres Seq. ID no. 13592261
  misc_feature (61)..(259): Pfam Name: ATPase family associated with various cellular Pfam Description: ATPase family associated with various cellular
  misc_feature (61)..(259): Pfam Name: ATPase family associated with various cellular Pfam Description: ATPase family associated with various cellular
  misc_feature (1)..(375): Homolog of NCBI NO: 32481061 NR Description: Rubisco activase alpha form precursor
  misc_feature (1)..(375): Homolog of NCBI NO: 12620883 NR Description: ribulose-1,5-bisphosphate carboxylase/oxygenase
  misc_feature (1)..(375): Homolog of NCBI NO: 8918359 NR Description: RuBisCO activase large isoform precursor
  misc_feature (1)..(375): Homolog of NCBI NO: 32481065 NR Description: Rubisco activase alpha form precursor [Larrea
  misc_feature (1)..(339): Homolog of NCBI NO: 30687999 NR Description: auxin-regulated protein [Arabidopsis thaliana]
  misc_feature (1)..(375): Homolog of NCBI NO: 32481061 NR Description: Rubisco activase alpha form precursor
  misc_feature (1)..(375): Homolog of NCBI NO: 8918359 NR Description: RuBisCO activase large isoform precursor
  misc_feature (1)..(339): Homolog of NCBI NO: 30687999 NR Description: auxin-regulated protein [Arabidopsis thaliana]
  misc_feature (1)..(375): Homolog of NCBI NO: 18405145 NR Description: auxin-regulated protein [Arabidopsis thaliana]
  misc_feature (1)..(375): Homolog of NCBI NO: 15450379 NR Description: At2g39730/T5I7.3 [Arabidopsis thaliana]
  misc_feature (1)..(375): Homolog of NCBI NO: 23308421 NR Description: At2g39730/T5I7.3 [Arabidopsis thaliana]
  misc_feature (1)..(375): Homolog of NCBI NO: 81660 NR Description: ribulose-bisphosphate carboxylase activase (EC
  misc_feature (1)..(339): Homolog of NCBI NO: 30687995 NR Description: auxin-regulated protein [Arabidopsis thaliana]
  misc_feature (1)..(375): Homolog of NCBI NO: 32481065 NR Description: Rubisco activase alpha form precursor [Larrea
  misc_feature (1)..(375): Homolog of NCBI NO: 12620883 NR Description: ribulose-1,5-bisphosphate carboxylase/oxygenase
  misc_feature (1)..(339): Homolog of NCBI NO: 30687995 NR Description: auxin-regulated protein [Arabidopsis thaliana]
  misc_feature (1)..(375): Homolog of NCBI NO: 81660 NR Description: ribulose-bisphosphate carboxylase activase (EC
  misc_feature (1)..(375): Homolog of NCBI NO: 23308421 NR Description: At2g39730/T5I7.3 [Arabidopsis thaliana]
  misc_feature (1)..(375): Homolog of NCBI NO: 15450379 NR Description: At2g39730/T5I7.3 [Arabidopsis thaliana]
  misc_feature (1)..(375): Homolog of NCBI NO: 18405145 NR Description: auxin-regulated protein [Arabidopsis thaliana]
MGTGTHHAVLSSYEYVSQGLRQYNLDNMMDGFYIAPAFMDKLVVHITKNFLTLPNIKVPLILGIWGGKGQGKSFQCELVMAKMGINPIMMSAGELESGNAGEPAKLIRQRYREAADLIKKGKMCCLFINDLDAGAGRMGGTTQYTVNNQMVNATLMNIADNPTNVQLPGMYNKEENARVPIICTGNDFSTLYAPLIRDGRMEKFYWAPTREDRIGVCKGIFRTDKIKDEDIVTLVDQFPGQSIDFFGALRARVYDDEVRKFVESLGVEKIGKRLVNSREGPPVFEQPEMTYEKLMEYGNMLVMEQENVKRVQLAETYLSQAALGDANADAIGRGTFYGKGAQQVNLPVPEGCTDPVAENFDPTARSDDGTCVYNF

SEQ ID NO: 27710 - DNA, 1591 bp, Arabidopsis thaliana
  misc_feature (1)..(1591): Ceres Seq. ID no. 12339561
  misc_feature: MA Experiment ID: 20000179 Result: Down-regulated in Transcription
  misc_feature: MA Experiment 20000179 PARAMETER Experiment Name: At_Germinating_Seeds_P Parameter: Age (hr) Value: 6 vs. 0
  misc_feature: MA Experiment 20000179 PARAMETER Experiment Name: At_Germinating_Seeds_P Parameter: Tissue Value: Germinating Seeds
  misc_feature: MA Experiment ID: 20000213 Result: Up-regulated in Transcription
  misc_feature: MA Experiment 20000213 PARAMETER Experiment Name: At_4deg_Cold_P Parameter: Timepoint (hr) Value: 2
  misc_feature: MA Experiment ID: 20000214 Result: Up-regulated in Transcription
  misc_feature: MA Experiment 20000214 PARAMETER Experiment Name: At_4deg_Cold_P Parameter: Timepoint (hr) Value: 6
  misc_feature: MA Experiment ID: 20000234 Result: Up-regulated in Transcription
  misc_feature: MA Experiment 20000234 PARAMETER Experiment Name: At_Siliques_P Parameter: Age (day) Value: 21
  misc_feature: MA Experiment 20000234 PARAMETER Experiment Name: At_Siliques_P Parameter: Organism Value: A. thaliana
  misc_feature: MA Experiment 20000234 PARAMETER Experiment Name: At_Siliques_P Parameter: Plant Line Value: WS
  misc_feature: MA Experiment 20000234 PARAMETER Experiment Name: At_Siliques_P Parameter: Tissue Value: Less Than 5mm Siliques vs. Whole Plant
  misc_feature: MA Experiment ID: 20000267 Result: Up-regulated in Transcription
  misc_feature: MA Experiment 20000267 PARAMETER Experiment Name: At_Drought_P Parameter: Age (day) Value: 7
  misc_feature: MA Experiment 20000267 PARAMETER Experiment Name: At_Drought_P Parameter: Organism Value: A. thaliana
  misc_feature: MA Experiment 20000267 PARAMETER Experiment Name: At_Drought_P Parameter: Plant Line Value: WS
  misc_feature: MA Experiment 20000267 PARAMETER Experiment Name: At_Drought_P Parameter: Timepoint (hr) Value: 6
  misc_feature: MA Experiment 20000267 PARAMETER Experiment Name: At_Drought_P Parameter: Tissue Value: Whole Plant
  misc_feature: MA Experiment 20000267 PARAMETER Experiment Name: At_Drought_P Parameter: Treatment Value: Drought vs. No Drought
  misc_feature: MA Experiment ID: 20000436 Result: Up-regulated in Transcription
  misc_feature: MA Experiment 20000436 PARAMETER Experiment Name: At_Drought_P Parameter: Age (day) Value: 7
  misc_feature: MA Experiment 20000436 PARAMETER Experiment Name: At_Drought_P Parameter: Organism Value: A. thaliana
  misc_feature: MA Experiment 20000436 PARAMETER Experiment Name: At_Drought_P Parameter: Plant Line Value: WS
  misc_feature: MA Experiment 20000436 PARAMETER Experiment Name: At_Drought_P Parameter: Timepoint (hr) Value: 12
  misc_feature: MA Experiment 20000436 PARAMETER Experiment Name: At_Drought_P Parameter: Tissue Value: Whole Plant
  misc_feature: MA Experiment 20000436 PARAMETER Experiment Name: At_Drought_P Parameter: Treatment Value: Drought vs. No Drought
  misc_feature: MA Experiment ID: 20000437 Result: Up-regulated in Transcription
  misc_feature: MA Experiment 20000437 PARAMETER Experiment Name: At_Drought_P Parameter: Age (day) Value: 8
  misc_feature: MA Experiment 20000437 PARAMETER Experiment Name: At_Drought_P Parameter: Organism Value: A. thaliana
  misc_feature: MA Experiment 20000437 PARAMETER Experiment Name: At_Drought_P Parameter: Plant Line Value: WS
  misc_feature: MA Experiment 20000437 PARAMETER Experiment Name: At_Drought_P Parameter: Timepoint (hr) Value: 24
  misc_feature: MA Experiment 20000437 PARAMETER Experiment Name: At_Drought_P Parameter: Tissue Value: Whole Plant
  misc_feature: MA Experiment 20000437 PARAMETER Experiment Name: At_Drought_P Parameter: Treatment Value: Drought vs. No Drought
  misc_feature: MA Experiment ID: 20000495 Result: Up-regulated in Transcription
  misc_feature: MA Experiment 20000495 PARAMETER Experiment Name: At_Guard_Cells_P Parameter: Harvest Date Value: 8/2/2002
  misc_feature: MA Experiment 20000495 PARAMETER Experiment Name: At_Guard_Cells_P Parameter: Organism Value: A. thaliana
  misc_feature: MA Experiment 20000495 PARAMETER Experiment Name: At_Guard_Cells_P Parameter: Tissue Value: Guard Cells vs. Leaves
  misc_feature: MA Experiment ID: 20000573 Result: Up-regulated in Transcription
  misc_feature: MA Experiment 20000573 PARAMETER Experiment Name: At_100uM_ABA_Mutants__P Parameter: Organism Value: A. thaliana
  misc_feature: MA Experiment 20000573 PARAMETER Experiment Name: At_100uM_ABA_Mutants__P Parameter: Plant Line Value: CS22 vs. Ler wt
  misc_feature: MA Experiment 20000573 PARAMETER Experiment Name: At_100uM_ABA_Mutants__P Parameter: Timepoint (hr) Value: N/A
  misc_feature: MA Experiment 20000573 PARAMETER Experiment Name: At_100uM_ABA_Mutants__P Parameter: Tissue Value: Whole Plant
  misc_feature: MA Experiment 20000573 PARAMETER Experiment Name: At_100uM_ABA_Mutants__P Parameter: Treatment Value: None
  misc_feature: MA Experiment ID: 20000574 Result: Up-regulated in Transcription
  misc_feature: MA Experiment 20000574 PARAMETER Experiment Name: At_100uM_ABA_Mutants__P Parameter: Organism Value: A. thaliana
  misc_feature: MA Experiment 20000574 PARAMETER Experiment Name: At_100uM_ABA_Mutants__P Parameter: Plant Line Value: CS23 vs. Ler wt
  misc_feature: MA Experiment 20000574 PARAMETER Experiment Name: At_100uM_ABA_Mutants__P Parameter: Timepoint (hr) Value: N/A
  misc_feature: MA Experiment 20000574 PARAMETER Experiment Name: At_100uM_ABA_Mutants__P Parameter: Tissue Value: Whole Plant
  misc_feature: MA Experiment 20000574 PARAMETER Experiment Name: At_100uM_ABA_Mutants__P Parameter: Treatment Value: None
  misc_feature: MA Experiment ID: 20000794 Result: Down-regulated in Transcription
  misc_feature: MA Experiment 20000794 PARAMETER Experiment Name: At_Petals_P Parameter: Age (day) Value: 23-25 days
  misc_feature: MA Experiment 20000794 PARAMETER Experiment Name: At_Petals_P Parameter: Plant Line Value: WS
  misc_feature: MA Experiment 20000794 PARAMETER Experiment Name: At_Petals_P Parameter: Tissue Value: Petals vs. Whole plant
  misc_feature: MA Experiment ID: 20001450 Result: Down-regulated in Transcription
  misc_feature: MA Experiment 20001450 PARAMETER Experiment Name: At_Far-red-induction_P Parameter: Age (day) Value: 7
  misc_feature: MA Experiment 20001450 PARAMETER Experiment Name: At_Far-red-induction_P Parameter: Light Value: Far-red vs. White
  misc_feature: MA Experiment 20001450 PARAMETER Experiment Name: At_Far-red-induction_P Parameter: Organism Value: A. thaliana
  misc_feature: MA Experiment 20001450 PARAMETER Experiment Name: At_Far-red-induction_P Parameter: Plant Line Value: Columbia
  misc_feature: MA Experiment 20001450 PARAMETER Experiment Name: At_Far-red-induction_P Parameter: Timepoint (hr) Value: 8
  misc_feature: MA Experiment 20001450 PARAMETER Experiment Name: At_Far-red-induction_P Parameter: Tissue Value: Whole Plant
  misc_feature: MA Experiment ID: 20001451 Result: Down-regulated in Transcription
  misc_feature: MA Experiment 20001451 PARAMETER Experiment Name: At_Far-red-induction_P Parameter: Age (day) Value: 7
  misc_feature: MA Experiment 20001451 PARAMETER Experiment Name: At_Far-red-induction_P Parameter: Light Value: Far-red vs. White
  misc_feature: MA Experiment 20001451 PARAMETER Experiment Name: At_Far-red-induction_P Parameter: Organism Value: A. thaliana
  misc_feature: MA Experiment 20001451 PARAMETER Experiment Name: At_Far-red-induction_P Parameter: Plant Line Value: Columbia
  misc_feature: MA Experiment 20001451 PARAMETER Experiment Name: At_Far-red-induction_P Parameter: Timepoint (hr) Value: 24
  misc_feature: MA Experiment 20001451 PARAMETER Experiment Name: At_Far-red-induction_P Parameter: Tissue Value: Whole Plant
  misc_feature: MA Experiment ID: 20001555 Result: Down-regulated in Transcription
  misc_feature: MA Experiment 20001555 PARAMETER Experiment Name: At_Drought_Soil_Dry_P Parameter: Age (day) Value: 24
  misc_feature: MA Experiment 20001555 PARAMETER Experiment Name: At_Drought_Soil_Dry_P Parameter: Organism Value: A. thaliana
  misc_feature: MA Experiment 20001555 PARAMETER Experiment Name: At_Drought_Soil_Dry_P Parameter: Plant Line Value: WS
  misc_feature: MA Experiment 20001555 PARAMETER Experiment Name: At_Drought_Soil_Dry_P Parameter: Post Timepoint (hr) Value: None
  misc_feature: MA Experiment 20001555 PARAMETER Experiment Name: At_Drought_Soil_Dry_P Parameter: Post-Treatment Value: None
  misc_feature: MA Experiment 20001555 PARAMETER Experiment Name: At_Drought_Soil_Dry_P Parameter: Timepoint (day) Value: 10
  misc_feature: MA Experiment 20001555 PARAMETER Experiment Name: At_Drought_Soil_Dry_P Parameter: Treatment Value: Drought vs. No Drought
  misc_feature: MA Experiment ID: 20001557 Result: Up-regulated in Transcription
  misc_feature: MA Experiment 20001557 PARAMETER Experiment Name: At_Drought_Soil_Dry_P Parameter: Age (day) Value: 27
  misc_feature: MA Experiment 20001557 PARAMETER Experiment Name: At_Drought_Soil_Dry_P Parameter: Organism Value: A. thaliana
  misc_feature: MA Experiment 20001557 PARAMETER Experiment Name: At_Drought_Soil_Dry_P Parameter: Plant Line Value: WS
  misc_feature: MA Experiment 20001557 PARAMETER Experiment Name: At_Drought_Soil_Dry_P Parameter: Post Timepoint (hr) Value: 3
  misc_feature: MA Experiment 20001557 PARAMETER Experiment Name: At_Drought_Soil_Dry_P Parameter: Post-Treatment Value: Re-Water vs. No Drought
  misc_feature: MA Experiment 20001557 PARAMETER Experiment Name: At_Drought_Soil_Dry_P Parameter: Timepoint (day) Value: 13
  misc_feature: MA Experiment 20001557 PARAMETER Experiment Name: At_Drought_Soil_Dry_P Parameter: Treatment Value: Drought vs. No Drought
  misc_feature: MA Experiment ID: 20001905 Result: Up-regulated in Transcription
  misc_feature: MA Experiment 20001905 PARAMETER Experiment Name: At_Drought_Reproduction_P Parameter: Age (day) Value: 40
  misc_feature: MA Experiment 20001905 PARAMETER Experiment Name: At_Drought_Reproduction_P Parameter: Organism Value: A. thaliana
  misc_feature: MA Experiment 20001905 PARAMETER Experiment Name: At_Drought_Reproduction_P Parameter: Plant Line Value: WS
  misc_feature: MA Experiment 20001905 PARAMETER Experiment Name: At_Drought_Reproduction_P Parameter: Timepoint (day) Value: 10
  misc_feature: MA Experiment 20001905 PARAMETER Experiment Name: At_Drought_Reproduction_P Parameter: Tissue Value: Rosettes
  misc_feature: MA Experiment 20001905 PARAMETER Experiment Name: At_Drought_Reproduction_P Parameter: Treatment Value: Drought vs. No Drought
gaatacaaaaactgaaacctttctctatttatctctctatacacaacaatggcggtcttcgttttatctctactcatactctcttccttctcagccattccattcacttatgcagattctggaatgatcggagttaactacggccgtatagcagacaatcttccggcaccggagaaagtagttgagctactgaaaacacaaggaatcaaccgcatcaagctttacgacaccgagacaactgtactaacctcactcgcgaactccggaatcaaagtcgttgtctctctccccaacgaaaacctcgcttccgccgccgcagatcagagctacaccgacacttgggttcaggacaacataaagaagtacattccagcgacggatatcgaagcaatcgccgttgggaacgaagtgttcgtcgatccgaggaacacgacgacgtatctcgttccagctatgaagaatgttcaaagctctctcgtcaagttcaatctcgacaaatccattaagatctcgtcgccgattgctttaagcgcgttggcgagttcgtatccaccgtcggctggttcgtttaaaccggagttaatcgaaccggttattaaaccgatgcttgatctcctccgcaaaacgtcgtcgcatcttatggtgaatgcttatcctttctttgcttacgcagctaacgccgataagatctcgttggattacgcgttgtttaaggagaacgccgggaatgttgattccggtaacggtttgaagtataacagtctcttagacgctcagatcgacgccgttttcgccgcaatgtccgccgttggatttaacgacgttaagcttgtggtgacagagacaggctggccttctgccggagacgagaacgagattggtgctggttcggctaacgcggcggcgtataacggcgggttagttaaaagagtgttgacgggaaacggaacgccgttaaaaccgaaggagccactaaacgtttatctgttcgctctgtttaacgagaatcagaaaacgggtccgacttctgagagaaactacgggttgttttacccaaacgagaacaaagtgtatgacgtttcgctcaacggtaagtcaacgccggtcaacgataacaaagagaaggttgttccggtgaaaccgtcgctcgtgggacagacgtggtgtgtggcgaatggtaaaacgacgaaggagaagcttcaggaaggtctcgactacgcttgtggcgaaggaggtgctgattgccgtccgattcaaccgggtgccacgtgttataatcctgaatcgttagaagctcacgcttcctacgcgttcaacagttactatcagaagaacgcacgtggagttggcacgtgtaattttggtggtgcagcgtacgtggtctcgcaacctcctaagtatgggaaatgcgagtttccaacagggcattgaaatggatatagagaagaagaggatcgtgcggatttatttacgttatttattttgatacattgttcttttgtcattcgagtatatgatttgcgtatatttatttttattattgtatatttggttggtttcatcggataaatagtcagattttctttccccc

SEQ ID NO: 27711 - protein, 460 aa, Arabidopsis thaliana
  peptide (1)..(460): Ceres Seq. ID no. 12339562
  misc_feature (27)..(346): Pfam Name: Glycosyl hydrolases family 17 Pfam Description: Glycosyl hydrolases family 17
  misc_feature (6)..(350): Homolog of NCBI NO: 11279331 NR Description: beta-1,3-glucanase (EC 3.2.1.-) precursor
  misc_feature (1)..(346): Homolog of NCBI NO: 27529826 NR Description: beta-1,3-glucanase-like protein [Nicotiana
  misc_feature (5)..(451): Homolog of NCBI NO: 25316444 NR Description: probable beta-1,3-glucanase [imported] -
  misc_feature (5)..(460): Homolog of NCBI NO: 30678225 NR Description: glycosyl hydrolase family 17 [Arabidopsis
  misc_feature (1)..(460): Homolog of NCBI NO: 11071974 NR Description: elicitor inducible beta-1,3-glucanase Nt-SubE76
  misc_feature (1)..(450): Homolog of NCBI NO: 15236882 NR Description: glycosyl hydrolase family 17; protein id:
  misc_feature (1)..(451): Homolog of NCBI NO: 9758115 NR Description: beta-1,3-glucanase-like protein [Arabidopsis
  misc_feature (1)..(460): Homolog of NCBI NO: 21594590 NR Description: beta-1,3-glucanase-like protein [Arabidopsis
  misc_feature (1)..(460): Homolog of NCBI NO: 18423719 NR Description: glycosyl hydrolase family 17
  misc_feature (1)..(460): Homolog of NCBI NO: 18700155 NR Description: AT5g55180/MCO15_13 [Arabidopsis thaliana]
MAVFVLSLLILSSFSAIPFTYADSGMIGVNYGRIADNLPAPEKVVELLKTQGINRIKLYDTETTVLTSLANSGIKVVVSLPNENLASAAADQSYTDTWVQDNIKKYIPATDIEAIAVGNEVFVDPRNTTTYLVPAMKNVQSSLVKFNLDKSIKISSPIALSALASSYPPSAGSFKPELIEPVIKPMLDLLRKTSSHLMVNAYPFFAYAANADKISLDYALFKENAGNVDSGNGLKYNSLLDAQIDAVFAAMSAVGFNDVKLVVTETGWPSAGDENEIGAGSANAAAYNGGLVKRVLTGNGTPLKPKEPLNVYLFALFNENQKTGPTSERNYGLFYPNENKVYDVSLNGKSTPVNDNKEKVVPVKPSLVGQTWCVANGKTTKEKLQEGLDYACGEGGADCRPIQPGATCYNPESLEAHASYAFNSYYQKNARGVGTCNFGGAAYVVSQPPKYGKCEFPTGH

SEQ ID NO: 27712 - protein, 435 aa, Arabidopsis thaliana
  peptide (1)..(435): Ceres Seq. ID no. 12339564
  misc_feature (2)..(321): Pfam Name: Glycosyl hydrolases family 17 Pfam Description: Glycosyl hydrolases family 17
  misc_feature (1)..(325): Homolog of NCBI NO: 11279331 NR Description: beta-1,3-glucanase (EC 3.2.1.-) precursor
  misc_feature (1)..(321): Homolog of NCBI NO: 27529826 NR Description: beta-1,3-glucanase-like protein [Nicotiana
  misc_feature (1)..(426): Homolog of NCBI NO: 25316444 NR Description: probable beta-1,3-glucanase [imported] -
  misc_feature (1)..(435): Homolog of NCBI NO: 30678225 NR Description: glycosyl hydrolase family 17 [Arabidopsis
  misc_feature (1)..(435): Homolog of NCBI NO: 11071974 NR Description: elicitor inducible beta-1,3-glucanase Nt-SubE76
  misc_feature (1)..(425): Homolog of NCBI NO: 15236882 NR Description: glycosyl hydrolase family 17; protein id:
  misc_feature (1)..(426): Homolog of NCBI NO: 9758115 NR Description: beta-1,3-glucanase-like protein [Arabidopsis
  misc_feature (1)..(435): Homolog of NCBI NO: 21594590 NR Description: beta-1,3-glucanase-like protein [Arabidopsis
  misc_feature (1)..(435): Homolog of NCBI NO: 18423719 NR Description: glycosyl hydrolase family 17
  misc_feature (1)..(435): Homolog of NCBI NO: 18700155 NR Description: AT5g55180/MCO15_13 [Arabidopsis thaliana]
MIGVNYGRIADNLPAPEKVVELLKTQGINRIKLYDTETTVLTSLANSGIKVVVSLPNENLASAAADQSYTDTWVQDNIKKYIPATDIEAIAVGNEVFVDPRNTTTYLVPAMKNVQSSLVKFNLDKSIKISSPIALSALASSYPPSAGSFKPELIEPVIKPMLDLLRKTSSHLMVNAYPFFAYAANADKISLDYALFKENAGNVDSGNGLKYNSLLDAQIDAVFAAMSAVGFNDVKLVVTETGWPSAGDENEIGAGSANAAAYNGGLVKRVLTGNGTPLKPKEPLNVYLFALFNENQKTGPTSERNYGLFYPNENKVYDVSLNGKSTPVNDNKEKVVPVKPSLVGQTWCVANGKTTKEKLQEGLDYACGEGGADCRPIQPGATCYNPESLEAHASYAFNSYYQKNARGVGTCNFGGAAYVVSQPPKYGKCEFPTGH

SEQ ID NO: 27713 - protein, 325 aa, Arabidopsis thaliana
  peptide (1)..(325): Ceres Seq. ID no. 12339566
  misc_feature (1)..(211): Pfam Name: Glycosyl hydrolases family 17 Pfam Description: Glycosyl hydrolases family 17
  misc_feature (1)..(215): Homolog of NCBI NO: 11279331 NR Description: beta-1,3-glucanase (EC 3.2.1.-) precursor
  misc_feature (1)..(211): Homolog of NCBI NO: 27529826 NR Description: beta-1,3-glucanase-like protein [Nicotiana
  misc_feature (1)..(316): Homolog of NCBI NO: 25316444 NR Description: probable beta-1,3-glucanase [imported] -
  misc_feature (1)..(325): Homolog of NCBI NO: 30678225 NR Description: glycosyl hydrolase family 17 [Arabidopsis
  misc_feature (1)..(325): Homolog of NCBI NO: 11071974 NR Description: elicitor inducible beta-1,3-glucanase Nt-SubE76
  misc_feature (1)..(315): Homolog of NCBI NO: 15236882 NR Description: glycosyl hydrolase family 17; protein id:
  misc_feature (1)..(316): Homolog of NCBI NO: 9758115 NR Description: beta-1,3-glucanase-like protein [Arabidopsis
  misc_feature (1)..(325): Homolog of NCBI NO: 21594590 NR Description: beta-1,3-glucanase-like protein [Arabidopsis
  misc_feature (1)..(325): Homolog of NCBI NO: 18423719 NR Description: glycosyl hydrolase family 17
  misc_feature (1)..(325): Homolog of NCBI NO: 18700155 NR Description: AT5g55180/MCO15_13 [Arabidopsis thaliana]
MKNVQSSLVKFNLDKSIKISSPIALSALASSYPPSAGSFKPELIEPVIKPMLDLLRKTSSHLMVNAYPFFAYAANADKISLDYALFKENAGNVDSGNGLKYNSLLDAQIDAVFAAMSAVGFNDVKLVVTETGWPSAGDENEIGAGSANAAAYNGGLVKRVLTGNGTPLKPKEPLNVYLFALFNENQKTGPTSERNYGLFYPNENKVYDVSLNGKSTPVNDNKEKVVPVKPSLVGQTWCVANGKTTKEKLQEGLDYACGEGGADCRPIQPGATCYNPESLEAHASYAFNSYYQKNARGVGTCNFGGAAYVVSQPPKYGKCEFPTGH

SEQ ID NO: 27714 - DNA, 1073 bp, Arabidopsis thaliana
  misc_feature (1)..(1073): Ceres Seq. ID no. 13499467
  misc_feature: MA Experiment ID: 108573 Result: Up-regulated in Transcription
  misc_feature: MA Experiment 108573 PARAMETER Experiment Name: At_Drought_cDNA_P Parameter: Timepoint (hr) Value: 6
  misc_feature: MA Experiment 108573 PARAMETER Experiment Name: At_Drought_cDNA_P Parameter: Tissue Value: Aerial
  misc_feature: MA Experiment 108573 PARAMETER Experiment Name: At_Drought_cDNA_P Parameter: Treatment Value: Drought vs. No Drought
  misc_feature: MA Experiment ID: 108607 Result: Up-regulated in Transcription
  misc_feature: MA Experiment 108607 PARAMETER Experiment Name: At_100uM_ABA_cDNA_P Parameter: Timepoint (hr) Value: 4
  misc_feature: MA Experiment 108607 PARAMETER Experiment Name: At_100uM_ABA_cDNA_P Parameter: Tissue Value: Aerial
  misc_feature: MA Experiment 108607 PARAMETER Experiment Name: At_100uM_ABA_cDNA_P Parameter: Treatment Value: 100uM ABA vs. No Treatment
  misc_feature: MA Experiment ID: 20000069 Result: Up-regulated in Transcription
  misc_feature: MA Experiment 20000069 PARAMETER Experiment Name: At_100uM_ABA_Mutants_cDNA_P Parameter: Plant Line Value: CS23
  misc_feature: MA Experiment 20000069 PARAMETER Experiment Name: At_100uM_ABA_Mutants_cDNA_P Parameter: Timepoint (hr) Value: 6
  misc_feature: MA Experiment 20000069 PARAMETER Experiment Name: At_100uM_ABA_Mutants_cDNA_P Parameter: Tissue Value: Aerial
  misc_feature: MA Experiment 20000069 PARAMETER Experiment Name: At_100uM_ABA_Mutants_cDNA_P Parameter: Treatment Value: 100uM ABA vs. No Treatment
  misc_feature: MA Experiment ID: 20000070 Result: Up-regulated in Transcription
  misc_feature: MA Experiment 20000070 PARAMETER Experiment Name: At_100uM_ABA_Mutants_cDNA_P Parameter: Plant Line Value: CS24
  misc_feature: MA Experiment 20000070 PARAMETER Experiment Name: At_100uM_ABA_Mutants_cDNA_P Parameter: Timepoint (hr) Value: 6
  misc_feature: MA Experiment 20000070 PARAMETER Experiment Name: At_100uM_ABA_Mutants_cDNA_P Parameter: Tissue Value: Aerial
  misc_feature: MA Experiment 20000070 PARAMETER Experiment Name: At_100uM_ABA_Mutants_cDNA_P Parameter: Treatment Value: 100uM ABA vs. No Treatment
  misc_feature: MA Experiment ID: 20000071 Result: Up-regulated in Transcription
  misc_feature: MA Experiment 20000071 PARAMETER Experiment Name: At_100uM_ABA_Mutants_cDNA_P Parameter: Plant Line Value: CS8104
  misc_feature: MA Experiment 20000071 PARAMETER Experiment Name: At_100uM_ABA_Mutants_cDNA_P Parameter: Timepoint (hr) Value: 6
  misc_feature: MA Experiment 20000071 PARAMETER Experiment Name: At_100uM_ABA_Mutants_cDNA_P Parameter: Tissue Value: Aerial
  misc_feature: MA Experiment 20000071 PARAMETER Experiment Name: At_100uM_ABA_Mutants_cDNA_P Parameter: Treatment Value: 100uM ABA vs. No Treatment
  misc_feature: MA Experiment ID: 20000072 Result: Up-regulated in Transcription
  misc_feature: MA Experiment 20000072 PARAMETER Experiment Name: At_100uM_ABA_Mutants_cDNA_P Parameter: Plant Line Value: CS8105
  misc_feature: MA Experiment 20000072 PARAMETER Experiment Name: At_100uM_ABA_Mutants_cDNA_P Parameter: Timepoint (hr) Value: 6
  misc_feature: MA Experiment 20000072 PARAMETER Experiment Name: At_100uM_ABA_Mutants_cDNA_P Parameter: Tissue Value: Aerial
  misc_feature: MA Experiment 20000072 PARAMETER Experiment Name: At_100uM_ABA_Mutants_cDNA_P Parameter: Treatment Value: 100uM ABA vs. No Treatment
  misc_feature: MA Experiment ID: 20000086 Result: Up-regulated in Transcription
  misc_feature: MA Experiment 20000086 PARAMETER Experiment Name: At_100uM_ABA_Mutants_cDNA_P Parameter: Plant Line Value: CS22
  misc_feature: MA Experiment 20000086 PARAMETER Experiment Name: At_100uM_ABA_Mutants_cDNA_P Parameter: Timepoint (hr) Value: 6
  misc_feature: MA Experiment 20000086 PARAMETER Experiment Name: At_100uM_ABA_Mutants_cDNA_P Parameter: Tissue Value: Aerial
  misc_feature: MA Experiment 20000086 PARAMETER Experiment Name: At_100uM_ABA_Mutants_cDNA_P Parameter: Treatment Value: 100uM ABA vs. No Treatment
  misc_feature: MA Experiment ID: 20000089 Result: Up-regulated in Transcription
  misc_feature: MA Experiment ID: 20000093 Result: Up-regulated in Transcription
  misc_feature: MA Experiment 20000093 PARAMETER Experiment Name: At_42deg_Heat_cDNA_P Parameter: Temperature (deg C) Value: 42 vs. 22
  misc_feature: MA Experiment 20000093 PARAMETER Experiment Name: At_42deg_Heat_cDNA_P Parameter: Timepoint (hr) Value: 0.5
  misc_feature: MA Experiment 20000093 PARAMETER Experiment Name: At_42deg_Heat_cDNA_P Parameter: Tissue Value: Aerial
  misc_feature: MA Experiment ID: 20000112 Result: Up-regulated in Transcription
  misc_feature: MA Experiment 20000112 PARAMETER Experiment Name: At_42deg_Heat_cDNA_P Parameter: Temperature (deg C) Value: 42 vs. 22
  misc_feature: MA Experiment 20000112 PARAMETER Experiment Name: At_42deg_Heat_cDNA_P Parameter: Timepoint (hr) Value: 2
  misc_feature: MA Experiment 20000112 PARAMETER Experiment Name: At_42deg_Heat_cDNA_P Parameter: Tissue Value: Aerial
  misc_feature: MA Experiment ID: 20000144 Result: Up-regulated in Transcription
  misc_feature: MA Experiment 20000144 PARAMETER Experiment Name: At_42deg_Heat_cDNA_P Parameter: Temperature (deg C) Value: 42 vs. 22
  misc_feature: MA Experiment 20000144 PARAMETER Experiment Name: At_42deg_Heat_cDNA_P Parameter: Timepoint (hr) Value: 1
  misc_feature: MA Experiment 20000144 PARAMETER Experiment Name: At_42deg_Heat_cDNA_P Parameter: Tissue Value: Aerial
  misc_feature: MA Experiment ID: 20000171 Result: Up-regulated in Transcription
  misc_feature: MA Experiment 20000171 PARAMETER Experiment Name: At_42deg_Heat_P Parameter: Age (day) Value: 14
  misc_feature: MA Experiment 20000171 PARAMETER Experiment Name: At_42deg_Heat_P Parameter: Organism Value: A. thaliana
  misc_feature: MA Experiment 20000171 PARAMETER Experiment Name: At_42deg_Heat_P Parameter: Plant Line Value: WS
  misc_feature: MA Experiment 20000171 PARAMETER Experiment Name: At_42deg_Heat_P Parameter: Temperature (deg C) Value: 42 vs. 22
  misc_feature: MA Experiment 20000171 PARAMETER Experiment Name: At_42deg_Heat_P Parameter: Timepoint (hr) Value: 1
  misc_feature: MA Experiment 20000171 PARAMETER Experiment Name: At_42deg_Heat_P Parameter: Tissue Value: Aerial
  misc_feature: MA Experiment ID: 20000224 Result: Down-regulated in Transcription
  misc_feature: MA Experiment ID: 20000235 Result: Down-regulated in Transcription
  misc_feature: MA Experiment 20000235 PARAMETER Experiment Name: At_Siliques_P Parameter: Age (day) Value: 21
  misc_feature: MA Experiment 20000235 PARAMETER Experiment Name: At_Siliques_P Parameter: Organism Value: A. thaliana
  misc_feature: MA Experiment 20000235 PARAMETER Experiment Name: At_Siliques_P Parameter: Plant Line Value: WS
  misc_feature: MA Experiment 20000235 PARAMETER Experiment Name: At_Siliques_P Parameter: Tissue Value: 5-10mm Siliques vs. Whole Plant
  misc_feature: MA Experiment ID: 20000437 Result: Up-regulated in Transcription
  misc_feature: MA Experiment 20000437 PARAMETER Experiment Name: At_Drought_P Parameter: Age (day) Value: 8
  misc_feature: MA Experiment 20000437 PARAMETER Experiment Name: At_Drought_P Parameter: Organism Value: A. thaliana
  misc_feature: MA Experiment 20000437 PARAMETER Experiment Name: At_Drought_P Parameter: Plant Line Value: WS
  misc_feature: MA Experiment 20000437 PARAMETER Experiment Name: At_Drought_P Parameter: Timepoint (hr) Value: 24
  misc_feature: MA Experiment 20000437 PARAMETER Experiment Name: At_Drought_P Parameter: Tissue Value: Whole Plant
  misc_feature: MA Experiment 20000437 PARAMETER Experiment Name: At_Drought_P Parameter: Treatment Value: Drought vs. No Drought
ctctctctgttgctaaaaacatttagatcgcttacctggttcgtgcacctgattagctgctgttatttctttttcttcccagagttcaggtcgttaaaaatctaatcttttttggtgggtgaagactcttctttatcaaatcaacctaatttctcagattctcagatctcaagagttttgtttttttagcaacaatgaataaaaatccacggctcgatttttcctcaccgtcgtcgttagccactatctccgactctgcagacggtgagctgaatgaagacgacatctttgcaatcgacatatctcacgcgccgcctcaagctcgtcattctcctgtatcatctccggcgaagcaacaaactcctgctcgtcagcttcagaggagcaaaagcggtttgaagaatgtggaagcgtctggtatcctcgcggctcttcctgaatcatctgggagtagtagttacttaagtcatgtctttcaccacaaacctgcggctgctctctctacttctgtctcctccacagcttcttcatcgtcttcttcaggtggtggtgcatcagctggttcttcgtcttcagctcgagctatcccgaccgcgcctaaaccgcctcaagagaggcttccgttttcagcttcttttgtaggtggtgggaagtatcctcaatcagctccggttcaagtgccgttagtgtcgtctgcgatgatgaatcgtcataataaggaattcaagctgactgatgtggtggatgatgatgaggaagaagaggaaggcgaaatgcttccgcctcacgagattgtagctcggtctttggctcagtcgtcgttgttatcttgctctgtgcttgaaggagcaggaaggacacttaaagggagagatctccggcaggtaaggaatgctgttttcagaagaaccggtttcatagattgagtgtttttttttttactctcttcttcagaaagacgattctttaatttgttatcccaattgatgaactactttatcccttatttggccacagaaacttgtcaatgtgtatgttcatatgttgtctacgttagacgatttgtttacttc

SEQ ID NO: 27715 - protein, 243 aa, Arabidopsis thaliana
  peptide (1)..(243): Ceres Seq. ID no. 13499468
  misc_feature (22)..(243): Pfam Name: Protein of unknown function, DUF584 Pfam Description: Protein of unknown function, DUF584
  misc_feature (149)..(243): Homolog of NCBI NO: 26452217 NR Description: unknown protein [Arabidopsis thaliana]
  misc_feature (149)..(243): Homolog of NCBI NO: 18412629 NR Description: expressed protein [Arabidopsis thaliana]
  misc_feature (114)..(241): Homolog of NCBI NO: 15234679 NR Description: hypothetical protein [Arabidopsis thaliana]
  misc_feature (114)..(241): Homolog of NCBI NO: 7487830 NR Description: hypothetical protein T8O5.180 - Arabidopsis
  misc_feature (109)..(237): Homolog of NCBI NO: 34908520 NR Description: P0423B08.9 [Oryza sativa (japonica
  misc_feature (9)..(243): Homolog of NCBI NO: 37534318 NR Description: putative prolyl 4-hydroxylase alpha subunit-like
  misc_feature (9)..(243): Homolog of NCBI NO: 38346328 NR Description: OJ000126_13.10 [Oryza sativa (japonica
  misc_feature (1)..(243): Homolog of NCBI NO: 21594619 NR Description: unknown [Arabidopsis thaliana]
  misc_feature (1)..(243): Homolog of NCBI NO: 18400614 NR Description: expressed protein [Arabidopsis thaliana]
  misc_feature (1)..(243): Homolog of NCBI NO: 15983450 NR Description: AT3g15040/K15M2_18 [Arabidopsis thaliana]
MNKNPRLDFSSPSSLATISDSADGELNEDDIFAIDISHAPPQARHSPVSSPAKQQTPARQLQRSKSGLKNVEASGILAALPESSGSSSYLSHVFHHKPAAALSTSVSSTASSSSSSGGGASAGSSSSARAIPTAPKPPQERLPFSASFVGGGKYPQSAPVQVPLVSSAMMNRHNKEFKLTDVVDDDEEEEEGEMLPPHEIVARSLAQSSLLSCSVLEGAGRTLKGRDLRQVRNAVFRRTGFID

SEQ ID NO: 27716 - DNA, 1102 bp, Arabidopsis thaliana
  misc_feature (1)..(1102): Ceres Seq. ID no. 13621924
  misc_feature: MA Experiment ID: 108434 Result: Up-regulated in Transcription
  misc_feature: MA Experiment 108434 PARAMETER Experiment Name: At_Root_Tips_cDNA_P Parameter: Tissue Value: Root Tips
  misc_feature: MA Experiment ID: 108608 Result: Up-regulated in Transcription
  misc_feature: MA Experiment 108608 PARAMETER Experiment Name: At_100uM_ABA_cDNA_P Parameter: Timepoint (hr) Value: 1
  misc_feature: MA Experiment 108608 PARAMETER Experiment Name: At_100uM_ABA_cDNA_P Parameter: Tissue Value: Aerial
  misc_feature: MA Experiment 108608 PARAMETER Experiment Name: At_100uM_ABA_cDNA_P Parameter: Treatment Value: 100uM ABA vs. No Treatment
  misc_feature: MA Experiment ID: 20000166 Result: Up-regulated in Transcription
  misc_feature: MA Experiment 20000166 PARAMETER Experiment Name: At_100uM_ABA_P Parameter: Age (day) Value: 14
  misc_feature: MA Experiment 20000166 PARAMETER Experiment Name: At_100uM_ABA_P Parameter: Organism Value: A. thaliana
  misc_feature: MA Experiment 20000166 PARAMETER Experiment Name: At_100uM_ABA_P Parameter: Plant Line Value: WS
  misc_feature: MA Experiment 20000166 PARAMETER Experiment Name: At_100uM_ABA_P Parameter: Timepoint (hr) Value: 1
  misc_feature: MA Experiment 20000166 PARAMETER Experiment Name: At_100uM_ABA_P Parameter: Tissue Value: Aerial
  misc_feature: MA Experiment 20000166 PARAMETER Experiment Name: At_100uM_ABA_P Parameter: Treatment Value: 100uM ABA vs. No Treatment
  misc_feature: MA Experiment ID: 20000227 Result: Up-regulated in Transcription
  misc_feature: MA Experiment 20000227 PARAMETER Experiment Name: At_Root-Tips-vs-Tops_P Parameter: Tissue Value: Root Tips vs. Root Tops
  misc_feature: MA Experiment ID: 20000234 Result: Up-regulated in Transcription
  misc_feature: MA Experiment 20000234 PARAMETER Experiment Name: At_Siliques_P Parameter: Age (day) Value: 21
  misc_feature: MA Experiment 20000234 PARAMETER Experiment Name: At_Siliques_P Parameter: Organism Value: A. thaliana
  misc_feature: MA Experiment 20000234 PARAMETER Experiment Name: At_Siliques_P Parameter: Plant Line Value: WS
  misc_feature: MA Experiment 20000234 PARAMETER Experiment Name: At_Siliques_P Parameter: Tissue Value: Less Than 5mm Siliques vs. Whole Plant
  misc_feature: MA Experiment ID: 20000235 Result: Up-regulated in Transcription
  misc_feature: MA Experiment 20000235 PARAMETER Experiment Name: At_Siliques_P Parameter: Age (day) Value: 21
  misc_feature: MA Experiment 20000235 PARAMETER Experiment Name: At_Siliques_P Parameter: Organism Value: A. thaliana
  misc_feature: MA Experiment 20000235 PARAMETER Experiment Name: At_Siliques_P Parameter: Plant Line Value: WS
  misc_feature: MA Experiment 20000235 PARAMETER Experiment Name: At_Siliques_P Parameter: Tissue Value: 5-10mm Siliques vs. Whole Plant
  misc_feature: MA Experiment ID: 20000438 Result: Up-regulated in Transcription
  misc_feature: MA Experiment 20000438 PARAMETER Experiment Name: At_Shoots__P Parameter: Age (day) Value: 14
  misc_feature: MA Experiment 20000438 PARAMETER Experiment Name: At_Shoots__P Parameter: Tissue Value: Shoots vs. Whole Plant
  misc_feature: MA Experiment ID: 20000495 Result: Down-regulated in Transcription
  misc_feature: MA Experiment 20000495 PARAMETER Experiment Name: At_Guard_Cells_P Parameter: Harvest Date Value: 8/2/2002
  misc_feature: MA Experiment 20000495 PARAMETER Experiment Name: At_Guard_Cells_P Parameter: Organism Value: A. thaliana
  misc_feature: MA Experiment 20000495 PARAMETER Experiment Name: At_Guard_Cells_P Parameter: Tissue Value: Guard Cells vs. Leaves
tccatttctcattgtatcttcatcagtctcttcttattccattttttcaaaccacttgcaaaattcgaatcagatcttctcttcaatcgaaaaaaaagaaaggatttgctctagattgttgaatcgaagatgtcgacaagggaagagaatgtttacatggcgaaattagccgaacaagctgaacgttacgaagaaatggttgaattcatggagaaagttgcgaaaactgttgatgttgaggaactttcagttgaagagaggaatcttctctctgttgcttacaagaacgtgattggagcgagaagagcttcgtggagaatcatttcttcgattgagcagaaagaagagagcaaagggaacgaagatcatgttgctattatcaaggattacagaggaaagattgaatccgagcttagcaaaatctgtgatgggattttgaatgttcttgaagctcatcttattccttctgcttcaccagctgaatctaaagtgttttatcttaagatgaagggtgattatcataggtatcttgctgagtttaaggctggtgctgaaaggaaagaagctgctgaaagcactttggttgcttacaagtctgcttccgacattgccactgctgagttagctcctactcacccgataaggcttggtcttgcactcaacttctctgtgttttactatgaaatcctcaactcgcctgatcgtgcttgcagcctcgcaaagcaggcgtttgatgatgcaatcgctgagttagatacattgggtgaggaatcatacaaggacagtacactgattatgcagcttcttagagacaatctcactctctggacttcagatatgactgacgaagcaggagatgagattaaggaggcatcaaagcccgatggtgccgagtaaacccgaagaagaggaagagtcattttataatggtagaaaactttcatgtgataatctgagtgagggatagctcaggattcttataagagacacagttttattgttgtttgtttgttttgaaactacttgcgatttatcattcctcctttagcttcctcaatatttcctattctcctttctaatgaaatcaaaacttggttatttc

SEQ ID NO: 27717 - protein, 255 aa, Arabidopsis thaliana
  peptide (1)..(255): Ceres Seq. ID no. 13621925
  misc_feature (4)..(241): Pfam Name: 14-3-3 protein Pfam Description: 14-3-3 protein
  misc_feature (1)..(250): Homolog of NCBI NO: 18417863 NR Description: 14-3-3 protein GF14 upsilon (grf5) [Arabidopsis
  misc_feature (2)..(255): Homolog of NCBI NO: 18396217 NR Description: 14-3-3 protein GF14 nu (grf7) [Arabidopsis
  misc_feature (3)..(250): Homolog of NCBI NO: 2921512 NR Description: GF14 protein [Fritillaria agrestis]
  misc_feature (2)..(255): Homolog of NCBI NO: 8515888 NR Description: 14-3-3 protein [Populus x canescens]
  misc_feature (1)..(255): Homolog of NCBI NO: 1168200 NR Description: 14-3-3-like protein GF14 psi (General regulatory
  misc_feature (1)..(255): Homolog of NCBI NO: 18421762 NR Description: 14-3-3 protein GF14 psi (grf3/RCI1) [Arabidopsis
MSTREENVYMAKLAEQAERYEEMVEFMEKVAKTVDVEELSVEERNLLSVAYKNVIGARRASWRIISSIEQKEESKGNEDHVAIIKDYRGKIESELSKICDGILNVLEAHLIPSASPAESKVFYLKMKGDYHRYLAEFKAGAERKEAAESTLVAYKSASDIATAELAPTHPIRLGLALNFSVFYYEILNSPDRACSLAKQAFDDAIAELDTLGEESYKDSTLIMQLLRDNLTLWTSDMTDEAGDEIKEASKPDGAE

SEQ ID NO: 27718 - protein, 246 aa, Arabidopsis thaliana
  peptide (1)..(246): Ceres Seq. ID no. 13621926
  misc_feature (1)..(232): Pfam Name: 14-3-3 protein Pfam Description: 14-3-3 protein
  misc_feature (1)..(241): Homolog of NCBI NO: 18417863 NR Description: 14-3-3 protein GF14 upsilon (grf5) [Arabidopsis
  misc_feature (1)..(246): Homolog of NCBI NO: 18396217 NR Description: 14-3-3 protein GF14 nu (grf7) [Arabidopsis
  misc_feature (1)..(241): Homolog of NCBI NO: 2921512 NR Description: GF14 protein [Fritillaria agrestis]
  misc_feature (1)..(246): Homolog of NCBI NO: 8515888 NR Description: 14-3-3 protein [Populus x canescens]
  misc_feature (1)..(246): Homolog of NCBI NO: 1168200 NR Description: 14-3-3-like protein GF14 psi (General regulatory
  misc_feature (1)..(246): Homolog of NCBI NO: 18421762 NR Description: 14-3-3 protein GF14 psi (grf3/RCI1) [Arabidopsis
MAKLAEQAERYEEMVEFMEKVAKTVDVEELSVEERNLLSVAYKNVIGARRASWRIISSIEQKEESKGNEDHVAIIKDYRGKIESELSKICDGILNVLEAHLIPSASPAESKVFYLKMKGDYHRYLAEFKAGAERKEAAESTLVAYKSASDIATAELAPTHPIRLGLALNFSVFYYEILNSPDRACSLAKQAFDDAIAELDTLGEESYKDSTLIMQLLRDNLTLWTSDMTDEAGDEIKEASKPDGAE

SEQ ID NO: 27719 - protein, 233 aa, Arabidopsis thaliana
  peptide (1)..(233): Ceres Seq. ID no. 13621927
  misc_feature (1)..(219): Pfam Name: 14-3-3 protein Pfam Description: 14-3-3 protein
  misc_feature (1)..(228): Homolog of NCBI NO: 18417863 NR Description: 14-3-3 protein GF14 upsilon (grf5) [Arabidopsis
  misc_feature (1)..(233): Homolog of NCBI NO: 18396217 NR Description: 14-3-3 protein GF14 nu (grf7) [Arabidopsis
  misc_feature (1)..(228): Homolog of NCBI NO: 2921512 NR Description: GF14 protein [Fritillaria agrestis]
  misc_feature (1)..(233): Homolog of NCBI NO: 8515888 NR Description: 14-3-3 protein [Populus x canescens]
  misc_feature (1)..(233): Homolog of NCBI NO: 1168200 NR Description: 14-3-3-like protein GF14 psi (General regulatory
  misc_feature (1)..(233): Homolog of NCBI NO: 18421762 NR Description: 14-3-3 protein GF14 psi (grf3/RCI1) [Arabidopsis
MVEFMEKVAKTVDVEELSVEERNLLSVAYKNVIGARRASWRIISSIEQKEESKGNEDHVAIIKDYRGKIESELSKICDGILNVLEAHLIPSASPAESKVFYLKMKGDYHRYLAEFKAGAERKEAAESTLVAYKSASDIATAELAPTHPIRLGLALNFSVFYYEILNSPDRACSLAKQAFDDAIAELDTLGEESYKDSTLIMQLLRDNLTLWTSDMTDEAGDEIKEASKPDGAE

SEQ ID NO: 27720 - DNA, 764 bp, Arabidopsis thaliana
  misc_feature (1)..(764): Ceres Seq. ID no. 12481981
  misc_feature: MA Experiment ID: 108462 Result: Down-regulated in Transcription
  misc_feature: MA Experiment 108462 PARAMETER Experiment Name: At_Germinating_Seeds_cDNA_P Parameter: Age (day) Value: 2 vs. 0
  misc_feature: MA Experiment 108462 PARAMETER Experiment Name: At_Germinating_Seeds_cDNA_P Parameter: Tissue Value: Germinating Seeds
  misc_feature: MA Experiment ID: 108464 Result: Down-regulated in Transcription
  misc_feature: MA Experiment 108464 PARAMETER Experiment Name: At_Germinating_Seeds_cDNA_P Parameter: Age (day) Value: 4 vs. 0
  misc_feature: MA Experiment 108464 PARAMETER Experiment Name: At_Germinating_Seeds_cDNA_P Parameter: Tissue Value: Germinating Seeds
  misc_feature: MA Experiment ID: 108488 Result: Down-regulated in Transcription
  misc_feature: MA Experiment ID: 20000184 Result: Down-regulated in Transcription
  misc_feature: MA Experiment 20000184 PARAMETER Experiment Name: At_Shoots__P Parameter: Age (day) Value: 7
  misc_feature: MA Experiment 20000184 PARAMETER Experiment Name: At_Shoots__P Parameter: Tissue Value: Shoots vs. Whole Plant
  misc_feature: MA Experiment ID: 20000224 Result: Up-regulated in Transcription
  misc_feature: MA Experiment ID: 20000264 Result: Up-regulated in Transcription
  misc_feature: MA Experiment 20000264 PARAMETER Experiment Name: At_Open_Flower_P Parameter: Age (day) Value: 21
  misc_feature: MA Experiment 20000264 PARAMETER Experiment Name: At_Open_Flower_P Parameter: Plant Line Value: WS
  misc_feature: MA Experiment 20000264 PARAMETER Experiment Name: At_Open_Flower_P Parameter: Tissue Value: Open Flower vs. Whole Plant
  misc_feature: MA Experiment ID: 20000794 Result: Up-regulated in Transcription
  misc_feature: MA Experiment 20000794 PARAMETER Experiment Name: At_Petals_P Parameter: Age (day) Value: 23-25 days
  misc_feature: MA Experiment 20000794 PARAMETER Experiment Name: At_Petals_P Parameter: Plant Line Value: WS
  misc_feature: MA Experiment 20000794 PARAMETER Experiment Name: At_Petals_P Parameter: Tissue Value: Petals vs. Whole plant
  misc_feature: MA Experiment ID: 20001557 Result: Down-regulated in Transcription
  misc_feature: MA Experiment 20001557 PARAMETER Experiment Name: At_Drought_Soil_Dry_P Parameter: Age (day) Value: 27
  misc_feature: MA Experiment 20001557 PARAMETER Experiment Name: At_Drought_Soil_Dry_P Parameter: Organism Value: A. thaliana
  misc_feature: MA Experiment 20001557 PARAMETER Experiment Name: At_Drought_Soil_Dry_P Parameter: Plant Line Value: WS
  misc_feature: MA Experiment 20001557 PARAMETER Experiment Name: At_Drought_Soil_Dry_P Parameter: Post Timepoint (hr) Value: 3
  misc_feature: MA Experiment 20001557 PARAMETER Experiment Name: At_Drought_Soil_Dry_P Parameter: Post-Treatment Value: Re-Water vs. No Drought
  misc_feature: MA Experiment 20001557 PARAMETER Experiment Name: At_Drought_Soil_Dry_P Parameter: Timepoint (day) Value: 13
  misc_feature: MA Experiment 20001557 PARAMETER Experiment Name: At_Drought_Soil_Dry_P Parameter: Treatment Value: Drought vs. No Drought
agagagagtatcgaagagaagaatccaaaaaaatgggatcttcaccaccgaagaagacgactctgcaacggtacttgtcacagcttcaacaacatcctttaagaacaaaggcaataactgctggagttttgtctggtgttagcgatgttgtatcacagaagctctctggcatacagaagattcagctgagaagggttcttctcaaagtgatatttgctggtgggtttcttggaccagcagggcatttctttcatacatatttagataagttttttaaagggaagaaggatacacagactgttgcaaagaaggtaattctggagcaattgacattgtcaccattgaaccatttgcttttcatgatctattatggagtagtcatagaaagaactccctggacccttgttagagaaaggatcaagaagacttatccaacggtccagcttactgcatggacgtttttcccggtggtgggatggattaactacaagtatgtgccactgcacttccgggtcatcttgcacagcctggtcgcattcttttggggaattttcctaaccctgcgagcgaggtcaatgacactagctttggcaaaggctaagtgattaggaaacacattgatcgtgacagagaactcaagccttgggactcattatgatcacttagtactctgtaagttaaagcaaatcaaacagctctgaaaccaaataaaaatctgtattaagatgataccattctaggatagcaatatgttttaagttatt

SEQ ID NO: 27721 - protein, 200 aa, Arabidopsis thaliana
  peptide (1)..(200): Ceres Seq. ID no. 12481982
  misc_feature (123)..(194): Pfam Name: Mpv17 / PMP22 family Pfam Description: Mpv17 / PMP22 family
  misc_feature (24)..(192): Homolog of NCBI NO: 34783266 NR Description: MPV17 protein [Homo sapiens]
  misc_feature (24)..(192): Homolog of NCBI NO: 4505241 NR Description: MpV17 transgene, murine homolog,
  misc_feature (5)..(185): Homolog of NCBI NO: 6679577 NR Description: peroxisomal membrane protein 2
  misc_feature (5)..(184): Homolog of NCBI NO: 9757841 NR Description: contains similarity to 22 kDa peroxisomal
  misc_feature (14)..(197): Homolog of NCBI NO: 21358267 NR Description: CG7970-PA [Drosophila melanogaster]
  misc_feature (4)..(189): Homolog of NCBI NO: 21553640 NR Description: contains similarity to 22 kDa peroxisomal
  misc_feature (5)..(189): Homolog of NCBI NO: 18422298 NR Description: putative protein
  misc_feature (40)..(177): Homolog of NCBI NO: 7485192 NR Description: hypothetical protein d13195c - Arabidopsis
  misc_feature (40)..(191): Homolog of NCBI NO: 30682784 NR Description: expressed protein [Arabidopsis thaliana]
  misc_feature (11)..(200): Homolog of NCBI NO: 15233520 NR Description: PEROXISOMAL MEMBRANE PROTEIN PMP22; protein id:
REYRREESKKMGSSPPKKTTLQRYLSQLQQHPLRTKAITAGVLSGVSDVVSQKLSGIQKIQLRRVLLKVIFAGGFLGPAGHFFHTYLDKFFKGKKDTQTVAKKVILEQLTLSPLNHLLFMIYYGVVIERTPWTLVRERIKKTYPTVQLTAWTFFPVVGWINYKYVPLHFRVILHSLVAFFWGIFLTLRARSMTLALAKAK

SEQ ID NO: 27722 - protein, 190 aa, Arabidopsis thaliana
  peptide (1)..(190): Ceres Seq. ID no. 12481983
  misc_feature (113)..(184): Pfam Name: Mpv17 / PMP22 family Pfam Description: Mpv17 / PMP22 family
  misc_feature (14)..(182): Homolog of NCBI NO: 34783266 NR Description: MPV17 protein [Homo sapiens]
  misc_feature (14)..(182): Homolog of NCBI NO: 4505241 NR Description: MpV17 transgene, murine homolog,
  misc_feature (1)..(175): Homolog of NCBI NO: 6679577 NR Description: peroxisomal membrane protein 2
  misc_feature (1)..(174): Homolog of NCBI NO: 9757841 NR Description: contains similarity to 22 kDa peroxisomal
  misc_feature (4)..(187): Homolog of NCBI NO: 21358267 NR Description: CG7970-PA [Drosophila melanogaster]
  misc_feature (1)..(179): Homolog of NCBI NO: 21553640 NR Description: contains similarity to 22 kDa peroxisomal
  misc_feature (1)..(179): Homolog of NCBI NO: 18422298 NR Description: putative protein
  misc_feature (30)..(167): Homolog of NCBI NO: 7485192 NR Description: hypothetical protein d13195c - Arabidopsis
  misc_feature (30)..(181): Homolog of NCBI NO: 30682784 NR Description: expressed protein [Arabidopsis thaliana]
  misc_feature (1)..(190): Homolog of NCBI NO: 15233520 NR Description: PEROXISOMAL MEMBRANE PROTEIN PMP22; protein id:
MGSSPPKKTTLQRYLSQLQQHPLRTKAITAGVLSGVSDVVSQKLSGIQKIQLRRVLLKVIFAGGFLGPAGHFFHTYLDKFFKGKKDTQTVAKKVILEQLTLSPLNHLLFMIYYGVVIERTPWTLVRERIKKTYPTVQLTAWTFFPVVGWINYKYVPLHFRVILHSLVAFFWGIFLTLRARSMTLALAKAK

SEQ ID NO: 27723 - DNA, 680 bp, Arabidopsis thaliana
  misc_feature (1)..(680): Ceres Seq. ID no. 12338681
  misc_feature: MA Experiment ID: 20000307 Result: Down-regulated in Transcription
  misc_feature: MA Experiment 20000307 PARAMETER Experiment Name: At_Germinating_Seeds_Sub_P Parameter: Age (hr) Value: 24 vs. 0
  misc_feature: MA Experiment 20000307 PARAMETER Experiment Name: At_Germinating_Seeds_Sub_P Parameter: Organism Value: A. thaliana
  misc_feature: MA Experiment 20000307 PARAMETER Experiment Name: At_Germinating_Seeds_Sub_P Parameter: Plant Line Value: WS
  misc_feature: MA Experiment 20000307 PARAMETER Experiment Name: At_Germinating_Seeds_Sub_P Parameter: Tissue Value: Germinating Seeds
  misc_feature: MA Experiment ID: 20000440 Result: Up-regulated in Transcription
  misc_feature: MA Experiment 20000440 PARAMETER Experiment Name: At_Closed-Flower__Sub_P Parameter: Tissue Value: Closed Flower vs. Whole Plant
  misc_feature: Phenotype: WHOLE PLANT Color-Dark Green
  misc_feature: Phenotype: WHOLE PLANT Size-Small
  misc_feature: Phenotype: WHOLE PLANT Color-Dark Green
  misc_feature: Phenotype: WHOLE PLANT Size-Small
  misc_feature: Phenotype: WHOLE PLANT Color-Dark Green
  misc_feature: Phenotype: WHOLE PLANT Size-Small
attcattcttcatttcctctgcctctttctcagatcacaaaaccctaatttcgaatctttattcttcagaatggctttctgtaacaaactcggtggtctattgagacaaaacatttcttctaacggaaatgttccggttacgtctatgctcggatctctccggttgatgtctaccaagcttttcatcggaggtctctcatggggaaccgatgacgcatccttaagggatgcttttgctcacttcggtgacgttgttgatgctaaagttatcgttgatagagagacaggaagatcaagggggtttggatttgtcaacttcaatgatgagggcgctgcaactgctgccatatcagagatggacggaaaggaactgaatggtcgtcacatccgagtgaatcctgctaatgatagaccaagtgctccacgggcttatggaggcggtggtggatacagcggaggaggtggtggtggctatggaggaggaggtggcagctacggtggtggtgatggtggtggttactaaacagaggatgtggttgtgaagaagagttaatggttctgtttagttggtttcttctattgaatcttatgttagtacaaaacctgaatgggatttgctgaaaactcattactcttttttttttggttaccaatcaatttggttgaaatattttattgcc

SEQ ID NO: 27724 - protein, 173 aa, Arabidopsis thaliana
  peptide (1)..(173): Ceres Seq. ID no. 12338682
  misc_feature (60)..(131): Pfam Name: RNA recognition motif. (a.k.a. RRM, RBD, or RNP domain) Pfam Description: RNA recognition motif. (a.k.a. RRM, RBD, or RNP
  misc_feature (24)..(171): Homolog of NCBI NO: 34906972 NR Description: putative glycine-rich RNA-binding protein 2
  misc_feature (24)..(148): Homolog of NCBI NO: 7489099 NR Description: RNA-binding protein RGP-3 - wood tobacco
  misc_feature (24)..(170): Homolog of NCBI NO: 7439995 NR Description: RNA binding protein 3 - wood tobacco
  misc_feature (24)..(172): Homolog of NCBI NO: 7439994 NR Description: glycine-rich RNA-binding protein - garden pea
  misc_feature (24)..(158): Homolog of NCBI NO: 21553972 NR Description: glycine-rich RNA binding protein, putative
  misc_feature (24)..(158): Homolog of NCBI NO: 15229525 NR Description: glycine-rich RNA-binding protein
  misc_feature (43)..(173): Homolog of NCBI NO: 322514 NR Description: glycine-rich RNA-binding protein (clone A81) -
  misc_feature (24)..(173): Homolog of NCBI NO: 15236359 NR Description: glycine-rich RNA-binding protein AtGRP2
  misc_feature (24)..(172): Homolog of NCBI NO: 30682622 NR Description: glycine-rich RNA-binding protein (AtGRP2)
  misc_feature (24)..(173): Homolog of NCBI NO: 2826811 NR Description: AtGRP2 [Arabidopsis thaliana]
FILHFLCLFLRSQNPNFESLFFRMAFCNKLGGLLRQNISSNGNVPVTSMLGSLRLMSTKLFIGGLSWGTDDASLRDAFAHFGDVVDAKVIVDRETGRSRGFGFVNFNDEGAATAAISEMDGKELNGRHIRVNPANDRPSAPRAYGGGGGYSGGGGGGYGGGGGSYGGGDGGGY

SEQ ID NO: 27725 - protein, 150 aa, Arabidopsis thaliana
  peptide (1)..(150): Ceres Seq. ID no. 12338683
  misc_feature (37)..(108): Pfam Name: RNA recognition motif. (a.k.a. RRM, RBD, or RNP domain) Pfam Description: RNA recognition motif. (a.k.a. RRM, RBD, or RNP
  misc_feature (1)..(148): Homolog of NCBI NO: 34906972 NR Description: putative glycine-rich RNA-binding protein 2
  misc_feature (1)..(125): Homolog of NCBI NO: 7489099 NR Description: RNA-binding protein RGP-3 - wood tobacco
  misc_feature (1)..(147): Homolog of NCBI NO: 7439995 NR Description: RNA binding protein 3 - wood tobacco
  misc_feature (1)..(149): Homolog of NCBI NO: 7439994 NR Description: glycine-rich RNA-binding protein - garden pea
  misc_feature (1)..(135): Homolog of NCBI NO: 21553972 NR Description: glycine-rich RNA binding protein, putative
  misc_feature (1)..(135): Homolog of NCBI NO: 15229525 NR Description: glycine-rich RNA-binding protein
  misc_feature (20)..(150): Homolog of NCBI NO: 322514 NR Description: glycine-rich RNA-binding protein (clone A81) -
  misc_feature (1)..(150): Homolog of NCBI NO: 15236359 NR Description: glycine-rich RNA-binding protein AtGRP2
  misc_feature (1)..(149): Homolog of NCBI NO: 30682622 NR Description: glycine-rich RNA-binding protein (AtGRP2)
  misc_feature (1)..(150): Homolog of NCBI NO: 2826811 NR Description: AtGRP2 [Arabidopsis thaliana]
MAFCNKLGGLLRQNISSNGNVPVTSMLGSLRLMSTKLFIGGLSWGTDDASLRDAFAHFGDVVDAKVIVDRETGRSRGFGFVNFNDEGAATAAISEMDGKELNGRHIRVNPANDRPSAPRAYGGGGGYSGGGGGGYGGGGGSYGGGDGGGY

SEQ ID NO: 27726 - protein, 125 aa, Arabidopsis thaliana
  peptide (1)..(125): Ceres Seq. ID no. 12338685
  misc_feature (12)..(83): Pfam Name: RNA recognition motif. (a.k.a. RRM, RBD, or RNP domain) Pfam Description: RNA recognition motif. (a.k.a. RRM, RBD, or RNP
  misc_feature (1)..(123): Homolog of NCBI NO: 34906972 NR Description: putative glycine-rich RNA-binding protein 2
  misc_feature (1)..(100): Homolog of NCBI NO: 7489099 NR Description: RNA-binding protein RGP-3 - wood tobacco
  misc_feature (1)..(122): Homolog of NCBI NO: 7439995 NR Description: RNA binding protein 3 - wood tobacco
  misc_feature (1)..(124): Homolog of NCBI NO: 7439994 NR Description: glycine-rich RNA-binding protein - garden pea
  misc_feature (1)..(110): Homolog of NCBI NO: 21553972 NR Description: glycine-rich RNA binding protein, putative
  misc_feature (1)..(110): Homolog of NCBI NO: 15229525 NR Description: glycine-rich RNA-binding protein
  misc_feature (1)..(125): Homolog of NCBI NO: 322514 NR Description: glycine-rich RNA-binding protein (clone A81) -
  misc_feature (1)..(125): Homolog of NCBI NO: 15236359 NR Description: glycine-rich RNA-binding protein AtGRP2
  misc_feature (1)..(124): Homolog of NCBI NO: 30682622 NR Description: glycine-rich RNA-binding protein (AtGRP2)
  misc_feature (1)..(125): Homolog of NCBI NO: 2826811 NR Description: AtGRP2 [Arabidopsis thaliana]
MLGSLRLMSTKLFIGGLSWGTDDASLRDAFAHFGDVVDAKVIVDRETGRSRGFGFVNFNDEGAATAAISEMDGKELNGRHIRVNPANDRPSAPRAYGGGGGYSGGGGGGYGGGGGSYGGGDGGGY

SEQ ID NO: 27727 - DNA, 1219 bp, Arabidopsis thaliana
  misc_feature (1)..(1219): Ceres Seq. ID no. 13487573
  misc_feature: MA Experiment ID: 108434 Result: Down-regulated in Transcription
  misc_feature: MA Experiment 108434 PARAMETER Experiment Name: At_Root_Tips_cDNA_P Parameter: Tissue Value: Root Tips
  misc_feature: MA Experiment ID: 108501 Result: Down-regulated in Transcription
  misc_feature: MA Experiment 108501 PARAMETER Experiment Name: At_ap2_floral_buds_cDNA_P Parameter: Plant Line Value: ap2 (Ler.)
  misc_feature: MA Experiment 108501 PARAMETER Experiment Name: At_ap2_floral_buds_cDNA_P Parameter: Tissue Value: Closed Flower
  misc_feature: MA Experiment ID: 20000171 Result: Up-regulated in Transcription
  misc_feature: MA Experiment 20000171 PARAMETER Experiment Name: At_42deg_Heat_P Parameter: Age (day) Value: 14
  misc_feature: MA Experiment 20000171 PARAMETER Experiment Name: At_42deg_Heat_P Parameter: Organism Value: A. thaliana
  misc_feature: MA Experiment 20000171 PARAMETER Experiment Name: At_42deg_Heat_P Parameter: Plant Line Value: WS
  misc_feature: MA Experiment 20000171 PARAMETER Experiment Name: At_42deg_Heat_P Parameter: Temperature (deg C) Value: 42 vs. 22
  misc_feature: MA Experiment 20000171 PARAMETER Experiment Name: At_42deg_Heat_P Parameter: Timepoint (hr) Value: 1
  misc_feature: MA Experiment 20000171 PARAMETER Experiment Name: At_42deg_Heat_P Parameter: Tissue Value: Aerial
  misc_feature: MA Experiment ID: 20000437 Result: Up-regulated in Transcription
  misc_feature: MA Experiment 20000437 PARAMETER Experiment Name: At_Drought_P Parameter: Age (day) Value: 8
  misc_feature: MA Experiment 20000437 PARAMETER Experiment Name: At_Drought_P Parameter: Organism Value: A. thaliana
  misc_feature: MA Experiment 20000437 PARAMETER Experiment Name: At_Drought_P Parameter: Plant Line Value: WS
  misc_feature: MA Experiment 20000437 PARAMETER Experiment Name: At_Drought_P Parameter: Timepoint (hr) Value: 24
  misc_feature: MA Experiment 20000437 PARAMETER Experiment Name: At_Drought_P Parameter: Tissue Value: Whole Plant
  misc_feature: MA Experiment 20000437 PARAMETER Experiment Name: At_Drought_P Parameter: Treatment Value: Drought vs. No Drought
ctttttgaaacgtcagggaaagagaatcccgcaatactctctcctctctcttttttttttttttctgggtcgaagtttggttctttgttggataatgatggtttttgacagtgaatctaacctagaccgattcttacgctgcactacaccgattgtgcctgcctattccctcccaaagacacagatcaagaaccttaatcctctatggtatccgttggagagccagagcgtcgagtatttcaggttgggagatttttgggattgtttcgacgagtggagtgcttacggtgcaggtgtccccattgtatcggaaacgggcgaaacattggtccaatactatgttccttacctctctgcaatccagattttcacctctcattctgttatcaatactcttagggaggagacagaatcaggggattcagggagcgagtcgtgtagcgaggagtggagatgggaaggatgttcttcgtctgaagaagggtttgatcatcaagaacctctcgatcgcctcggttactcttacttgcagtatttcgagagatgtacaccttactctagagtccctctcatggataagatcaaagagttgggagaaagatacgtagggttgaggtcattgaggagtgttgatctgtctcctgcgagttggatggctgttgcttggtatccaatctatcacattcccatgaatagaagcataaaagacttgtctacttgcttcctcacttaccacacgctttcttcatctttccaagatgtaaaaagggaagaggagaaggagaggataagtgtgagtgcatttgggatggccacttacaagatgcaagggaggctatgggataatgatagattgctttgctttttgagcgtagcagattcttggctaaagcagctaagggtccaccaccatgacttcacctacttcaccactactactcattatctttgatatatgtagtgttttagatcattacttggttaacagtctatttagctttgttgtttaagagtagcacatatcaataatgttggattgttgttacttgggactctttgggaaggataggtactgactttttcttcacaagacttttatatcataaatttagtttggggtcagattgatgatgatgggctcaatacatttattcttttctaatgttttgtggctttctgtttgtacaaacgcacgttctcttgattttggtatccttcc

SEQ ID NO: 27728 - protein, 316 aa, Arabidopsis thaliana
  peptide (1)..(316): Ceres Seq. ID no. 13487574
  misc_feature (39)..(309): Pfam Name: Protein of unknown function (DUF789) Pfam Description: Protein of unknown function (DUF789)
  misc_feature (33)..(280): Homolog of NCBI NO: 22328289 NR Description: expressed protein [Arabidopsis thaliana]
  misc_feature (226)..(314): Homolog of NCBI NO: 9280648 NR Description: F21B7.22 [Arabidopsis thaliana]
  misc_feature (38)..(252): Homolog of NCBI NO: 9280648 NR Description: F21B7.22 [Arabidopsis thaliana]
  misc_feature (38)..(309): Homolog of NCBI NO: 18958013 NR Description: At1g03610/F21B7_13 [Arabidopsis thaliana]
  misc_feature (38)..(309): Homolog of NCBI NO: 18379117 NR Description: expressed protein [Arabidopsis thaliana]
  misc_feature (25)..(252): Homolog of NCBI NO: 7486201 NR Description: hypothetical protein F26K10.30 - Arabidopsis
  misc_feature (59)..(316): Homolog of NCBI NO: 19310572 NR Description: unknown protein [Arabidopsis thaliana]
  misc_feature (32)..(316): Homolog of NCBI NO: 30687867 NR Description: expressed protein [Arabidopsis thaliana]
  misc_feature (33)..(316): Homolog of NCBI NO: 21594686 NR Description: unknown [Arabidopsis thaliana]
  misc_feature (32)..(316): Homolog of NCBI NO: 18417136 NR Description: expressed protein [Arabidopsis thaliana]
FLKRQGKRIPQYSLLSLFFFFLGRSLVLCWIMMVFDSESNLDRFLRCTTPIVPAYSLPKTQIKNLNPLWYPLESQSVEYFRLGDFWDCFDEWSAYGAGVPIVSETGETLVQYYVPYLSAIQIFTSHSVINTLREETESGDSGSESCSEEWRWEGCSSSEEGFDHQEPLDRLGYSYLQYFERCTPYSRVPLMDKIKELGERYVGLRSLRSVDLSPASWMAVAWYPIYHIPMNRSIKDLSTCFLTYHTLSSSFQDVKREEEKERISVSAFGMATYKMQGRLWDNDRLLCFLSVADSWLKQLRVHHHDFTYFTTTTHYL

SEQ ID NO: 27729 - protein, 285 aa, Arabidopsis thaliana
  peptide (1)..(285): Ceres Seq. ID no. 13487575
  misc_feature (8)..(278): Pfam Name: Protein of unknown function (DUF789) Pfam Description: Protein of unknown function (DUF789)
  misc_feature (2)..(249): Homolog of NCBI NO: 22328289 NR Description: expressed protein [Arabidopsis thaliana]
  misc_feature (195)..(283): Homolog of NCBI NO: 9280648 NR Description: F21B7.22 [Arabidopsis thaliana]
  misc_feature (7)..(221): Homolog of NCBI NO: 9280648 NR Description: F21B7.22 [Arabidopsis thaliana]
  misc_feature (7)..(278): Homolog of NCBI NO: 18958013 NR Description: At1g03610/F21B7_13 [Arabidopsis thaliana]
  misc_feature (7)..(278): Homolog of NCBI NO: 18379117 NR Description: expressed protein [Arabidopsis thaliana]
  misc_feature (1)..(221): Homolog of NCBI NO: 7486201 NR Description: hypothetical protein F26K10.30 - Arabidopsis
  misc_feature (28)..(285): Homolog of NCBI NO: 19310572 NR Description: unknown protein [Arabidopsis thaliana]
  misc_feature (1)..(285): Homolog of NCBI NO: 30687867 NR Description: expressed protein [Arabidopsis thaliana]
  misc_feature (2)..(285): Homolog of NCBI NO: 21594686 NR Description: unknown [Arabidopsis thaliana]
  misc_feature (1)..(285): Homolog of NCBI NO: 18417136 NR Description: expressed protein [Arabidopsis thaliana]
MMVFDSESNLDRFLRCTTPIVPAYSLPKTQIKNLNPLWYPLESQSVEYFRLGDFWDCFDEWSAYGAGVPIVSETGETLVQYYVPYLSAIQIFTSHSVINTLREETESGDSGSESCSEEWRWEGCSSSEEGFDHQEPLDRLGYSYLQYFERCTPYSRVPLMDKIKELGERYVGLRSLRSVDLSPASWMAVAWYPIYHIPMNRSIKDLSTCFLTYHTLSSSFQDVKREEEKERISVSAFGMATYKMQGRLWDNDRLLCFLSVADSWLKQLRVHHHDFTYFTTTTHYL

SEQ ID NO: 27730 - protein, 284 aa, Arabidopsis thaliana
  peptide (1)..(284): Ceres Seq. ID no. 13487576
  misc_feature (7)..(277): Pfam Name: Protein of unknown function (DUF789) Pfam Description: Protein of unknown function (DUF789)
  misc_feature (1)..(248): Homolog of NCBI NO: 22328289 NR Description: expressed protein [Arabidopsis thaliana]
  misc_feature (194)..(282): Homolog of NCBI NO: 9280648 NR Description: F21B7.22 [Arabidopsis thaliana]
  misc_feature (6)..(220): Homolog of NCBI NO: 9280648 NR Description: F21B7.22 [Arabidopsis thaliana]
  misc_feature (6)..(277): Homolog of NCBI NO: 18958013 NR Description: At1g03610/F21B7_13 [Arabidopsis thaliana]
  misc_feature (6)..(277): Homolog of NCBI NO: 18379117 NR Description: expressed protein [Arabidopsis thaliana]
  misc_feature (1)..(220): Homolog of NCBI NO: 7486201 NR Description: hypothetical protein F26K10.30 - Arabidopsis
  misc_feature (27)..(284): Homolog of NCBI NO: 19310572 NR Description: unknown protein [Arabidopsis thaliana]
  misc_feature (1)..(284): Homolog of NCBI NO: 30687867 NR Description: expressed protein [Arabidopsis thaliana]
  misc_feature (1)..(284): Homolog of NCBI NO: 21594686 NR Description: unknown [Arabidopsis thaliana]
  misc_feature (1)..(284): Homolog of NCBI NO: 18417136 NR Description: expressed protein [Arabidopsis thaliana]
MVFDSESNLDRFLRCTTPIVPAYSLPKTQIKNLNPLWYPLESQSVEYFRLGDFWDCFDEWSAYGAGVPIVSETGETLVQYYVPYLSAIQIFTSHSVINTLREETESGDSGSESCSEEWRWEGCSSSEEGFDHQEPLDRLGYSYLQYFERCTPYSRVPLMDKIKELGERYVGLRSLRSVDLSPASWMAVAWYPIYHIPMNRSIKDLSTCFLTYHTLSSSFQDVKREEEKERISVSAFGMATYKMQGRLWDNDRLLCFLSVADSWLKQLRVHHHDFTYFTTTTHYL

SEQ ID NO: 27731 - DNA, 930 bp, Arabidopsis thaliana
  misc_feature (1)..(930): Ceres Seq. ID no. 13493755
  misc_feature: MA Experiment ID: 108434 Result: Up-regulated in Transcription
  misc_feature: MA Experiment 108434 PARAMETER Experiment Name: At_Root_Tips_cDNA_P Parameter: Tissue Value: Root Tips
  misc_feature: MA Experiment ID: 108461 Result: Down-regulated in Transcription
  misc_feature: MA Experiment 108461 PARAMETER Experiment Name: At_Germinating_Seeds_cDNA_P Parameter: Age (day) Value: 1 vs. 0
  misc_feature: MA Experiment 108461 PARAMETER Experiment Name: At_Germinating_Seeds_cDNA_P Parameter: Tissue Value: Germinating Seeds
  misc_feature: MA Experiment ID: 108462 Result: Down-regulated in Transcription
  misc_feature: MA Experiment 108462 PARAMETER Experiment Name: At_Germinating_Seeds_cDNA_P Parameter: Age (day) Value: 2 vs. 0
  misc_feature: MA Experiment 108462 PARAMETER Experiment Name: At_Germinating_Seeds_cDNA_P Parameter: Tissue Value: Germinating Seeds
  misc_feature: MA Experiment ID: 108463 Result: Down-regulated in Transcription
  misc_feature: MA Experiment 108463 PARAMETER Experiment Name: At_Germinating_Seeds_cDNA_P Parameter: Age (day) Value: 3 vs. 0
  misc_feature: MA Experiment 108463 PARAMETER Experiment Name: At_Germinating_Seeds_cDNA_P Parameter: Tissue Value: Germinating Seeds
  misc_feature: MA Experiment ID: 108464 Result: Down-regulated in Transcription
  misc_feature: MA Experiment 108464 PARAMETER Experiment Name: At_Germinating_Seeds_cDNA_P Parameter: Age (day) Value: 4 vs. 0
  misc_feature: MA Experiment 108464 PARAMETER Experiment Name: At_Germinating_Seeds_cDNA_P Parameter: Tissue Value: Germinating Seeds
  misc_feature: MA Experiment ID: 20000090 Result: Up-regulated in Transcription
  misc_feature: MA Experiment ID: 20000180 Result: Down-regulated in Transcription
  misc_feature: MA Experiment 20000180 PARAMETER Experiment Name: At_Germinating_Seeds_P Parameter: Age (hr) Value: 24 vs. 0
  misc_feature: MA Experiment 20000180 PARAMETER Experiment Name: At_Germinating_Seeds_P Parameter: Tissue Value: Germinating Seeds
  misc_feature: MA Experiment ID: 20000224 Result: Down-regulated in Transcription
  misc_feature: MA Experiment ID: 20001248 Result: Up-regulated in Transcription
  misc_feature: MA Experiment 20001248 PARAMETER Experiment Name: At_Far-red-induction_P Parameter: Age (day) Value: 7
  misc_feature: MA Experiment 20001248 PARAMETER Experiment Name: At_Far-red-induction_P Parameter: Light Value: Far-red vs. White
  misc_feature: MA Experiment 20001248 PARAMETER Experiment Name: At_Far-red-induction_P Parameter: Organism Value: A. thaliana
  misc_feature: MA Experiment 20001248 PARAMETER Experiment Name: At_Far-red-induction_P Parameter: Plant Line Value: Columbia
  misc_feature: MA Experiment 20001248 PARAMETER Experiment Name: At_Far-red-induction_P Parameter: Timepoint (hr) Value: 4
  misc_feature: MA Experiment 20001248 PARAMETER Experiment Name: At_Far-red-induction_P Parameter: Tissue Value: Whole Plant
attcctctgagaaaccctaagaaaaaccctgcctgaaaatctctgttttttttgacgattctttctttgtgatcggaaaaaatggtggctggtctaagagatttcacgctcagaaccgaagatggctccgggaaaccggtactggatgaatctaacggcgaggaacttatgcacgttcagacttccgtcgccgtcgctctcggaaaccgtcccattgagtctcccggaactctctacatcacttccaggaaattaatttggctgagcgatgtagacatggctaaaggatacgcagttgatttcttatcaatatcgcttcacgctgtttctagagatcctgaggcttattcatctccttgtatatatactcagattgaagttgaagaagatgaggatgatgagtctgattcagaatccactgaagttttggacttatcaaagatcagagagatgaggcttgttccttctgactctacccagttggagacgctgtttgatgtattctgcgagtgtgctgagctgaatcctgaaccagttcaagaagaagaagaagaaagcggacataattgggtgtttagtgctgatcagatggatgttcgtggaggagatgatgatgcagagtggcaaatatctcagagtccgactagtgtaattggtcattccaatggagatgaaggtcttaatcagcctatgcttgagctccaaatcaatgatcagaggtttgaggatgctgaagagatggttcatgaaagtgagaccaaagatcactagactcttcacaattgtactcgaaaacatagtagttgtgttattttaacgatgaaagagttgtattatgttcaacgataaagtattatgttcgtgatacttagcttttcaatttatggctgattaaactttaatctttctcgtaatagatctctcaatttg

SEQ ID NO: 27732 - protein, 229 aa, Arabidopsis thaliana
  peptide (1)..(229): Ceres Seq. ID no. 13493756
  misc_feature (46)..(120): Pfam Name: Nucleotide-sensitive chloride conductance Pfam Description: Nucleotide-sensitive chloride conductance
  misc_feature (49)..(158): Homolog of NCBI NO: 544031 NR Description: Chloride conductance regulatory protein ICln
  misc_feature (49)..(158): Homolog of NCBI NO: 13431571 NR Description: Chloride conductance regulatory protein ICln (Chloride channel, nucleotide sensitive 1A) (Chloride ion current
  misc_feature (27)..(158): Homolog of NCBI NO: 2197127 NR Description: swelling-induced chloride conductance regulatory
  misc_feature (27)..(158): Homolog of NCBI NO: 7513563 NR Description: swelling-induced chloride conductance regulatory
  misc_feature (27)..(158): Homolog of NCBI NO: 1095482 NR Description: Cl current-related protein
  misc_feature (27)..(158): Homolog of NCBI NO: 1060971 NR Description: chloride channel [Oryctolagus cuniculus]
  misc_feature (97)..(229): Homolog of NCBI NO: 21671879 NR Description: Hypothetical protein [Oryza sativa (japonica
  misc_feature (58)..(229): Homolog of NCBI NO: 37531488 NR Description: hypothetical protein [Oryza sativa (japonica
  misc_feature (1)..(100): Homolog of NCBI NO: 37531484 NR Description: unknown protein [Oryza sativa (japonica
  misc_feature (1)..(229): Homolog of NCBI NO: 15241766 NR Description: expressed protein [Arabidopsis thaliana]
MVAGLRDFTLRTEDGSGKPVLDESNGEELMHVQTSVAVALGNRPIESPGTLYITSRKLIWLSDVDMAKGYAVDFLSISLHAVSRDPEAYSSPCIYTQIEVEEDEDDESDSESTEVLDLSKIREMRLVPSDSTQLETLFDVFCECAELNPEPVQEEEEESGHNWVFSADQMDVRGGDDDAEWQISQSPTSVIGHSNGDEGLNQPMLELQINDQRFEDAEEMVHESETKDH

SEQ ID NO: 27733 - protein, 200 aa, Arabidopsis thaliana
  peptide (1)..(200): Ceres Seq. ID no. 13493757
  misc_feature (17)..(91): Pfam Name: Nucleotide-sensitive chloride conductance Pfam Description: Nucleotide-sensitive chloride conductance
  misc_feature (20)..(129): Homolog of NCBI NO: 544031 NR Description: Chloride conductance regulatory protein ICln
  misc_feature (20)..(129): Homolog of NCBI NO: 13431571 NR Description: Chloride conductance regulatory protein ICln (Chloride channel, nucleotide sensitive 1A) (Chloride ion current
  misc_feature (1)..(129): Homolog of NCBI NO: 7513563 NR Description: swelling-induced chloride conductance regulatory
  misc_feature (1)..(129): Homolog of NCBI NO: 2197127 NR Description: swelling-induced chloride conductance regulatory
  misc_feature (1)..(129): Homolog of NCBI NO: 1095482 NR Description: Cl current-related protein
  misc_feature (1)..(129): Homolog of NCBI NO: 1060971 NR Description: chloride channel [Oryctolagus cuniculus]
  misc_feature (68)..(200): Homolog of NCBI NO: 21671879 NR Description: Hypothetical protein [Oryza sativa (japonica
  misc_feature (29)..(200): Homolog of NCBI NO: 37531488 NR Description: hypothetical protein [Oryza sativa (japonica
  misc_feature (1)..(71): Homolog of NCBI NO: 37531484 NR Description: unknown protein [Oryza sativa (japonica
  misc_feature (1)..(200): Homolog of NCBI NO: 15241766 NR Description: expressed protein [Arabidopsis thaliana]
MHVQTSVAVALGNRPIESPGTLYITSRKLIWLSDVDMAKGYAVDFLSISLHAVSRDPEAYSSPCIYTQIEVEEDEDDESDSESTEVLDLSKIREMRLVPSDSTQLETLFDVFCECAELNPEPVQEEEEESGHNWVFSADQMDVRGGDDDAEWQISQSPTSVIGHSNGDEGLNQPMLELQINDQRFEDAEEMVHESETKDH

SEQ ID NO: 27734 - protein, 164 aa, Arabidopsis thaliana
  peptide (1)..(164): Ceres Seq. ID no. 13493758
  misc_feature (1)..(55): Pfam Name: Nucleotide-sensitive chloride conductance Pfam Description: Nucleotide-sensitive chloride conductance
  misc_feature (1)..(93): Homolog of NCBI NO: 544031 NR Description: Chloride conductance regulatory protein ICln
  misc_feature (1)..(93): Homolog of NCBI NO: 13431571 NR Description: Chloride conductance regulatory protein ICln (Chloride channel, nucleotide sensitive 1A) (Chloride ion current
  misc_feature (1)..(93): Homolog of NCBI NO: 7513563 NR Description: swelling-induced chloride conductance regulatory
  misc_feature (1)..(93): Homolog of NCBI NO: 1095482 NR Description: Cl current-related protein
  misc_feature (1)..(93): Homolog of NCBI NO: 2197127 NR Description: swelling-induced chloride conductance regulatory
  misc_feature (1)..(93): Homolog of NCBI NO: 1060971 NR Description: chloride channel [Oryctolagus cuniculus]
  misc_feature (32)..(164): Homolog of NCBI NO: 21671879 NR Description: Hypothetical protein [Oryza sativa (japonica
  misc_feature (1)..(164): Homolog of NCBI NO: 37531488 NR Description: hypothetical protein [Oryza sativa (japonica
  misc_feature (1)..(35): Homolog of NCBI NO: 37531484 NR Description: unknown protein [Oryza sativa (japonica
  misc_feature (1)..(164): Homolog of NCBI NO: 15241766 NR Description: expressed protein [Arabidopsis thaliana]
MAKGYAVDFLSISLHAVSRDPEAYSSPCIYTQIEVEEDEDDESDSESTEVLDLSKIREMRLVPSDSTQLETLFDVFCECAELNPEPVQEEEEESGHNWVFSADQMDVRGGDDDAEWQISQSPTSVIGHSNGDEGLNQPMLELQINDQRFEDAEEMVHESETKDH

SEQ ID NO: 27735 - DNA, 825 bp, Arabidopsis thaliana
  misc_feature (1)..(825): Ceres Seq. ID no. 13489945
  misc_feature: MA Experiment ID: 20000235 Result: Down-regulated in Transcription
  misc_feature: MA Experiment 20000235 PARAMETER Experiment Name: At_Siliques_P Parameter: Age (day) Value: 21
  misc_feature: MA Experiment 20000235 PARAMETER Experiment Name: At_Siliques_P Parameter: Organism Value: A. thaliana
  misc_feature: MA Experiment 20000235 PARAMETER Experiment Name: At_Siliques_P Parameter: Plant Line Value: WS
  misc_feature: MA Experiment 20000235 PARAMETER Experiment Name: At_Siliques_P Parameter: Tissue Value: 5-10mm Siliques vs. Whole Plant
  misc_feature: MA Experiment ID: 20000495 Result: Up-regulated in Transcription
  misc_feature: MA Experiment 20000495 PARAMETER Experiment Name: At_Guard_Cells_P Parameter: Harvest Date Value: 8/2/2002
  misc_feature: MA Experiment 20000495 PARAMETER Experiment Name: At_Guard_Cells_P Parameter: Organism Value: A. thaliana
  misc_feature: MA Experiment 20000495 PARAMETER Experiment Name: At_Guard_Cells_P Parameter: Tissue Value: Guard Cells vs. Leaves
  misc_feature: MA Experiment ID: 20000496 Result: Up-regulated in Transcription
  misc_feature: MA Experiment 20000496 PARAMETER Experiment Name: At_Guard_Cells_P Parameter: Harvest Date Value: 7/19/2002
  misc_feature: MA Experiment 20000496 PARAMETER Experiment Name: At_Guard_Cells_P Parameter: Organism Value: Canola
  misc_feature: MA Experiment 20000496 PARAMETER Experiment Name: At_Guard_Cells_P Parameter: Tissue Value: Guard Cells vs. Leaves
  misc_feature: MA Experiment ID: 20001248 Result: Up-regulated in Transcription
  misc_feature: MA Experiment 20001248 PARAMETER Experiment Name: At_Far-red-induction_P Parameter: Age (day) Value: 7
  misc_feature: MA Experiment 20001248 PARAMETER Experiment Name: At_Far-red-induction_P Parameter: Light Value: Far-red vs. White
  misc_feature: MA Experiment 20001248 PARAMETER Experiment Name: At_Far-red-induction_P Parameter: Organism Value: A. thaliana
  misc_feature: MA Experiment 20001248 PARAMETER Experiment Name: At_Far-red-induction_P Parameter: Plant Line Value: Columbia
  misc_feature: MA Experiment 20001248 PARAMETER Experiment Name: At_Far-red-induction_P Parameter: Timepoint (hr) Value: 4
  misc_feature: MA Experiment 20001248 PARAMETER Experiment Name: At_Far-red-induction_P Parameter: Tissue Value: Whole Plant
  misc_feature: MA Experiment ID: 20001451 Result: Up-regulated in Transcription
  misc_feature: MA Experiment 20001451 PARAMETER Experiment Name: At_Far-red-induction_P Parameter: Age (day) Value: 7
  misc_feature: MA Experiment 20001451 PARAMETER Experiment Name: At_Far-red-induction_P Parameter: Light Value: Far-red vs. White
  misc_feature: MA Experiment 20001451 PARAMETER Experiment Name: At_Far-red-induction_P Parameter: Organism Value: A. thaliana
  misc_feature: MA Experiment 20001451 PARAMETER Experiment Name: At_Far-red-induction_P Parameter: Plant Line Value: Columbia
  misc_feature: MA Experiment 20001451 PARAMETER Experiment Name: At_Far-red-induction_P Parameter: Timepoint (hr) Value: 24
  misc_feature: MA Experiment 20001451 PARAMETER Experiment Name: At_Far-red-induction_P Parameter: Tissue Value: Whole Plant
agactctctcttctcatctctctctctctctctctcttcaaaccctaaaaattcacgcattttggcacagttaagttcgctgaatcccgttcctcttcctctgtctctctccccaagaaaatcactcagatcaaagctcaaatttcggatctcacagctgtcgcttcggtagaggaaaggatgaccagagaacatcctcccgagcctcttgatttcttcatctggactgttgaggatgttgggtcttggctcgaggagataaaccttgggggctaccgccagattttcaaagaaaatggtgtcaatggagaatatctagaaagcatgtctgtgtttactaccgagcagatccttcacttcataaggaggcatcacatgaagtggggagacttcatcaccctctgtaaagaactcagaaggattaaagtggcttgcttgaaaggtgagcagagagttagacggccatggtgggcaccgtcttgtctatccgtagtctttgttaaggcagccaaacgcaaccgacagtctcgtgttgtatctctcaagcttgaatcttgacattacactttggctgtttatgtacgtacttgtctctcttctcttctcttgttttcttttccttttttttttttttttggtttgggtttgtttgtggcacatgcactaggaagaaacaaactcaagtcaaaaaagctgtttggcttggtgaaatcttgcaagcgggaaaaaaattatgcgttttgtactttggtggtgtatacaaagcttgctctcagatgtttaatatatggcttgtgcaatctttatgtgacagataatagtgtg

SEQ ID NO: 27736 - protein, 125 aa, Arabidopsis thaliana
  peptide (1)..(125): Ceres Seq. ID no. 13489946
  misc_feature (13)..(42): Pfam Name: SAM domain (Sterile alpha motif) Pfam Description: SAM domain (Sterile alpha motif)
  misc_feature (1)..(125): Homolog of NCBI NO: 18398048 NR Description: auxin-regulated protein [Arabidopsis thaliana]
  misc_feature (1)..(125): Homolog of NCBI NO: 6466959 NR Description: unknown protein [Arabidopsis thaliana]
MTREHPPEPLDFFIWTVEDVGSWLEEINLGGYRQIFKENGVNGEYLESMSVFTTEQILHFIRRHHMKWGDFITLCKELRRIKVACLKGEQRVRRPWWAPSCLSVVFVKAAKRNRQSRVVSLKLES

SEQ ID NO: 27737 - protein, 77 aa, Arabidopsis thaliana
  peptide (1)..(77): Ceres Seq. ID no. 13489947
  misc_feature (1)..(77): Homolog of NCBI NO: 18398048 NR Description: auxin-regulated protein [Arabidopsis thaliana]
  misc_feature (1)..(77): Homolog of NCBI NO: 6466959 NR Description: unknown protein [Arabidopsis thaliana]
MSVFTTEQILHFIRRHHMKWGDFITLCKELRRIKVACLKGEQRVRRPWWAPSCLSVVFVKAAKRNRQSRVVSLKLES

SEQ ID NO: 27738 - DNA, 1104 bp, Arabidopsis thaliana
  misc_feature (1)..(1104): Ceres Seq. ID no. 12331667
  misc_feature: MA Experiment ID: 108573 Result: Up-regulated in Transcription
  misc_feature: MA Experiment 108573 PARAMETER Experiment Name: At_Drought_cDNA_P Parameter: Timepoint (hr) Value: 6
  misc_feature: MA Experiment 108573 PARAMETER Experiment Name: At_Drought_cDNA_P Parameter: Tissue Value: Aerial
  misc_feature: MA Experiment 108573 PARAMETER Experiment Name: At_Drought_cDNA_P Parameter: Treatment Value: Drought vs. No Drought
  misc_feature: MA Experiment ID: 20000171 Result: Up-regulated in Transcription
  misc_feature: MA Experiment 20000171 PARAMETER Experiment Name: At_42deg_Heat_P Parameter: Age (day) Value: 14
  misc_feature: MA Experiment 20000171 PARAMETER Experiment Name: At_42deg_Heat_P Parameter: Organism Value: A. thaliana
  misc_feature: MA Experiment 20000171 PARAMETER Experiment Name: At_42deg_Heat_P Parameter: Plant Line Value: WS
  misc_feature: MA Experiment 20000171 PARAMETER Experiment Name: At_42deg_Heat_P Parameter: Temperature (deg C) Value: 42 vs. 22
  misc_feature: MA Experiment 20000171 PARAMETER Experiment Name: At_42deg_Heat_P Parameter: Timepoint (hr) Value: 1
  misc_feature: MA Experiment 20000171 PARAMETER Experiment Name: At_42deg_Heat_P Parameter: Tissue Value: Aerial
  misc_feature: MA Experiment ID: 20000224 Result: Down-regulated in Transcription
  misc_feature: MA Experiment ID: 20001905 Result: Up-regulated in Transcription
  misc_feature: MA Experiment 20001905 PARAMETER Experiment Name: At_Drought_Reproduction_P Parameter: Age (day) Value: 40
  misc_feature: MA Experiment 20001905 PARAMETER Experiment Name: At_Drought_Reproduction_P Parameter: Organism Value: A. thaliana
  misc_feature: MA Experiment 20001905 PARAMETER Experiment Name: At_Drought_Reproduction_P Parameter: Plant Line Value: WS
  misc_feature: MA Experiment 20001905 PARAMETER Experiment Name: At_Drought_Reproduction_P Parameter: Timepoint (day) Value: 10
  misc_feature: MA Experiment 20001905 PARAMETER Experiment Name: At_Drought_Reproduction_P Parameter: Tissue Value: Rosettes
  misc_feature: MA Experiment 20001905 PARAMETER Experiment Name: At_Drought_Reproduction_P Parameter: Treatment Value: Drought vs. No Drought
cttctttcctctttcttctttctgttttctggtcgctcgttacccccaagacctcgtcgaggtttctctctctctgaaaaagtgcttttgctgcgtttccatgctctcggaaggaacttggctgaatcgttggagaattatcgatctggcgtcgttggtgcatctctagctgcgccaattcatcggatccggtttgatttctccctttcgcgaatctagccttccgtgatcttagcagccatgttctatggcacagctgtatgggacccttggcttatcgttggccagattatttgcctccaatgctcttactatctcactcttggactcttcaccatggtctttcttggccttcgtgttcctcgccttagtcttgtctacttcttcgattacgctactctcactacttccaccttcaccggttggtctgttattgcctcattcctcttctcttcactcgctggggctgtgtacatgatatttttggtggagcgagcacggaaatgcttagatttctctgcaactctctacatcatacatctcttcttttgcatcatgtatggaggatggccttcctctatggcgtggtgggttgttaatggaaccggactcgctgttatggctttgctagctgagtacttgtgcattaaacgcgaacagcgagagatccctatggatcgcttccactcaagggtttgaagattggtgaaagaacaagtgatgaagattcttgtgggttagcagcgcgactcgtagagcctagtagagcctagtactcttaacaattgtgatgtacagagatgaaatcagaggagtagaatgggcgaaaggaagttcagctagccaagcaacaatgttggacactggtgcaccaactctgactgcaatttttagtgacttcaaatactaagactttggaatacgtttcaatttgttcttttgtatgaaaaaaacattagactcgaataggttattgatttcatgttgcttcttttttttgtttatactggattttctcttctatcctctacttggtgcagctttgtgtgttttaaaaccagtgtctcattcatcatactcttttaccaccaattgaatccttcc

SEQ ID NO: 27739 - protein, 152 aa, Arabidopsis thaliana
  peptide (1)..(152): Ceres Seq. ID no. 12331668
  misc_feature (7)..(146): Homolog of NCBI NO: 27469691 NR Description: Similar to chromosome 20 open reading frame 169
  misc_feature (7)..(145): Homolog of NCBI NO: 12838117 NR Description: unnamed protein product [Mus musculus]
  misc_feature (7)..(145): Homolog of NCBI NO: 12833500 NR Description: unnamed protein product [Mus musculus]
  misc_feature (1)..(145): Homolog of NCBI NO: 34860687 NR Description: similar to chromosome 20 open reading frame 169
  misc_feature (1)..(75): Homolog of NCBI NO: 34912286 NR Description: P0451D05.3 [Oryza sativa (japonica
  misc_feature (7)..(146): Homolog of NCBI NO: 23618848 NR Description: chromosome 20 open reading frame 169
  misc_feature (7)..(146): Homolog of NCBI NO: 11561813 NR Description: dJ453C12.4.1 (novel protein (similar to
  misc_feature (1)..(146): Homolog of NCBI NO: 14270398 NR Description: hypothetical protein [Homo sapiens]
  misc_feature (1)..(150): Homolog of NCBI NO: 12324600 NR Description: unknown protein; 19658-19089 [Arabidopsis
  misc_feature (1)..(152): Homolog of NCBI NO: 18412584 NR Description: Expressed protein
MFYGTAVWDPWLIVGQIICLQCSYYLTLGLFTMVFLGLRVPRLSLVYFFDYATLTTSTFTGWSVIASFLFSSLAGAVYMIFLVERARKCLDFSATLYIIHLFFCIMYGGWPSSMAWWVVNGTGLAVMALLAEYLCIKREQREIPMDRFHSRV

SEQ ID NO: 27740 - protein, 120 aa, Arabidopsis thaliana
  peptide (1)..(120): Ceres Seq. ID no. 12331669
  misc_feature (1)..(114): Homolog of NCBI NO: 27469691 NR Description: Similar to chromosome 20 open reading frame 169
  misc_feature (1)..(113): Homolog of NCBI NO: 12838117 NR Description: unnamed protein product [Mus musculus]
  misc_feature (1)..(113): Homolog of NCBI NO: 12833500 NR Description: unnamed protein product [Mus musculus]
  misc_feature (1)..(113): Homolog of NCBI NO: 34860687 NR Description: similar to chromosome 20 open reading frame 169
  misc_feature (1)..(43): Homolog of NCBI NO: 34912286 NR Description: P0451D05.3 [Oryza sativa (japonica
  misc_feature (1)..(114): Homolog of NCBI NO: 23618848 NR Description: chromosome 20 open reading frame 169
  misc_feature (1)..(114): Homolog of NCBI NO: 11561813 NR Description: dJ453C12.4.1 (novel protein (similar to
  misc_feature (1)..(114): Homolog of NCBI NO: 14270398 NR Description: hypothetical protein [Homo sapiens]
  misc_feature (1)..(118): Homolog of NCBI NO: 12324600 NR Description: unknown protein; 19658-19089 [Arabidopsis
  misc_feature (1)..(120): Homolog of NCBI NO: 18412584 NR Description: Expressed protein
MVFLGLRVPRLSLVYFFDYATLTTSTFTGWSVIASFLFSSLAGAVYMIFLVERARKCLDFSATLYIIHLFFCIMYGGWPSSMAWWVVNGTGLAVMALLAEYLCIKREQREIPMDRFHSRV

SEQ ID NO: 27741 - protein, 76 aa, Arabidopsis thaliana
  peptide (1)..(76): Ceres Seq. ID no. 12331670
MAQLYGTLGLSLARLFASNALTISLLDSSPWSFLAFVFLALVLSTSSITLLSLLPPSPVGLLLPHSSSLHSLGLCT

SEQ ID NO: 27742 - DNA, 680 bp, Arabidopsis thaliana
  misc_feature (1)..(680): Ceres Seq. ID no. 12331621
  misc_feature: MA Experiment ID: 108434 Result: Up-regulated in Transcription
  misc_feature: MA Experiment 108434 PARAMETER Experiment Name: At_Root_Tips_cDNA_P Parameter: Tissue Value: Root Tips
  misc_feature: MA Experiment ID: 20000180 Result: Up-regulated in Transcription
  misc_feature: MA Experiment 20000180 PARAMETER Experiment Name: At_Germinating_Seeds_P Parameter: Age (hr) Value: 24 vs. 0
  misc_feature: MA Experiment 20000180 PARAMETER Experiment Name: At_Germinating_Seeds_P Parameter: Tissue Value: Germinating Seeds
  misc_feature: MA Experiment ID: 20000185 Result: Up-regulated in Transcription
  misc_feature: MA Experiment 20000185 PARAMETER Experiment Name: At_Roots__P Parameter: Age (day) Value: 7 vs. 21
  misc_feature: MA Experiment 20000185 PARAMETER Experiment Name: At_Roots__P Parameter: Organism Value: A. thaliana
  misc_feature: MA Experiment 20000185 PARAMETER Experiment Name: At_Roots__P Parameter: Tissue Value: Roots vs. Whole Plant
  misc_feature: MA Experiment ID: 20000234 Result: Up-regulated in Transcription
  misc_feature: MA Experiment 20000234 PARAMETER Experiment Name: At_Siliques_P Parameter: Age (day) Value: 21
  misc_feature: MA Experiment 20000234 PARAMETER Experiment Name: At_Siliques_P Parameter: Organism Value: A. thaliana
  misc_feature: MA Experiment 20000234 PARAMETER Experiment Name: At_Siliques_P Parameter: Plant Line Value: WS
  misc_feature: MA Experiment 20000234 PARAMETER Experiment Name: At_Siliques_P Parameter: Tissue Value: Less Than 5mm Siliques vs. Whole Plant
  misc_feature: MA Experiment ID: 20000439 Result: Up-regulated in Transcription
  misc_feature: MA Experiment 20000439 PARAMETER Experiment Name: At_Roots__P Parameter: Age (day) Value: 14 vs. 21
  misc_feature: MA Experiment 20000439 PARAMETER Experiment Name: At_Roots__P Parameter: Organism Value: A. thaliana
  misc_feature: MA Experiment 20000439 PARAMETER Experiment Name: At_Roots__P Parameter: Tissue Value: Roots vs. Whole Plant
gttgttgaaccagtggcccgaaatctcgaatcgactcatctctcagctcaccggtgctgcattatcaaaactgcaggaaggatttggttgtgaagatggcatcgaagttgatacaagttcaatcaaaggcatgtgaggcttcaaagtttgtggctaagcatggaacttcctactacagacagctgttggagaagaacaagcagtatatccaggaacctgccactgttgagaagtgccaagagttgtctaagcagttgctctacacccgtcttgctagcattcccggacgctatgaaaccttctggaaggaagtagactacgcaaagaacctatggaagaacagatccggtctgaaggtagaagatgcaggaatcgctgcattgtttggtctcgaatgctttgcatggtattgcgcaggtgaaatcgccggcagaggattcaccttcacaggctattacccatgaaggagagtaacaataacttgaagattgtgtaatcccctccgtttttagttttcatgattctctcttgaatcaattttttttccagtttatccctgaaacggaggctttgaagctgagaaaaatccattttgctataactctttgataaaggttgctctcaataagaacaaaatttcccaggaaattgctttcactataatgtttttgtccttgttt

SEQ ID NO: 27743 - protein, 122 aa, Arabidopsis thaliana
  peptide (1)..(122): Ceres Seq. ID no. 12331622
  misc_feature (8)..(122): Pfam Name: Mitochondrial ATP synthase g subunit Pfam Description: Mitochondrial ATP synthase g subunit
  misc_feature (1)..(120): Homolog of NCBI NO: 34912342 NR Description: P0518F01.5 [Oryza sativa (japonica
  misc_feature (1)..(122): Homolog of NCBI NO: 15236143 NR Description: putative protein
  misc_feature (1)..(122): Homolog of NCBI NO: 15224821 NR Description: copia-like retroelement pol polyprotein
  misc_feature (1)..(122): Homolog of NCBI NO: 15233603 NR Description: putative protein
MASKLIQVQSKACEASKFVAKHGTSYYRQLLEKNKQYIQEPATVEKCQELSKQLLYTRLASIPGRYETFWKEVDYAKNLWKNRSGLKVEDAGIAALFGLECFAWYCAGEIAGRGFTFTGYYP

SEQ ID NO: 27744 - DNA, 1090 bp, Arabidopsis thaliana
  misc_feature (1)..(1090): Ceres Seq. ID no. 13489767
  misc_feature: MA Experiment ID: 108463 Result: Down-regulated in Transcription
  misc_feature: MA Experiment 108463 PARAMETER Experiment Name: At_Germinating_Seeds_cDNA_P Parameter: Age (day) Value: 3 vs. 0
  misc_feature: MA Experiment 108463 PARAMETER Experiment Name: At_Germinating_Seeds_cDNA_P Parameter: Tissue Value: Germinating Seeds
  misc_feature: MA Experiment ID: 108464 Result: Down-regulated in Transcription
  misc_feature: MA Experiment 108464 PARAMETER Experiment Name: At_Germinating_Seeds_cDNA_P Parameter: Age (day) Value: 4 vs. 0
  misc_feature: MA Experiment 108464 PARAMETER Experiment Name: At_Germinating_Seeds_cDNA_P Parameter: Tissue Value: Germinating Seeds
  misc_feature: MA Experiment ID: 108488 Result: Down-regulated in Transcription
  misc_feature: MA Experiment ID: 20000111 Result: Down-regulated in Transcription
  misc_feature: MA Experiment 20000111 PARAMETER Experiment Name: At_42deg_Heat_cDNA_P Parameter: Temperature (deg C) Value: 42 vs. 22
  misc_feature: MA Experiment 20000111 PARAMETER Experiment Name: At_42deg_Heat_cDNA_P Parameter: Timepoint (hr) Value: 6
  misc_feature: MA Experiment 20000111 PARAMETER Experiment Name: At_42deg_Heat_cDNA_P Parameter: Tissue Value: Aerial
  misc_feature: MA Experiment ID: 20000113 Result: Down-regulated in Transcription
  misc_feature: MA Experiment 20000113 PARAMETER Experiment Name: At_42deg_Heat_cDNA_P Parameter: Temperature (deg C) Value: 42 vs. 22
  misc_feature: MA Experiment 20000113 PARAMETER Experiment Name: At_42deg_Heat_cDNA_P Parameter: Timepoint (hr) Value: 8
  misc_feature: MA Experiment 20000113 PARAMETER Experiment Name: At_42deg_Heat_cDNA_P Parameter: Tissue Value: Aerial
  misc_feature: MA Experiment ID: 20000179 Result: Up-regulated in Transcription
  misc_feature: MA Experiment 20000179 PARAMETER Experiment Name: At_Germinating_Seeds_P Parameter: Age (hr) Value: 6 vs. 0
  misc_feature: MA Experiment 20000179 PARAMETER Experiment Name: At_Germinating_Seeds_P Parameter: Tissue Value: Germinating Seeds
  misc_feature: MA Experiment ID: 20000438 Result: Down-regulated in Transcription
  misc_feature: MA Experiment 20000438 PARAMETER Experiment Name: At_Shoots__P Parameter: Age (day) Value: 14
  misc_feature: MA Experiment 20000438 PARAMETER Experiment Name: At_Shoots__P Parameter: Tissue Value: Shoots vs. Whole Plant
  misc_feature: MA Experiment ID: 20000439 Result: Down-regulated in Transcription
  misc_feature: MA Experiment 20000439 PARAMETER Experiment Name: At_Roots__P Parameter: Age (day) Value: 14 vs. 21
  misc_feature: MA Experiment 20000439 PARAMETER Experiment Name: At_Roots__P Parameter: Organism Value: A. thaliana
  misc_feature: MA Experiment 20000439 PARAMETER Experiment Name: At_Roots__P Parameter: Tissue Value: Roots vs. Whole Plant
  misc_feature: MA Experiment ID: 20001904 Result: Up-regulated in Transcription
  misc_feature: MA Experiment 20001904 PARAMETER Experiment Name: At_Drought_Reproduction_P Parameter: Age (day) Value: 37
  misc_feature: MA Experiment 20001904 PARAMETER Experiment Name: At_Drought_Reproduction_P Parameter: Organism Value: A. thaliana
  misc_feature: MA Experiment 20001904 PARAMETER Experiment Name: At_Drought_Reproduction_P Parameter: Plant Line Value: WS
  misc_feature: MA Experiment 20001904 PARAMETER Experiment Name: At_Drought_Reproduction_P Parameter: Timepoint (day) Value: 7
  misc_feature: MA Experiment 20001904 PARAMETER Experiment Name: At_Drought_Reproduction_P Parameter: Tissue Value: Rosettes
  misc_feature: MA Experiment 20001904 PARAMETER Experiment Name: At_Drought_Reproduction_P Parameter: Treatment Value: Drought vs. No Drought
agacaccagtcttaccctaacttttttcaaagtctctgtctttctgtggaaatctggggaataaacatatgaatctaaagagaaaaagaagaaagtaaaaaagcaaaatcgaagtttttgttcaattttctgggatcaaagagcaattttcgtttctttattcgttgaaagtgtgaagcttttttgatttagtgagaagtgttaatggcgggttacagagcagatgatgattacgattacctattcaaggtggttctgatcggtgattcaggtgttggaaagtccaatttgctttctcgattcaccaggaacgagtttagtctcgagtctaaatcaacgatcggggtcgagttcgcgactcgtagcttgaatgttaatgaaaaagtcatcaaagcccagatttgggacactgctggtcaagaaagataccgagcaatcactagtgcttactatcgaggagctgttggggcgcttcttgtttacgacgtaacccgacactcaacattcgaaaacgttgagagatggctaagggaactccgtgaccacactgacccaaacatagttgtgatgcttgtgggaaacaaatccgatcttcgccatcttgtagcagtccaaaccgaagatgcaaaatcttttgcagagaatgaatcactctacttcatggaaacctcagctcttgaatctaccaatgttgagaacgcgttttctgaagtactcactcagatttaccatgttgtgagcaagaaagcaatggaggctggtgaagattccggtaatgttccttcgaaaggagagaagatcgatgttgatgtttccgcagtgaagaaaactggttgctgctccaactaaatggtcttatgtcctaaagctgaaatcggtttttaaattttacattcaaattttgtttttgaagatgtttgcttttttttaggaaaacaatctatgttattatgccttttgatttgcttgtttgaaaattgcttagctttggtctgattctgtaccggttgagggattttgtaatttaaccggttctggtctatggtttgttcagtttgtttttaattcaatccgcaaatatctctaaatc

SEQ ID NO: 27745 - protein, 214 aa, Arabidopsis thaliana
  peptide (1)..(214): Ceres Seq. ID no. 13489768
  misc_feature (15)..(176): Pfam Name: Ras family Pfam Description: Ras family
  misc_feature (1)..(214): Homolog of NCBI NO: 541979 NR Description: GTP-binding protein, ras-like - fava bean
  misc_feature (1)..(213): Homolog of NCBI NO: 730512 NR Description: RAS-RELATED PROTEIN RIC2
  misc_feature (1)..(213): Homolog of NCBI NO: 13195452 NR Description: GTP-binding protein [Oryza sativa]
  misc_feature (1)..(214): Homolog of NCBI NO: 21536533 NR Description: Rab-type small GTP-binding protein-like
  misc_feature (1)..(214): Homolog of NCBI NO: 15242483 NR Description: GTP-binding protein, putative [Arabidopsis
  misc_feature (1)..(214): Homolog of NCBI NO: 15234020 NR Description: Ras family GTP-binding protein [Arabidopsis
MAGYRADDDYDYLFKVVLIGDSGVGKSNLLSRFTRNEFSLESKSTIGVEFATRSLNVNEKVIKAQIWDTAGQERYRAITSAYYRGAVGALLVYDVTRHSTFENVERWLRELRDHTDPNIVVMLVGNKSDLRHLVAVQTEDAKSFAENESLYFMETSALESTNVENAFSEVLTQIYHVVSKKAMEAGEDSGNVPSKGEKIDVDVSAVKKTGCCSN

SEQ ID NO: 27746 - DNA, 842 bp, Arabidopsis thaliana
  misc_feature (1)..(842): Ceres Seq. ID no. 12738275
  misc_feature: MA Experiment ID: 108461 Result: Up-regulated in Transcription
  misc_feature: MA Experiment 108461 PARAMETER Experiment Name: At_Germinating_Seeds_cDNA_P Parameter: Age (day) Value: 1 vs. 0
  misc_feature: MA Experiment 108461 PARAMETER Experiment Name: At_Germinating_Seeds_cDNA_P Parameter: Tissue Value: Germinating Seeds
  misc_feature: MA Experiment ID: 108462 Result: Up-regulated in Transcription
  misc_feature: MA Experiment 108462 PARAMETER Experiment Name: At_Germinating_Seeds_cDNA_P Parameter: Age (day) Value: 2 vs. 0
  misc_feature: MA Experiment 108462 PARAMETER Experiment Name: At_Germinating_Seeds_cDNA_P Parameter: Tissue Value: Germinating Seeds
  misc_feature: MA Experiment ID: 108464 Result: Up-regulated in Transcription
  misc_feature: MA Experiment 108464 PARAMETER Experiment Name: At_Germinating_Seeds_cDNA_P Parameter: Age (day) Value: 4 vs. 0
  misc_feature: MA Experiment 108464 PARAMETER Experiment Name: At_Germinating_Seeds_cDNA_P Parameter: Tissue Value: Germinating Seeds
  misc_feature: MA Experiment ID: 108473 Result: Down-regulated in Transcription
  misc_feature: MA Experiment 108473 PARAMETER Experiment Name: At_Drought_Flowers_cDNA_P Parameter: Timepoint (hr) Value: 7 d
  misc_feature: MA Experiment 108473 PARAMETER Experiment Name: At_Drought_Flowers_cDNA_P Parameter: Tissue Value: Flower
  misc_feature: MA Experiment 108473 PARAMETER Experiment Name: At_Drought_Flowers_cDNA_P Parameter: Treatment Value: Drought vs. No Drought
  misc_feature: MA Experiment ID: 108489 Result: Down-regulated in Transcription
  misc_feature: MA Experiment ID: 108573 Result: Down-regulated in Transcription
  misc_feature: MA Experiment 108573 PARAMETER Experiment Name: At_Drought_cDNA_P Parameter: Timepoint (hr) Value: 6
  misc_feature: MA Experiment 108573 PARAMETER Experiment Name: At_Drought_cDNA_P Parameter: Tissue Value: Aerial
  misc_feature: MA Experiment 108573 PARAMETER Experiment Name: At_Drought_cDNA_P Parameter: Treatment Value: Drought vs. No Drought
  misc_feature: MA Experiment ID: 108574 Result: Up-regulated in Transcription
  misc_feature: MA Experiment 108574 PARAMETER Experiment Name: At_Wounding__cDNA_P Parameter: Timepoint (hr) Value: 1
  misc_feature: MA Experiment 108574 PARAMETER Experiment Name: At_Wounding__cDNA_P Parameter: Tissue Value: Aerial
  misc_feature: MA Experiment 108574 PARAMETER Experiment Name: At_Wounding__cDNA_P Parameter: Treatment Value: Wounding vs. No Wounding
  misc_feature: MA Experiment ID: 108576 Result: Down-regulated in Transcription
  misc_feature: MA Experiment 108576 PARAMETER Experiment Name: At_42deg_Heat_cDNA_P Parameter: Temperature (deg C) Value: 42 vs. 22
  misc_feature: MA Experiment 108576 PARAMETER Experiment Name: At_42deg_Heat_cDNA_P Parameter: Timepoint (hr) Value: 1
  misc_feature: MA Experiment 108576 PARAMETER Experiment Name: At_42deg_Heat_cDNA_P Parameter: Tissue Value: Aerial
  misc_feature: MA Experiment ID: 108579 Result: Up-regulated in Transcription
  misc_feature: MA Experiment 108579 PARAMETER Experiment Name: At_4deg_Cold_cDNA_P Parameter: Temperature (deg C) Value: 4 vs. 22
  misc_feature: MA Experiment 108579 PARAMETER Experiment Name: At_4deg_Cold_cDNA_P Parameter: Timepoint (hr) Value: 6
  misc_feature: MA Experiment 108579 PARAMETER Experiment Name: At_4deg_Cold_cDNA_P Parameter: Tissue Value: Aerial
  misc_feature: MA Experiment ID: 108585 Result: Down-regulated in Transcription
  misc_feature: MA Experiment 108585 PARAMETER Experiment Name: At_5mM_NaNP_cDNA_P Parameter: Timepoint (hr) Value: 6
  misc_feature: MA Experiment 108585 PARAMETER Experiment Name: At_5mM_NaNP_cDNA_P Parameter: Tissue Value: Aerial
  misc_feature: MA Experiment 108585 PARAMETER Experiment Name: At_5mM_NaNP_cDNA_P Parameter: Treatment Value: null
  misc_feature: MA Experiment ID: 20000090 Result: Down-regulated in Transcription
  misc_feature: MA Experiment ID: 20000111 Result: Down-regulated in Transcription
  misc_feature: MA Experiment 20000111 PARAMETER Experiment Name: At_42deg_Heat_cDNA_P Parameter: Temperature (deg C) Value: 42 vs. 22
  misc_feature: MA Experiment 20000111 PARAMETER Experiment Name: At_42deg_Heat_cDNA_P Parameter: Timepoint (hr) Value: 6
  misc_feature: MA Experiment 20000111 PARAMETER Experiment Name: At_42deg_Heat_cDNA_P Parameter: Tissue Value: Aerial
  misc_feature: MA Experiment ID: 20000113 Result: Down-regulated in Transcription
  misc_feature: MA Experiment 20000113 PARAMETER Experiment Name: At_42deg_Heat_cDNA_P Parameter: Temperature (deg C) Value: 42 vs. 22
  misc_feature: MA Experiment 20000113 PARAMETER Experiment Name: At_42deg_Heat_cDNA_P Parameter: Timepoint (hr) Value: 8
  misc_feature: MA Experiment 20000113 PARAMETER Experiment Name: At_42deg_Heat_cDNA_P Parameter: Tissue Value: Aerial
  misc_feature: MA Experiment ID: 20000171 Result: Down-regulated in Transcription
  misc_feature: MA Experiment 20000171 PARAMETER Experiment Name: At_42deg_Heat_P Parameter: Age (day) Value: 14
  misc_feature: MA Experiment 20000171 PARAMETER Experiment Name: At_42deg_Heat_P Parameter: Organism Value: A. thaliana
  misc_feature: MA Experiment 20000171 PARAMETER Experiment Name: At_42deg_Heat_P Parameter: Plant Line Value: WS
  misc_feature: MA Experiment 20000171 PARAMETER Experiment Name: At_42deg_Heat_P Parameter: Temperature (deg C) Value: 42 vs. 22
  misc_feature: MA Experiment 20000171 PARAMETER Experiment Name: At_42deg_Heat_P Parameter: Timepoint (hr) Value: 1
  misc_feature: MA Experiment 20000171 PARAMETER Experiment Name: At_42deg_Heat_P Parameter: Tissue Value: Aerial
  misc_feature: MA Experiment ID: 20000173 Result: Down-regulated in Transcription
  misc_feature: MA Experiment 20000173 PARAMETER Experiment Name: At_42deg_Heat_P Parameter: Age (day) Value: 14
  misc_feature: MA Experiment 20000173 PARAMETER Experiment Name: At_42deg_Heat_P Parameter: Organism Value: A. thaliana
  misc_feature: MA Experiment 20000173 PARAMETER Experiment Name: At_42deg_Heat_P Parameter: Plant Line Value: WS
  misc_feature: MA Experiment 20000173 PARAMETER Experiment Name: At_42deg_Heat_P Parameter: Temperature (deg C) Value: 42 vs. 22
  misc_feature: MA Experiment 20000173 PARAMETER Experiment Name: At_42deg_Heat_P Parameter: Timepoint (hr) Value: 6
  misc_feature: MA Experiment 20000173 PARAMETER Experiment Name: At_42deg_Heat_P Parameter: Tissue Value: Aerial
  misc_feature: MA Experiment ID: 20000180 Result: Up-regulated in Transcription
  misc_feature: MA Experiment 20000180 PARAMETER Experiment Name: At_Germinating_Seeds_P Parameter: Age (hr) Value: 24 vs. 0
  misc_feature: MA Experiment 20000180 PARAMETER Experiment Name: At_Germinating_Seeds_P Parameter: Tissue Value: Germinating Seeds
  misc_feature: MA Experiment ID: 20000234 Result: Up-regulated in Transcription
  misc_feature: MA Experiment 20000234 PARAMETER Experiment Name: At_Siliques_P Parameter: Age (day) Value: 21
  misc_feature: MA Experiment 20000234 PARAMETER Experiment Name: At_Siliques_P Parameter: Organism Value: A. thaliana
  misc_feature: MA Experiment 20000234 PARAMETER Experiment Name: At_Siliques_P Parameter: Plant Line Value: WS
  misc_feature: MA Experiment 20000234 PARAMETER Experiment Name: At_Siliques_P Parameter: Tissue Value: Less Than 5mm Siliques vs. Whole Plant
  misc_feature: MA Experiment ID: 20000264 Result: Up-regulated in Transcription
  misc_feature: MA Experiment 20000264 PARAMETER Experiment Name: At_Open_Flower_P Parameter: Age (day) Value: 21
  misc_feature: MA Experiment 20000264 PARAMETER Experiment Name: At_Open_Flower_P Parameter: Plant Line Value: WS
  misc_feature: MA Experiment 20000264 PARAMETER Experiment Name: At_Open_Flower_P Parameter: Tissue Value: Open Flower vs. Whole Plant
  misc_feature: MA Experiment ID: 20000265 Result: Up-regulated in Transcription
  misc_feature: MA Experiment 20000265 PARAMETER Experiment Name: At_Open_Flower_P Parameter: Age (day) Value: 21
  misc_feature: MA Experiment 20000265 PARAMETER Experiment Name: At_Open_Flower_P Parameter: Plant Line Value: WS
  misc_feature: MA Experiment 20000265 PARAMETER Experiment Name: At_Open_Flower_P Parameter: Tissue Value: Closed Flower vs. Whole Plant
  misc_feature: MA Experiment ID: 20000286 Result: Up-regulated in Transcription
  misc_feature: MA Experiment 20000286 PARAMETER Experiment Name: At_Open_Flower_P Parameter: Age (day) Value: 21
  misc_feature: MA Experiment 20000286 PARAMETER Experiment Name: At_Open_Flower_P Parameter: Plant Line Value: WS
  misc_feature: MA Experiment 20000286 PARAMETER Experiment Name: At_Open_Flower_P Parameter: Tissue Value: Half Open vs. Whole Plant
  misc_feature: MA Experiment ID: 20000438 Result: Up-regulated in Transcription
  misc_feature: MA Experiment 20000438 PARAMETER Experiment Name: At_Shoots__P Parameter: Age (day) Value: 14
  misc_feature: MA Experiment 20000438 PARAMETER Experiment Name: At_Shoots__P Parameter: Tissue Value: Shoots vs. Whole Plant
  misc_feature: MA Experiment ID: 20000452 Result: Up-regulated in Transcription
  misc_feature: MA Experiment 20000452 PARAMETER Experiment Name: At_CS6879_Shoots-Roots_P Parameter: Age (day) Value: 14
  misc_feature: MA Experiment 20000452 PARAMETER Experiment Name: At_CS6879_Shoots-Roots_P Parameter: Organism Value: A. thaliana
  misc_feature: MA Experiment 20000452 PARAMETER Experiment Name: At_CS6879_Shoots-Roots_P Parameter: Plant Line Value: CS6879 vs. WS
  misc_feature: MA Experiment 20000452 PARAMETER Experiment Name: At_CS6879_Shoots-Roots_P Parameter: Tissue Value: Shoots
  misc_feature: MA Experiment ID: 20000573 Result: Down-regulated in Transcription
  misc_feature: MA Experiment 20000573 PARAMETER Experiment Name: At_100uM_ABA_Mutants__P Parameter: Organism Value: A. thaliana
  misc_feature: MA Experiment 20000573 PARAMETER Experiment Name: At_100uM_ABA_Mutants__P Parameter: Plant Line Value: CS22 vs. Ler wt
  misc_feature: MA Experiment 20000573 PARAMETER Experiment Name: At_100uM_ABA_Mutants__P Parameter: Timepoint (hr) Value: N/A
  misc_feature: MA Experiment 20000573 PARAMETER Experiment Name: At_100uM_ABA_Mutants__P Parameter: Tissue Value: Whole Plant
  misc_feature: MA Experiment 20000573 PARAMETER Experiment Name: At_100uM_ABA_Mutants__P Parameter: Treatment Value: None
  misc_feature: MA Experiment ID: 20000574 Result: Down-regulated in Transcription
  misc_feature: MA Experiment 20000574 PARAMETER Experiment Name: At_100uM_ABA_Mutants__P Parameter: Organism Value: A. thaliana
  misc_feature: MA Experiment 20000574 PARAMETER Experiment Name: At_100uM_ABA_Mutants__P Parameter: Plant Line Value: CS23 vs. Ler wt
  misc_feature: MA Experiment 20000574 PARAMETER Experiment Name: At_100uM_ABA_Mutants__P Parameter: Timepoint (hr) Value: N/A
  misc_feature: MA Experiment 20000574 PARAMETER Experiment Name: At_100uM_ABA_Mutants__P Parameter: Tissue Value: Whole Plant
  misc_feature: MA Experiment 20000574 PARAMETER Experiment Name: At_100uM_ABA_Mutants__P Parameter: Treatment Value: None
  misc_feature: MA Experiment ID: 20000794 Result: Up-regulated in Transcription
  misc_feature: MA Experiment 20000794 PARAMETER Experiment Name: At_Petals_P Parameter: Age (day) Value: 23-25 days
  misc_feature: MA Experiment 20000794 PARAMETER Experiment Name: At_Petals_P Parameter: Plant Line Value: WS
  misc_feature: MA Experiment 20000794 PARAMETER Experiment Name: At_Petals_P Parameter: Tissue Value: Petals vs. Whole plant
  misc_feature: MA Experiment ID: 20001247 Result: Down-regulated in Transcription
  misc_feature: MA Experiment 20001247 PARAMETER Experiment Name: At_Far-red-induction_P Parameter: Age (day) Value: 7
  misc_feature: MA Experiment 20001247 PARAMETER Experiment Name: At_Far-red-induction_P Parameter: Light Value: Far-red vs. White
  misc_feature: MA Experiment 20001247 PARAMETER Experiment Name: At_Far-red-induction_P Parameter: Organism Value: A. thaliana
  misc_feature: MA Experiment 20001247 PARAMETER Experiment Name: At_Far-red-induction_P Parameter: Plant Line Value: Columbia
  misc_feature: MA Experiment 20001247 PARAMETER Experiment Name: At_Far-red-induction_P Parameter: Timepoint (hr) Value: 1
  misc_feature: MA Experiment 20001247 PARAMETER Experiment Name: At_Far-red-induction_P Parameter: Tissue Value: Whole Plant
  misc_feature: MA Experiment ID: 20001248 Result: Down-regulated in Transcription
  misc_feature: MA Experiment 20001248 PARAMETER Experiment Name: At_Far-red-induction_P Parameter: Age (day) Value: 7
  misc_feature: MA Experiment 20001248 PARAMETER Experiment Name: At_Far-red-induction_P Parameter: Light Value: Far-red vs. White
  misc_feature: MA Experiment 20001248 PARAMETER Experiment Name: At_Far-red-induction_P Parameter: Organism Value: A. thaliana
  misc_feature: MA Experiment 20001248 PARAMETER Experiment Name: At_Far-red-induction_P Parameter: Plant Line Value: Columbia
  misc_feature: MA Experiment 20001248 PARAMETER Experiment Name: At_Far-red-induction_P Parameter: Timepoint (hr) Value: 4
  misc_feature: MA Experiment 20001248 PARAMETER Experiment Name: At_Far-red-induction_P Parameter: Tissue Value: Whole Plant
  misc_feature: MA Experiment ID: 20001450 Result: Down-regulated in Transcription
  misc_feature: MA Experiment 20001450 PARAMETER Experiment Name: At_Far-red-induction_P Parameter: Age (day) Value: 7
  misc_feature: MA Experiment 20001450 PARAMETER Experiment Name: At_Far-red-induction_P Parameter: Light Value: Far-red vs. White
  misc_feature: MA Experiment 20001450 PARAMETER Experiment Name: At_Far-red-induction_P Parameter: Organism Value: A. thaliana
  misc_feature: MA Experiment 20001450 PARAMETER Experiment Name: At_Far-red-induction_P Parameter: Plant Line Value: Columbia
  misc_feature: MA Experiment 20001450 PARAMETER Experiment Name: At_Far-red-induction_P Parameter: Timepoint (hr) Value: 8
  misc_feature: MA Experiment 20001450 PARAMETER Experiment Name: At_Far-red-induction_P Parameter: Tissue Value: Whole Plant
  misc_feature: MA Experiment ID: 20001558 Result: Down-regulated in Transcription
  misc_feature: MA Experiment 20001558 PARAMETER Experiment Name: At_Drought_Soil_Dry_P Parameter: Age (day) Value: 27
  misc_feature: MA Experiment 20001558 PARAMETER Experiment Name: At_Drought_Soil_Dry_P Parameter: Organism Value: A. thaliana
  misc_feature: MA Experiment 20001558 PARAMETER Experiment Name: At_Drought_Soil_Dry_P Parameter: Plant Line Value: WS
  misc_feature: MA Experiment 20001558 PARAMETER Experiment Name: At_Drought_Soil_Dry_P Parameter: Post Timepoint (hr) Value: 6
  misc_feature: MA Experiment 20001558 PARAMETER Experiment Name: At_Drought_Soil_Dry_P Parameter: Post-Treatment Value: Re-Water vs. No Drought
  misc_feature: MA Experiment 20001558 PARAMETER Experiment Name: At_Drought_Soil_Dry_P Parameter: Timepoint (day) Value: 13
  misc_feature: MA Experiment 20001558 PARAMETER Experiment Name: At_Drought_Soil_Dry_P Parameter: Treatment Value: Drought vs. No Drought
  misc_feature: MA Experiment ID: 20001757 Result: Down-regulated in Transcription
  misc_feature: MA Experiment 20001757 PARAMETER Experiment Name: At_50mM_NH4NO3_L-to-H_P Parameter: Timepoint (hr) Value: 6
  misc_feature: MA Experiment 20001757 PARAMETER Experiment Name: At_50mM_NH4NO3_L-to-H_P Parameter: Tissue Value: Leaf
  misc_feature: MA Experiment 20001757 PARAMETER Experiment Name: At_50mM_NH4NO3_L-to-H_P Parameter: Treatment Value: 50mM NH4NO3 vs 100mM Mannitol
cacaaacgcgctgcagctgcaatcgcgtctggtaaactcaaggatgaaatcattcctgttgctactaagattgtggaccctgagactaaagcagagaaggcaatcgtcgtatctgttgatgacggtgtacgtccaaactcaaacatggcagatttggcaaagctgaagactgtctttaaacagaacggttccaccacagctggcaatgctagtcagatcagtgatggtgctggagcagtactgctaatgaagagaagtttggctatgaagaagggacttcccattcttggagtattcaggagttttgctgttactggtgtggaaccatctgtaatgggtattggtccagctgttgccattcccgctgcaactaagctcgcagggctcaccgtcagcgatattgatctattcgagatcaatgaggcatttgcatctcagtatgtgtactcttgcaagaagttagagctggatatggaaaaggtcaatgttaatggaggagccattgctattggccatcccctgggtgctacaggagctcgatgtgttgcgacattgttgcacgagatgaagcggagaggaaaagattgccgctttggagtaatctcaatgtgcataggcactggaatgggagctgcagctgtttttgagaggggagactctgttgataacttgtccaacgctcgtgtggctaacggggatagtcattagaacatcgaagagagcttgaataagtagaagtaatgatgcattgagtctaataaatatgatgctttagctctttcacattgctgaacaatgaaaacttttgtcattctgagtttaaaatcaactacttttctccg

SEQ ID NO: 27747 - protein, 235 aa, Arabidopsis thaliana
  peptide (1)..(235): Ceres Seq. ID no. 12738276
  misc_feature (1)..(86): Pfam Name: Thiolase, N-terminal domain Pfam Description: Thiolase, N-terminal domain
  misc_feature (1)..(228): Homolog of NCBI NO: 37535022 NR Description: putative thiolase [Oryza sativa (japonica
  misc_feature (1)..(235): Homolog of NCBI NO: 7433644 NR Description: acetyl-CoA C-acyltransferase (EC 2.3.1.16)
  misc_feature (1)..(228): Homolog of NCBI NO: 29367431 NR Description: 3-ketoacyl-CoA thiolase-like protein
  misc_feature (1)..(232): Homolog of NCBI NO: 421810 NR Description: acetyl-CoA C-acyltransferase (EC 2.3.1.16)
  misc_feature (1)..(228): Homolog of NCBI NO: 34597334 NR Description: acetoacetyl CoA thiolase [Helianthus annuus]
  misc_feature (1)..(228): Homolog of NCBI NO: 15225798 NR Description: 3-ketoacyl-CoA thiolase
  misc_feature (1)..(232): Homolog of NCBI NO: 7433647 NR Description: acetyl-CoA C-acyltransferase (EC 2.3.1.16)
  misc_feature (1)..(232): Homolog of NCBI NO: 393707 NR Description: 3-ketoacyl-CoA thiolase; acetyl-CoA
  misc_feature (1)..(235): Homolog of NCBI NO: 30695564 NR Description: acetyl-CoA C-acyltransferase 1 (3-ketoacyl-CoA
  misc_feature (1)..(235): Homolog of NCBI NO: 30695561 NR Description: acetyl-CoA C-acyltransferase 1 (3-ketoacyl-CoA
HKRAAAAIASGKLKDEIIPVATKIVDPETKAEKAIVVSVDDGVRPNSNMADLAKLKTVFKQNGSTTAGNASQISDGAGAVLLMKRSLAMKKGLPILGVFRSFAVTGVEPSVMGIGPAVAIPAATKLAGLTVSDIDLFEINEAFASQYVYSCKKLELDMEKVNVNGGAIAIGHPLGATGARCVATLLHEMKRRGKDCRFGVISMCIGTGMGAAAVFERGDSVDNLSNARVANGDSH

SEQ ID NO: 27748 - protein, 187 aa, Arabidopsis thaliana
  peptide (1)..(187): Ceres Seq. ID no. 12738277
  misc_feature (1)..(180): Homolog of NCBI NO: 37535022 NR Description: putative thiolase [Oryza sativa (japonica
  misc_feature (1)..(187): Homolog of NCBI NO: 7433644 NR Description: acetyl-CoA C-acyltransferase (EC 2.3.1.16)
  misc_feature (1)..(180): Homolog of NCBI NO: 29367431 NR Description: 3-ketoacyl-CoA thiolase-like protein
  misc_feature (1)..(184): Homolog of NCBI NO: 421810 NR Description: acetyl-CoA C-acyltransferase (EC 2.3.1.16)
  misc_feature (1)..(180): Homolog of NCBI NO: 34597334 NR Description: acetoacetyl CoA thiolase [Helianthus annuus]
  misc_feature (1)..(180): Homolog of NCBI NO: 15225798 NR Description: 3-ketoacyl-CoA thiolase
  misc_feature (1)..(184): Homolog of NCBI NO: 7433647 NR Description: acetyl-CoA C-acyltransferase (EC 2.3.1.16)
  misc_feature (1)..(184): Homolog of NCBI NO: 393707 NR Description: 3-ketoacyl-CoA thiolase; acetyl-CoA
  misc_feature (1)..(187): Homolog of NCBI NO: 30695564 NR Description: acetyl-CoA C-acyltransferase 1 (3-ketoacyl-CoA
  misc_feature (1)..(187): Homolog of NCBI NO: 30695561 NR Description: acetyl-CoA C-acyltransferase 1 (3-ketoacyl-CoA
MADLAKLKTVFKQNGSTTAGNASQISDGAGAVLLMKRSLAMKKGLPILGVFRSFAVTGVEPSVMGIGPAVAIPAATKLAGLTVSDIDLFEINEAFASQYVYSCKKLELDMEKVNVNGGAIAIGHPLGATGARCVATLLHEMKRRGKDCRFGVISMCIGTGMGAAAVFERGDSVDNLSNARVANGDSH

SEQ ID NO: 27749 - protein, 153 aa, Arabidopsis thaliana
  peptide (1)..(153): Ceres Seq. ID no. 12738278
  misc_feature (1)..(146): Homolog of NCBI NO: 37535022 NR Description: putative thiolase [Oryza sativa (japonica
  misc_feature (1)..(153): Homolog of NCBI NO: 7433644 NR Description: acetyl-CoA C-acyltransferase (EC 2.3.1.16)
  misc_feature (1)..(146): Homolog of NCBI NO: 29367431 NR Description: 3-ketoacyl-CoA thiolase-like protein
  misc_feature (1)..(150): Homolog of NCBI NO: 421810 NR Description: acetyl-CoA C-acyltransferase (EC 2.3.1.16)
  misc_feature (1)..(146): Homolog of NCBI NO: 34597334 NR Description: acetoacetyl CoA thiolase [Helianthus annuus]
  misc_feature (1)..(146): Homolog of NCBI NO: 15225798 NR Description: 3-ketoacyl-CoA thiolase
  misc_feature (1)..(150): Homolog of NCBI NO: 7433647 NR Description: acetyl-CoA C-acyltransferase (EC 2.3.1.16)
  misc_feature (1)..(150): Homolog of NCBI NO: 393707 NR Description: 3-ketoacyl-CoA thiolase; acetyl-CoA
  misc_feature (1)..(153): Homolog of NCBI NO: 30695564 NR Description: acetyl-CoA C-acyltransferase 1 (3-ketoacyl-CoA
  misc_feature (1)..(153): Homolog of NCBI NO: 30695561 NR Description: acetyl-CoA C-acyltransferase 1 (3-ketoacyl-CoA
MKRSLAMKKGLPILGVFRSFAVTGVEPSVMGIGPAVAIPAATKLAGLTVSDIDLFEINEAFASQYVYSCKKLELDMEKVNVNGGAIAIGHPLGATGARCVATLLHEMKRRGKDCRFGVISMCIGTGMGAAAVFERGDSVDNLSNARVANGDSH

SEQ ID NO: 27750 - DNA, 1392 bp, Arabidopsis thaliana
  misc_feature (1)..(1392): Ceres Seq. ID no. 13492415
  misc_feature: MA Experiment ID: 108434 Result: Down-regulated in Transcription
  misc_feature: MA Experiment 108434 PARAMETER Experiment Name: At_Root_Tips_cDNA_P Parameter: Tissue Value: Root Tips
  misc_feature: MA Experiment ID: 108561 Result: Up-regulated in Transcription
  misc_feature: MA Experiment 108561 PARAMETER Experiment Name: At_100uM_ABA_cDNA_P Parameter: Timepoint (hr) Value: 6
  misc_feature: MA Experiment 108561 PARAMETER Experiment Name: At_100uM_ABA_cDNA_P Parameter: Tissue Value: Aerial
  misc_feature: MA Experiment 108561 PARAMETER Experiment Name: At_100uM_ABA_cDNA_P Parameter: Treatment Value: 100uM ABA vs. No Treatment
  misc_feature: MA Experiment ID: 20000185 Result: Up-regulated in Transcription
  misc_feature: MA Experiment 20000185 PARAMETER Experiment Name: At_Roots__P Parameter: Age (day) Value: 7 vs. 21
  misc_feature: MA Experiment 20000185 PARAMETER Experiment Name: At_Roots__P Parameter: Organism Value: A. thaliana
  misc_feature: MA Experiment 20000185 PARAMETER Experiment Name: At_Roots__P Parameter: Tissue Value: Roots vs. Whole Plant
  misc_feature: MA Experiment ID: 20000437 Result: Up-regulated in Transcription
  misc_feature: MA Experiment 20000437 PARAMETER Experiment Name: At_Drought_P Parameter: Age (day) Value: 8
  misc_feature: MA Experiment 20000437 PARAMETER Experiment Name: At_Drought_P Parameter: Organism Value: A. thaliana
  misc_feature: MA Experiment 20000437 PARAMETER Experiment Name: At_Drought_P Parameter: Plant Line Value: WS
  misc_feature: MA Experiment 20000437 PARAMETER Experiment Name: At_Drought_P Parameter: Timepoint (hr) Value: 24
  misc_feature: MA Experiment 20000437 PARAMETER Experiment Name: At_Drought_P Parameter: Tissue Value: Whole Plant
  misc_feature: MA Experiment 20000437 PARAMETER Experiment Name: At_Drought_P Parameter: Treatment Value: Drought vs. No Drought
  misc_feature: MA Experiment ID: 20000439 Result: Up-regulated in Transcription
  misc_feature: MA Experiment 20000439 PARAMETER Experiment Name: At_Roots__P Parameter: Age (day) Value: 14 vs. 21
  misc_feature: MA Experiment 20000439 PARAMETER Experiment Name: At_Roots__P Parameter: Organism Value: A. thaliana
  misc_feature: MA Experiment 20000439 PARAMETER Experiment Name: At_Roots__P Parameter: Tissue Value: Roots vs. Whole Plant
  misc_feature: MA Experiment ID: 20000451 Result: Up-regulated in Transcription
  misc_feature: MA Experiment 20000451 PARAMETER Experiment Name: At_CS6879_Shoots-Roots_P Parameter: Age (day) Value: 14
  misc_feature: MA Experiment 20000451 PARAMETER Experiment Name: At_CS6879_Shoots-Roots_P Parameter: Organism Value: A. thaliana
  misc_feature: MA Experiment 20000451 PARAMETER Experiment Name: At_CS6879_Shoots-Roots_P Parameter: Plant Line Value: CS6879 vs. WS
  misc_feature: MA Experiment 20000451 PARAMETER Experiment Name: At_CS6879_Shoots-Roots_P Parameter: Tissue Value: Roots
  misc_feature: MA Experiment ID: 20001451 Result: Up-regulated in Transcription
  misc_feature: MA Experiment 20001451 PARAMETER Experiment Name: At_Far-red-induction_P Parameter: Age (day) Value: 7
  misc_feature: MA Experiment 20001451 PARAMETER Experiment Name: At_Far-red-induction_P Parameter: Light Value: Far-red vs. White
  misc_feature: MA Experiment 20001451 PARAMETER Experiment Name: At_Far-red-induction_P Parameter: Organism Value: A. thaliana
  misc_feature: MA Experiment 20001451 PARAMETER Experiment Name: At_Far-red-induction_P Parameter: Plant Line Value: Columbia
  misc_feature: MA Experiment 20001451 PARAMETER Experiment Name: At_Far-red-induction_P Parameter: Timepoint (hr) Value: 24
  misc_feature: MA Experiment 20001451 PARAMETER Experiment Name: At_Far-red-induction_P Parameter: Tissue Value: Whole Plant
agaatcaatcagtaaaacgaaaagctaatccaaaactctttaattatttgcaacaactgatcaatggctgtaacaagctcttcttctacttgtgatggtttcttcatcatcagccttattgttatcgtttcttcattgtttgggacatcatctgcgcagttaaacgcaacgttttactcaggcacatgccctaacgcctctgccatcgttcgcagcactattcagcaagctcttcaatccgatgcaagaatcggaggcagcctaatccgccttcattttcacgactgttttgttaatggttgcgatgggtcgctcttgcttgacgacacttcaagcatccagagcgagaagaacgctcctgccaatgcaaactcaactagaggattcaatgttgtcgatagtatcaagacagccctcgagaatgcttgtccgggcattgtttcttgctctgacattttagctcttgcctcagaggcctctgtgtctttggcaggaggaccttcatggactgtgttattaggaagaagagatggtctcaccgcaaacttgtctggagccaattcgtctcttccctctcccttcgaaggccttaacaacatcacatcaaaatttgtagctgtcgggctaaagacaaccgatgtagtatccttgtctggagcgcatacgtttgggcgtggtcaatgcgtaacgttcaacaatagactattcaacttcaacgggacaggaaaccccgacccgactctgaactcaacacttctcagcagtcttcaacagctatgtcctcaaaacggcagcaatacagggatcaccaatctcgatctgagcacacctgatgcgttcgataacaattacttcacgaaccttcagagtaacaatgggcttctccagtcagaccaggaactgttctcaaacaccggttcagccaccgtcccgattgttaattcctttgcaagtaaccagaccctgttttttgaggcgtttgttcagtctatgatcaagatggggaacattagtcccttgactgggagtagtggagagattagacaagactgtaaggtggttaatggacagtcatcagccactgaagcaggggacattcagttacaatctgacggaccagtgagtgtagcagatatgtgaacaacgatgagatcagtttcaccgtttgtttatcatatatgaataataactcctaggccgaatcatttttgtgaaaaaaataagtttggttgaggagaaaataagtgagtggtagggttgtgttttacacttttgaaaattttaatattctaaaacattattatgcctaaatacatgcatgcatgtataacgtctatcgttttgatacattttgtggatttgaatctaaattgtgtcacaacgacaaaattt

SEQ ID NO: 27751 - protein, 358 aa, Arabidopsis thaliana
  peptide (1)..(358): Ceres Seq. ID no. 13492416
  misc_feature (49)..(298): Pfam Name: Peroxidase Pfam Description: Peroxidase
  misc_feature (31)..(339): Homolog of NCBI NO: 1279654 NR Description: peroxidase [Populus balsamifera subsp.
  misc_feature (71)..(324): Homolog of NCBI NO: 38261094 NR Description: peroxidase [Brassica napus]
  misc_feature (13)..(335): Homolog of NCBI NO: 5002348 NR Description: peroxidase 5 precursor [Phaseolus vulgaris]
  misc_feature (15)..(334): Homolog of NCBI NO: 8546851 NR Description: peroxidase [Ipomoea batatas]
  misc_feature (32)..(335): Homolog of NCBI NO: 1730490 NR Description: Peroxidase A2
  misc_feature (32)..(335): Homolog of NCBI NO: 11513747 NR Description: Chain A, Arabidopsis Thaliana Peroxidase A2
  misc_feature (1)..(335): Homolog of NCBI NO: 15240140 NR Description: peroxidase, putative [Arabidopsis thaliana]
  misc_feature (1)..(335): Homolog of NCBI NO: 21593262 NR Description: peroxidase [Arabidopsis thaliana]
  misc_feature (1)..(358): Homolog of NCBI NO: 21594792 NR Description: peroxidase [Arabidopsis thaliana]
  misc_feature (1)..(358): Homolog of NCBI NO: 15240141 NR Description: peroxidase, putative [Arabidopsis thaliana]
MAVTSSSSTCDGFFIISLIVIVSSLFGTSSAQLNATFYSGTCPNASAIVRSTIQQALQSDARIGGSLIRLHFHDCFVNGCDGSLLLDDTSSIQSEKNAPANANSTRGFNVVDSIKTALENACPGIVSCSDILALASEASVSLAGGPSWTVLLGRRDGLTANLSGANSSLPSPFEGLNNITSKFVAVGLKTTDVVSLSGAHTFGRGQCVTFNNRLFNFNGTGNPDPTLNSTLLSSLQQLCPQNGSNTGITNLDLSTPDAFDNNYFTNLQSNNGLLQSDQELFSNTGSATVPIVNSFASNQTLFFEAFVQSMIKMGNISPLTGSSGEIRQDCKVVNGQSSATEAGDIQLQSDGPVSVADM

SEQ ID NO: 27752 - DNA, 1547 bp, Arabidopsis thaliana
  misc_feature (1)..(1547): Ceres Seq. ID no. 12327682
  misc_feature: MA Experiment ID: 108488 Result: Down-regulated in Transcription
  misc_feature: MA Experiment ID: 108573 Result: Up-regulated in Transcription
  misc_feature: MA Experiment 108573 PARAMETER Experiment Name: At_Drought_cDNA_P Parameter: Timepoint (hr) Value: 6
  misc_feature: MA Experiment 108573 PARAMETER Experiment Name: At_Drought_cDNA_P Parameter: Tissue Value: Aerial
  misc_feature: MA Experiment 108573 PARAMETER Experiment Name: At_Drought_cDNA_P Parameter: Treatment Value: Drought vs. No Drought
  misc_feature: MA Experiment ID: 20000171 Result: Down-regulated in Transcription
  misc_feature: MA Experiment 20000171 PARAMETER Experiment Name: At_42deg_Heat_P Parameter: Age (day) Value: 14
  misc_feature: MA Experiment 20000171 PARAMETER Experiment Name: At_42deg_Heat_P Parameter: Organism Value: A. thaliana
  misc_feature: MA Experiment 20000171 PARAMETER Experiment Name: At_42deg_Heat_P Parameter: Plant Line Value: WS
  misc_feature: MA Experiment 20000171 PARAMETER Experiment Name: At_42deg_Heat_P Parameter: Temperature (deg C) Value: 42 vs. 22
  misc_feature: MA Experiment 20000171 PARAMETER Experiment Name: At_42deg_Heat_P Parameter: Timepoint (hr) Value: 1
  misc_feature: MA Experiment 20000171 PARAMETER Experiment Name: At_42deg_Heat_P Parameter: Tissue Value: Aerial
  misc_feature: MA Experiment ID: 20000437 Result: Up-regulated in Transcription
  misc_feature: MA Experiment 20000437 PARAMETER Experiment Name: At_Drought_P Parameter: Age (day) Value: 8
  misc_feature: MA Experiment 20000437 PARAMETER Experiment Name: At_Drought_P Parameter: Organism Value: A. thaliana
  misc_feature: MA Experiment 20000437 PARAMETER Experiment Name: At_Drought_P Parameter: Plant Line Value: WS
  misc_feature: MA Experiment 20000437 PARAMETER Experiment Name: At_Drought_P Parameter: Timepoint (hr) Value: 24
  misc_feature: MA Experiment 20000437 PARAMETER Experiment Name: At_Drought_P Parameter: Tissue Value: Whole Plant
  misc_feature: MA Experiment 20000437 PARAMETER Experiment Name: At_Drought_P Parameter: Treatment Value: Drought vs. No Drought
  misc_feature: MA Experiment ID: 20000794 Result: Up-regulated in Transcription
  misc_feature: MA Experiment 20000794 PARAMETER Experiment Name: At_Petals_P Parameter: Age (day) Value: 23-25 days
  misc_feature: MA Experiment 20000794 PARAMETER Experiment Name: At_Petals_P Parameter: Plant Line Value: WS
  misc_feature: MA Experiment 20000794 PARAMETER Experiment Name: At_Petals_P Parameter: Tissue Value: Petals vs. Whole plant
  misc_feature: MA Experiment ID: 20001904 Result: Up-regulated in Transcription
  misc_feature: MA Experiment 20001904 PARAMETER Experiment Name: At_Drought_Reproduction_P Parameter: Age (day) Value: 37
  misc_feature: MA Experiment 20001904 PARAMETER Experiment Name: At_Drought_Reproduction_P Parameter: Organism Value: A. thaliana
  misc_feature: MA Experiment 20001904 PARAMETER Experiment Name: At_Drought_Reproduction_P Parameter: Plant Line Value: WS
  misc_feature: MA Experiment 20001904 PARAMETER Experiment Name: At_Drought_Reproduction_P Parameter: Timepoint (day) Value: 7
  misc_feature: MA Experiment 20001904 PARAMETER Experiment Name: At_Drought_Reproduction_P Parameter: Tissue Value: Rosettes
  misc_feature: MA Experiment 20001904 PARAMETER Experiment Name: At_Drought_Reproduction_P Parameter: Treatment Value: Drought vs. No Drought
  misc_feature: MA Experiment ID: 20001905 Result: Up-regulated in Transcription
  misc_feature: MA Experiment 20001905 PARAMETER Experiment Name: At_Drought_Reproduction_P Parameter: Age (day) Value: 40
  misc_feature: MA Experiment 20001905 PARAMETER Experiment Name: At_Drought_Reproduction_P Parameter: Organism Value: A. thaliana
  misc_feature: MA Experiment 20001905 PARAMETER Experiment Name: At_Drought_Reproduction_P Parameter: Plant Line Value: WS
  misc_feature: MA Experiment 20001905 PARAMETER Experiment Name: At_Drought_Reproduction_P Parameter: Timepoint (day) Value: 10
  misc_feature: MA Experiment 20001905 PARAMETER Experiment Name: At_Drought_Reproduction_P Parameter: Tissue Value: Rosettes
  misc_feature: MA Experiment 20001905 PARAMETER Experiment Name: At_Drought_Reproduction_P Parameter: Treatment Value: Drought vs. No Drought
  misc_feature: MA Experiment ID: 20001906 Result: Up-regulated in Transcription
  misc_feature: MA Experiment 20001906 PARAMETER Experiment Name: At_Drought_Reproduction_P Parameter: Age (day) Value: 35
  misc_feature: MA Experiment 20001906 PARAMETER Experiment Name: At_Drought_Reproduction_P Parameter: Organism Value: A. thaliana
  misc_feature: MA Experiment 20001906 PARAMETER Experiment Name: At_Drought_Reproduction_P Parameter: Plant Line Value: WS
  misc_feature: MA Experiment 20001906 PARAMETER Experiment Name: At_Drought_Reproduction_P Parameter: Timepoint (day) Value: 5
  misc_feature: MA Experiment 20001906 PARAMETER Experiment Name: At_Drought_Reproduction_P Parameter: Tissue Value: Siliques
  misc_feature: MA Experiment 20001906 PARAMETER Experiment Name: At_Drought_Reproduction_P Parameter: Treatment Value: Drought vs. No Drought
  misc_feature: MA Experiment ID: 20001908 Result: Up-regulated in Transcription
  misc_feature: MA Experiment 20001908 PARAMETER Experiment Name: At_Drought_Reproduction_P Parameter: Age (day) Value: 40
  misc_feature: MA Experiment 20001908 PARAMETER Experiment Name: At_Drought_Reproduction_P Parameter: Organism Value: A. thaliana
  misc_feature: MA Experiment 20001908 PARAMETER Experiment Name: At_Drought_Reproduction_P Parameter: Plant Line Value: WS
  misc_feature: MA Experiment 20001908 PARAMETER Experiment Name: At_Drought_Reproduction_P Parameter: Timepoint (day) Value: 10
  misc_feature: MA Experiment 20001908 PARAMETER Experiment Name: At_Drought_Reproduction_P Parameter: Tissue Value: Siliques
  misc_feature: MA Experiment 20001908 PARAMETER Experiment Name: At_Drought_Reproduction_P Parameter: Treatment Value: Drought vs. No Drought
  misc_feature: MA Experiment ID: 20001911 Result: Up-regulated in Transcription
  misc_feature: MA Experiment 20001911 PARAMETER Experiment Name: At_Drought_Reproduction_P Parameter: Age (day) Value: 40
  misc_feature: MA Experiment 20001911 PARAMETER Experiment Name: At_Drought_Reproduction_P Parameter: Organism Value: A. thaliana
  misc_feature: MA Experiment 20001911 PARAMETER Experiment Name: At_Drought_Reproduction_P Parameter: Plant Line Value: WS
  misc_feature: MA Experiment 20001911 PARAMETER Experiment Name: At_Drought_Reproduction_P Parameter: Timepoint (day) Value: 10
  misc_feature: MA Experiment 20001911 PARAMETER Experiment Name: At_Drought_Reproduction_P Parameter: Tissue Value: Flowers
  misc_feature: MA Experiment 20001911 PARAMETER Experiment Name: At_Drought_Reproduction_P Parameter: Treatment Value: Drought vs. No Drought
attaaaaagtcttaacgcccacaacgaaaaggaacttctctttttgtttggtgactgaatcggtggaaaacaacacaagtttgttcctttttgtctctccagatcccttggcttccttcttcttcttcatcctcctcgtgagactctgtgttgaaatttctctagggttttaattatcggcgttggtttttcgtttttgagaatttgatttcgtttttagaaataatgggtgattgggctcaacttgctcagtctgtgatcctaggtttgattttctcttaccttctcgctaagctgatctcgatcgtcgtcacgtttaaagaagacaatctctctcttactcgtcacccagaggagtctcaattggaaattaaaccggaaggagttgactcgcgacgtctcgattcctcttgcggtggtttcggtggtgaggcggattcgcttgtggcggagcagggtagctcccgaagtgatagcgttgccggtgacgacagtgaggaagatgatgattgggaaggcgtcgagagcacggaactcgatgaggcttttagcgccgccactctttttgtgactaccgccgccgcagatcggctttcgcagaaggtaccgagtgatgtgcagcagcagctttacggattgtataagattgctacggaagggccgtgtactgctcctcagccatcagctctcaaaatgactgctcgtgccaagtggcaagcatggcagaaactgggagctatgccacctgaagaggcgatggagaagtatattgagattgtcactcagctttacccaacttggttagacggtggcgtgaaagccggaagtcggggtggggatgatgcagcctccaactcaagaggaaccatgggaccagtttttagctctttggtttatgatgaggagtccgaaaatgagttgaagattgatgccatacacggatttgctagagaaggagaagtcgagaatttactgaaaagcattgaaagcggcattcctgtaaatgcaagggacagtgaaggtcgcacaccattgcactgggctatagaccgtggccacctcaacatcgccaaagttctggtcgataagaacgccgatgtgaatgctaaggacaacgaaggccaaacccctttgcattatgctgttgtatgcgacagagaagctatcgccgagtttctggttaaacagaacgcaaacacagccgctaaagatgaggatggaaactctccccttgatctctgtgaatcagactggccctggatccgagattctgcaaagcaggcagactaaacaaatactaaccacgtcttctctaaatccgcaatgtatatgatcaaatgacttagtaagaagcttttctttactttaaactttctttccatccctaccacatcactgggatgttccaacactatatcacttggatgttaccaagtcttgttctttgatttctttcttcttacattttaacaatcttttgttcctttaggctttatgatatgtcgtaaccggttttgttggtttgctataaatacacacatatagac

SEQ ID NO: 27753 - protein, 354 aa, Arabidopsis thaliana
  peptide (1)..(354): Ceres Seq. ID no. 12327683
  misc_feature (104)..(190): Pfam Name: Acyl CoA binding protein Pfam Description: Acyl CoA binding protein
  misc_feature (90)..(338): Homolog of NCBI NO: 31204677 NR Description: ENSANGP00000017422 [Anopheles gambiae]
  misc_feature (75)..(335): Homolog of NCBI NO: 21312284 NR Description: RIKEN cDNA 2610100E10 [Mus musculus]
  misc_feature (75)..(335): Homolog of NCBI NO: 34880749 NR Description: similar to RIKEN cDNA 2610100E10 [Rattus
  misc_feature (78)..(335): Homolog of NCBI NO: 14150169 NR Description: hypothetical protein MGC2404 [Homo sapiens]
  misc_feature (2)..(346): Homolog of NCBI NO: 32488636 NR Description: OSJNBa0032F06.12 [Oryza sativa (japonica
  misc_feature (1)..(348): Homolog of NCBI NO: 21593070 NR Description: putative acyl-CoA binding protein [Arabidopsis
  misc_feature (1)..(348): Homolog of NCBI NO: 21284389 NR Description: acyl-CoA binding protein [Arabidopsis thaliana]
  misc_feature (1)..(348): Homolog of NCBI NO: 15238757 NR Description: putative protein
  misc_feature (1)..(273): Homolog of NCBI NO: 12039034 NR Description: acyl-CoA binding protein 2 [Arabidopsis thaliana]
  misc_feature (1)..(354): Homolog of NCBI NO: 15234270 NR Description: putative acyl-CoA binding protein
MGDWAQLAQSVILGLIFSYLLAKLISIVVTFKEDNLSLTRHPEESQLEIKPEGVDSRRLDSSCGGFGGEADSLVAEQGSSRSDSVAGDDSEEDDDWEGVESTELDEAFSAATLFVTTAAADRLSQKVPSDVQQQLYGLYKIATEGPCTAPQPSALKMTARAKWQAWQKLGAMPPEEAMEKYIEIVTQLYPTWLDGGVKAGSRGGDDAASNSRGTMGPVFSSLVYDEESENELKIDAIHGFAREGEVENLLKSIESGIPVNARDSEGRTPLHWAIDRGHLNIAKVLVDKNADVNAKDNEGQTPLHYAVVCDREAIAEFLVKQNANTAAKDEDGNSPLDLCESDWPWIRDSAKQAD

SEQ ID NO: 27754 - protein, 198 aa, Arabidopsis thaliana
  peptide (1)..(198): Ceres Seq. ID no. 12327684
  misc_feature (109)..(141): Pfam Name: Ankyrin repeat Pfam Description: Ankyrin repeat
  misc_feature (1)..(182): Homolog of NCBI NO: 31204677 NR Description: ENSANGP00000017422 [Anopheles gambiae]
  misc_feature (1)..(179): Homolog of NCBI NO: 21312284 NR Description: RIKEN cDNA 2610100E10 [Mus musculus]
  misc_feature (1)..(179): Homolog of NCBI NO: 34880749 NR Description: similar to RIKEN cDNA 2610100E10 [Rattus
  misc_feature (1)..(179): Homolog of NCBI NO: 14150169 NR Description: hypothetical protein MGC2404 [Homo sapiens]
  misc_feature (1)..(190): Homolog of NCBI NO: 32488636 NR Description: OSJNBa0032F06.12 [Oryza sativa (japonica
  misc_feature (1)..(192): Homolog of NCBI NO: 21593070 NR Description: putative acyl-CoA binding protein [Arabidopsis
  misc_feature (1)..(192): Homolog of NCBI NO: 21284389 NR Description: acyl-CoA binding protein [Arabidopsis thaliana]
  misc_feature (1)..(192): Homolog of NCBI NO: 15238757 NR Description: putative protein
  misc_feature (1)..(117): Homolog of NCBI NO: 12039034 NR Description: acyl-CoA binding protein 2 [Arabidopsis thaliana]
  misc_feature (1)..(198): Homolog of NCBI NO: 15234270 NR Description: putative acyl-CoA binding protein
MTARAKWQAWQKLGAMPPEEAMEKYIEIVTQLYPTWLDGGVKAGSRGGDDAASNSRGTMGPVFSSLVYDEESENELKIDAIHGFAREGEVENLLKSIESGIPVNARDSEGRTPLHWAIDRGHLNIAKVLVDKNADVNAKDNEGQTPLHYAVVCDREAIAEFLVKQNANTAAKDEDGNSPLDLCESDWPWIRDSAKQAD

SEQ ID NO: 27755 - protein, 183 aa, Arabidopsis thaliana
  peptide (1)..(183): Ceres Seq. ID no. 12327685
  misc_feature (94)..(126): Pfam Name: Ankyrin repeat Pfam Description: Ankyrin repeat
  misc_feature (1)..(167): Homolog of NCBI NO: 31204677 NR Description: ENSANGP00000017422 [Anopheles gambiae]
  misc_feature (1)..(164): Homolog of NCBI NO: 21312284 NR Description: RIKEN cDNA 2610100E10 [Mus musculus]
  misc_feature (1)..(164): Homolog of NCBI NO: 34880749 NR Description: similar to RIKEN cDNA 2610100E10 [Rattus
  misc_feature (1)..(164): Homolog of NCBI NO: 14150169 NR Description: hypothetical protein MGC2404 [Homo sapiens]
  misc_feature (1)..(175): Homolog of NCBI NO: 32488636 NR Description: OSJNBa0032F06.12 [Oryza sativa (japonica
  misc_feature (1)..(177): Homolog of NCBI NO: 21593070 NR Description: putative acyl-CoA binding protein [Arabidopsis
  misc_feature (1)..(177): Homolog of NCBI NO: 21284389 NR Description: acyl-CoA binding protein [Arabidopsis thaliana]
  misc_feature (1)..(177): Homolog of NCBI NO: 15238757 NR Description: putative protein
  misc_feature (1)..(102): Homolog of NCBI NO: 12039034 NR Description: acyl-CoA binding protein 2 [Arabidopsis thaliana]
  misc_feature (1)..(183): Homolog of NCBI NO: 15234270 NR Description: putative acyl-CoA binding protein
MPPEEAMEKYIEIVTQLYPTWLDGGVKAGSRGGDDAASNSRGTMGPVFSSLVYDEESENELKIDAIHGFAREGEVENLLKSIESGIPVNARDSEGRTPLHWAIDRGHLNIAKVLVDKNADVNAKDNEGQTPLHYAVVCDREAIAEFLVKQNANTAAKDEDGNSPLDLCESDWPWIRDSAKQAD

SEQ ID NO: 27756 - DNA, 1519 bp, Arabidopsis thaliana
  misc_feature (1)..(1519): Ceres Seq. ID no. 12558479
  misc_feature: MA Experiment ID: 20001451 Result: Down-regulated in Transcription
  misc_feature: MA Experiment 20001451 PARAMETER Experiment Name: At_Far-red-induction_P Parameter: Age (day) Value: 7
  misc_feature: MA Experiment 20001451 PARAMETER Experiment Name: At_Far-red-induction_P Parameter: Light Value: Far-red vs. White
  misc_feature: MA Experiment 20001451 PARAMETER Experiment Name: At_Far-red-induction_P Parameter: Organism Value: A. thaliana
  misc_feature: MA Experiment 20001451 PARAMETER Experiment Name: At_Far-red-induction_P Parameter: Plant Line Value: Columbia
  misc_feature: MA Experiment 20001451 PARAMETER Experiment Name: At_Far-red-induction_P Parameter: Timepoint (hr) Value: 24
  misc_feature: MA Experiment 20001451 PARAMETER Experiment Name: At_Far-red-induction_P Parameter: Tissue Value: Whole Plant
  misc_feature: MA Experiment ID: 20001557 Result: Up-regulated in Transcription
  misc_feature: MA Experiment 20001557 PARAMETER Experiment Name: At_Drought_Soil_Dry_P Parameter: Age (day) Value: 27
  misc_feature: MA Experiment 20001557 PARAMETER Experiment Name: At_Drought_Soil_Dry_P Parameter: Organism Value: A. thaliana
  misc_feature: MA Experiment 20001557 PARAMETER Experiment Name: At_Drought_Soil_Dry_P Parameter: Plant Line Value: WS
  misc_feature: MA Experiment 20001557 PARAMETER Experiment Name: At_Drought_Soil_Dry_P Parameter: Post Timepoint (hr) Value: 3
  misc_feature: MA Experiment 20001557 PARAMETER Experiment Name: At_Drought_Soil_Dry_P Parameter: Post-Treatment Value: Re-Water vs. No Drought
  misc_feature: MA Experiment 20001557 PARAMETER Experiment Name: At_Drought_Soil_Dry_P Parameter: Timepoint (day) Value: 13
  misc_feature: MA Experiment 20001557 PARAMETER Experiment Name: At_Drought_Soil_Dry_P Parameter: Treatment Value: Drought vs. No Drought
gctcttttcaaagctcgcctcttcaccacagagaaaacttcgtctctcttctctgcttcgccctctcatttcctgtgagataaaggcggagtctctctccagttattttgctcatccatcgattcttagagttcaaaatggttgatcaagttcagcaccccactattgcgcagaaagctgccgggcagttcatgcgttcaagtgtttccaaggacgttcaagtgggttaccagaggccttctatgtatcaaagacatgcaacctacggaaactactccaatgctgcatttcaatttcctccgacatcccggatgttggcaacaactgcttctcccgtgtttgtccaaaccccaggagagaaggggttcactaactttgcccttgactttctgatgggtggtgtttctgctgccgtctccaagactgctgctgctcctattgaacgtgttaagcttttgatccagaaccaggatgagatgattaaagctggcaggctttctgaaccctacaagggtattggtgactgtttcggcaggacgattaaggatgaaggttttggttctctatggagaggaaacactgccaatgttatccgttatttccccactcaggccttgaactttgccttcaaagattacttcaaaagacttttcaactttaagaaggacagagatggttactggaagtggtttgctggtaacttggcatctggaggagcagctggtgcctcttcccttctgtttgtgtactcccttgactatgcccgtacccgtctagctaatgatgccaaggctgcaaagaaaggaggtggtggaagacagtttgatggtcttgttgatgtctacagaaagacacttaagactgatggtattgctggtctgtaccgtggattcaacatctcatgtgttggtatcattgtctaccgtggtctgtactttggactctatgactctgtgaagcctgttctcctcactggtgacttacaggacagtttcttcgctagtttcgctcttggatgggttattaccaatggtgcgggtcttgcatcctaccccattgacactgtccgcagaagaatgatgatgacgtctggtgaagctgtcaagtacaagagttctttggacgccttcaagcagatcctcaagaatgaaggagccaagtcactcttcaagggagctggtgccaacattctgcgtgctgttgcaggtgctggtgtgctttccggttacgacaaattgcagctgattgtcttcggtaagaagtacggatcaggaggtgcctaagcattgcttcttcctccttttttcgattttaattgcggttttaaggcccgcaataaactgagatgttgatgaaattttttttgcttaagacttagggaggcatgtgccctaaaccaaattttatatcgttctgacgccaactttttttacttatggaataattcatgtttgagagagtttgttagactcttcgattttaaagaattttggatttatgaaataaattcttctttttt

SEQ ID NO: 27757 - protein, 381 aa, Arabidopsis thaliana
  peptide (1)..(381): Ceres Seq. ID no. 12558480
  misc_feature (1)..(381): Homolog of NCBI NO: 100424 NR Description: ADP,ATP carrier protein precursor - potato
  misc_feature (1)..(381): Homolog of NCBI NO: 113457 NR Description: ADP,ATP carrier protein, mitochondrial precursor
  misc_feature (1)..(381): Homolog of NCBI NO: 1890116 NR Description: ADP/ATP translocator [Lycopersicon esculentum]
  misc_feature (6)..(380): Homolog of NCBI NO: 113461 NR Description: ADP,ATP carrier protein, mitochondrial precursor
  misc_feature (2)..(381): Homolog of NCBI NO: 3334115 NR Description: ADP,ATP carrier protein 1, mitochondrial (ADP/ATP translocase 1) (Adenine nucleotide translocator 1) (ANT
  misc_feature (1)..(381): Homolog of NCBI NO: 478810 NR Description: ADP,ATP carrier protein - Arabidopsis thaliana
  misc_feature (1)..(381): Homolog of NCBI NO: 15240640 NR Description: adenosine nucleotide translocator
  misc_feature (1)..(381): Homolog of NCBI NO: 444790 NR Description: nucleotide translocator
  misc_feature (4)..(381): Homolog of NCBI NO: 99658 NR Description: ADP,ATP carrier protein - Arabidopsis thaliana
  misc_feature (1)..(381): Homolog of NCBI NO: 15231937 NR Description: adenylate translocator
  misc_feature (1)..(381): Homolog of NCBI NO: 100424 NR Description: ADP,ATP carrier protein precursor - potato
  misc_feature (1)..(381): Homolog of NCBI NO: 113457 NR Description: ADP,ATP carrier protein, mitochondrial precursor
  misc_feature (1)..(381): Homolog of NCBI NO: 1890116 NR Description: ADP/ATP translocator [Lycopersicon esculentum]
  misc_feature (6)..(380): Homolog of NCBI NO: 113461 NR Description: ADP,ATP carrier protein, mitochondrial precursor
  misc_feature (2)..(381): Homolog of NCBI NO: 3334115 NR Description: ADP,ATP carrier protein 1, mitochondrial (ADP/ATP translocase 1) (Adenine nucleotide translocator 1) (ANT
  misc_feature (1)..(381): Homolog of NCBI NO: 478810 NR Description: ADP,ATP carrier protein - Arabidopsis thaliana
  misc_feature (1)..(381): Homolog of NCBI NO: 15240640 NR Description: adenosine nucleotide translocator
  misc_feature (1)..(381): Homolog of NCBI NO: 444790 NR Description: nucleotide translocator
  misc_feature (4)..(381): Homolog of NCBI NO: 99658 NR Description: ADP,ATP carrier protein - Arabidopsis thaliana
  misc_feature (1)..(381): Homolog of NCBI NO: 15231937 NR Description: adenylate translocator
MVDQVQHPTIAQKAAGQFMRSSVSKDVQVGYQRPSMYQRHATYGNYSNAAFQFPPTSRMLATTASPVFVQTPGEKGFTNFALDFLMGGVSAAVSKTAAAPIERVKLLIQNQDEMIKAGRLSEPYKGIGDCFGRTIKDEGFGSLWRGNTANVIRYFPTQALNFAFKDYFKRLFNFKKDRDGYWKWFAGNLASGGAAGASSLLFVYSLDYARTRLANDAKAAKKGGGGRQFDGLVDVYRKTLKTDGIAGLYRGFNISCVGIIVYRGLYFGLYDSVKPVLLTGDLQDSFFASFALGWVITNGAGLASYPIDTVRRRMMMTSGEAVKYKSSLDAFKQILKNEGAKSLFKGAGANILRAVAGAGVLSGYDKLQLIVFGKKYGSGGA

SEQ ID NO: 27758 - protein, 363 aa, Arabidopsis thaliana
  peptide (1)..(363): Ceres Seq. ID no. 12558481
  misc_feature (1)..(363): Homolog of NCBI NO: 100424 NR Description: ADP,ATP carrier protein precursor - potato
  misc_feature (1)..(363): Homolog of NCBI NO: 113457 NR Description: ADP,ATP carrier protein, mitochondrial precursor
  misc_feature (1)..(363): Homolog of NCBI NO: 1890116 NR Description: ADP/ATP translocator [Lycopersicon esculentum]
  misc_feature (1)..(362): Homolog of NCBI NO: 113461 NR Description: ADP,ATP carrier protein, mitochondrial precursor
  misc_feature (1)..(363): Homolog of NCBI NO: 3334115 NR Description: ADP,ATP carrier protein 1, mitochondrial (ADP/ATP translocase 1) (Adenine nucleotide translocator 1) (ANT
  misc_feature (1)..(363): Homolog of NCBI NO: 478810 NR Description: ADP,ATP carrier protein - Arabidopsis thaliana
  misc_feature (1)..(363): Homolog of NCBI NO: 15240640 NR Description: adenosine nucleotide translocator
  misc_feature (1)..(363): Homolog of NCBI NO: 444790 NR Description: nucleotide translocator
  misc_feature (1)..(363): Homolog of NCBI NO: 99658 NR Description: ADP,ATP carrier protein - Arabidopsis thaliana
  misc_feature (1)..(363): Homolog of NCBI NO: 15231937 NR Description: adenylate translocator
  misc_feature (1)..(363): Homolog of NCBI NO: 100424 NR Description: ADP,ATP carrier protein precursor - potato
  misc_feature (1)..(363): Homolog of NCBI NO: 113457 NR Description: ADP,ATP carrier protein, mitochondrial precursor
  misc_feature (1)..(363): Homolog of NCBI NO: 1890116 NR Description: ADP/ATP translocator [Lycopersicon esculentum]
  misc_feature (1)..(362): Homolog of NCBI NO: 113461 NR Description: ADP,ATP carrier protein, mitochondrial precursor
  misc_feature (1)..(363): Homolog of NCBI NO: 3334115 NR Description: ADP,ATP carrier protein 1, mitochondrial (ADP/ATP translocase 1) (Adenine nucleotide translocator 1) (ANT
  misc_feature (1)..(363): Homolog of NCBI NO: 478810 NR Description: ADP,ATP carrier protein - Arabidopsis thaliana
  misc_feature (1)..(363): Homolog of NCBI NO: 15240640 NR Description: adenosine nucleotide translocator
  misc_feature (1)..(363): Homolog of NCBI NO: 444790 NR Description: nucleotide translocator
  misc_feature (1)..(363): Homolog of NCBI NO: 99658 NR Description: ADP,ATP carrier protein - Arabidopsis thaliana
  misc_feature (1)..(363): Homolog of NCBI NO: 15231937 NR Description: adenylate translocator
MRSSVSKDVQVGYQRPSMYQRHATYGNYSNAAFQFPPTSRMLATTASPVFVQTPGEKGFTNFALDFLMGGVSAAVSKTAAAPIERVKLLIQNQDEMIKAGRLSEPYKGIGDCFGRTIKDEGFGSLWRGNTANVIRYFPTQALNFAFKDYFKRLFNFKKDRDGYWKWFAGNLASGGAAGASSLLFVYSLDYARTRLANDAKAAKKGGGGRQFDGLVDVYRKTLKTDGIAGLYRGFNISCVGIIVYRGLYFGLYDSVKPVLLTGDLQDSFFASFALGWVITNGAGLASYPIDTVRRRMMMTSGEAVKYKSSLDAFKQILKNEGAKSLFKGAGANILRAVAGAGVLSGYDKLQLIVFGKKYGSGGA

SEQ ID NO: 27759 - protein, 346 aa, Arabidopsis thaliana
  peptide (1)..(346): Ceres Seq. ID no. 12558482
  misc_feature (1)..(346): Homolog of NCBI NO: 100424 NR Description: ADP,ATP carrier protein precursor - potato
  misc_feature (1)..(346): Homolog of NCBI NO: 113457 NR Description: ADP,ATP carrier protein, mitochondrial precursor
  misc_feature (1)..(346): Homolog of NCBI NO: 1890116 NR Description: ADP/ATP translocator [Lycopersicon esculentum]
  misc_feature (1)..(345): Homolog of NCBI NO: 113461 NR Description: ADP,ATP carrier protein, mitochondrial precursor
  misc_feature (1)..(346): Homolog of NCBI NO: 3334115 NR Description: ADP,ATP carrier protein 1, mitochondrial (ADP/ATP translocase 1) (Adenine nucleotide translocator 1) (ANT
  misc_feature (1)..(346): Homolog of NCBI NO: 478810 NR Description: ADP,ATP carrier protein - Arabidopsis thaliana
  misc_feature (1)..(346): Homolog of NCBI NO: 15240640 NR Description: adenosine nucleotide translocator
  misc_feature (1)..(346): Homolog of NCBI NO: 444790 NR Description: nucleotide translocator
  misc_feature (1)..(346): Homolog of NCBI NO: 99658 NR Description: ADP,ATP carrier protein - Arabidopsis thaliana
  misc_feature (1)..(346): Homolog of NCBI NO: 15231937 NR Description: adenylate translocator
  misc_feature (1)..(346): Homolog of NCBI NO: 100424 NR Description: ADP,ATP carrier protein precursor - potato
  misc_feature (1)..(346): Homolog of NCBI NO: 113457 NR Description: ADP,ATP carrier protein, mitochondrial precursor
  misc_feature (1)..(346): Homolog of NCBI NO: 1890116 NR Description: ADP/ATP translocator [Lycopersicon esculentum]
  misc_feature (1)..(345): Homolog of NCBI NO: 113461 NR Description: ADP,ATP carrier protein, mitochondrial precursor
  misc_feature (1)..(346): Homolog of NCBI NO: 3334115 NR Description: ADP,ATP carrier protein 1, mitochondrial (ADP/ATP translocase 1) (Adenine nucleotide translocator 1) (ANT
  misc_feature (1)..(346): Homolog of NCBI NO: 478810 NR Description: ADP,ATP carrier protein - Arabidopsis thaliana
  misc_feature (1)..(346): Homolog of NCBI NO: 15240640 NR Description: adenosine nucleotide translocator
  misc_feature (1)..(346): Homolog of NCBI NO: 444790 NR Description: nucleotide translocator
  misc_feature (1)..(346): Homolog of NCBI NO: 99658 NR Description: ADP,ATP carrier protein - Arabidopsis thaliana
  misc_feature (1)..(346): Homolog of NCBI NO: 15231937 NR Description: adenylate translocator
MYQRHATYGNYSNAAFQFPPTSRMLATTASPVFVQTPGEKGFTNFALDFLMGGVSAAVSKTAAAPIERVKLLIQNQDEMIKAGRLSEPYKGIGDCFGRTIKDEGFGSLWRGNTANVIRYFPTQALNFAFKDYFKRLFNFKKDRDGYWKWFAGNLASGGAAGASSLLFVYSLDYARTRLANDAKAAKKGGGGRQFDGLVDVYRKTLKTDGIAGLYRGFNISCVGIIVYRGLYFGLYDSVKPVLLTGDLQDSFFASFALGWVITNGAGLASYPIDTVRRRMMMTSGEAVKYKSSLDAFKQILKNEGAKSLFKGAGANILRAVAGAGVLSGYDKLQLIVFGKKYGSGGA

SEQ ID NO: 27760 - DNA, 1314 bp, Arabidopsis thaliana
  misc_feature (1)..(1314): Ceres Seq. ID no. 12371735
  misc_feature: MA Experiment ID: 108433 Result: Up-regulated in Transcription
  misc_feature: MA Experiment 108433 PARAMETER Experiment Name: At_rhl_Mutant2_cDNA_P Parameter: Age (day) Value: 7
  misc_feature: MA Experiment 108433 PARAMETER Experiment Name: At_rhl_Mutant2_cDNA_P Parameter: Organism Value: A. thaliana
  misc_feature: MA Experiment 108433 PARAMETER Experiment Name: At_rhl_Mutant2_cDNA_P Parameter: Plant Line Value: rhl Mutant vs. wt landsburg
  misc_feature: MA Experiment 108433 PARAMETER Experiment Name: At_rhl_Mutant2_cDNA_P Parameter: Tissue Value: Roots
  misc_feature: MA Experiment ID: 108434 Result: Down-regulated in Transcription
  misc_feature: MA Experiment 108434 PARAMETER Experiment Name: At_Root_Tips_cDNA_P Parameter: Tissue Value: Root Tips
  misc_feature: MA Experiment ID: 108461 Result: Down-regulated in Transcription
  misc_feature: MA Experiment 108461 PARAMETER Experiment Name: At_Germinating_Seeds_cDNA_P Parameter: Age (day) Value: 1 vs. 0
  misc_feature: MA Experiment 108461 PARAMETER Experiment Name: At_Germinating_Seeds_cDNA_P Parameter: Tissue Value: Germinating Seeds
  misc_feature: MA Experiment ID: 108572 Result: Up-regulated in Transcription
  misc_feature: MA Experiment 108572 PARAMETER Experiment Name: At_Drought_cDNA_P Parameter: Timepoint (hr) Value: 1
  misc_feature: MA Experiment 108572 PARAMETER Experiment Name: At_Drought_cDNA_P Parameter: Tissue Value: Aerial
  misc_feature: MA Experiment 108572 PARAMETER Experiment Name: At_Drought_cDNA_P Parameter: Treatment Value: Drought vs. No Drought
  misc_feature: MA Experiment ID: 108573 Result: Up-regulated in Transcription
  misc_feature: MA Experiment 108573 PARAMETER Experiment Name: At_Drought_cDNA_P Parameter: Timepoint (hr) Value: 6
  misc_feature: MA Experiment 108573 PARAMETER Experiment Name: At_Drought_cDNA_P Parameter: Tissue Value: Aerial
  misc_feature: MA Experiment 108573 PARAMETER Experiment Name: At_Drought_cDNA_P Parameter: Treatment Value: Drought vs. No Drought
  misc_feature: MA Experiment ID: 108577 Result: Down-regulated in Transcription
  misc_feature: MA Experiment 108577 PARAMETER Experiment Name: At_42deg_Heat_cDNA_P Parameter: Temperature (deg C) Value: 42 vs. 22
  misc_feature: MA Experiment 108577 PARAMETER Experiment Name: At_42deg_Heat_cDNA_P Parameter: Timepoint (hr) Value: 6
  misc_feature: MA Experiment 108577 PARAMETER Experiment Name: At_42deg_Heat_cDNA_P Parameter: Tissue Value: Aerial
  misc_feature: MA Experiment ID: 108585 Result: Down-regulated in Transcription
  misc_feature: MA Experiment 108585 PARAMETER Experiment Name: At_5mM_NaNP_cDNA_P Parameter: Timepoint (hr) Value: 6
  misc_feature: MA Experiment 108585 PARAMETER Experiment Name: At_5mM_NaNP_cDNA_P Parameter: Tissue Value: Aerial
  misc_feature: MA Experiment 108585 PARAMETER Experiment Name: At_5mM_NaNP_cDNA_P Parameter: Treatment Value: null
  misc_feature: MA Experiment ID: 108594 Result: Down-regulated in Transcription
  misc_feature: MA Experiment 108594 PARAMETER Experiment Name: At_Ler-rhl_Root_cDNA_P Parameter: Plant Line Value: null
  misc_feature: MA Experiment ID: 108595 Result: Down-regulated in Transcription
  misc_feature: MA Experiment 108595 PARAMETER Experiment Name: At_Ler-pi_Ovule_cDNA_P Parameter: Plant Line Value: null
  misc_feature: MA Experiment ID: 108605 Result: Up-regulated in Transcription
  misc_feature: MA Experiment 108605 PARAMETER Experiment Name: At_100uM_ABA_cDNA_P Parameter: Timepoint (hr) Value: 6
  misc_feature: MA Experiment 108605 PARAMETER Experiment Name: At_100uM_ABA_cDNA_P Parameter: Tissue Value: Aerial
  misc_feature: MA Experiment 108605 PARAMETER Experiment Name: At_100uM_ABA_cDNA_P Parameter: Treatment Value: 100uM ABA vs. No Treatment
  misc_feature: MA Experiment ID: 20000069 Result: Up-regulated in Transcription
  misc_feature: MA Experiment 20000069 PARAMETER Experiment Name: At_100uM_ABA_Mutants_cDNA_P Parameter: Plant Line Value: CS23
  misc_feature: MA Experiment 20000069 PARAMETER Experiment Name: At_100uM_ABA_Mutants_cDNA_P Parameter: Timepoint (hr) Value: 6
  misc_feature: MA Experiment 20000069 PARAMETER Experiment Name: At_100uM_ABA_Mutants_cDNA_P Parameter: Tissue Value: Aerial
  misc_feature: MA Experiment 20000069 PARAMETER Experiment Name: At_100uM_ABA_Mutants_cDNA_P Parameter: Treatment Value: 100uM ABA vs. No Treatment
  misc_feature: MA Experiment ID: 20000071 Result: Up-regulated in Transcription
  misc_feature: MA Experiment 20000071 PARAMETER Experiment Name: At_100uM_ABA_Mutants_cDNA_P Parameter: Plant Line Value: CS8104
  misc_feature: MA Experiment 20000071 PARAMETER Experiment Name: At_100uM_ABA_Mutants_cDNA_P Parameter: Timepoint (hr) Value: 6
  misc_feature: MA Experiment 20000071 PARAMETER Experiment Name: At_100uM_ABA_Mutants_cDNA_P Parameter: Tissue Value: Aerial
  misc_feature: MA Experiment 20000071 PARAMETER Experiment Name: At_100uM_ABA_Mutants_cDNA_P Parameter: Treatment Value: 100uM ABA vs. No Treatment
  misc_feature: MA Experiment ID: 20000111 Result: Down-regulated in Transcription
  misc_feature: MA Experiment 20000111 PARAMETER Experiment Name: At_42deg_Heat_cDNA_P Parameter: Temperature (deg C) Value: 42 vs. 22
  misc_feature: MA Experiment 20000111 PARAMETER Experiment Name: At_42deg_Heat_cDNA_P Parameter: Timepoint (hr) Value: 6
  misc_feature: MA Experiment 20000111 PARAMETER Experiment Name: At_42deg_Heat_cDNA_P Parameter: Tissue Value: Aerial
  misc_feature: MA Experiment ID: 20000169 Result: Up-regulated in Transcription
  misc_feature: MA Experiment 20000169 PARAMETER Experiment Name: At_100uM_ABA_P Parameter: Age (day) Value: 14
  misc_feature: MA Experiment 20000169 PARAMETER Experiment Name: At_100uM_ABA_P Parameter: Organism Value: A. thaliana
  misc_feature: MA Experiment 20000169 PARAMETER Experiment Name: At_100uM_ABA_P Parameter: Plant Line Value: WS
  misc_feature: MA Experiment 20000169 PARAMETER Experiment Name: At_100uM_ABA_P Parameter: Timepoint (hr) Value: 6
  misc_feature: MA Experiment 20000169 PARAMETER Experiment Name: At_100uM_ABA_P Parameter: Tissue Value: Aerial
  misc_feature: MA Experiment 20000169 PARAMETER Experiment Name: At_100uM_ABA_P Parameter: Treatment Value: 100uM ABA vs. No Treatment
  misc_feature: MA Experiment ID: 20000173 Result: Down-regulated in Transcription
  misc_feature: MA Experiment 20000173 PARAMETER Experiment Name: At_42deg_Heat_P Parameter: Age (day) Value: 14
  misc_feature: MA Experiment 20000173 PARAMETER Experiment Name: At_42deg_Heat_P Parameter: Organism Value: A. thaliana
  misc_feature: MA Experiment 20000173 PARAMETER Experiment Name: At_42deg_Heat_P Parameter: Plant Line Value: WS
  misc_feature: MA Experiment 20000173 PARAMETER Experiment Name: At_42deg_Heat_P Parameter: Temperature (deg C) Value: 42 vs. 22
  misc_feature: MA Experiment 20000173 PARAMETER Experiment Name: At_42deg_Heat_P Parameter: Timepoint (hr) Value: 6
  misc_feature: MA Experiment 20000173 PARAMETER Experiment Name: At_42deg_Heat_P Parameter: Tissue Value: Aerial
  misc_feature: MA Experiment ID: 20000184 Result: Down-regulated in Transcription
  misc_feature: MA Experiment 20000184 PARAMETER Experiment Name: At_Shoots__P Parameter: Age (day) Value: 7
  misc_feature: MA Experiment 20000184 PARAMETER Experiment Name: At_Shoots__P Parameter: Tissue Value: Shoots vs. Whole Plant
  misc_feature: MA Experiment ID: 20000227 Result: Down-regulated in Transcription
  misc_feature: MA Experiment 20000227 PARAMETER Experiment Name: At_Root-Tips-vs-Tops_P Parameter: Tissue Value: Root Tips vs. Root Tops
  misc_feature: MA Experiment ID: 20000234 Result: Down-regulated in Transcription
  misc_feature: MA Experiment 20000234 PARAMETER Experiment Name: At_Siliques_P Parameter: Age (day) Value: 21
  misc_feature: MA Experiment 20000234 PARAMETER Experiment Name: At_Siliques_P Parameter: Organism Value: A. thaliana
  misc_feature: MA Experiment 20000234 PARAMETER Experiment Name: At_Siliques_P Parameter: Plant Line Value: WS
  misc_feature: MA Experiment 20000234 PARAMETER Experiment Name: At_Siliques_P Parameter: Tissue Value: Less Than 5mm Siliques vs. Whole Plant
  misc_feature: MA Experiment ID: 20000235 Result: Down-regulated in Transcription
  misc_feature: MA Experiment 20000235 PARAMETER Experiment Name: At_Siliques_P Parameter: Age (day) Value: 21
  misc_feature: MA Experiment 20000235 PARAMETER Experiment Name: At_Siliques_P Parameter: Organism Value: A. thaliana
  misc_feature: MA Experiment 20000235 PARAMETER Experiment Name: At_Siliques_P Parameter: Plant Line Value: WS
  misc_feature: MA Experiment 20000235 PARAMETER Experiment Name: At_Siliques_P Parameter: Tissue Value: 5-10mm Siliques vs. Whole Plant
  misc_feature: MA Experiment ID: 20000265 Result: Down-regulated in Transcription
  misc_feature: MA Experiment 20000265 PARAMETER Experiment Name: At_Open_Flower_P Parameter: Age (day) Value: 21
  misc_feature: MA Experiment 20000265 PARAMETER Experiment Name: At_Open_Flower_P Parameter: Plant Line Value: WS
  misc_feature: MA Experiment 20000265 PARAMETER Experiment Name: At_Open_Flower_P Parameter: Tissue Value: Closed Flower vs. Whole Plant
  misc_feature: MA Experiment ID: 20000286 Result: Down-regulated in Transcription
  misc_feature: MA Experiment 20000286 PARAMETER Experiment Name: At_Open_Flower_P Parameter: Age (day) Value: 21
  misc_feature: MA Experiment 20000286 PARAMETER Experiment Name: At_Open_Flower_P Parameter: Plant Line Value: WS
  misc_feature: MA Experiment 20000286 PARAMETER Experiment Name: At_Open_Flower_P Parameter: Tissue Value: Half Open vs. Whole Plant
  misc_feature: MA Experiment ID: 20000436 Result: Up-regulated in Transcription
  misc_feature: MA Experiment 20000436 PARAMETER Experiment Name: At_Drought_P Parameter: Age (day) Value: 7
  misc_feature: MA Experiment 20000436 PARAMETER Experiment Name: At_Drought_P Parameter: Organism Value: A. thaliana
  misc_feature: MA Experiment 20000436 PARAMETER Experiment Name: At_Drought_P Parameter: Plant Line Value: WS
  misc_feature: MA Experiment 20000436 PARAMETER Experiment Name: At_Drought_P Parameter: Timepoint (hr) Value: 12
  misc_feature: MA Experiment 20000436 PARAMETER Experiment Name: At_Drought_P Parameter: Tissue Value: Whole Plant
  misc_feature: MA Experiment 20000436 PARAMETER Experiment Name: At_Drought_P Parameter: Treatment Value: Drought vs. No Drought
  misc_feature: MA Experiment ID: 20000437 Result: Up-regulated in Transcription
  misc_feature: MA Experiment 20000437 PARAMETER Experiment Name: At_Drought_P Parameter: Age (day) Value: 8
  misc_feature: MA Experiment 20000437 PARAMETER Experiment Name: At_Drought_P Parameter: Organism Value: A. thaliana
  misc_feature: MA Experiment 20000437 PARAMETER Experiment Name: At_Drought_P Parameter: Plant Line Value: WS
  misc_feature: MA Experiment 20000437 PARAMETER Experiment Name: At_Drought_P Parameter: Timepoint (hr) Value: 24
  misc_feature: MA Experiment 20000437 PARAMETER Experiment Name: At_Drought_P Parameter: Tissue Value: Whole Plant
  misc_feature: MA Experiment 20000437 PARAMETER Experiment Name: At_Drought_P Parameter: Treatment Value: Drought vs. No Drought
  misc_feature: MA Experiment ID: 20000573 Result: Down-regulated in Transcription
  misc_feature: MA Experiment 20000573 PARAMETER Experiment Name: At_100uM_ABA_Mutants__P Parameter: Organism Value: A. thaliana
  misc_feature: MA Experiment 20000573 PARAMETER Experiment Name: At_100uM_ABA_Mutants__P Parameter: Plant Line Value: CS22 vs. Ler wt
  misc_feature: MA Experiment 20000573 PARAMETER Experiment Name: At_100uM_ABA_Mutants__P Parameter: Timepoint (hr) Value: N/A
  misc_feature: MA Experiment 20000573 PARAMETER Experiment Name: At_100uM_ABA_Mutants__P Parameter: Tissue Value: Whole Plant
  misc_feature: MA Experiment 20000573 PARAMETER Experiment Name: At_100uM_ABA_Mutants__P Parameter: Treatment Value: None
  misc_feature: MA Experiment ID: 20000574 Result: Down-regulated in Transcription
  misc_feature: MA Experiment 20000574 PARAMETER Experiment Name: At_100uM_ABA_Mutants__P Parameter: Organism Value: A. thaliana
  misc_feature: MA Experiment 20000574 PARAMETER Experiment Name: At_100uM_ABA_Mutants__P Parameter: Plant Line Value: CS23 vs. Ler wt
  misc_feature: MA Experiment 20000574 PARAMETER Experiment Name: At_100uM_ABA_Mutants__P Parameter: Timepoint (hr) Value: N/A
  misc_feature: MA Experiment 20000574 PARAMETER Experiment Name: At_100uM_ABA_Mutants__P Parameter: Tissue Value: Whole Plant
  misc_feature: MA Experiment 20000574 PARAMETER Experiment Name: At_100uM_ABA_Mutants__P Parameter: Treatment Value: None
  misc_feature: MA Experiment ID: 20000794 Result: Up-regulated in Transcription
  misc_feature: MA Experiment 20000794 PARAMETER Experiment Name: At_Petals_P Parameter: Age (day) Value: 23-25 days
  misc_feature: MA Experiment 20000794 PARAMETER Experiment Name: At_Petals_P Parameter: Plant Line Value: WS
  misc_feature: MA Experiment 20000794 PARAMETER Experiment Name: At_Petals_P Parameter: Tissue Value: Petals vs. Whole plant
  misc_feature: MA Experiment ID: 20001557 Result: Down-regulated in Transcription
  misc_feature: MA Experiment 20001557 PARAMETER Experiment Name: At_Drought_Soil_Dry_P Parameter: Age (day) Value: 27
  misc_feature: MA Experiment 20001557 PARAMETER Experiment Name: At_Drought_Soil_Dry_P Parameter: Organism Value: A. thaliana
  misc_feature: MA Experiment 20001557 PARAMETER Experiment Name: At_Drought_Soil_Dry_P Parameter: Plant Line Value: WS
  misc_feature: MA Experiment 20001557 PARAMETER Experiment Name: At_Drought_Soil_Dry_P Parameter: Post Timepoint (hr) Value: 3
  misc_feature: MA Experiment 20001557 PARAMETER Experiment Name: At_Drought_Soil_Dry_P Parameter: Post-Treatment Value: Re-Water vs. No Drought
  misc_feature: MA Experiment 20001557 PARAMETER Experiment Name: At_Drought_Soil_Dry_P Parameter: Timepoint (day) Value: 13
  misc_feature: MA Experiment 20001557 PARAMETER Experiment Name: At_Drought_Soil_Dry_P Parameter: Treatment Value: Drought vs. No Drought
  misc_feature: MA Experiment ID: 20001558 Result: Down-regulated in Transcription
  misc_feature: MA Experiment 20001558 PARAMETER Experiment Name: At_Drought_Soil_Dry_P Parameter: Age (day) Value: 27
  misc_feature: MA Experiment 20001558 PARAMETER Experiment Name: At_Drought_Soil_Dry_P Parameter: Organism Value: A. thaliana
  misc_feature: MA Experiment 20001558 PARAMETER Experiment Name: At_Drought_Soil_Dry_P Parameter: Plant Line Value: WS
  misc_feature: MA Experiment 20001558 PARAMETER Experiment Name: At_Drought_Soil_Dry_P Parameter: Post Timepoint (hr) Value: 6
  misc_feature: MA Experiment 20001558 PARAMETER Experiment Name: At_Drought_Soil_Dry_P Parameter: Post-Treatment Value: Re-Water vs. No Drought
  misc_feature: MA Experiment 20001558 PARAMETER Experiment Name: At_Drought_Soil_Dry_P Parameter: Timepoint (day) Value: 13
  misc_feature: MA Experiment 20001558 PARAMETER Experiment Name: At_Drought_Soil_Dry_P Parameter: Treatment Value: Drought vs. No Drought
  misc_feature: MA Experiment ID: 20001560 Result: Down-regulated in Transcription
  misc_feature: MA Experiment 20001560 PARAMETER Experiment Name: At_Drought_Soil_Dry_P Parameter: Age (day) Value: 28
  misc_feature: MA Experiment 20001560 PARAMETER Experiment Name: At_Drought_Soil_Dry_P Parameter: Organism Value: A. thaliana
  misc_feature: MA Experiment 20001560 PARAMETER Experiment Name: At_Drought_Soil_Dry_P Parameter: Plant Line Value: WS
  misc_feature: MA Experiment 20001560 PARAMETER Experiment Name: At_Drought_Soil_Dry_P Parameter: Post Timepoint (hr) Value: None
  misc_feature: MA Experiment 20001560 PARAMETER Experiment Name: At_Drought_Soil_Dry_P Parameter: Post-Treatment Value: None
  misc_feature: MA Experiment 20001560 PARAMETER Experiment Name: At_Drought_Soil_Dry_P Parameter: Timepoint (day) Value: 14
  misc_feature: MA Experiment 20001560 PARAMETER Experiment Name: At_Drought_Soil_Dry_P Parameter: Treatment Value: Drought vs. No Drought
  misc_feature: MA Experiment ID: 20001911 Result: Up-regulated in Transcription
  misc_feature: MA Experiment 20001911 PARAMETER Experiment Name: At_Drought_Reproduction_P Parameter: Age (day) Value: 40
  misc_feature: MA Experiment 20001911 PARAMETER Experiment Name: At_Drought_Reproduction_P Parameter: Organism Value: A. thaliana
  misc_feature: MA Experiment 20001911 PARAMETER Experiment Name: At_Drought_Reproduction_P Parameter: Plant Line Value: WS
  misc_feature: MA Experiment 20001911 PARAMETER Experiment Name: At_Drought_Reproduction_P Parameter: Timepoint (day) Value: 10
  misc_feature: MA Experiment 20001911 PARAMETER Experiment Name: At_Drought_Reproduction_P Parameter: Tissue Value: Flowers
  misc_feature: MA Experiment 20001911 PARAMETER Experiment Name: At_Drought_Reproduction_P Parameter: Treatment Value: Drought vs. No Drought
ctacttcttcccaagtttgatcactcagcgaaacaaagcaaactaagtaacaaagttaaaaaaacaaagaatttgattgtttttttttcttatagatggcggtaggaatctttggattgatcccaagctcatcaccagacgagctaaggaagattcttcaagcgctttcgacgaaatggggagacgtagttgaggattttgagagtcttgaagtgaagccaatgaaaggagcgatgactaacgaagtgttcatggttagttggcctagaaaagaaacgaatcttcaatgtaggaatcttcttgttcgtgtttatggtgaaggtgttgagcttttcttcaatagagacgatgagattcgtacttttgagtatgttgctcgtcatggtcacggtcctacacttcttggtcgcttcgccggcggtagagtcgaagagtttatccatgcccggacactatcggcaaccgatcttcgtgatccgaacatatcagctcttgttgcatctaagctaagaagatttcacagcatacacattcctggagatagaattatgctcatctgggacaggatgaggacttgggtaggacaagccaagaatctatgttcaaatgaacattcaacagagtttggtctagacgacattgaagatgaaatcaacctgctggaacaagaagtgaacaatgaacaagagattggcttctgtcacaatgacttgcagtatggtaacatcatgattgatgaagaaaccaatacaattactatcattgattatgagtatgcaagttataatccgatcgcttacgacatagcaaatcatttctgtgaaatggcggcagattatcattcaaacactcctcatatcttggactacactctatatccaggggaagaagaaaggaggagattcatatgtaactacttaacctcttcaggtgaagaagcaagagaagaagacatagaacaacttttggatgatattgagaagtatacattggcaagccatctcttctggggtttatggggaatcatatctggttatgtgaacaagattgagtttgattatatcgagtattcgaggcagagattcaaacagtattggcttcgcaagccaaagcttttatctttcttcccatcctaataagtaaattctctgtttacttatgtttactctttgcgaataacgcggtaaaaacccgatgatggatccatgatatagctatgccaaagctaaaactatgtgtaattcttctgttctgaacttctgatactatgtaataagtaaaagatataaatattccatactataatatttccac

SEQ ID NO: 27761 - protein, 346 aa, Arabidopsis thaliana
  peptide (1)..(346): Ceres Seq. ID no. 12371736
  misc_feature (64)..(335): Pfam Name: Choline/ethanolamine kinase Pfam Description: Choline/ethanolamine kinase
  misc_feature (8)..(341): Homolog of NCBI NO: 12323732 NR Description: putative choline kinase; 4535-2895 [Arabidopsis
  misc_feature (14)..(342): Homolog of NCBI NO: 25348157 NR Description: protein choline kinase F1O17.1 [imported] -
  misc_feature (14)..(342): Homolog of NCBI NO: 22330627 NR Description: putative choline kinase
  misc_feature (1)..(341): Homolog of NCBI NO: 7488652 NR Description: choline kinase (EC 2.7.1.32) CK1 - soybean
  misc_feature (1)..(341): Homolog of NCBI NO: 12311795 NR Description: choline kinase [Pisum sativum]
  misc_feature (1)..(341): Homolog of NCBI NO: 7488653 NR Description: choline kinase (EC 2.7.1.32) CK2 - soybean
  misc_feature (8)..(341): Homolog of NCBI NO: 15217543 NR Description: choline kinase, putative; protein id: At1g71697.1
  misc_feature (1)..(346): Homolog of NCBI NO: 21537276 NR Description: choline kinase GmCK2p-like protein [Arabidopsis
  misc_feature (1)..(346): Homolog of NCBI NO: 15234032 NR Description: choline kinase GmCK2p -like protein
  misc_feature (1)..(346): Homolog of NCBI NO: 21594823 NR Description: choline kinase GmCK2p-like protein [Arabidopsis
MAVGIFGLIPSSSPDELRKILQALSTKWGDVVEDFESLEVKPMKGAMTNEVFMVSWPRKETNLQCRNLLVRVYGEGVELFFNRDDEIRTFEYVARHGHGPTLLGRFAGGRVEEFIHARTLSATDLRDPNISALVASKLRRFHSIHIPGDRIMLIWDRMRTWVGQAKNLCSNEHSTEFGLDDIEDEINLLEQEVNNEQEIGFCHNDLQYGNIMIDEETNTITIIDYEYASYNPIAYDIANHFCEMAADYHSNTPHILDYTLYPGEEERRRFICNYLTSSGEEAREEDIEQLLDDIEKYTLASHLFWGLWGIISGYVNKIEFDYIEYSRQRFKQYWLRKPKLLSFFPS

SEQ ID NO: 27762 - protein, 304 aa, Arabidopsis thaliana
  peptide (1)..(304): Ceres Seq. ID no. 12371737
  misc_feature (22)..(293): Pfam Name: Choline/ethanolamine kinase Pfam Description: Choline/ethanolamine kinase
  misc_feature (1)..(299): Homolog of NCBI NO: 12323732 NR Description: putative choline kinase; 4535-2895 [Arabidopsis
  misc_feature (1)..(300): Homolog of NCBI NO: 25348157 NR Description: protein choline kinase F1O17.1 [imported] -
  misc_feature (1)..(300): Homolog of NCBI NO: 22330627 NR Description: putative choline kinase
  misc_feature (1)..(299): Homolog of NCBI NO: 7488652 NR Description: choline kinase (EC 2.7.1.32) CK1 - soybean
  misc_feature (1)..(299): Homolog of NCBI NO: 12311795 NR Description: choline kinase [Pisum sativum]
  misc_feature (1)..(299): Homolog of NCBI NO: 7488653 NR Description: choline kinase (EC 2.7.1.32) CK2 - soybean
  misc_feature (1)..(299): Homolog of NCBI NO: 15217543 NR Description: choline kinase, putative; protein id: At1g71697.1
  misc_feature (1)..(304): Homolog of NCBI NO: 21537276 NR Description: choline kinase GmCK2p-like protein [Arabidopsis
  misc_feature (1)..(304): Homolog of NCBI NO: 15234032 NR Description: choline kinase GmCK2p -like protein
  misc_feature (1)..(304): Homolog of NCBI NO: 21594823 NR Description: choline kinase GmCK2p-like protein [Arabidopsis
MKGAMTNEVFMVSWPRKETNLQCRNLLVRVYGEGVELFFNRDDEIRTFEYVARHGHGPTLLGRFAGGRVEEFIHARTLSATDLRDPNISALVASKLRRFHSIHIPGDRIMLIWDRMRTWVGQAKNLCSNEHSTEFGLDDIEDEINLLEQEVNNEQEIGFCHNDLQYGNIMIDEETNTITIIDYEYASYNPIAYDIANHFCEMAADYHSNTPHILDYTLYPGEEERRRFICNYLTSSGEEAREEDIEQLLDDIEKYTLASHLFWGLWGIISGYVNKIEFDYIEYSRQRFKQYWLRKPKLLSFFPS

SEQ ID NO: 27763 - protein, 300 aa, Arabidopsis thaliana
  peptide (1)..(300): Ceres Seq. ID no. 12371738
  misc_feature (18)..(289): Pfam Name: Choline/ethanolamine kinase Pfam Description: Choline/ethanolamine kinase
  misc_feature (1)..(295): Homolog of NCBI NO: 12323732 NR Description: putative choline kinase; 4535-2895 [Arabidopsis
  misc_feature (1)..(296): Homolog of NCBI NO: 25348157 NR Description: protein choline kinase F1O17.1 [imported] -
  misc_feature (1)..(296): Homolog of NCBI NO: 22330627 NR Description: putative choline kinase
  misc_feature (1)..(295): Homolog of NCBI NO: 7488652 NR Description: choline kinase (EC 2.7.1.32) CK1 - soybean
  misc_feature (1)..(295): Homolog of NCBI NO: 12311795 NR Description: choline kinase [Pisum sativum]
  misc_feature (1)..(295): Homolog of NCBI NO: 7488653 NR Description: choline kinase (EC 2.7.1.32) CK2 - soybean
  misc_feature (1)..(295): Homolog of NCBI NO: 15217543 NR Description: choline kinase, putative; protein id: At1g71697.1
  misc_feature (1)..(300): Homolog of NCBI NO: 21537276 NR Description: choline kinase GmCK2p-like protein [Arabidopsis
  misc_feature (1)..(300): Homolog of NCBI NO: 15234032 NR Description: choline kinase GmCK2p -like protein
  misc_feature (1)..(300): Homolog of NCBI NO: 21594823 NR Description: choline kinase GmCK2p-like protein [Arabidopsis
MTNEVFMVSWPRKETNLQCRNLLVRVYGEGVELFFNRDDEIRTFEYVARHGHGPTLLGRFAGGRVEEFIHARTLSATDLRDPNISALVASKLRRFHSIHIPGDRIMLIWDRMRTWVGQAKNLCSNEHSTEFGLDDIEDEINLLEQEVNNEQEIGFCHNDLQYGNIMIDEETNTITIIDYEYASYNPIAYDIANHFCEMAADYHSNTPHILDYTLYPGEEERRRFICNYLTSSGEEAREEDIEQLLDDIEKYTLASHLFWGLWGIISGYVNKIEFDYIEYSRQRFKQYWLRKPKLLSFFPS

SEQ ID NO: 27764 - DNA, 1014 bp, Arabidopsis thaliana
  misc_feature (1)..(1014): Ceres Seq. ID no. 13489272
  misc_feature: MA Experiment ID: 108577 Result: Down-regulated in Transcription
  misc_feature: MA Experiment 108577 PARAMETER Experiment Name: At_42deg_Heat_cDNA_P Parameter: Temperature (deg C) Value: 42 vs. 22
  misc_feature: MA Experiment 108577 PARAMETER Experiment Name: At_42deg_Heat_cDNA_P Parameter: Timepoint (hr) Value: 6
  misc_feature: MA Experiment 108577 PARAMETER Experiment Name: At_42deg_Heat_cDNA_P Parameter: Tissue Value: Aerial
  misc_feature: MA Experiment ID: 20000111 Result: Down-regulated in Transcription
  misc_feature: MA Experiment 20000111 PARAMETER Experiment Name: At_42deg_Heat_cDNA_P Parameter: Temperature (deg C) Value: 42 vs. 22
  misc_feature: MA Experiment 20000111 PARAMETER Experiment Name: At_42deg_Heat_cDNA_P Parameter: Timepoint (hr) Value: 6
  misc_feature: MA Experiment 20000111 PARAMETER Experiment Name: At_42deg_Heat_cDNA_P Parameter: Tissue Value: Aerial
  misc_feature: MA Experiment ID: 20000113 Result: Down-regulated in Transcription
  misc_feature: MA Experiment 20000113 PARAMETER Experiment Name: At_42deg_Heat_cDNA_P Parameter: Temperature (deg C) Value: 42 vs. 22
  misc_feature: MA Experiment 20000113 PARAMETER Experiment Name: At_42deg_Heat_cDNA_P Parameter: Timepoint (hr) Value: 8
  misc_feature: MA Experiment 20000113 PARAMETER Experiment Name: At_42deg_Heat_cDNA_P Parameter: Tissue Value: Aerial
  misc_feature: MA Experiment ID: 20000173 Result: Down-regulated in Transcription
  misc_feature: MA Experiment 20000173 PARAMETER Experiment Name: At_42deg_Heat_P Parameter: Age (day) Value: 14
  misc_feature: MA Experiment 20000173 PARAMETER Experiment Name: At_42deg_Heat_P Parameter: Organism Value: A. thaliana
  misc_feature: MA Experiment 20000173 PARAMETER Experiment Name: At_42deg_Heat_P Parameter: Plant Line Value: WS
  misc_feature: MA Experiment 20000173 PARAMETER Experiment Name: At_42deg_Heat_P Parameter: Temperature (deg C) Value: 42 vs. 22
  misc_feature: MA Experiment 20000173 PARAMETER Experiment Name: At_42deg_Heat_P Parameter: Timepoint (hr) Value: 6
  misc_feature: MA Experiment 20000173 PARAMETER Experiment Name: At_42deg_Heat_P Parameter: Tissue Value: Aerial
  misc_feature: MA Experiment ID: 20000224 Result: Down-regulated in Transcription
aactaattaaagtttttggtttggtaagagttgcgaaacgataaccaataataaatgggagacatcattatctctttttctaaatctctccaatggcgtctcttcgtagcctttcgatttggttcttcttcttcttcgtcttcgtcttcttaatcaatccctccatttctattcgaacttccttcatcaagcttcccggaagcgacggatctcgctactgcgacagctggagattagccgccgagaccaataacgtcggaacttgggatctgattccgtcaatctgcgtggattccgtcgccgagtatcttaacggagaccagtttttatccgattacagtgtcatcgtcgattatgctctcgcgtttgcgaaatcggttgaaatttccggcgacggcaaggacgtgtggatcttcgatatcgacgagacgcttctcacgaatattgactactacaaggctcatggttacgggtctgaaccgtatgacgataataaatttagtgagtgggtggaacaaggaacagctccagcttttgatgcgagcttgagactgtacaatgctctcaagaaacttggtttcactatcattttgctaaccggtcgggacgagcatcaaaggacttccaccgagacaaatctccgggatgccggttattccggttgggaacgtctcctcttgagaggtccaaatgatcaagggaagtcagctacaaattacaaatccgagcagcgatcgaaactgattgaggaaggtttcaaaatccgtggcaatagcggtgatcaatggagtgacttgcaaggttttgccgtggctgatcgttctttcaaagtcccaaatcccatgtactacattccttgatcactattcatttctgattttatgtattgagtaacaaccacttatgtgttttagacgttaatattacctttgctcctatattacattgatctttagtataaacattaactaatactttcatataaagtataattataattgctttgtatcttcc

SEQ ID NO: 27765 - protein, 255 aa, Arabidopsis thaliana
  peptide (1)..(255): Ceres Seq. ID no. 13489273
  misc_feature (27)..(255): Pfam Name: HAD superfamily, subfamily IIIB (Acid phosphatase) Pfam Description: HAD superfamily, subfamily IIIB (Acid
  misc_feature (16)..(255): Homolog of NCBI NO: 15224907 NR Description: acid phosphatase -related [Arabidopsis thaliana]
  misc_feature (43)..(254): Homolog of NCBI NO: 445113 NR Description: acid phosphatase 1
  misc_feature (43)..(254): Homolog of NCBI NO: 130718 NR Description: Acid phosphatase precursor 1
  misc_feature (23)..(255): Homolog of NCBI NO: 15241412 NR Description: acid phosphatase [Arabidopsis thaliana]
  misc_feature (42)..(255): Homolog of NCBI NO: 15234949 NR Description: acid phosphatase - like protein [Arabidopsis
  misc_feature (1)..(254): Homolog of NCBI NO: 15233526 NR Description: acid phosphatase-related protein [Arabidopsis
  misc_feature (1)..(255): Homolog of NCBI NO: 15233504 NR Description: acid phosphatase-related protein [Arabidopsis
MASLRSLSIWFFFFFVFVFLINPSISIRTSFIKLPGSDGSRYCDSWRLAAETNNVGTWDLIPSICVDSVAEYLNGDQFLSDYSVIVDYALAFAKSVEISGDGKDVWIFDIDETLLTNIDYYKAHGYGSEPYDDNKFSEWVEQGTAPAFDASLRLYNALKKLGFTIILLTGRDEHQRTSTETNLRDAGYSGWERLLLRGPNDQGKSATNYKSEQRSKLIEEGFKIRGNSGDQWSDLQGFAVADRSFKVPNPMYYIP

SEQ ID NO: 27766 - DNA, 1610 bp, Arabidopsis thaliana
  misc_feature (1)..(1610): Ceres Seq. ID no. 12325174
  misc_feature: MA Experiment ID: 108434 Result: Up-regulated in Transcription
  misc_feature: MA Experiment 108434 PARAMETER Experiment Name: At_Root_Tips_cDNA_P Parameter: Tissue Value: Root Tips
  misc_feature: MA Experiment ID: 108461 Result: Down-regulated in Transcription
  misc_feature: MA Experiment 108461 PARAMETER Experiment Name: At_Germinating_Seeds_cDNA_P Parameter: Age (day) Value: 1 vs. 0
  misc_feature: MA Experiment 108461 PARAMETER Experiment Name: At_Germinating_Seeds_cDNA_P Parameter: Tissue Value: Germinating Seeds
  misc_feature: MA Experiment ID: 108462 Result: Down-regulated in Transcription
  misc_feature: MA Experiment 108462 PARAMETER Experiment Name: At_Germinating_Seeds_cDNA_P Parameter: Age (day) Value: 2 vs. 0
  misc_feature: MA Experiment 108462 PARAMETER Experiment Name: At_Germinating_Seeds_cDNA_P Parameter: Tissue Value: Germinating Seeds
  misc_feature: MA Experiment ID: 108463 Result: Down-regulated in Transcription
  misc_feature: MA Experiment 108463 PARAMETER Experiment Name: At_Germinating_Seeds_cDNA_P Parameter: Age (day) Value: 3 vs. 0
  misc_feature: MA Experiment 108463 PARAMETER Experiment Name: At_Germinating_Seeds_cDNA_P Parameter: Tissue Value: Germinating Seeds
  misc_feature: MA Experiment ID: 108585 Result: Up-regulated in Transcription
  misc_feature: MA Experiment 108585 PARAMETER Experiment Name: At_5mM_NaNP_cDNA_P Parameter: Timepoint (hr) Value: 6
  misc_feature: MA Experiment 108585 PARAMETER Experiment Name: At_5mM_NaNP_cDNA_P Parameter: Tissue Value: Aerial
  misc_feature: MA Experiment 108585 PARAMETER Experiment Name: At_5mM_NaNP_cDNA_P Parameter: Treatment Value: null
  misc_feature: MA Experiment ID: 108595 Result: Up-regulated in Transcription
  misc_feature: MA Experiment 108595 PARAMETER Experiment Name: At_Ler-pi_Ovule_cDNA_P Parameter: Plant Line Value: null
  misc_feature: MA Experiment ID: 20000180 Result: Down-regulated in Transcription
  misc_feature: MA Experiment 20000180 PARAMETER Experiment Name: At_Germinating_Seeds_P Parameter: Age (hr) Value: 24 vs. 0
  misc_feature: MA Experiment 20000180 PARAMETER Experiment Name: At_Germinating_Seeds_P Parameter: Tissue Value: Germinating Seeds
  misc_feature: MA Experiment ID: 20000184 Result: Up-regulated in Transcription
  misc_feature: MA Experiment 20000184 PARAMETER Experiment Name: At_Shoots__P Parameter: Age (day) Value: 7
  misc_feature: MA Experiment 20000184 PARAMETER Experiment Name: At_Shoots__P Parameter: Tissue Value: Shoots vs. Whole Plant
  misc_feature: MA Experiment ID: 20000234 Result: Up-regulated in Transcription
  misc_feature: MA Experiment 20000234 PARAMETER Experiment Name: At_Siliques_P Parameter: Age (day) Value: 21
  misc_feature: MA Experiment 20000234 PARAMETER Experiment Name: At_Siliques_P Parameter: Organism Value: A. thaliana
  misc_feature: MA Experiment 20000234 PARAMETER Experiment Name: At_Siliques_P Parameter: Plant Line Value: WS
  misc_feature: MA Experiment 20000234 PARAMETER Experiment Name: At_Siliques_P Parameter: Tissue Value: Less Than 5mm Siliques vs. Whole Plant
  misc_feature: MA Experiment ID: 20000264 Result: Up-regulated in Transcription
  misc_feature: MA Experiment 20000264 PARAMETER Experiment Name: At_Open_Flower_P Parameter: Age (day) Value: 21
  misc_feature: MA Experiment 20000264 PARAMETER Experiment Name: At_Open_Flower_P Parameter: Plant Line Value: WS
  misc_feature: MA Experiment 20000264 PARAMETER Experiment Name: At_Open_Flower_P Parameter: Tissue Value: Open Flower vs. Whole Plant
  misc_feature: MA Experiment ID: 20000265 Result: Up-regulated in Transcription
  misc_feature: MA Experiment 20000265 PARAMETER Experiment Name: At_Open_Flower_P Parameter: Age (day) Value: 21
  misc_feature: MA Experiment 20000265 PARAMETER Experiment Name: At_Open_Flower_P Parameter: Plant Line Value: WS
  misc_feature: MA Experiment 20000265 PARAMETER Experiment Name: At_Open_Flower_P Parameter: Tissue Value: Closed Flower vs. Whole Plant
  misc_feature: MA Experiment ID: 20000286 Result: Up-regulated in Transcription
  misc_feature: MA Experiment 20000286 PARAMETER Experiment Name: At_Open_Flower_P Parameter: Age (day) Value: 21
  misc_feature: MA Experiment 20000286 PARAMETER Experiment Name: At_Open_Flower_P Parameter: Plant Line Value: WS
  misc_feature: MA Experiment 20000286 PARAMETER Experiment Name: At_Open_Flower_P Parameter: Tissue Value: Half Open vs. Whole Plant
  misc_feature: MA Experiment ID: 20001557 Result: Up-regulated in Transcription
  misc_feature: MA Experiment 20001557 PARAMETER Experiment Name: At_Drought_Soil_Dry_P Parameter: Age (day) Value: 27
  misc_feature: MA Experiment 20001557 PARAMETER Experiment Name: At_Drought_Soil_Dry_P Parameter: Organism Value: A. thaliana
  misc_feature: MA Experiment 20001557 PARAMETER Experiment Name: At_Drought_Soil_Dry_P Parameter: Plant Line Value: WS
  misc_feature: MA Experiment 20001557 PARAMETER Experiment Name: At_Drought_Soil_Dry_P Parameter: Post Timepoint (hr) Value: 3
  misc_feature: MA Experiment 20001557 PARAMETER Experiment Name: At_Drought_Soil_Dry_P Parameter: Post-Treatment Value: Re-Water vs. No Drought
  misc_feature: MA Experiment 20001557 PARAMETER Experiment Name: At_Drought_Soil_Dry_P Parameter: Timepoint (day) Value: 13
  misc_feature: MA Experiment 20001557 PARAMETER Experiment Name: At_Drought_Soil_Dry_P Parameter: Treatment Value: Drought vs. No Drought
gaaaaaaaaagtcacagtctgtctgtctctctcctctaatcttttttatccgctagggttttgaagcaaggtttctcgcgattttctcgatatctctcgcccatggcgaaaccaagtcgtggccgtcgttccccctccgtgtctggctcgtcatctcgttccagttccagatctcgttcgggttcgagcccctccaggtctatttcccgctcacgctcccgttctagatcgctctcttcatcttcatctccttcgcgaagcgtcagttctgggagtcgcagtcctccacgtcgtggaaaaagtcctgctggacctgctaggcgaggtcgctctcctcctcctccaccatctaaaggagcatcttcaccttccaagaaagctgttcaagaatctcttgttctccatgttgattctcttagcaggaatgtgaatgaagcccatctcaaagaaatctttggcaactttggtgaagttatacatgtcgaaattgcgatggatcgagctgttaatcttccaagaggacatggttatgttgagttcaaggcaagagctgatgctgagaaagctcagctctacatggatggtgcccaaattgatggaaaggttgttaaagcaacgttcacactaccacctcgtcagaaagtatcttcaccccctaaacctgtctcagctgcaccaaaaagagatgctccaaaatctgataatgctgctgctgacgctgagaaagatggtggtcccaggcgcccaagagagacatctcctcaacggaaaacagggctttctccgagaaggcgatcacctctacctaggagaggcttatcacctagaaggcgatcacctgattctccccatcgccggaggccgggctctcctatccgccgtcgcggtgatacacctcctagacgtaggccagcatcaccatctagaggccgttctccatcttctccccctccaagacgatatagatctcctccaaggggctcccctagaagaattcgtggcagtcctgttcgaagaaggtctcctcttcctctaagacgaaggtctccacctccaaggagactacgcagtcctcccagaagatctccaatccgtaggcgtagccgatccccaattcgtaggcctggtcgctctcgttcaagttccatctcaccccgcaagggacgaggtccagctgggagacgtgggaggtcatcttcttactctagttcaccaagtcccagaaggattcctaggaagatttcaaggagccgcagtcctaagaggccactgagaggaaaaagaagcagcagtaacagcagcagcagcagttcaccgccaccaccacctccacctcgtaaaacttaaaggtgataaaaatgttataaaaagaaaagaaaagaaaacttgagtcttgatgtagctctctttctccacatctttatcgttatcatctgtctcagcctcttttcttagaacagataaaatgttaaccagtgaccaaatgagggttgtggtttttgtagtgtttggatgtttaatcttcttttgtggatctcctcattagatgcaacgataatgacttggttcttttagctggttgtaattccctaatatattcagtcttgttg

SEQ ID NO: 27767 - protein, 414 aa, Arabidopsis thaliana
  peptide (1)..(414): Ceres Seq. ID no. 12325175
  misc_feature (100)..(171): Pfam Name: RNA recognition motif. (a.k.a. RRM, RBD, or RNP domain) Pfam Description: RNA recognition motif. (a.k.a. RRM, RBD, or RNP
  misc_feature (178)..(411): Homolog of NCBI NO: 23274133 NR Description: Similar to serine/arginine repetitive matrix 1
  misc_feature (9)..(256): Homolog of NCBI NO: 3253165 NR Description: SR protein [Homo sapiens]
  misc_feature (191)..(414): Homolog of NCBI NO: 34905768 NR Description: P0401G10.10 [Oryza sativa (japonica
  misc_feature (1)..(78): Homolog of NCBI NO: 30684163 NR Description: proline-rich protein -related [Arabidopsis
  misc_feature (1)..(78): Homolog of NCBI NO: 9843651 NR Description: SRM102 [Arabidopsis thaliana]
  misc_feature (212)..(413): Homolog of NCBI NO: 30684163 NR Description: proline-rich protein -related [Arabidopsis
  misc_feature (212)..(413): Homolog of NCBI NO: 9843651 NR Description: SRM102 [Arabidopsis thaliana]
  misc_feature (119)..(379): Homolog of NCBI NO: 34905768 NR Description: P0401G10.10 [Oryza sativa (japonica
  misc_feature (1)..(414): Homolog of NCBI NO: 15027957 NR Description: putative arginine/serine-rich protein
  misc_feature (1)..(414): Homolog of NCBI NO: 15219287 NR Description: arginine/serine-rich protein, putative
MAKPSRGRRSPSVSGSSSRSSSRSRSGSSPSRSISRSRSRSRSLSSSSSPSRSVSSGSRSPPRRGKSPAGPARRGRSPPPPPSKGASSPSKKAVQESLVLHVDSLSRNVNEAHLKEIFGNFGEVIHVEIAMDRAVNLPRGHGYVEFKARADAEKAQLYMDGAQIDGKVVKATFTLPPRQKVSSPPKPVSAAPKRDAPKSDNAAADAEKDGGPRRPRETSPQRKTGLSPRRRSPLPRRGLSPRRRSPDSPHRRRPGSPIRRRGDTPPRRRPASPSRGRSPSSPPPRRYRSPPRGSPRRIRGSPVRRRSPLPLRRRSPPPRRLRSPPRRSPIRRRSRSPIRRPGRSRSSSISPRKGRGPAGRRGRSSSYSSSPSPRRIPRKISRSRSPKRPLRGKRSSSNSSSSSSPPPPPPPRKT

SEQ ID NO: 27768 - protein, 284 aa, Arabidopsis thaliana
  peptide (1)..(284): Ceres Seq. ID no. 12325176
  misc_feature (85)..(283): Pfam Name: Extensin-like region Pfam Description: Extensin-like region
  misc_feature (1)..(114): Homolog of NCBI NO: 18032270 NR Description: splicing-related factor RNPS1 [Homo sapiens]
  misc_feature (1)..(114): Homolog of NCBI NO: 6857826 NR Description: RNA-binding protein S1, serine-rich domain; SR
  misc_feature (48)..(281): Homolog of NCBI NO: 23274133 NR Description: Similar to serine/arginine repetitive matrix 1
  misc_feature (1)..(126): Homolog of NCBI NO: 3253165 NR Description: SR protein [Homo sapiens]
  misc_feature (61)..(284): Homolog of NCBI NO: 34905768 NR Description: P0401G10.10 [Oryza sativa (japonica
  misc_feature (82)..(283): Homolog of NCBI NO: 30684163 NR Description: proline-rich protein -related [Arabidopsis
  misc_feature (82)..(283): Homolog of NCBI NO: 9843651 NR Description: SRM102 [Arabidopsis thaliana]
  misc_feature (1)..(249): Homolog of NCBI NO: 34905768 NR Description: P0401G10.10 [Oryza sativa (japonica
  misc_feature (1)..(284): Homolog of NCBI NO: 15027957 NR Description: putative arginine/serine-rich protein
  misc_feature (1)..(284): Homolog of NCBI NO: 15219287 NR Description: arginine/serine-rich protein, putative
MDRAVNLPRGHGYVEFKARADAEKAQLYMDGAQIDGKVVKATFTLPPRQKVSSPPKPVSAAPKRDAPKSDNAAADAEKDGGPRRPRETSPQRKTGLSPRRRSPLPRRGLSPRRRSPDSPHRRRPGSPIRRRGDTPPRRRPASPSRGRSPSSPPPRRYRSPPRGSPRRIRGSPVRRRSPLPLRRRSPPPRRLRSPPRRSPIRRRSRSPIRRPGRSRSSSISPRKGRGPAGRRGRSSSYSSSPSPRRIPRKISRSRSPKRPLRGKRSSSNSSSSSSPPPPPPPRKT

SEQ ID NO: 27769 - protein, 256 aa, Arabidopsis thaliana
  peptide (1)..(256): Ceres Seq. ID no. 12325177
  misc_feature (57)..(255): Pfam Name: Extensin-like region Pfam Description: Extensin-like region
  misc_feature (1)..(86): Homolog of NCBI NO: 18032270 NR Description: splicing-related factor RNPS1 [Homo sapiens]
  misc_feature (1)..(86): Homolog of NCBI NO: 6857826 NR Description: RNA-binding protein S1, serine-rich domain; SR
  misc_feature (20)..(253): Homolog of NCBI NO: 23274133 NR Description: Similar to serine/arginine repetitive matrix 1
  misc_feature (1)..(98): Homolog of NCBI NO: 3253165 NR Description: SR protein [Homo sapiens]
  misc_feature (33)..(256): Homolog of NCBI NO: 34905768 NR Description: P0401G10.10 [Oryza sativa (japonica
  misc_feature (54)..(255): Homolog of NCBI NO: 30684163 NR Description: proline-rich protein -related [Arabidopsis
  misc_feature (54)..(255): Homolog of NCBI NO: 9843651 NR Description: SRM102 [Arabidopsis thaliana]
  misc_feature (1)..(221): Homolog of NCBI NO: 34905768 NR Description: P0401G10.10 [Oryza sativa (japonica
  misc_feature (1)..(256): Homolog of NCBI NO: 15027957 NR Description: putative arginine/serine-rich protein
  misc_feature (1)..(256): Homolog of NCBI NO: 15219287 NR Description: arginine/serine-rich protein, putative
MDGAQIDGKVVKATFTLPPRQKVSSPPKPVSAAPKRDAPKSDNAAADAEKDGGPRRPRETSPQRKTGLSPRRRSPLPRRGLSPRRRSPDSPHRRRPGSPIRRRGDTPPRRRPASPSRGRSPSSPPPRRYRSPPRGSPRRIRGSPVRRRSPLPLRRRSPPPRRLRSPPRRSPIRRRSRSPIRRPGRSRSSSISPRKGRGPAGRRGRSSSYSSSPSPRRIPRKISRSRSPKRPLRGKRSSSNSSSSSSPPPPPPPRKT

SEQ ID NO: 27770 - DNA, 1098 bp, Arabidopsis thaliana
  misc_feature (1)..(1098): Ceres Seq. ID no. 12331633
  misc_feature: MA Experiment ID: 108435 Result: Up-regulated in Transcription
  misc_feature: MA Experiment 108435 PARAMETER Experiment Name: At_stm_Mutants_cDNA_P Parameter: Plant Line Value: wt Landsburg vs stm
  misc_feature: MA Experiment 108435 PARAMETER Experiment Name: At_stm_Mutants_cDNA_P Parameter: Tissue Value: Shoot Apical Meristem Region
  misc_feature: MA Experiment ID: 108464 Result: Up-regulated in Transcription
  misc_feature: MA Experiment 108464 PARAMETER Experiment Name: At_Germinating_Seeds_cDNA_P Parameter: Age (day) Value: 4 vs. 0
  misc_feature: MA Experiment 108464 PARAMETER Experiment Name: At_Germinating_Seeds_cDNA_P Parameter: Tissue Value: Germinating Seeds
  misc_feature: MA Experiment ID: 108501 Result: Up-regulated in Transcription
  misc_feature: MA Experiment 108501 PARAMETER Experiment Name: At_ap2_floral_buds_cDNA_P Parameter: Plant Line Value: ap2 (Ler.)
  misc_feature: MA Experiment 108501 PARAMETER Experiment Name: At_ap2_floral_buds_cDNA_P Parameter: Tissue Value: Closed Flower
  misc_feature: MA Experiment ID: 108579 Result: Up-regulated in Transcription
  misc_feature: MA Experiment 108579 PARAMETER Experiment Name: At_4deg_Cold_cDNA_P Parameter: Temperature (deg C) Value: 4 vs. 22
  misc_feature: MA Experiment 108579 PARAMETER Experiment Name: At_4deg_Cold_cDNA_P Parameter: Timepoint (hr) Value: 6
  misc_feature: MA Experiment 108579 PARAMETER Experiment Name: At_4deg_Cold_cDNA_P Parameter: Tissue Value: Aerial
  misc_feature: MA Experiment ID: 108595 Result: Up-regulated in Transcription
  misc_feature: MA Experiment 108595 PARAMETER Experiment Name: At_Ler-pi_Ovule_cDNA_P Parameter: Plant Line Value: null
  misc_feature: MA Experiment ID: 20000069 Result: Down-regulated in Transcription
  misc_feature: MA Experiment 20000069 PARAMETER Experiment Name: At_100uM_ABA_Mutants_cDNA_P Parameter: Plant Line Value: CS23
  misc_feature: MA Experiment 20000069 PARAMETER Experiment Name: At_100uM_ABA_Mutants_cDNA_P Parameter: Timepoint (hr) Value: 6
  misc_feature: MA Experiment 20000069 PARAMETER Experiment Name: At_100uM_ABA_Mutants_cDNA_P Parameter: Tissue Value: Aerial
  misc_feature: MA Experiment 20000069 PARAMETER Experiment Name: At_100uM_ABA_Mutants_cDNA_P Parameter: Treatment Value: 100uM ABA vs. No Treatment
  misc_feature: MA Experiment ID: 20000070 Result: Down-regulated in Transcription
  misc_feature: MA Experiment 20000070 PARAMETER Experiment Name: At_100uM_ABA_Mutants_cDNA_P Parameter: Plant Line Value: CS24
  misc_feature: MA Experiment 20000070 PARAMETER Experiment Name: At_100uM_ABA_Mutants_cDNA_P Parameter: Timepoint (hr) Value: 6
  misc_feature: MA Experiment 20000070 PARAMETER Experiment Name: At_100uM_ABA_Mutants_cDNA_P Parameter: Tissue Value: Aerial
  misc_feature: MA Experiment 20000070 PARAMETER Experiment Name: At_100uM_ABA_Mutants_cDNA_P Parameter: Treatment Value: 100uM ABA vs. No Treatment
  misc_feature: MA Experiment ID: 20000071 Result: Down-regulated in Transcription
  misc_feature: MA Experiment 20000071 PARAMETER Experiment Name: At_100uM_ABA_Mutants_cDNA_P Parameter: Plant Line Value: CS8104
  misc_feature: MA Experiment 20000071 PARAMETER Experiment Name: At_100uM_ABA_Mutants_cDNA_P Parameter: Timepoint (hr) Value: 6
  misc_feature: MA Experiment 20000071 PARAMETER Experiment Name: At_100uM_ABA_Mutants_cDNA_P Parameter: Tissue Value: Aerial
  misc_feature: MA Experiment 20000071 PARAMETER Experiment Name: At_100uM_ABA_Mutants_cDNA_P Parameter: Treatment Value: 100uM ABA vs. No Treatment
  misc_feature: MA Experiment ID: 20000086 Result: Down-regulated in Transcription
  misc_feature: MA Experiment 20000086 PARAMETER Experiment Name: At_100uM_ABA_Mutants_cDNA_P Parameter: Plant Line Value: CS22
  misc_feature: MA Experiment 20000086 PARAMETER Experiment Name: At_100uM_ABA_Mutants_cDNA_P Parameter: Timepoint (hr) Value: 6
  misc_feature: MA Experiment 20000086 PARAMETER Experiment Name: At_100uM_ABA_Mutants_cDNA_P Parameter: Tissue Value: Aerial
  misc_feature: MA Experiment 20000086 PARAMETER Experiment Name: At_100uM_ABA_Mutants_cDNA_P Parameter: Treatment Value: 100uM ABA vs. No Treatment
  misc_feature: MA Experiment ID: 20000087 Result: Down-regulated in Transcription
  misc_feature: MA Experiment 20000087 PARAMETER Experiment Name: At_100uM_ABA_Mutants_cDNA_P Parameter: Plant Line Value: WS
  misc_feature: MA Experiment 20000087 PARAMETER Experiment Name: At_100uM_ABA_Mutants_cDNA_P Parameter: Timepoint (hr) Value: 6
  misc_feature: MA Experiment 20000087 PARAMETER Experiment Name: At_100uM_ABA_Mutants_cDNA_P Parameter: Tissue Value: Aerial
  misc_feature: MA Experiment 20000087 PARAMETER Experiment Name: At_100uM_ABA_Mutants_cDNA_P Parameter: Treatment Value: 100uM ABA vs. No Treatment
  misc_feature: MA Experiment ID: 20000088 Result: Down-regulated in Transcription
  misc_feature: MA Experiment 20000088 PARAMETER Experiment Name: At_100uM_ABA_Mutants_cDNA_P Parameter: Plant Line Value: Landsberg
  misc_feature: MA Experiment 20000088 PARAMETER Experiment Name: At_100uM_ABA_Mutants_cDNA_P Parameter: Timepoint (hr) Value: 6
  misc_feature: MA Experiment 20000088 PARAMETER Experiment Name: At_100uM_ABA_Mutants_cDNA_P Parameter: Tissue Value: Aerial
  misc_feature: MA Experiment 20000088 PARAMETER Experiment Name: At_100uM_ABA_Mutants_cDNA_P Parameter: Treatment Value: 100uM ABA vs. No Treatment
  misc_feature: MA Experiment ID: 20000089 Result: Down-regulated in Transcription
  misc_feature: MA Experiment ID: 20000090 Result: Down-regulated in Transcription
  misc_feature: MA Experiment ID: 20000117 Result: Down-regulated in Transcription
  misc_feature: MA Experiment 20000117 PARAMETER Experiment Name: At_100uM_ABA_Mutants_cDNA_P Parameter: Plant Line Value: Columbia
  misc_feature: MA Experiment 20000117 PARAMETER Experiment Name: At_100uM_ABA_Mutants_cDNA_P Parameter: Timepoint (hr) Value: 6
  misc_feature: MA Experiment 20000117 PARAMETER Experiment Name: At_100uM_ABA_Mutants_cDNA_P Parameter: Tissue Value: Aerial
  misc_feature: MA Experiment 20000117 PARAMETER Experiment Name: At_100uM_ABA_Mutants_cDNA_P Parameter: Treatment Value: 100uM ABA vs. No Treatment
  misc_feature: MA Experiment ID: 20000224 Result: Up-regulated in Transcription
  misc_feature: MA Experiment ID: 20000227 Result: Up-regulated in Transcription
  misc_feature: MA Experiment 20000227 PARAMETER Experiment Name: At_Root-Tips-vs-Tops_P Parameter: Tissue Value: Root Tips vs. Root Tops
  misc_feature: MA Experiment ID: 20000234 Result: Up-regulated in Transcription
  misc_feature: MA Experiment 20000234 PARAMETER Experiment Name: At_Siliques_P Parameter: Age (day) Value: 21
  misc_feature: MA Experiment 20000234 PARAMETER Experiment Name: At_Siliques_P Parameter: Organism Value: A. thaliana
  misc_feature: MA Experiment 20000234 PARAMETER Experiment Name: At_Siliques_P Parameter: Plant Line Value: WS
  misc_feature: MA Experiment 20000234 PARAMETER Experiment Name: At_Siliques_P Parameter: Tissue Value: Less Than 5mm Siliques vs. Whole Plant
  misc_feature: MA Experiment ID: 20000264 Result: Up-regulated in Transcription
  misc_feature: MA Experiment 20000264 PARAMETER Experiment Name: At_Open_Flower_P Parameter: Age (day) Value: 21
  misc_feature: MA Experiment 20000264 PARAMETER Experiment Name: At_Open_Flower_P Parameter: Plant Line Value: WS
  misc_feature: MA Experiment 20000264 PARAMETER Experiment Name: At_Open_Flower_P Parameter: Tissue Value: Open Flower vs. Whole Plant
  misc_feature: MA Experiment ID: 20000286 Result: Up-regulated in Transcription
  misc_feature: MA Experiment 20000286 PARAMETER Experiment Name: At_Open_Flower_P Parameter: Age (day) Value: 21
  misc_feature: MA Experiment 20000286 PARAMETER Experiment Name: At_Open_Flower_P Parameter: Plant Line Value: WS
  misc_feature: MA Experiment 20000286 PARAMETER Experiment Name: At_Open_Flower_P Parameter: Tissue Value: Half Open vs. Whole Plant
  misc_feature: MA Experiment ID: 20000437 Result: Down-regulated in Transcription
  misc_feature: MA Experiment 20000437 PARAMETER Experiment Name: At_Drought_P Parameter: Age (day) Value: 8
  misc_feature: MA Experiment 20000437 PARAMETER Experiment Name: At_Drought_P Parameter: Organism Value: A. thaliana
  misc_feature: MA Experiment 20000437 PARAMETER Experiment Name: At_Drought_P Parameter: Plant Line Value: WS
  misc_feature: MA Experiment 20000437 PARAMETER Experiment Name: At_Drought_P Parameter: Timepoint (hr) Value: 24
  misc_feature: MA Experiment 20000437 PARAMETER Experiment Name: At_Drought_P Parameter: Tissue Value: Whole Plant
  misc_feature: MA Experiment 20000437 PARAMETER Experiment Name: At_Drought_P Parameter: Treatment Value: Drought vs. No Drought
  misc_feature: MA Experiment ID: 20000438 Result: Up-regulated in Transcription
  misc_feature: MA Experiment 20000438 PARAMETER Experiment Name: At_Shoots__P Parameter: Age (day) Value: 14
  misc_feature: MA Experiment 20000438 PARAMETER Experiment Name: At_Shoots__P Parameter: Tissue Value: Shoots vs. Whole Plant
  misc_feature: MA Experiment ID: 20000451 Result: Down-regulated in Transcription
  misc_feature: MA Experiment 20000451 PARAMETER Experiment Name: At_CS6879_Shoots-Roots_P Parameter: Age (day) Value: 14
  misc_feature: MA Experiment 20000451 PARAMETER Experiment Name: At_CS6879_Shoots-Roots_P Parameter: Organism Value: A. thaliana
  misc_feature: MA Experiment 20000451 PARAMETER Experiment Name: At_CS6879_Shoots-Roots_P Parameter: Plant Line Value: CS6879 vs. WS
  misc_feature: MA Experiment 20000451 PARAMETER Experiment Name: At_CS6879_Shoots-Roots_P Parameter: Tissue Value: Roots
  misc_feature: MA Experiment ID: 20000495 Result: Up-regulated in Transcription
  misc_feature: MA Experiment 20000495 PARAMETER Experiment Name: At_Guard_Cells_P Parameter: Harvest Date Value: 8/2/2002
  misc_feature: MA Experiment 20000495 PARAMETER Experiment Name: At_Guard_Cells_P Parameter: Organism Value: A. thaliana
  misc_feature: MA Experiment 20000495 PARAMETER Experiment Name: At_Guard_Cells_P Parameter: Tissue Value: Guard Cells vs. Leaves
  misc_feature: MA Experiment ID: 20000576 Result: Up-regulated in Transcription
  misc_feature: MA Experiment 20000576 PARAMETER Experiment Name: At_100uM_ABA_Mutants__P Parameter: Organism Value: A. thaliana
  misc_feature: MA Experiment 20000576 PARAMETER Experiment Name: At_100uM_ABA_Mutants__P Parameter: Plant Line Value: CS23
  misc_feature: MA Experiment 20000576 PARAMETER Experiment Name: At_100uM_ABA_Mutants__P Parameter: Timepoint (hr) Value: 6
  misc_feature: MA Experiment 20000576 PARAMETER Experiment Name: At_100uM_ABA_Mutants__P Parameter: Tissue Value: Whole Plant
  misc_feature: MA Experiment 20000576 PARAMETER Experiment Name: At_100uM_ABA_Mutants__P Parameter: Treatment Value: 1uM ABA vs. No Treatment
  misc_feature: MA Experiment ID: 20000794 Result: Up-regulated in Transcription
  misc_feature: MA Experiment 20000794 PARAMETER Experiment Name: At_Petals_P Parameter: Age (day) Value: 23-25 days
  misc_feature: MA Experiment 20000794 PARAMETER Experiment Name: At_Petals_P Parameter: Plant Line Value: WS
  misc_feature: MA Experiment 20000794 PARAMETER Experiment Name: At_Petals_P Parameter: Tissue Value: Petals vs. Whole plant
  misc_feature: MA Experiment ID: 20001248 Result: Down-regulated in Transcription
  misc_feature: MA Experiment 20001248 PARAMETER Experiment Name: At_Far-red-induction_P Parameter: Age (day) Value: 7
  misc_feature: MA Experiment 20001248 PARAMETER Experiment Name: At_Far-red-induction_P Parameter: Light Value: Far-red vs. White
  misc_feature: MA Experiment 20001248 PARAMETER Experiment Name: At_Far-red-induction_P Parameter: Organism Value: A. thaliana
  misc_feature: MA Experiment 20001248 PARAMETER Experiment Name: At_Far-red-induction_P Parameter: Plant Line Value: Columbia
  misc_feature: MA Experiment 20001248 PARAMETER Experiment Name: At_Far-red-induction_P Parameter: Timepoint (hr) Value: 4
  misc_feature: MA Experiment 20001248 PARAMETER Experiment Name: At_Far-red-induction_P Parameter: Tissue Value: Whole Plant
  misc_feature: MA Experiment ID: 20001458 Result: Down-regulated in Transcription
  misc_feature: MA Experiment 20001458 PARAMETER Experiment Name: At_50mM_NH4NO3_L-to-H_P Parameter: Age (day) Value: Undefined
  misc_feature: MA Experiment 20001458 PARAMETER Experiment Name: At_50mM_NH4NO3_L-to-H_P Parameter: Organism Value: Undefined
  misc_feature: MA Experiment 20001458 PARAMETER Experiment Name: At_50mM_NH4NO3_L-to-H_P Parameter: Plant Line Value: Undefined
  misc_feature: MA Experiment 20001458 PARAMETER Experiment Name: At_50mM_NH4NO3_L-to-H_P Parameter: Timepoint (hr) Value: 2
  misc_feature: MA Experiment 20001458 PARAMETER Experiment Name: At_50mM_NH4NO3_L-to-H_P Parameter: Tissue Value: Siliques
  misc_feature: MA Experiment 20001458 PARAMETER Experiment Name: At_50mM_NH4NO3_L-to-H_P Parameter: Treatment Value: 50mM NH4NO3 vs. 100mM Manitol
  misc_feature: MA Experiment ID: 20001556 Result: Down-regulated in Transcription
  misc_feature: MA Experiment 20001556 PARAMETER Experiment Name: At_Drought_Soil_Dry_P Parameter: Age (day) Value: 26
  misc_feature: MA Experiment 20001556 PARAMETER Experiment Name: At_Drought_Soil_Dry_P Parameter: Organism Value: A. thaliana
  misc_feature: MA Experiment 20001556 PARAMETER Experiment Name: At_Drought_Soil_Dry_P Parameter: Plant Line Value: WS
  misc_feature: MA Experiment 20001556 PARAMETER Experiment Name: At_Drought_Soil_Dry_P Parameter: Post Timepoint (hr) Value: None
  misc_feature: MA Experiment 20001556 PARAMETER Experiment Name: At_Drought_Soil_Dry_P Parameter: Post-Treatment Value: None
  misc_feature: MA Experiment 20001556 PARAMETER Experiment Name: At_Drought_Soil_Dry_P Parameter: Timepoint (day) Value: 12
  misc_feature: MA Experiment 20001556 PARAMETER Experiment Name: At_Drought_Soil_Dry_P Parameter: Treatment Value: Drought vs. No Drought
  misc_feature: MA Experiment ID: 20001557 Result: Down-regulated in Transcription
  misc_feature: MA Experiment 20001557 PARAMETER Experiment Name: At_Drought_Soil_Dry_P Parameter: Age (day) Value: 27
  misc_feature: MA Experiment 20001557 PARAMETER Experiment Name: At_Drought_Soil_Dry_P Parameter: Organism Value: A. thaliana
  misc_feature: MA Experiment 20001557 PARAMETER Experiment Name: At_Drought_Soil_Dry_P Parameter: Plant Line Value: WS
  misc_feature: MA Experiment 20001557 PARAMETER Experiment Name: At_Drought_Soil_Dry_P Parameter: Post Timepoint (hr) Value: 3
  misc_feature: MA Experiment 20001557 PARAMETER Experiment Name: At_Drought_Soil_Dry_P Parameter: Post-Treatment Value: Re-Water vs. No Drought
  misc_feature: MA Experiment 20001557 PARAMETER Experiment Name: At_Drought_Soil_Dry_P Parameter: Timepoint (day) Value: 13
  misc_feature: MA Experiment 20001557 PARAMETER Experiment Name: At_Drought_Soil_Dry_P Parameter: Treatment Value: Drought vs. No Drought
  misc_feature: MA Experiment ID: 20001558 Result: Down-regulated in Transcription
  misc_feature: MA Experiment 20001558 PARAMETER Experiment Name: At_Drought_Soil_Dry_P Parameter: Age (day) Value: 27
  misc_feature: MA Experiment 20001558 PARAMETER Experiment Name: At_Drought_Soil_Dry_P Parameter: Organism Value: A. thaliana
  misc_feature: MA Experiment 20001558 PARAMETER Experiment Name: At_Drought_Soil_Dry_P Parameter: Plant Line Value: WS
  misc_feature: MA Experiment 20001558 PARAMETER Experiment Name: At_Drought_Soil_Dry_P Parameter: Post Timepoint (hr) Value: 6
  misc_feature: MA Experiment 20001558 PARAMETER Experiment Name: At_Drought_Soil_Dry_P Parameter: Post-Treatment Value: Re-Water vs. No Drought
  misc_feature: MA Experiment 20001558 PARAMETER Experiment Name: At_Drought_Soil_Dry_P Parameter: Timepoint (day) Value: 13
  misc_feature: MA Experiment 20001558 PARAMETER Experiment Name: At_Drought_Soil_Dry_P Parameter: Treatment Value: Drought vs. No Drought
  misc_feature: MA Experiment ID: 20001905 Result: Down-regulated in Transcription
  misc_feature: MA Experiment 20001905 PARAMETER Experiment Name: At_Drought_Reproduction_P Parameter: Age (day) Value: 40
  misc_feature: MA Experiment 20001905 PARAMETER Experiment Name: At_Drought_Reproduction_P Parameter: Organism Value: A. thaliana
  misc_feature: MA Experiment 20001905 PARAMETER Experiment Name: At_Drought_Reproduction_P Parameter: Plant Line Value: WS
  misc_feature: MA Experiment 20001905 PARAMETER Experiment Name: At_Drought_Reproduction_P Parameter: Timepoint (day) Value: 10
  misc_feature: MA Experiment 20001905 PARAMETER Experiment Name: At_Drought_Reproduction_P Parameter: Tissue Value: Rosettes
  misc_feature: MA Experiment 20001905 PARAMETER Experiment Name: At_Drought_Reproduction_P Parameter: Treatment Value: Drought vs. No Drought
  misc_feature: MA Experiment ID: 20001906 Result: Down-regulated in Transcription
  misc_feature: MA Experiment 20001906 PARAMETER Experiment Name: At_Drought_Reproduction_P Parameter: Age (day) Value: 35
  misc_feature: MA Experiment 20001906 PARAMETER Experiment Name: At_Drought_Reproduction_P Parameter: Organism Value: A. thaliana
  misc_feature: MA Experiment 20001906 PARAMETER Experiment Name: At_Drought_Reproduction_P Parameter: Plant Line Value: WS
  misc_feature: MA Experiment 20001906 PARAMETER Experiment Name: At_Drought_Reproduction_P Parameter: Timepoint (day) Value: 5
  misc_feature: MA Experiment 20001906 PARAMETER Experiment Name: At_Drought_Reproduction_P Parameter: Tissue Value: Siliques
  misc_feature: MA Experiment 20001906 PARAMETER Experiment Name: At_Drought_Reproduction_P Parameter: Treatment Value: Drought vs. No Drought
  misc_feature: MA Experiment ID: 20001907 Result: Down-regulated in Transcription
  misc_feature: MA Experiment 20001907 PARAMETER Experiment Name: At_Drought_Reproduction_P Parameter: Age (day) Value: 37
  misc_feature: MA Experiment 20001907 PARAMETER Experiment Name: At_Drought_Reproduction_P Parameter: Organism Value: A. thaliana
  misc_feature: MA Experiment 20001907 PARAMETER Experiment Name: At_Drought_Reproduction_P Parameter: Plant Line Value: WS
  misc_feature: MA Experiment 20001907 PARAMETER Experiment Name: At_Drought_Reproduction_P Parameter: Timepoint (day) Value: 7
  misc_feature: MA Experiment 20001907 PARAMETER Experiment Name: At_Drought_Reproduction_P Parameter: Tissue Value: Siliques
  misc_feature: MA Experiment 20001907 PARAMETER Experiment Name: At_Drought_Reproduction_P Parameter: Treatment Value: Drought vs. No Drought
acatcacataaaaacaatcatagcaaaaacatatatcctcaaattaattagatctcatctatctctaccctcgacatggatcatgaggaaattccatccacgccctcaacgccggcgacaaccccggggactccaggagcgccgctctttggaggattcgaagggaagaggaatggacacaatggtagatacacaccaaagtcacttctcaaaagctgcaaatgtttcagtgttgacaatgaatgggctcttgaagatggaagactccctccggtcacttgctctctccctccccctaacgtttccctctaccgcaagttgggagcagagtttgttgggacattgatcctgatattcgccggaacagcgacggcgatcgtgaatcagaagacagatggagctgagacgcttattggttgcgccgcctcggctggtctggcggttatgatcgttatattatcgaccggtcacatctccggggcacatctcaatccggctgtaaccattgcctttgctgctctcaaacacttcccttggaaacacgtgccggtgtatatcggagctcaggtgatggcctccgtgagtgcggcgtttgcactgaaagcagtgtttgaaccaacgatgagcggtgacgtgacggtgccaacggtgggtctcagccaagctttcgccttggaattcattatcagcttcaacctcatgttcgttgtcacagccgtagccaccgacacgagagctgtgggagagttggcgggaattgccgtaggagcaacggtcatgcttaacatactcatagctggacctgcaacttctgcttcgatgaatcctgtaagaacactaggtccagccattgcagcaaacaattacagagctatttggatttaccttactgccccaatacttggagcgttaattggagcaggaacctacacgattgtgaagttgccagaggaagatgaagcacccaaagaaaggagaagcttcagaagatgaatgaaaaacttgaaaaccatgttactctgtttttgcatcacttatgtgtataatataatatctggggtcaatgatggtaataaaaatgcgaatgtcccttttatc

SEQ ID NO: 27771 - protein, 305 aa, Arabidopsis thaliana
  peptide (1)..(305): Ceres Seq. ID no. 12331634
  misc_feature (75)..(285): Pfam Name: Major intrinsic protein Pfam Description: Major intrinsic protein
  misc_feature (77)..(293): Homolog of NCBI NO: 5139541 NR Description: nodulin26-like major intrinsic protein [Pisum
  misc_feature (59)..(289): Homolog of NCBI NO: 15777893 NR Description: early embryogenesis aquaglyceroporin [Pinus taeda]
  misc_feature (75)..(289): Homolog of NCBI NO: 17025880 NR Description: multifunctional aquaporin [Medicago truncatula]
  misc_feature (66)..(290): Homolog of NCBI NO: 37573042 NR Description: putative nodulin [Oryza sativa (japonica
  misc_feature (73)..(290): Homolog of NCBI NO: 28971941 NR Description: putative nodulin [Oryza sativa (japonica
  misc_feature (62)..(295): Homolog of NCBI NO: 9971217 NR Description: MIP [Adiantum capillus-veneris]
  misc_feature (74)..(305): Homolog of NCBI NO: 37536006 NR Description: putative nodulin-26 [Oryza sativa (japonica
  misc_feature (1)..(305): Homolog of NCBI NO: 13447791 NR Description: NOD26-like membrane integral protein ZmNIP3-1
  misc_feature (10)..(305): Homolog of NCBI NO: 15235034 NR Description: major intrinsic protein (MIP) - like
  misc_feature (1)..(305): Homolog of NCBI NO: 15220826 NR Description: nodulin-like protein; protein id: At1g80760.1
MDHEEIPSTPSTPATTPGTPGAPLFGGFEGKRNGHNGRYTPKSLLKSCKCFSVDNEWALEDGRLPPVTCSLPPPNVSLYRKLGAEFVGTLILIFAGTATAIVNQKTDGAETLIGCAASAGLAVMIVILSTGHISGAHLNPAVTIAFAALKHFPWKHVPVYIGAQVMASVSAAFALKAVFEPTMSGDVTVPTVGLSQAFALEFIISFNLMFVVTAVATDTRAVGELAGIAVGATVMLNILIAGPATSASMNPVRTLGPAIAANNYRAIWIYLTAPILGALIGAGTYTIVKLPEEDEAPKERRSFRR

SEQ ID NO: 27772 - protein, 182 aa, Arabidopsis thaliana
  peptide (1)..(182): Ceres Seq. ID no. 12331635
  misc_feature (1)..(162): Pfam Name: Major intrinsic protein Pfam Description: Major intrinsic protein
  misc_feature (1)..(170): Homolog of NCBI NO: 5139541 NR Description: nodulin26-like major intrinsic protein [Pisum
  misc_feature (1)..(166): Homolog of NCBI NO: 15777893 NR Description: early embryogenesis aquaglyceroporin [Pinus taeda]
  misc_feature (1)..(166): Homolog of NCBI NO: 17025880 NR Description: multifunctional aquaporin [Medicago truncatula]
  misc_feature (1)..(167): Homolog of NCBI NO: 37573042 NR Description: putative nodulin [Oryza sativa (japonica
  misc_feature (1)..(167): Homolog of NCBI NO: 28971941 NR Description: putative nodulin [Oryza sativa (japonica
  misc_feature (1)..(172): Homolog of NCBI NO: 9971217 NR Description: MIP [Adiantum capillus-veneris]
  misc_feature (1)..(182): Homolog of NCBI NO: 37536006 NR Description: putative nodulin-26 [Oryza sativa (japonica
  misc_feature (1)..(182): Homolog of NCBI NO: 13447791 NR Description: NOD26-like membrane integral protein ZmNIP3-1
  misc_feature (1)..(182): Homolog of NCBI NO: 15235034 NR Description: major intrinsic protein (MIP) - like
  misc_feature (1)..(182): Homolog of NCBI NO: 15220826 NR Description: nodulin-like protein; protein id: At1g80760.1
MIVILSTGHISGAHLNPAVTIAFAALKHFPWKHVPVYIGAQVMASVSAAFALKAVFEPTMSGDVTVPTVGLSQAFALEFIISFNLMFVVTAVATDTRAVGELAGIAVGATVMLNILIAGPATSASMNPVRTLGPAIAANNYRAIWIYLTAPILGALIGAGTYTIVKLPEEDEAPKERRSFRR

SEQ ID NO: 27773 - DNA, 2351 bp, Arabidopsis thaliana
  misc_feature (1)..(2351): Ceres Seq. ID no. 13491443
  misc_feature: MA Experiment ID: 108434 Result: Up-regulated in Transcription
  misc_feature: MA Experiment 108434 PARAMETER Experiment Name: At_Root_Tips_cDNA_P Parameter: Tissue Value: Root Tips
  misc_feature: MA Experiment ID: 108462 Result: Down-regulated in Transcription
  misc_feature: MA Experiment 108462 PARAMETER Experiment Name: At_Germinating_Seeds_cDNA_P Parameter: Age (day) Value: 2 vs. 0
  misc_feature: MA Experiment 108462 PARAMETER Experiment Name: At_Germinating_Seeds_cDNA_P Parameter: Tissue Value: Germinating Seeds
  misc_feature: MA Experiment ID: 108463 Result: Down-regulated in Transcription
  misc_feature: MA Experiment 108463 PARAMETER Experiment Name: At_Germinating_Seeds_cDNA_P Parameter: Age (day) Value: 3 vs. 0
  misc_feature: MA Experiment 108463 PARAMETER Experiment Name: At_Germinating_Seeds_cDNA_P Parameter: Tissue Value: Germinating Seeds
  misc_feature: MA Experiment ID: 108464 Result: Down-regulated in Transcription
  misc_feature: MA Experiment 108464 PARAMETER Experiment Name: At_Germinating_Seeds_cDNA_P Parameter: Age (day) Value: 4 vs. 0
  misc_feature: MA Experiment 108464 PARAMETER Experiment Name: At_Germinating_Seeds_cDNA_P Parameter: Tissue Value: Germinating Seeds
  misc_feature: MA Experiment ID: 20000086 Result: Up-regulated in Transcription
  misc_feature: MA Experiment 20000086 PARAMETER Experiment Name: At_100uM_ABA_Mutants_cDNA_P Parameter: Plant Line Value: CS22
  misc_feature: MA Experiment 20000086 PARAMETER Experiment Name: At_100uM_ABA_Mutants_cDNA_P Parameter: Timepoint (hr) Value: 6
  misc_feature: MA Experiment 20000086 PARAMETER Experiment Name: At_100uM_ABA_Mutants_cDNA_P Parameter: Tissue Value: Aerial
  misc_feature: MA Experiment 20000086 PARAMETER Experiment Name: At_100uM_ABA_Mutants_cDNA_P Parameter: Treatment Value: 100uM ABA vs. No Treatment
  misc_feature: MA Experiment ID: 20000088 Result: Up-regulated in Transcription
  misc_feature: MA Experiment 20000088 PARAMETER Experiment Name: At_100uM_ABA_Mutants_cDNA_P Parameter: Plant Line Value: Landsberg
  misc_feature: MA Experiment 20000088 PARAMETER Experiment Name: At_100uM_ABA_Mutants_cDNA_P Parameter: Timepoint (hr) Value: 6
  misc_feature: MA Experiment 20000088 PARAMETER Experiment Name: At_100uM_ABA_Mutants_cDNA_P Parameter: Tissue Value: Aerial
  misc_feature: MA Experiment 20000088 PARAMETER Experiment Name: At_100uM_ABA_Mutants_cDNA_P Parameter: Treatment Value: 100uM ABA vs. No Treatment
  misc_feature: MA Experiment ID: 20000179 Result: Down-regulated in Transcription
  misc_feature: MA Experiment 20000179 PARAMETER Experiment Name: At_Germinating_Seeds_P Parameter: Age (hr) Value: 6 vs. 0
  misc_feature: MA Experiment 20000179 PARAMETER Experiment Name: At_Germinating_Seeds_P Parameter: Tissue Value: Germinating Seeds
  misc_feature: MA Experiment ID: 20000180 Result: Down-regulated in Transcription
  misc_feature: MA Experiment 20000180 PARAMETER Experiment Name: At_Germinating_Seeds_P Parameter: Age (hr) Value: 24 vs. 0
  misc_feature: MA Experiment 20000180 PARAMETER Experiment Name: At_Germinating_Seeds_P Parameter: Tissue Value: Germinating Seeds
  misc_feature: MA Experiment ID: 20001248 Result: Up-regulated in Transcription
  misc_feature: MA Experiment 20001248 PARAMETER Experiment Name: At_Far-red-induction_P Parameter: Age (day) Value: 7
  misc_feature: MA Experiment 20001248 PARAMETER Experiment Name: At_Far-red-induction_P Parameter: Light Value: Far-red vs. White
  misc_feature: MA Experiment 20001248 PARAMETER Experiment Name: At_Far-red-induction_P Parameter: Organism Value: A. thaliana
  misc_feature: MA Experiment 20001248 PARAMETER Experiment Name: At_Far-red-induction_P Parameter: Plant Line Value: Columbia
  misc_feature: MA Experiment 20001248 PARAMETER Experiment Name: At_Far-red-induction_P Parameter: Timepoint (hr) Value: 4
  misc_feature: MA Experiment 20001248 PARAMETER Experiment Name: At_Far-red-induction_P Parameter: Tissue Value: Whole Plant
  misc_feature: MA Experiment ID: 20001458 Result: Up-regulated in Transcription
  misc_feature: MA Experiment 20001458 PARAMETER Experiment Name: At_50mM_NH4NO3_L-to-H_P Parameter: Age (day) Value: Undefined
  misc_feature: MA Experiment 20001458 PARAMETER Experiment Name: At_50mM_NH4NO3_L-to-H_P Parameter: Organism Value: Undefined
  misc_feature: MA Experiment 20001458 PARAMETER Experiment Name: At_50mM_NH4NO3_L-to-H_P Parameter: Plant Line Value: Undefined
  misc_feature: MA Experiment 20001458 PARAMETER Experiment Name: At_50mM_NH4NO3_L-to-H_P Parameter: Timepoint (hr) Value: 2
  misc_feature: MA Experiment 20001458 PARAMETER Experiment Name: At_50mM_NH4NO3_L-to-H_P Parameter: Tissue Value: Siliques
  misc_feature: MA Experiment 20001458 PARAMETER Experiment Name: At_50mM_NH4NO3_L-to-H_P Parameter: Treatment Value: 50mM NH4NO3 vs. 100mM Manitol
  misc_feature: MA Experiment ID: 20001555 Result: Up-regulated in Transcription
  misc_feature: MA Experiment 20001555 PARAMETER Experiment Name: At_Drought_Soil_Dry_P Parameter: Age (day) Value: 24
  misc_feature: MA Experiment 20001555 PARAMETER Experiment Name: At_Drought_Soil_Dry_P Parameter: Organism Value: A. thaliana
  misc_feature: MA Experiment 20001555 PARAMETER Experiment Name: At_Drought_Soil_Dry_P Parameter: Plant Line Value: WS
  misc_feature: MA Experiment 20001555 PARAMETER Experiment Name: At_Drought_Soil_Dry_P Parameter: Post Timepoint (hr) Value: None
  misc_feature: MA Experiment 20001555 PARAMETER Experiment Name: At_Drought_Soil_Dry_P Parameter: Post-Treatment Value: None
  misc_feature: MA Experiment 20001555 PARAMETER Experiment Name: At_Drought_Soil_Dry_P Parameter: Timepoint (day) Value: 10
  misc_feature: MA Experiment 20001555 PARAMETER Experiment Name: At_Drought_Soil_Dry_P Parameter: Treatment Value: Drought vs. No Drought
  misc_feature: MA Experiment ID: 20001556 Result: Up-regulated in Transcription
  misc_feature: MA Experiment 20001556 PARAMETER Experiment Name: At_Drought_Soil_Dry_P Parameter: Age (day) Value: 26
  misc_feature: MA Experiment 20001556 PARAMETER Experiment Name: At_Drought_Soil_Dry_P Parameter: Organism Value: A. thaliana
  misc_feature: MA Experiment 20001556 PARAMETER Experiment Name: At_Drought_Soil_Dry_P Parameter: Plant Line Value: WS
  misc_feature: MA Experiment 20001556 PARAMETER Experiment Name: At_Drought_Soil_Dry_P Parameter: Post Timepoint (hr) Value: None
  misc_feature: MA Experiment 20001556 PARAMETER Experiment Name: At_Drought_Soil_Dry_P Parameter: Post-Treatment Value: None
  misc_feature: MA Experiment 20001556 PARAMETER Experiment Name: At_Drought_Soil_Dry_P Parameter: Timepoint (day) Value: 12
  misc_feature: MA Experiment 20001556 PARAMETER Experiment Name: At_Drought_Soil_Dry_P Parameter: Treatment Value: Drought vs. No Drought
  misc_feature: MA Experiment ID: 20001557 Result: Up-regulated in Transcription
  misc_feature: MA Experiment 20001557 PARAMETER Experiment Name: At_Drought_Soil_Dry_P Parameter: Age (day) Value: 27
  misc_feature: MA Experiment 20001557 PARAMETER Experiment Name: At_Drought_Soil_Dry_P Parameter: Organism Value: A. thaliana
  misc_feature: MA Experiment 20001557 PARAMETER Experiment Name: At_Drought_Soil_Dry_P Parameter: Plant Line Value: WS
  misc_feature: MA Experiment 20001557 PARAMETER Experiment Name: At_Drought_Soil_Dry_P Parameter: Post Timepoint (hr) Value: 3
  misc_feature: MA Experiment 20001557 PARAMETER Experiment Name: At_Drought_Soil_Dry_P Parameter: Post-Treatment Value: Re-Water vs. No Drought
  misc_feature: MA Experiment 20001557 PARAMETER Experiment Name: At_Drought_Soil_Dry_P Parameter: Timepoint (day) Value: 13
  misc_feature: MA Experiment 20001557 PARAMETER Experiment Name: At_Drought_Soil_Dry_P Parameter: Treatment Value: Drought vs. No Drought
  misc_feature: MA Experiment ID: 20001558 Result: Up-regulated in Transcription
  misc_feature: MA Experiment 20001558 PARAMETER Experiment Name: At_Drought_Soil_Dry_P Parameter: Age (day) Value: 27
  misc_feature: MA Experiment 20001558 PARAMETER Experiment Name: At_Drought_Soil_Dry_P Parameter: Organism Value: A. thaliana
  misc_feature: MA Experiment 20001558 PARAMETER Experiment Name: At_Drought_Soil_Dry_P Parameter: Plant Line Value: WS
  misc_feature: MA Experiment 20001558 PARAMETER Experiment Name: At_Drought_Soil_Dry_P Parameter: Post Timepoint (hr) Value: 6
  misc_feature: MA Experiment 20001558 PARAMETER Experiment Name: At_Drought_Soil_Dry_P Parameter: Post-Treatment Value: Re-Water vs. No Drought
  misc_feature: MA Experiment 20001558 PARAMETER Experiment Name: At_Drought_Soil_Dry_P Parameter: Timepoint (day) Value: 13
  misc_feature: MA Experiment 20001558 PARAMETER Experiment Name: At_Drought_Soil_Dry_P Parameter: Treatment Value: Drought vs. No Drought
  misc_feature: MA Experiment ID: 20001559 Result: Up-regulated in Transcription
  misc_feature: MA Experiment 20001559 PARAMETER Experiment Name: At_Drought_Soil_Dry_P Parameter: Age (day) Value: 28
  misc_feature: MA Experiment 20001559 PARAMETER Experiment Name: At_Drought_Soil_Dry_P Parameter: Organism Value: A. thaliana
  misc_feature: MA Experiment 20001559 PARAMETER Experiment Name: At_Drought_Soil_Dry_P Parameter: Plant Line Value: WS
  misc_feature: MA Experiment 20001559 PARAMETER Experiment Name: At_Drought_Soil_Dry_P Parameter: Post Timepoint (hr) Value: 29
  misc_feature: MA Experiment 20001559 PARAMETER Experiment Name: At_Drought_Soil_Dry_P Parameter: Post-Treatment Value: Re-Water vs. No Drought
  misc_feature: MA Experiment 20001559 PARAMETER Experiment Name: At_Drought_Soil_Dry_P Parameter: Timepoint (day) Value: 14
  misc_feature: MA Experiment 20001559 PARAMETER Experiment Name: At_Drought_Soil_Dry_P Parameter: Treatment Value: Drought vs. No Drought
gtcctcttttgtcgtctctccctgctttcgcacttcatagcctcaatctctcaacaagcagaagagattcgattctccattatcttccttctaaatgccttccctaatgttatctgataagaaagaggagaagaagatgaagaagaagatggctttggataccccagagcttgattctaagaaggggaagaaggagcagaagctgaaactatctgattcggatgaagaagagtcggagaagaagaagagtaagaagaaggataagaagcgtaaggcttccgaggaggaggatgaagtgaagagcgattcaagctcggagaagaagaagagcagcaagaaggttaagttgggcgttgaggatgttgaagttgataaccctaatgctgtttctaagtttcggatttctgcgcctttgagggagaagcttaaggcgaatggtattgaagctcttttcccgattcaggcttccacgtttgatatggttctcgatggtgctgatttagttggacgggctcgtactggtcagggtaaaacattggcttttgtgttgcctatattggaatctttggttaatggacctgccaaaagcaaaaggaagatgggatatggcaggtcaccaagtgttttggtccttttaccgaccagagaattggccaagcaggtggctgctgactttgatgcatatggaggatcacttgggttaagttcatgttgtctctatggaggtgatagctatccagttcaggagggtaaattaaagagaggtgttgacattgtagttggaacccctggtcgtattaaggatcatattgaaagacaaaaccttgatttcagctatttacaattccgtgttcttgatgaagctgatgaaatgttgaggatgggatttgttgaggatgttgaacttattttagggaaagtggaggattctactaaagtccagactcttctcttcagtgctactttgccatcatgggtgaaaaatatctctaacaggtttcttaaaagagaccagaagactattgatcttgttggtaatgataaaatgaaggccagtaatagtgttcgacacattgctattccttgtaataaggcagccatggctcggttgattcctgatattatcagttgctatagcagtggaggccaaactattattttcgctgaaactaaagttcaagtttctgagctttctggtttgttggatggatcaagagccttgcatggtgaaatacctcaatcacaacgtgaggttactcttgctggatttaggaatggcaagtttgcaacattggtggctacaaatgttgctgctcgtggtctagatatcaatgatgtgcagttaattatccagtgtgagcctccacgtgaagttgaagcatatattcatcgttcaggccgaacaggaagagctggcaacacaggagttgcggttacactctacgattctagaaagtcgagtgtatccaggatcgaaaaagaagctggtatcaaatttgagcaccttgctgcacctcaacctgatgaaattgccagatctggtggtatggaagctgctgagaaagttaaacaagtgtgtgacagtgtggttcctgcattccttgaagctgccaaggaattattagaaacttctggtttatcagctgaagtactcctcgcaaaagctcttgcaaaaactgcgggcttcactgagataaagaaaaggtcacttcttacatcaatggagaactatgtgacactacatcttgaagcagggaaaccaatatactcgccatcatttgtttatggactgctaaggagagttttaccggatgacaaggtggaaatgattgaagggttatctctaacagcagataaaacaggagctgtgttcgatgttaagcaatcagatctagacttgttcattgcaggagcacaaaagagtgctggaagtatgagtttggaagtggttaaggtgatgcctaaactccaggagagagaaccattgccacaaaaaagattcggtggtggtggcagaggaaatcggtttggtggtggtggaggaaatcggtttggcggtggtggtggcagaggaagaggaggcagtggtggtagaggccagagatattgaaaactggaacccaacttctcctttctatataaaaagaaactaaactccgtcttataatttcattactatcttcttccgctgatgttttctacactataataggtggcttttctgtgttttccattttctttccttgaacaaacttatggaggctctcttgtaccctcttatcaattttgtgtaatgttggatgataatgatgattaaattataacttcgtcactcattggaattgttttgc

SEQ ID NO: 27774 - protein, 671 aa, Arabidopsis thaliana
  peptide (1)..(671): Ceres Seq. ID no. 13491444
  misc_feature (109)..(327): Pfam Name: DEAD/DEAH box helicase Pfam Description: DEAD/DEAH box helicase
  misc_feature (23)..(669): Homolog of NCBI NO: 10764780 NR Description: RNA helicase II/Gu [Xenopus laevis]
  misc_feature (1)..(668): Homolog of NCBI NO: 34852522 NR Description: similar to Nucleolar RNA helicase II (Nucleolar
  misc_feature (1)..(670): Homolog of NCBI NO: 2135315 NR Description: RNA helicase Gu - human (fragment)
  misc_feature (1)..(670): Homolog of NCBI NO: 34879863 NR Description: similar to Nucleolar RNA helicase II (Nucleolar
  misc_feature (12)..(670): Homolog of NCBI NO: 26368308 NR Description: unnamed protein product [Mus musculus]
  misc_feature (12)..(670): Homolog of NCBI NO: 21410145 NR Description: Ddx21 protein [Mus musculus]
  misc_feature (12)..(670): Homolog of NCBI NO: 10092595 NR Description: DEAD/H (Asp-Glu-Ala-Asp/His) box polypeptide 21
  misc_feature (12)..(670): Homolog of NCBI NO: 13959325 NR Description: Nucleolar RNA helicase II (Nucleolar RNA helicase
  misc_feature (1)..(671): Homolog of NCBI NO: 7484683 NR Description: RNA helicase prh75 - spinach
  misc_feature (6)..(667): Homolog of NCBI NO: 7211427 NR Description: RNA helicase [Vigna radiata]
MPSLMLSDKKEEKKMKKKMALDTPELDSKKGKKEQKLKLSDSDEEESEKKKSKKKDKKRKASEEEDEVKSDSSSEKKKSSKKVKLGVEDVEVDNPNAVSKFRISAPLREKLKANGIEALFPIQASTFDMVLDGADLVGRARTGQGKTLAFVLPILESLVNGPAKSKRKMGYGRSPSVLVLLPTRELAKQVAADFDAYGGSLGLSSCCLYGGDSYPVQEGKLKRGVDIVVGTPGRIKDHIERQNLDFSYLQFRVLDEADEMLRMGFVEDVELILGKVEDSTKVQTLLFSATLPSWVKNISNRFLKRDQKTIDLVGNDKMKASNSVRHIAIPCNKAAMARLIPDIISCYSSGGQTIIFAETKVQVSELSGLLDGSRALHGEIPQSQREVTLAGFRNGKFATLVATNVAARGLDINDVQLIIQCEPPREVEAYIHRSGRTGRAGNTGVAVTLYDSRKSSVSRIEKEAGIKFEHLAAPQPDEIARSGGMEAAEKVKQVCDSVVPAFLEAAKELLETSGLSAEVLLAKALAKTAGFTEIKKRSLLTSMENYVTLHLEAGKPIYSPSFVYGLLRRVLPDDKVEMIEGLSLTADKTGAVFDVKQSDLDLFIAGAQKSAGSMSLEVVKVMPKLQEREPLPQKRFGGGGRGNRFGGGGGNRFGGGGGRGRGGSGGRGQRY

SEQ ID NO: 27775 - protein, 667 aa, Arabidopsis thaliana
  peptide (1)..(667): Ceres Seq. ID no. 13491445
  misc_feature (105)..(323): Pfam Name: DEAD/DEAH box helicase Pfam Description: DEAD/DEAH box helicase
  misc_feature (19)..(665): Homolog of NCBI NO: 10764780 NR Description: RNA helicase II/Gu [Xenopus laevis]
  misc_feature (1)..(664): Homolog of NCBI NO: 34852522 NR Description: similar to Nucleolar RNA helicase II (Nucleolar
  misc_feature (1)..(666): Homolog of NCBI NO: 2135315 NR Description: RNA helicase Gu - human (fragment)
  misc_feature (1)..(666): Homolog of NCBI NO: 34879863 NR Description: similar to Nucleolar RNA helicase II (Nucleolar
  misc_feature (8)..(666): Homolog of NCBI NO: 21410145 NR Description: Ddx21 protein [Mus musculus]
  misc_feature (8)..(666): Homolog of NCBI NO: 26368308 NR Description: unnamed protein product [Mus musculus]
  misc_feature (8)..(666): Homolog of NCBI NO: 10092595 NR Description: DEAD/H (Asp-Glu-Ala-Asp/His) box polypeptide 21
  misc_feature (8)..(666): Homolog of NCBI NO: 13959325 NR Description: Nucleolar RNA helicase II (Nucleolar RNA helicase
  misc_feature (1)..(667): Homolog of NCBI NO: 7484683 NR Description: RNA helicase prh75 - spinach
  misc_feature (2)..(663): Homolog of NCBI NO: 7211427 NR Description: RNA helicase [Vigna radiata]
MLSDKKEEKKMKKKMALDTPELDSKKGKKEQKLKLSDSDEEESEKKKSKKKDKKRKASEEEDEVKSDSSSEKKKSSKKVKLGVEDVEVDNPNAVSKFRISAPLREKLKANGIEALFPIQASTFDMVLDGADLVGRARTGQGKTLAFVLPILESLVNGPAKSKRKMGYGRSPSVLVLLPTRELAKQVAADFDAYGGSLGLSSCCLYGGDSYPVQEGKLKRGVDIVVGTPGRIKDHIERQNLDFSYLQFRVLDEADEMLRMGFVEDVELILGKVEDSTKVQTLLFSATLPSWVKNISNRFLKRDQKTIDLVGNDKMKASNSVRHIAIPCNKAAMARLIPDIISCYSSGGQTIIFAETKVQVSELSGLLDGSRALHGEIPQSQREVTLAGFRNGKFATLVATNVAARGLDINDVQLIIQCEPPREVEAYIHRSGRTGRAGNTGVAVTLYDSRKSSVSRIEKEAGIKFEHLAAPQPDEIARSGGMEAAEKVKQVCDSVVPAFLEAAKELLETSGLSAEVLLAKALAKTAGFTEIKKRSLLTSMENYVTLHLEAGKPIYSPSFVYGLLRRVLPDDKVEMIEGLSLTADKTGAVFDVKQSDLDLFIAGAQKSAGSMSLEVVKVMPKLQEREPLPQKRFGGGGRGNRFGGGGGNRFGGGGGRGRGGSGGRGQRY

SEQ ID NO: 27776 - protein, 657 aa, Arabidopsis thaliana
  peptide (1)..(657): Ceres Seq. ID no. 13491446
  misc_feature (95)..(313): Pfam Name: DEAD/DEAH box helicase Pfam Description: DEAD/DEAH box helicase
  misc_feature (9)..(655): Homolog of NCBI NO: 10764780 NR Description: RNA helicase II/Gu [Xenopus laevis]
  misc_feature (1)..(654): Homolog of NCBI NO: 34852522 NR Description: similar to Nucleolar RNA helicase II (Nucleolar
  misc_feature (1)..(656): Homolog of NCBI NO: 2135315 NR Description: RNA helicase Gu - human (fragment)
  misc_feature (1)..(656): Homolog of NCBI NO: 34879863 NR Description: similar to Nucleolar RNA helicase II (Nucleolar
  misc_feature (1)..(656): Homolog of NCBI NO: 26368308 NR Description: unnamed protein product [Mus musculus]
  misc_feature (1)..(656): Homolog of NCBI NO: 21410145 NR Description: Ddx21 protein [Mus musculus]
  misc_feature (1)..(656): Homolog of NCBI NO: 10092595 NR Description: DEAD/H (Asp-Glu-Ala-Asp/His) box polypeptide 21
  misc_feature (1)..(656): Homolog of NCBI NO: 13959325 NR Description: Nucleolar RNA helicase II (Nucleolar RNA helicase
  misc_feature (1)..(657): Homolog of NCBI NO: 7484683 NR Description: RNA helicase prh75 - spinach
  misc_feature (1)..(653): Homolog of NCBI NO: 7211427 NR Description: RNA helicase [Vigna radiata]
MKKKMALDTPELDSKKGKKEQKLKLSDSDEEESEKKKSKKKDKKRKASEEEDEVKSDSSSEKKKSSKKVKLGVEDVEVDNPNAVSKFRISAPLREKLKANGIEALFPIQASTFDMVLDGADLVGRARTGQGKTLAFVLPILESLVNGPAKSKRKMGYGRSPSVLVLLPTRELAKQVAADFDAYGGSLGLSSCCLYGGDSYPVQEGKLKRGVDIVVGTPGRIKDHIERQNLDFSYLQFRVLDEADEMLRMGFVEDVELILGKVEDSTKVQTLLFSATLPSWVKNISNRFLKRDQKTIDLVGNDKMKASNSVRHIAIPCNKAAMARLIPDIISCYSSGGQTIIFAETKVQVSELSGLLDGSRALHGEIPQSQREVTLAGFRNGKFATLVATNVAARGLDINDVQLIIQCEPPREVEAYIHRSGRTGRAGNTGVAVTLYDSRKSSVSRIEKEAGIKFEHLAAPQPDEIARSGGMEAAEKVKQVCDSVVPAFLEAAKELLETSGLSAEVLLAKALAKTAGFTEIKKRSLLTSMENYVTLHLEAGKPIYSPSFVYGLLRRVLPDDKVEMIEGLSLTADKTGAVFDVKQSDLDLFIAGAQKSAGSMSLEVVKVMPKLQEREPLPQKRFGGGGRGNRFGGGGGNRFGGGGGRGRGGSGGRGQRY

SEQ ID NO: 27777 - DNA, 705 bp, Arabidopsis thaliana
  misc_feature (1)..(705): Ceres Seq. ID no. 12580042
  misc_feature: MA Experiment ID: 108434 Result: Up-regulated in Transcription
  misc_feature: MA Experiment 108434 PARAMETER Experiment Name: At_Root_Tips_cDNA_P Parameter: Tissue Value: Root Tips
  misc_feature: MA Experiment ID: 108462 Result: Down-regulated in Transcription
  misc_feature: MA Experiment 108462 PARAMETER Experiment Name: At_Germinating_Seeds_cDNA_P Parameter: Age (day) Value: 2 vs. 0
  misc_feature: MA Experiment 108462 PARAMETER Experiment Name: At_Germinating_Seeds_cDNA_P Parameter: Tissue Value: Germinating Seeds
  misc_feature: MA Experiment ID: 108463 Result: Down-regulated in Transcription
  misc_feature: MA Experiment 108463 PARAMETER Experiment Name: At_Germinating_Seeds_cDNA_P Parameter: Age (day) Value: 3 vs. 0
  misc_feature: MA Experiment 108463 PARAMETER Experiment Name: At_Germinating_Seeds_cDNA_P Parameter: Tissue Value: Germinating Seeds
  misc_feature: MA Experiment ID: 108488 Result: Down-regulated in Transcription
  misc_feature: MA Experiment ID: 108572 Result: Down-regulated in Transcription
  misc_feature: MA Experiment 108572 PARAMETER Experiment Name: At_Drought_cDNA_P Parameter: Timepoint (hr) Value: 1
  misc_feature: MA Experiment 108572 PARAMETER Experiment Name: At_Drought_cDNA_P Parameter: Tissue Value: Aerial
  misc_feature: MA Experiment 108572 PARAMETER Experiment Name: At_Drought_cDNA_P Parameter: Treatment Value: Drought vs. No Drought
  misc_feature: MA Experiment ID: 108574 Result: Down-regulated in Transcription
  misc_feature: MA Experiment 108574 PARAMETER Experiment Name: At_Wounding__cDNA_P Parameter: Timepoint (hr) Value: 1
  misc_feature: MA Experiment 108574 PARAMETER Experiment Name: At_Wounding__cDNA_P Parameter: Tissue Value: Aerial
  misc_feature: MA Experiment 108574 PARAMETER Experiment Name: At_Wounding__cDNA_P Parameter: Treatment Value: Wounding vs. No Wounding
  misc_feature: MA Experiment ID: 108577 Result: Down-regulated in Transcription
  misc_feature: MA Experiment 108577 PARAMETER Experiment Name: At_42deg_Heat_cDNA_P Parameter: Temperature (deg C) Value: 42 vs. 22
  misc_feature: MA Experiment 108577 PARAMETER Experiment Name: At_42deg_Heat_cDNA_P Parameter: Timepoint (hr) Value: 6
  misc_feature: MA Experiment 108577 PARAMETER Experiment Name: At_42deg_Heat_cDNA_P Parameter: Tissue Value: Aerial
  misc_feature: MA Experiment ID: 108607 Result: Down-regulated in Transcription
  misc_feature: MA Experiment 108607 PARAMETER Experiment Name: At_100uM_ABA_cDNA_P Parameter: Timepoint (hr) Value: 4
  misc_feature: MA Experiment 108607 PARAMETER Experiment Name: At_100uM_ABA_cDNA_P Parameter: Tissue Value: Aerial
  misc_feature: MA Experiment 108607 PARAMETER Experiment Name: At_100uM_ABA_cDNA_P Parameter: Treatment Value: 100uM ABA vs. No Treatment
  misc_feature: MA Experiment ID: 20000069 Result: Up-regulated in Transcription
  misc_feature: MA Experiment 20000069 PARAMETER Experiment Name: At_100uM_ABA_Mutants_cDNA_P Parameter: Plant Line Value: CS23
  misc_feature: MA Experiment 20000069 PARAMETER Experiment Name: At_100uM_ABA_Mutants_cDNA_P Parameter: Timepoint (hr) Value: 6
  misc_feature: MA Experiment 20000069 PARAMETER Experiment Name: At_100uM_ABA_Mutants_cDNA_P Parameter: Tissue Value: Aerial
  misc_feature: MA Experiment 20000069 PARAMETER Experiment Name: At_100uM_ABA_Mutants_cDNA_P Parameter: Treatment Value: 100uM ABA vs. No Treatment
  misc_feature: MA Experiment ID: 20000070 Result: Up-regulated in Transcription
  misc_feature: MA Experiment 20000070 PARAMETER Experiment Name: At_100uM_ABA_Mutants_cDNA_P Parameter: Plant Line Value: CS24
  misc_feature: MA Experiment 20000070 PARAMETER Experiment Name: At_100uM_ABA_Mutants_cDNA_P Parameter: Timepoint (hr) Value: 6
  misc_feature: MA Experiment 20000070 PARAMETER Experiment Name: At_100uM_ABA_Mutants_cDNA_P Parameter: Tissue Value: Aerial
  misc_feature: MA Experiment 20000070 PARAMETER Experiment Name: At_100uM_ABA_Mutants_cDNA_P Parameter: Treatment Value: 100uM ABA vs. No Treatment
  misc_feature: MA Experiment ID: 20000072 Result: Up-regulated in Transcription
  misc_feature: MA Experiment 20000072 PARAMETER Experiment Name: At_100uM_ABA_Mutants_cDNA_P Parameter: Plant Line Value: CS8105
  misc_feature: MA Experiment 20000072 PARAMETER Experiment Name: At_100uM_ABA_Mutants_cDNA_P Parameter: Timepoint (hr) Value: 6
  misc_feature: MA Experiment 20000072 PARAMETER Experiment Name: At_100uM_ABA_Mutants_cDNA_P Parameter: Tissue Value: Aerial
  misc_feature: MA Experiment 20000072 PARAMETER Experiment Name: At_100uM_ABA_Mutants_cDNA_P Parameter: Treatment Value: 100uM ABA vs. No Treatment
  misc_feature: MA Experiment ID: 20000086 Result: Up-regulated in Transcription
  misc_feature: MA Experiment 20000086 PARAMETER Experiment Name: At_100uM_ABA_Mutants_cDNA_P Parameter: Plant Line Value: CS22
  misc_feature: MA Experiment 20000086 PARAMETER Experiment Name: At_100uM_ABA_Mutants_cDNA_P Parameter: Timepoint (hr) Value: 6
  misc_feature: MA Experiment 20000086 PARAMETER Experiment Name: At_100uM_ABA_Mutants_cDNA_P Parameter: Tissue Value: Aerial
  misc_feature: MA Experiment 20000086 PARAMETER Experiment Name: At_100uM_ABA_Mutants_cDNA_P Parameter: Treatment Value: 100uM ABA vs. No Treatment
  misc_feature: MA Experiment ID: 20000087 Result: Up-regulated in Transcription
  misc_feature: MA Experiment 20000087 PARAMETER Experiment Name: At_100uM_ABA_Mutants_cDNA_P Parameter: Plant Line Value: WS
  misc_feature: MA Experiment 20000087 PARAMETER Experiment Name: At_100uM_ABA_Mutants_cDNA_P Parameter: Timepoint (hr) Value: 6
  misc_feature: MA Experiment 20000087 PARAMETER Experiment Name: At_100uM_ABA_Mutants_cDNA_P Parameter: Tissue Value: Aerial
  misc_feature: MA Experiment 20000087 PARAMETER Experiment Name: At_100uM_ABA_Mutants_cDNA_P Parameter: Treatment Value: 100uM ABA vs. No Treatment
  misc_feature: MA Experiment ID: 20000088 Result: Up-regulated in Transcription
  misc_feature: MA Experiment 20000088 PARAMETER Experiment Name: At_100uM_ABA_Mutants_cDNA_P Parameter: Plant Line Value: Landsberg
  misc_feature: MA Experiment 20000088 PARAMETER Experiment Name: At_100uM_ABA_Mutants_cDNA_P Parameter: Timepoint (hr) Value: 6
  misc_feature: MA Experiment 20000088 PARAMETER Experiment Name: At_100uM_ABA_Mutants_cDNA_P Parameter: Tissue Value: Aerial
  misc_feature: MA Experiment 20000088 PARAMETER Experiment Name: At_100uM_ABA_Mutants_cDNA_P Parameter: Treatment Value: 100uM ABA vs. No Treatment
  misc_feature: MA Experiment ID: 20000089 Result: Up-regulated in Transcription
  misc_feature: MA Experiment ID: 20000090 Result: Up-regulated in Transcription
  misc_feature: MA Experiment ID: 20000117 Result: Up-regulated in Transcription
  misc_feature: MA Experiment 20000117 PARAMETER Experiment Name: At_100uM_ABA_Mutants_cDNA_P Parameter: Plant Line Value: Columbia
  misc_feature: MA Experiment 20000117 PARAMETER Experiment Name: At_100uM_ABA_Mutants_cDNA_P Parameter: Timepoint (hr) Value: 6
  misc_feature: MA Experiment 20000117 PARAMETER Experiment Name: At_100uM_ABA_Mutants_cDNA_P Parameter: Tissue Value: Aerial
  misc_feature: MA Experiment 20000117 PARAMETER Experiment Name: At_100uM_ABA_Mutants_cDNA_P Parameter: Treatment Value: 100uM ABA vs. No Treatment
  misc_feature: MA Experiment ID: 20000224 Result: Down-regulated in Transcription
acatctcactgctcactactctcactgtaatcccttagatcttcttttcaaatttcaatggcgtccggtgatgttgagtatcggtgcttcgttggaggtctagcatgggccactgatgacagagctcttgagactgccttcgctcaatacggcgacgttattgattccaagatcattaacgatcgtgagactggaagatcaaggggattcggattcgtcaccttcaaggatgagaaagccatgaaggatgcgattgagggaatgaacggacaagatctcgatggccgtagcatcactgttaacgaggctcagtcacgaggaagcggtggcggcggaggccaccgtggaggtggtggcggtggataccgcagcggcggtggtggaggttactccggtggaggtggtagctacggaggtggcggcggtagacgcgagggtggaggaggatacagcggcggcggcggttactcctcaagaggtggtggtggcggaagctacggtggtggaagacgtgagggaggaggaggatacggtggtggtgaaggaggaggttacggaggaagcggtggtggtggaggatggtaattcctttaattaggtttgggattaccaatgaatgttctctctctcgcttgttatgcttctacttggttttgtgtgttctctattttgttattcttccgttaatgtaatgaaagagttgtt

SEQ ID NO: 27778 - protein, 175 aa, Arabidopsis thaliana
  peptide (1)..(175): Ceres Seq. ID no. 12580043
  misc_feature (10)..(81): Pfam Name: RNA recognition motif. (a.k.a. RRM, RBD, or RNP domain) Pfam Description: RNA recognition motif. (a.k.a. RRM, RBD, or RNP
  misc_feature (1)..(175): Homolog of NCBI NO: 10799202 NR Description: glycine-rich RNA-binding protein [Sorghum bicolor]
  misc_feature (1)..(175): Homolog of NCBI NO: 544423 NR Description: Glycine-rich RNA-binding protein 2
  misc_feature (5)..(175): Homolog of NCBI NO: 544416 NR Description: Glycine-rich RNA-binding protein 10
  misc_feature (1)..(175): Homolog of NCBI NO: 34851124 NR Description: putative glycine-rich RNA-binding protein [Prunus
  misc_feature (5)..(175): Homolog of NCBI NO: 15235002 NR Description: glycine-rich RNA-binding protein 8 (GRP8)
  misc_feature (1)..(175): Homolog of NCBI NO: 30681492 NR Description: glycine-rich RNA-binding protein (AtGRP7)
  misc_feature (1)..(175): Homolog of NCBI NO: 1346180 NR Description: Glycine-rich RNA-binding protein GRP1A
  misc_feature (1)..(175): Homolog of NCBI NO: 1346181 NR Description: Glycine-rich RNA-binding protein GRP2A
  misc_feature (1)..(175): Homolog of NCBI NO: 15226605 NR Description: glycine-rich RNA binding protein AtGRP7
  misc_feature (1)..(175): Homolog of NCBI NO: 21553354 NR Description: glycine-rich RNA binding protein 7 [Arabidopsis
MASGDVEYRCFVGGLAWATDDRALETAFAQYGDVIDSKIINDRETGRSRGFGFVTFKDEKAMKDAIEGMNGQDLDGRSITVNEAQSRGSGGGGGHRGGGGGGYRSGGGGGYSGGGGSYGGGGGRREGGGGYSGGGGYSSRGGGGGSYGGGRREGGGGYGGGEGGGYGGSGGGGGW

SEQ ID NO: 27779 - protein, 114 aa, Arabidopsis thaliana
  peptide (1)..(114): Ceres Seq. ID no. 12580044
  misc_feature (27)..(112): Pfam Name: Herpesvirus large structural phosphoprotein UL32 Pfam Description: Herpesvirus large structural phosphoprotein UL32
  misc_feature (1)..(114): Homolog of NCBI NO: 10799202 NR Description: glycine-rich RNA-binding protein [Sorghum bicolor]
  misc_feature (1)..(114): Homolog of NCBI NO: 544423 NR Description: Glycine-rich RNA-binding protein 2
  misc_feature (1)..(114): Homolog of NCBI NO: 544416 NR Description: Glycine-rich RNA-binding protein 10
  misc_feature (1)..(114): Homolog of NCBI NO: 34851124 NR Description: putative glycine-rich RNA-binding protein [Prunus
  misc_feature (1)..(114): Homolog of NCBI NO: 15235002 NR Description: glycine-rich RNA-binding protein 8 (GRP8)
  misc_feature (1)..(114): Homolog of NCBI NO: 30681492 NR Description: glycine-rich RNA-binding protein (AtGRP7)
  misc_feature (1)..(114): Homolog of NCBI NO: 1346180 NR Description: Glycine-rich RNA-binding protein GRP1A
  misc_feature (1)..(114): Homolog of NCBI NO: 1346181 NR Description: Glycine-rich RNA-binding protein GRP2A
  misc_feature (1)..(114): Homolog of NCBI NO: 15226605 NR Description: glycine-rich RNA binding protein AtGRP7
  misc_feature (1)..(114): Homolog of NCBI NO: 21553354 NR Description: glycine-rich RNA binding protein 7 [Arabidopsis
MKDAIEGMNGQDLDGRSITVNEAQSRGSGGGGGHRGGGGGGYRSGGGGGYSGGGGSYGGGGGRREGGGGYSGGGGYSSRGGGGGSYGGGRREGGGGYGGGEGGGYGGSGGGGGW

SEQ ID NO: 27780 - protein, 107 aa, Arabidopsis thaliana
  peptide (1)..(107): Ceres Seq. ID no. 12580045
  misc_feature (20)..(105): Pfam Name: Herpesvirus large structural phosphoprotein UL32 Pfam Description: Herpesvirus large structural phosphoprotein UL32
  misc_feature (1)..(107): Homolog of NCBI NO: 10799202 NR Description: glycine-rich RNA-binding protein [Sorghum bicolor]
  misc_feature (1)..(107): Homolog of NCBI NO: 544423 NR Description: Glycine-rich RNA-binding protein 2
  misc_feature (1)..(107): Homolog of NCBI NO: 544416 NR Description: Glycine-rich RNA-binding protein 10
  misc_feature (1)..(107): Homolog of NCBI NO: 34851124 NR Description: putative glycine-rich RNA-binding protein [Prunus
  misc_feature (1)..(107): Homolog of NCBI NO: 15235002 NR Description: glycine-rich RNA-binding protein 8 (GRP8)
  misc_feature (1)..(107): Homolog of NCBI NO: 30681492 NR Description: glycine-rich RNA-binding protein (AtGRP7)
  misc_feature (1)..(107): Homolog of NCBI NO: 1346180 NR Description: Glycine-rich RNA-binding protein GRP1A
  misc_feature (1)..(107): Homolog of NCBI NO: 1346181 NR Description: Glycine-rich RNA-binding protein GRP2A
  misc_feature (1)..(107): Homolog of NCBI NO: 15226605 NR Description: glycine-rich RNA binding protein AtGRP7
  misc_feature (1)..(107): Homolog of NCBI NO: 21553354 NR Description: glycine-rich RNA binding protein 7 [Arabidopsis
MNGQDLDGRSITVNEAQSRGSGGGGGHRGGGGGGYRSGGGGGYSGGGGSYGGGGGRREGGGGYSGGGGYSSRGGGGGSYGGGRREGGGGYGGGEGGGYGGSGGGGGW

SEQ ID NO: 27781 - DNA, 1374 bp, Arabidopsis thaliana
  misc_feature (1)..(1374): Ceres Seq. ID no. 12348627
  misc_feature: MA Experiment ID: 108433 Result: Down-regulated in Transcription
  misc_feature: MA Experiment 108433 PARAMETER Experiment Name: At_rhl_Mutant2_cDNA_P Parameter: Age (day) Value: 7
  misc_feature: MA Experiment 108433 PARAMETER Experiment Name: At_rhl_Mutant2_cDNA_P Parameter: Organism Value: A. thaliana
  misc_feature: MA Experiment 108433 PARAMETER Experiment Name: At_rhl_Mutant2_cDNA_P Parameter: Plant Line Value: rhl Mutant vs. wt landsburg
  misc_feature: MA Experiment 108433 PARAMETER Experiment Name: At_rhl_Mutant2_cDNA_P Parameter: Tissue Value: Roots
  misc_feature: MA Experiment ID: 108434 Result: Up-regulated in Transcription
  misc_feature: MA Experiment 108434 PARAMETER Experiment Name: At_Root_Tips_cDNA_P Parameter: Tissue Value: Root Tips
  misc_feature: MA Experiment ID: 108572 Result: Up-regulated in Transcription
  misc_feature: MA Experiment 108572 PARAMETER Experiment Name: At_Drought_cDNA_P Parameter: Timepoint (hr) Value: 1
  misc_feature: MA Experiment 108572 PARAMETER Experiment Name: At_Drought_cDNA_P Parameter: Tissue Value: Aerial
  misc_feature: MA Experiment 108572 PARAMETER Experiment Name: At_Drought_cDNA_P Parameter: Treatment Value: Drought vs. No Drought
  misc_feature: MA Experiment ID: 108573 Result: Up-regulated in Transcription
  misc_feature: MA Experiment 108573 PARAMETER Experiment Name: At_Drought_cDNA_P Parameter: Timepoint (hr) Value: 6
  misc_feature: MA Experiment 108573 PARAMETER Experiment Name: At_Drought_cDNA_P Parameter: Tissue Value: Aerial
  misc_feature: MA Experiment 108573 PARAMETER Experiment Name: At_Drought_cDNA_P Parameter: Treatment Value: Drought vs. No Drought
  misc_feature: MA Experiment ID: 108577 Result: Down-regulated in Transcription
  misc_feature: MA Experiment 108577 PARAMETER Experiment Name: At_42deg_Heat_cDNA_P Parameter: Temperature (deg C) Value: 42 vs. 22
  misc_feature: MA Experiment 108577 PARAMETER Experiment Name: At_42deg_Heat_cDNA_P Parameter: Timepoint (hr) Value: 6
  misc_feature: MA Experiment 108577 PARAMETER Experiment Name: At_42deg_Heat_cDNA_P Parameter: Tissue Value: Aerial
  misc_feature: MA Experiment ID: 108594 Result: Down-regulated in Transcription
  misc_feature: MA Experiment 108594 PARAMETER Experiment Name: At_Ler-rhl_Root_cDNA_P Parameter: Plant Line Value: null
  misc_feature: MA Experiment ID: 108605 Result: Up-regulated in Transcription
  misc_feature: MA Experiment 108605 PARAMETER Experiment Name: At_100uM_ABA_cDNA_P Parameter: Timepoint (hr) Value: 6
  misc_feature: MA Experiment 108605 PARAMETER Experiment Name: At_100uM_ABA_cDNA_P Parameter: Tissue Value: Aerial
  misc_feature: MA Experiment 108605 PARAMETER Experiment Name: At_100uM_ABA_cDNA_P Parameter: Treatment Value: 100uM ABA vs. No Treatment
  misc_feature: MA Experiment ID: 108607 Result: Up-regulated in Transcription
  misc_feature: MA Experiment 108607 PARAMETER Experiment Name: At_100uM_ABA_cDNA_P Parameter: Timepoint (hr) Value: 4
  misc_feature: MA Experiment 108607 PARAMETER Experiment Name: At_100uM_ABA_cDNA_P Parameter: Tissue Value: Aerial
  misc_feature: MA Experiment 108607 PARAMETER Experiment Name: At_100uM_ABA_cDNA_P Parameter: Treatment Value: 100uM ABA vs. No Treatment
  misc_feature: MA Experiment ID: 20000169 Result: Up-regulated in Transcription
  misc_feature: MA Experiment 20000169 PARAMETER Experiment Name: At_100uM_ABA_P Parameter: Age (day) Value: 14
  misc_feature: MA Experiment 20000169 PARAMETER Experiment Name: At_100uM_ABA_P Parameter: Organism Value: A. thaliana
  misc_feature: MA Experiment 20000169 PARAMETER Experiment Name: At_100uM_ABA_P Parameter: Plant Line Value: WS
  misc_feature: MA Experiment 20000169 PARAMETER Experiment Name: At_100uM_ABA_P Parameter: Timepoint (hr) Value: 6
  misc_feature: MA Experiment 20000169 PARAMETER Experiment Name: At_100uM_ABA_P Parameter: Tissue Value: Aerial
  misc_feature: MA Experiment 20000169 PARAMETER Experiment Name: At_100uM_ABA_P Parameter: Treatment Value: 100uM ABA vs. No Treatment
  misc_feature: MA Experiment ID: 20000184 Result: Up-regulated in Transcription
  misc_feature: MA Experiment 20000184 PARAMETER Experiment Name: At_Shoots__P Parameter: Age (day) Value: 7
  misc_feature: MA Experiment 20000184 PARAMETER Experiment Name: At_Shoots__P Parameter: Tissue Value: Shoots vs. Whole Plant
  misc_feature: MA Experiment ID: 20000185 Result: Up-regulated in Transcription
  misc_feature: MA Experiment 20000185 PARAMETER Experiment Name: At_Roots__P Parameter: Age (day) Value: 7 vs. 21
  misc_feature: MA Experiment 20000185 PARAMETER Experiment Name: At_Roots__P Parameter: Organism Value: A. thaliana
  misc_feature: MA Experiment 20000185 PARAMETER Experiment Name: At_Roots__P Parameter: Tissue Value: Roots vs. Whole Plant
  misc_feature: MA Experiment ID: 20000234 Result: Up-regulated in Transcription
  misc_feature: MA Experiment 20000234 PARAMETER Experiment Name: At_Siliques_P Parameter: Age (day) Value: 21
  misc_feature: MA Experiment 20000234 PARAMETER Experiment Name: At_Siliques_P Parameter: Organism Value: A. thaliana
  misc_feature: MA Experiment 20000234 PARAMETER Experiment Name: At_Siliques_P Parameter: Plant Line Value: WS
  misc_feature: MA Experiment 20000234 PARAMETER Experiment Name: At_Siliques_P Parameter: Tissue Value: Less Than 5mm Siliques vs. Whole Plant
  misc_feature: MA Experiment ID: 20000264 Result: Up-regulated in Transcription
  misc_feature: MA Experiment 20000264 PARAMETER Experiment Name: At_Open_Flower_P Parameter: Age (day) Value: 21
  misc_feature: MA Experiment 20000264 PARAMETER Experiment Name: At_Open_Flower_P Parameter: Plant Line Value: WS
  misc_feature: MA Experiment 20000264 PARAMETER Experiment Name: At_Open_Flower_P Parameter: Tissue Value: Open Flower vs. Whole Plant
  misc_feature: MA Experiment ID: 20000265 Result: Up-regulated in Transcription
  misc_feature: MA Experiment 20000265 PARAMETER Experiment Name: At_Open_Flower_P Parameter: Age (day) Value: 21
  misc_feature: MA Experiment 20000265 PARAMETER Experiment Name: At_Open_Flower_P Parameter: Plant Line Value: WS
  misc_feature: MA Experiment 20000265 PARAMETER Experiment Name: At_Open_Flower_P Parameter: Tissue Value: Closed Flower vs. Whole Plant
  misc_feature: MA Experiment ID: 20000438 Result: Up-regulated in Transcription
  misc_feature: MA Experiment 20000438 PARAMETER Experiment Name: At_Shoots__P Parameter: Age (day) Value: 14
  misc_feature: MA Experiment 20000438 PARAMETER Experiment Name: At_Shoots__P Parameter: Tissue Value: Shoots vs. Whole Plant
  misc_feature: MA Experiment ID: 20000439 Result: Up-regulated in Transcription
  misc_feature: MA Experiment 20000439 PARAMETER Experiment Name: At_Roots__P Parameter: Age (day) Value: 14 vs. 21
  misc_feature: MA Experiment 20000439 PARAMETER Experiment Name: At_Roots__P Parameter: Organism Value: A. thaliana
  misc_feature: MA Experiment 20000439 PARAMETER Experiment Name: At_Roots__P Parameter: Tissue Value: Roots vs. Whole Plant
  misc_feature: MA Experiment ID: 20001248 Result: Down-regulated in Transcription
  misc_feature: MA Experiment 20001248 PARAMETER Experiment Name: At_Far-red-induction_P Parameter: Age (day) Value: 7
  misc_feature: MA Experiment 20001248 PARAMETER Experiment Name: At_Far-red-induction_P Parameter: Light Value: Far-red vs. White
  misc_feature: MA Experiment 20001248 PARAMETER Experiment Name: At_Far-red-induction_P Parameter: Organism Value: A. thaliana
  misc_feature: MA Experiment 20001248 PARAMETER Experiment Name: At_Far-red-induction_P Parameter: Plant Line Value: Columbia
  misc_feature: MA Experiment 20001248 PARAMETER Experiment Name: At_Far-red-induction_P Parameter: Timepoint (hr) Value: 4
  misc_feature: MA Experiment 20001248 PARAMETER Experiment Name: At_Far-red-induction_P Parameter: Tissue Value: Whole Plant
aacacaaagacaataaaattaatcaaaaataaacaaaggagagagacagaagaaacagagagagtagttaattccggtggttttctgctcatctacttctatccaccttcatcccttccgccccaaaattcaattctctcttcctttctctctctttctccttaaaaactctaactttactcatctcatctccaaagtctcaacctttcttctctaatggagatctgcacttacttcaaatcacaacccacttggctcctcattctcttcgttctggggtcaatctcaatcttcaaattcatcttcaccctcctcagatctttctacatctacttcctccgaccatccaaaaacctccgccgatacggttcatgggcaatcatcaccggaccaacagacggaatcggtaaagctttcgcctttcagttagcccagaaaggtcttaaccttatactcgttgctcgtaacccagacaagctcaaagatgtctctgattccatcagatctaagtatagtcaaactcagatcttgaccgttgtgatggatttctctggagatattgatgaaggtgtgaaacggactaaggagagtattgaaggattagatgttgggattttgattaataatgctggcatgtcttatccttatgctaagtattttcatgaggttgatgaagagttgatcaataacttgattaagatcaatgttgaaggaactactaaagttactcaagctgtgttgcctaatatgcttaagagtaagaaaggtgctattattaatatgggttctggtgctgctgctcttattccttcttatcctttttactctgtttatgctggtgctaaaacgtacgtggatcagttcacaaagtgtctacatgttgagtataagaagagtgggattgatgttcaatgccaggttcccttgtatgttgcaacaaagatgacaaaaataagaagagcatccttcttagttgcatcaccagagggttacgcaaaggcagcactgcgttttgtaggctatgaagcacaatgcacaccgtactggcctcacgctctcatgggtgcagttgtctctgcattgcccgaaagcgtttttgaatcatttaacatcaagagatgcctccagatccggaagaagggtctccaaaaagactccatgaagaaagaatgaatcttccaggtttaagttactaccaagaatttccttcttctgaagttgttggtttcttgaaaagcttctgttctgaatcttttgtaagacttgtactctttagttttctaagttttttatattttaagattaaaaaccctaacgtacacgaataatttacttcctctgtttctatttattaatttaagcagtgttgtattg

SEQ ID NO: 27782 - protein, 318 aa, Arabidopsis thaliana
  peptide (1)..(318): Ceres Seq. ID no. 12348628
  misc_feature (9)..(317): Homolog of NCBI NO: 38345332 NR Description: OSJNBa0081L15.5 [Oryza sativa (japonica
  misc_feature (6)..(317): Homolog of NCBI NO: 7489808 NR Description: probable beta-keto acyl reductase - maize
  misc_feature (6)..(317): Homolog of NCBI NO: 7489413 NR Description: probable b-keto acyl reductase (EC 1.1.-.-) -
  misc_feature (109)..(318): Homolog of NCBI NO: 23505781 NR Description: At1g67730/F12A21_31 [Arabidopsis thaliana]
  misc_feature (109)..(318): Homolog of NCBI NO: 13605726 NR Description: At1g67730/F12A21_31 [Arabidopsis thaliana]
  misc_feature (70)..(318): Homolog of NCBI NO: 2586125 NR Description: b-keto acyl reductase [Arabidopsis thaliana]
  misc_feature (1)..(318): Homolog of NCBI NO: 28565601 NR Description: putative 3-ketoacyl-CoA reductase 2 [Brassica
  misc_feature (34)..(318): Homolog of NCBI NO: 11072027 NR Description: F12A21.14 [Arabidopsis thaliana]
  misc_feature (1)..(318): Homolog of NCBI NO: 28565597 NR Description: putative 3-ketoacyl-CoA reductase 1 [Brassica
  misc_feature (1)..(318): Homolog of NCBI NO: 18408847 NR Description: Expressed protein
MEICTYFKSQPTWLLILFVLGSISIFKFIFTLLRSFYIYFLRPSKNLRRYGSWAIITGPTDGIGKAFAFQLAQKGLNLILVARNPDKLKDVSDSIRSKYSQTQILTVVMDFSGDIDEGVKRTKESIEGLDVGILINNAGMSYPYAKYFHEVDEELINNLIKINVEGTTKVTQAVLPNMLKSKKGAIINMGSGAAALIPSYPFYSVYAGAKTYVDQFTKCLHVEYKKSGIDVQCQVPLYVATKMTKIRRASFLVASPEGYAKAALRFVGYEAQCTPYWPHALMGAVVSALPESVFESFNIKRCLQIRKKGLQKDSMKKE

SEQ ID NO: 27783 - protein, 210 aa, Arabidopsis thaliana
  peptide (1)..(210): Ceres Seq. ID no. 12348629
  misc_feature (1)..(209): Homolog of NCBI NO: 38345332 NR Description: OSJNBa0081L15.5 [Oryza sativa (japonica
  misc_feature (1)..(209): Homolog of NCBI NO: 7489808 NR Description: probable beta-keto acyl reductase - maize
  misc_feature (1)..(209): Homolog of NCBI NO: 7489413 NR Description: probable b-keto acyl reductase (EC 1.1.-.-) -
  misc_feature (1)..(210): Homolog of NCBI NO: 23505781 NR Description: At1g67730/F12A21_31 [Arabidopsis thaliana]
  misc_feature (1)..(210): Homolog of NCBI NO: 13605726 NR Description: At1g67730/F12A21_31 [Arabidopsis thaliana]
  misc_feature (1)..(210): Homolog of NCBI NO: 2586125 NR Description: b-keto acyl reductase [Arabidopsis thaliana]
  misc_feature (1)..(210): Homolog of NCBI NO: 28565601 NR Description: putative 3-ketoacyl-CoA reductase 2 [Brassica
  misc_feature (1)..(210): Homolog of NCBI NO: 11072027 NR Description: F12A21.14 [Arabidopsis thaliana]
  misc_feature (1)..(210): Homolog of NCBI NO: 28565597 NR Description: putative 3-ketoacyl-CoA reductase 1 [Brassica
  misc_feature (1)..(210): Homolog of NCBI NO: 18408847 NR Description: Expressed protein
MDFSGDIDEGVKRTKESIEGLDVGILINNAGMSYPYAKYFHEVDEELINNLIKINVEGTTKVTQAVLPNMLKSKKGAIINMGSGAAALIPSYPFYSVYAGAKTYVDQFTKCLHVEYKKSGIDVQCQVPLYVATKMTKIRRASFLVASPEGYAKAALRFVGYEAQCTPYWPHALMGAVVSALPESVFESFNIKRCLQIRKKGLQKDSMKKE

SEQ ID NO: 27784 - protein, 179 aa, Arabidopsis thaliana
  peptide (1)..(179): Ceres Seq. ID no. 12348630
  misc_feature (1)..(178): Homolog of NCBI NO: 38345332 NR Description: OSJNBa0081L15.5 [Oryza sativa (japonica
  misc_feature (1)..(178): Homolog of NCBI NO: 7489808 NR Description: probable beta-keto acyl reductase - maize
  misc_feature (1)..(178): Homolog of NCBI NO: 7489413 NR Description: probable b-keto acyl reductase (EC 1.1.-.-) -
  misc_feature (1)..(179): Homolog of NCBI NO: 23505781 NR Description: At1g67730/F12A21_31 [Arabidopsis thaliana]
  misc_feature (1)..(179): Homolog of NCBI NO: 13605726 NR Description: At1g67730/F12A21_31 [Arabidopsis thaliana]
  misc_feature (1)..(179): Homolog of NCBI NO: 2586125 NR Description: b-keto acyl reductase [Arabidopsis thaliana]
  misc_feature (1)..(179): Homolog of NCBI NO: 28565601 NR Description: putative 3-ketoacyl-CoA reductase 2 [Brassica
  misc_feature (1)..(179): Homolog of NCBI NO: 11072027 NR Description: F12A21.14 [Arabidopsis thaliana]
  misc_feature (1)..(179): Homolog of NCBI NO: 28565597 NR Description: putative 3-ketoacyl-CoA reductase 1 [Brassica
  misc_feature (1)..(179): Homolog of NCBI NO: 18408847 NR Description: Expressed protein
MSYPYAKYFHEVDEELINNLIKINVEGTTKVTQAVLPNMLKSKKGAIINMGSGAAALIPSYPFYSVYAGAKTYVDQFTKCLHVEYKKSGIDVQCQVPLYVATKMTKIRRASFLVASPEGYAKAALRFVGYEAQCTPYWPHALMGAVVSALPESVFESFNIKRCLQIRKKGLQKDSMKKE

SEQ ID NO: 27785 - DNA, 1264 bp, Arabidopsis thaliana
  misc_feature (1)..(1264): Ceres Seq. ID no. 12330000
  misc_feature: MA Experiment ID: 108434 Result: Up-regulated in Transcription
  misc_feature: MA Experiment 108434 PARAMETER Experiment Name: At_Root_Tips_cDNA_P Parameter: Tissue Value: Root Tips
  misc_feature: MA Experiment ID: 108461 Result: Up-regulated in Transcription
  misc_feature: MA Experiment 108461 PARAMETER Experiment Name: At_Germinating_Seeds_cDNA_P Parameter: Age (day) Value: 1 vs. 0
  misc_feature: MA Experiment 108461 PARAMETER Experiment Name: At_Germinating_Seeds_cDNA_P Parameter: Tissue Value: Germinating Seeds
  misc_feature: MA Experiment ID: 108462 Result: Up-regulated in Transcription
  misc_feature: MA Experiment 108462 PARAMETER Experiment Name: At_Germinating_Seeds_cDNA_P Parameter: Age (day) Value: 2 vs. 0
  misc_feature: MA Experiment 108462 PARAMETER Experiment Name: At_Germinating_Seeds_cDNA_P Parameter: Tissue Value: Germinating Seeds
  misc_feature: MA Experiment ID: 108463 Result: Up-regulated in Transcription
  misc_feature: MA Experiment 108463 PARAMETER Experiment Name: At_Germinating_Seeds_cDNA_P Parameter: Age (day) Value: 3 vs. 0
  misc_feature: MA Experiment 108463 PARAMETER Experiment Name: At_Germinating_Seeds_cDNA_P Parameter: Tissue Value: Germinating Seeds
  misc_feature: MA Experiment ID: 108464 Result: Up-regulated in Transcription
  misc_feature: MA Experiment 108464 PARAMETER Experiment Name: At_Germinating_Seeds_cDNA_P Parameter: Age (day) Value: 4 vs. 0
  misc_feature: MA Experiment 108464 PARAMETER Experiment Name: At_Germinating_Seeds_cDNA_P Parameter: Tissue Value: Germinating Seeds
  misc_feature: MA Experiment ID: 108577 Result: Down-regulated in Transcription
  misc_feature: MA Experiment 108577 PARAMETER Experiment Name: At_42deg_Heat_cDNA_P Parameter: Temperature (deg C) Value: 42 vs. 22
  misc_feature: MA Experiment 108577 PARAMETER Experiment Name: At_42deg_Heat_cDNA_P Parameter: Timepoint (hr) Value: 6
  misc_feature: MA Experiment 108577 PARAMETER Experiment Name: At_42deg_Heat_cDNA_P Parameter: Tissue Value: Aerial
  misc_feature: MA Experiment ID: 20000111 Result: Down-regulated in Transcription
  misc_feature: MA Experiment 20000111 PARAMETER Experiment Name: At_42deg_Heat_cDNA_P Parameter: Temperature (deg C) Value: 42 vs. 22
  misc_feature: MA Experiment 20000111 PARAMETER Experiment Name: At_42deg_Heat_cDNA_P Parameter: Timepoint (hr) Value: 6
  misc_feature: MA Experiment 20000111 PARAMETER Experiment Name: At_42deg_Heat_cDNA_P Parameter: Tissue Value: Aerial
  misc_feature: MA Experiment ID: 20000113 Result: Down-regulated in Transcription
  misc_feature: MA Experiment 20000113 PARAMETER Experiment Name: At_42deg_Heat_cDNA_P Parameter: Temperature (deg C) Value: 42 vs. 22
  misc_feature: MA Experiment 20000113 PARAMETER Experiment Name: At_42deg_Heat_cDNA_P Parameter: Timepoint (hr) Value: 8
  misc_feature: MA Experiment 20000113 PARAMETER Experiment Name: At_42deg_Heat_cDNA_P Parameter: Tissue Value: Aerial
  misc_feature: MA Experiment ID: 20000144 Result: Down-regulated in Transcription
  misc_feature: MA Experiment 20000144 PARAMETER Experiment Name: At_42deg_Heat_cDNA_P Parameter: Temperature (deg C) Value: 42 vs. 22
  misc_feature: MA Experiment 20000144 PARAMETER Experiment Name: At_42deg_Heat_cDNA_P Parameter: Timepoint (hr) Value: 1
  misc_feature: MA Experiment 20000144 PARAMETER Experiment Name: At_42deg_Heat_cDNA_P Parameter: Tissue Value: Aerial
  misc_feature: MA Experiment ID: 20000171 Result: Down-regulated in Transcription
  misc_feature: MA Experiment 20000171 PARAMETER Experiment Name: At_42deg_Heat_P Parameter: Age (day) Value: 14
  misc_feature: MA Experiment 20000171 PARAMETER Experiment Name: At_42deg_Heat_P Parameter: Organism Value: A. thaliana
  misc_feature: MA Experiment 20000171 PARAMETER Experiment Name: At_42deg_Heat_P Parameter: Plant Line Value: WS
  misc_feature: MA Experiment 20000171 PARAMETER Experiment Name: At_42deg_Heat_P Parameter: Temperature (deg C) Value: 42 vs. 22
  misc_feature: MA Experiment 20000171 PARAMETER Experiment Name: At_42deg_Heat_P Parameter: Timepoint (hr) Value: 1
  misc_feature: MA Experiment 20000171 PARAMETER Experiment Name: At_42deg_Heat_P Parameter: Tissue Value: Aerial
  misc_feature: MA Experiment ID: 20000173 Result: Down-regulated in Transcription
  misc_feature: MA Experiment 20000173 PARAMETER Experiment Name: At_42deg_Heat_P Parameter: Age (day) Value: 14
  misc_feature: MA Experiment 20000173 PARAMETER Experiment Name: At_42deg_Heat_P Parameter: Organism Value: A. thaliana
  misc_feature: MA Experiment 20000173 PARAMETER Experiment Name: At_42deg_Heat_P Parameter: Plant Line Value: WS
  misc_feature: MA Experiment 20000173 PARAMETER Experiment Name: At_42deg_Heat_P Parameter: Temperature (deg C) Value: 42 vs. 22
  misc_feature: MA Experiment 20000173 PARAMETER Experiment Name: At_42deg_Heat_P Parameter: Timepoint (hr) Value: 6
  misc_feature: MA Experiment 20000173 PARAMETER Experiment Name: At_42deg_Heat_P Parameter: Tissue Value: Aerial
  misc_feature: MA Experiment ID: 20000180 Result: Up-regulated in Transcription
  misc_feature: MA Experiment 20000180 PARAMETER Experiment Name: At_Germinating_Seeds_P Parameter: Age (hr) Value: 24 vs. 0
  misc_feature: MA Experiment 20000180 PARAMETER Experiment Name: At_Germinating_Seeds_P Parameter: Tissue Value: Germinating Seeds
  misc_feature: MA Experiment ID: 20001906 Result: Down-regulated in Transcription
  misc_feature: MA Experiment 20001906 PARAMETER Experiment Name: At_Drought_Reproduction_P Parameter: Age (day) Value: 35
  misc_feature: MA Experiment 20001906 PARAMETER Experiment Name: At_Drought_Reproduction_P Parameter: Organism Value: A. thaliana
  misc_feature: MA Experiment 20001906 PARAMETER Experiment Name: At_Drought_Reproduction_P Parameter: Plant Line Value: WS
  misc_feature: MA Experiment 20001906 PARAMETER Experiment Name: At_Drought_Reproduction_P Parameter: Timepoint (day) Value: 5
  misc_feature: MA Experiment 20001906 PARAMETER Experiment Name: At_Drought_Reproduction_P Parameter: Tissue Value: Siliques
  misc_feature: MA Experiment 20001906 PARAMETER Experiment Name: At_Drought_Reproduction_P Parameter: Treatment Value: Drought vs. No Drought
gaccggatccgaataattggatccaccggatcggagggaaaaaaaacaaacccgtgacgccattaacgaaggtcgagcttgcttgacaccacacaatgcattctcctcgtaagctatttcacgcgcggtcatcactcgccacgcgccgatcaacggctcttgtcgtattaacttccctagctattggaatcgccggtttcacatttggactcgccgtaattcttataccgggtctccgattaaccggtcgtaattgcttgacgaacactcctccgaagacggtgcgagtcgtttgggacgtcgccggaaatagtaatggcgttgttagtggcgaaaagaagaggcataaggttatgggattcgttggtattcaaaccggatttggatctgctggccggagacgatcacttagaaagacatggatgccgtcagatccagaaggtcttcgacgtttggaagaatctacggggttagccatcaggtttatgataggaaaaacgaaaagtgaggagaaaatggctcagctcagaagagaaatcgcagagtatgatgacttcgtactgctagatatcgaagaggagtacagtaagcttccttacaaaactttggctttcttcaaagctgcgtacgcgctttatgattctgagttctatgtcaaagctgatgatgatatatacttgaggccagatcgactctctctgctattggcgaaagagcggagtcactctcagacgtacctaggatgcttgaaaaagggtccggttttcacagatcctaagctcaaatggtatgaaccattgtctcatctgctgggaaaagagtactttcttcatgcttatggcccgatttatgctctctctgctgatgtggtagccagtttggttgccctcaagaataacagtttcaggatgtttaacaacgaggacgtaacaataggtgcgtggatgctggcaatgaatgtcaaccacgagaaccatcacatcctttgcgaaccagaatgctcaccttcttctgttgctgtttgggacatccctaaatgctcaggtctttgtaacccagagaaaaggatgttggaacttcacaagcaagaaagctgctcgaaaagcccaactttgccatcagatgatgaatgatattatttctcttatcaaatgtctttataaacctcttctcagtggtcgaagctctatcacttgcagattcatttcttcgagcgaacctgcaacgagattatttcacatagattcaagtttagagttcactt

SEQ ID NO: 27786 - protein, 345 aa, Arabidopsis thaliana
  peptide (1)..(345): Ceres Seq. ID no. 12330001
  misc_feature (100)..(295): Pfam Name: Galactosyltransferase Pfam Description: Galactosyltransferase
  misc_feature (80)..(339): Homolog of NCBI NO: 15217544 NR Description: elicitor response protein, putative; protein id:
  misc_feature (72)..(336): Homolog of NCBI NO: 12323294 NR Description: putative (Avr9) elicitor response protein;
  misc_feature (56)..(329): Homolog of NCBI NO: 18395060 NR Description: Expressed protein
  misc_feature (235)..(344): Homolog of NCBI NO: 7487205 NR Description: hypothetical protein At2g26100 [imported] -
  misc_feature (2)..(230): Homolog of NCBI NO: 7487205 NR Description: hypothetical protein At2g26100 [imported] -
  misc_feature (141)..(345): Homolog of NCBI NO: 22553074 NR Description: beta 1,3-glycosyltransferase-like protein III
  misc_feature (2)..(344): Homolog of NCBI NO: 30683005 NR Description: galactosyltransferase family [Arabidopsis
  misc_feature (1)..(345): Homolog of NCBI NO: 15232447 NR Description: galactosyltransferase, putative
  misc_feature (1)..(345): Homolog of NCBI NO: 25405979 NR Description: protein F12M16.19 [imported] - Arabidopsis
  misc_feature (1)..(345): Homolog of NCBI NO: 30695469 NR Description: galactosyltransferase family [Arabidopsis
MHSPRKLFHARSSLATRRSTALVVLTSLAIGIAGFTFGLAVILIPGLRLTGRNCLTNTPPKTVRVVWDVAGNSNGVVSGEKKRHKVMGFVGIQTGFGSAGRRRSLRKTWMPSDPEGLRRLEESTGLAIRFMIGKTKSEEKMAQLRREIAEYDDFVLLDIEEEYSKLPYKTLAFFKAAYALYDSEFYVKADDDIYLRPDRLSLLLAKERSHSQTYLGCLKKGPVFTDPKLKWYEPLSHLLGKEYFLHAYGPIYALSADVVASLVALKNNSFRMFNNEDVTIGAWMLAMNVNHENHHILCEPECSPSSVAVWDIPKCSGLCNPEKRMLELHKQESCSKSPTLPSDDE

SEQ ID NO: 27787 - protein, 259 aa, Arabidopsis thaliana
  peptide (1)..(259): Ceres Seq. ID no. 12330002
  misc_feature (14)..(209): Pfam Name: Galactosyltransferase Pfam Description: Galactosyltransferase
  misc_feature (1)..(253): Homolog of NCBI NO: 15217544 NR Description: elicitor response protein, putative; protein id:
  misc_feature (1)..(250): Homolog of NCBI NO: 12323294 NR Description: putative (Avr9) elicitor response protein;
  misc_feature (1)..(243): Homolog of NCBI NO: 18395060 NR Description: Expressed protein
  misc_feature (149)..(258): Homolog of NCBI NO: 7487205 NR Description: hypothetical protein At2g26100 [imported] -
  misc_feature (1)..(144): Homolog of NCBI NO: 7487205 NR Description: hypothetical protein At2g26100 [imported] -
  misc_feature (55)..(259): Homolog of NCBI NO: 22553074 NR Description: beta 1,3-glycosyltransferase-like protein III
  misc_feature (1)..(258): Homolog of NCBI NO: 30683005 NR Description: galactosyltransferase family [Arabidopsis
  misc_feature (1)..(259): Homolog of NCBI NO: 15232447 NR Description: galactosyltransferase, putative
  misc_feature (1)..(259): Homolog of NCBI NO: 25405979 NR Description: protein F12M16.19 [imported] - Arabidopsis
  misc_feature (1)..(259): Homolog of NCBI NO: 30695469 NR Description: galactosyltransferase family [Arabidopsis
MGFVGIQTGFGSAGRRRSLRKTWMPSDPEGLRRLEESTGLAIRFMIGKTKSEEKMAQLRREIAEYDDFVLLDIEEEYSKLPYKTLAFFKAAYALYDSEFYVKADDDIYLRPDRLSLLLAKERSHSQTYLGCLKKGPVFTDPKLKWYEPLSHLLGKEYFLHAYGPIYALSADVVASLVALKNNSFRMFNNEDVTIGAWMLAMNVNHENHHILCEPECSPSSVAVWDIPKCSGLCNPEKRMLELHKQESCSKSPTLPSDDE

SEQ ID NO: 27788 - protein, 236 aa, Arabidopsis thaliana
  peptide (1)..(236): Ceres Seq. ID no. 12330003
  misc_feature (1)..(186): Pfam Name: Galactosyltransferase Pfam Description: Galactosyltransferase
  misc_feature (1)..(230): Homolog of NCBI NO: 15217544 NR Description: elicitor response protein, putative; protein id:
  misc_feature (1)..(227): Homolog of NCBI NO: 12323294 NR Description: putative (Avr9) elicitor response protein;
  misc_feature (1)..(220): Homolog of NCBI NO: 18395060 NR Description: Expressed protein
  misc_feature (126)..(235): Homolog of NCBI NO: 7487205 NR Description: hypothetical protein At2g26100 [imported] -
  misc_feature (1)..(121): Homolog of NCBI NO: 7487205 NR Description: hypothetical protein At2g26100 [imported] -
  misc_feature (32)..(236): Homolog of NCBI NO: 22553074 NR Description: beta 1,3-glycosyltransferase-like protein III
  misc_feature (1)..(235): Homolog of NCBI NO: 30683005 NR Description: galactosyltransferase family [Arabidopsis
  misc_feature (1)..(236): Homolog of NCBI NO: 15232447 NR Description: galactosyltransferase, putative
  misc_feature (1)..(236): Homolog of NCBI NO: 25405979 NR Description: protein F12M16.19 [imported] - Arabidopsis
  misc_feature (1)..(236): Homolog of NCBI NO: 30695469 NR Description: galactosyltransferase family [Arabidopsis
MPSDPEGLRRLEESTGLAIRFMIGKTKSEEKMAQLRREIAEYDDFVLLDIEEEYSKLPYKTLAFFKAAYALYDSEFYVKADDDIYLRPDRLSLLLAKERSHSQTYLGCLKKGPVFTDPKLKWYEPLSHLLGKEYFLHAYGPIYALSADVVASLVALKNNSFRMFNNEDVTIGAWMLAMNVNHENHHILCEPECSPSSVAVWDIPKCSGLCNPEKRMLELHKQESCSKSPTLPSDDE

SEQ ID NO: 27789 - DNA, 958 bp, Arabidopsis thaliana
  misc_feature (1)..(958): Ceres Seq. ID no. 12738824
  misc_feature: MA Experiment ID: 108434 Result: Down-regulated in Transcription
  misc_feature: MA Experiment 108434 PARAMETER Experiment Name: At_Root_Tips_cDNA_P Parameter: Tissue Value: Root Tips
  misc_feature: MA Experiment ID: 108462 Result: Up-regulated in Transcription
  misc_feature: MA Experiment 108462 PARAMETER Experiment Name: At_Germinating_Seeds_cDNA_P Parameter: Age (day) Value: 2 vs. 0
  misc_feature: MA Experiment 108462 PARAMETER Experiment Name: At_Germinating_Seeds_cDNA_P Parameter: Tissue Value: Germinating Seeds
  misc_feature: MA Experiment ID: 108463 Result: Up-regulated in Transcription
  misc_feature: MA Experiment 108463 PARAMETER Experiment Name: At_Germinating_Seeds_cDNA_P Parameter: Age (day) Value: 3 vs. 0
  misc_feature: MA Experiment 108463 PARAMETER Experiment Name: At_Germinating_Seeds_cDNA_P Parameter: Tissue Value: Germinating Seeds
  misc_feature: MA Experiment ID: 108464 Result: Up-regulated in Transcription
  misc_feature: MA Experiment 108464 PARAMETER Experiment Name: At_Germinating_Seeds_cDNA_P Parameter: Age (day) Value: 4 vs. 0
  misc_feature: MA Experiment 108464 PARAMETER Experiment Name: At_Germinating_Seeds_cDNA_P Parameter: Tissue Value: Germinating Seeds
  misc_feature: MA Experiment ID: 108488 Result: Down-regulated in Transcription
  misc_feature: MA Experiment ID: 108668 Result: Up-regulated in Transcription
  misc_feature: MA Experiment 108668 PARAMETER Experiment Name: At_2mM_SA_cDNA_P Parameter: Plant Line Value: WS
  misc_feature: MA Experiment 108668 PARAMETER Experiment Name: At_2mM_SA_cDNA_P Parameter: Timepoint (hr) Value: 6
  misc_feature: MA Experiment 108668 PARAMETER Experiment Name: At_2mM_SA_cDNA_P Parameter: Treatment Value: 2mM SA vs. No Treatment
  misc_feature: MA Experiment ID: 20000182 Result: Up-regulated in Transcription
  misc_feature: MA Experiment 20000182 PARAMETER Experiment Name: At_2mM_SA_P Parameter: Age (day) Value: 14
  misc_feature: MA Experiment 20000182 PARAMETER Experiment Name: At_2mM_SA_P Parameter: Organism Value: A. thaliana
  misc_feature: MA Experiment 20000182 PARAMETER Experiment Name: At_2mM_SA_P Parameter: Plant Line Value: WS
  misc_feature: MA Experiment 20000182 PARAMETER Experiment Name: At_2mM_SA_P Parameter: Timepoint (hr) Value: 6
  misc_feature: MA Experiment 20000182 PARAMETER Experiment Name: At_2mM_SA_P Parameter: Tissue Value: Aerial
  misc_feature: MA Experiment 20000182 PARAMETER Experiment Name: At_2mM_SA_P Parameter: Treatment Value: 2mM SA vs. No Treatment
aaatacaattgatcttcccccatctccaattcagatttggacagagtaacctgtgatcgtgtcggttggggtagaagagatcgaagtgggagcaaaatcatgatgaatcggctattcgggaaacccaagcaggaggctaatgctctccaaactttagacaagcttaacgagacgcttgagatgctagagaaaaaggagaaagtactcttgaagaaagctggtcagaggttgagaaggcaaaagaatactcccgggctaagaacaaacgagcggctatacagtgtttgaaaaggaagaggttatatgagggacaagtcgaacagcttgggaatttccagctccgtattcatgatcaaatgattatgttagaaggtgcaaaagcaacaaccgaaactgttgatgcattgaggagtggagcttctgcaatgaaggcaatgcagaaagcaacaaatattgatgatgtggataagaccatggacgagatcaatgagcaaaccgagaacatgaaacagatccaagaagcattggcgactccaatgggggcagcggctgacttcgacgaggatgagcttgcagcagagcttgatgaactagaaagtgaagagcttgaatcgcaacttctacagccggcaacaacagctcctccattgccttcagttccagtgcctgcagggcgtcaaccggctcgtcctgttccccagaagcggactgctgaggaagaagaactcgctgcattacaggctgagatggccctctaaggttattcacctctccgagcagagacatgtatgcattgatagacacgaacagacgatgtatataaggatctgaatcagattaattcggagcgaaaaacttttataatccccgtcgttaatgttatctgcaatttgagtgttcttcacataatttatcttttgtaatttttgtatctttttatgacactttttcctttggc

SEQ ID NO: 27790 - protein, 133 aa, Arabidopsis thaliana
  peptide (1)..(133): Ceres Seq. ID no. 12738825
  misc_feature (1)..(103): Pfam Name: SNF7 Pfam Description: SNF7
  misc_feature (1)..(127): Homolog of NCBI NO: 40548422 NR Description: Snf7 homologue associated with Alix 2 [Homo
  misc_feature (1)..(132): Homolog of NCBI NO: 29841209 NR Description: similar to GenBank Accession Number BC011429
  misc_feature (1)..(128): Homolog of NCBI NO: 28827795 NR Description: chromosome 20 open reading frame 178 [Homo
  misc_feature (1)..(128): Homolog of NCBI NO: 28077049 NR Description: RIKEN cDNA 2010012F05 [Mus musculus]
  misc_feature (1)..(129): Homolog of NCBI NO: 28277855 NR Description: Unknown (protein for MGC:56112) [Danio rerio]
  misc_feature (1)..(133): Homolog of NCBI NO: 19115183 NR Description: similar to yeast Snf7 protein involved in glucose
  misc_feature (1)..(133): Homolog of NCBI NO: 28850339 NR Description: similar to C56C10.3.p
  misc_feature (1)..(133): Homolog of NCBI NO: 15224854 NR Description: copia-like retroelement pol polyprotein
  misc_feature (1)..(133): Homolog of NCBI NO: 21594892 NR Description: copia-like retroelement pol polyprotein
  misc_feature (1)..(133): Homolog of NCBI NO: 15233464 NR Description: putative protein
MIMLEGAKATTETVDALRSGASAMKAMQKATNIDDVDKTMDEINEQTENMKQIQEALATPMGAAADFDEDELAAELDELESEELESQLLQPATTAPPLPSVPVPAGRQPARPVPQKRTAEEEELAALQAEMAL

SEQ ID NO: 27791 - protein, 131 aa, Arabidopsis thaliana
  peptide (1)..(131): Ceres Seq. ID no. 12738826
  misc_feature (1)..(101): Pfam Name: SNF7 Pfam Description: SNF7
  misc_feature (1)..(125): Homolog of NCBI NO: 40548422 NR Description: Snf7 homologue associated with Alix 2 [Homo
  misc_feature (1)..(130): Homolog of NCBI NO: 29841209 NR Description: similar to GenBank Accession Number BC011429
  misc_feature (1)..(126): Homolog of NCBI NO: 28827795 NR Description: chromosome 20 open reading frame 178 [Homo
  misc_feature (1)..(126): Homolog of NCBI NO: 28077049 NR Description: RIKEN cDNA 2010012F05 [Mus musculus]
  misc_feature (1)..(127): Homolog of NCBI NO: 28277855 NR Description: Unknown (protein for MGC:56112) [Danio rerio]
  misc_feature (1)..(131): Homolog of NCBI NO: 19115183 NR Description: similar to yeast Snf7 protein involved in glucose
  misc_feature (1)..(131): Homolog of NCBI NO: 28850339 NR Description: similar to C56C10.3.p
  misc_feature (1)..(131): Homolog of NCBI NO: 15224854 NR Description: copia-like retroelement pol polyprotein
  misc_feature (1)..(131): Homolog of NCBI NO: 21594892 NR Description: copia-like retroelement pol polyprotein
  misc_feature (1)..(131): Homolog of NCBI NO: 15233464 NR Description: putative protein
MLEGAKATTETVDALRSGASAMKAMQKATNIDDVDKTMDEINEQTENMKQIQEALATPMGAAADFDEDELAAELDELESEELESQLLQPATTAPPLPSVPVPAGRQPARPVPQKRTAEEEELAALQAEMAL

SEQ ID NO: 27792 - protein, 110 aa, Arabidopsis thaliana
  peptide (1)..(110): Ceres Seq. ID no. 12738827
  misc_feature (1)..(80): Pfam Name: SNF7 Pfam Description: SNF7
  misc_feature (1)..(104): Homolog of NCBI NO: 40548422 NR Description: Snf7 homologue associated with Alix 2 [Homo
  misc_feature (1)..(109): Homolog of NCBI NO: 29841209 NR Description: similar to GenBank Accession Number BC011429
  misc_feature (1)..(105): Homolog of NCBI NO: 28827795 NR Description: chromosome 20 open reading frame 178 [Homo
  misc_feature (1)..(105): Homolog of NCBI NO: 28077049 NR Description: RIKEN cDNA 2010012F05 [Mus musculus]
  misc_feature (1)..(106): Homolog of NCBI NO: 28277855 NR Description: Unknown (protein for MGC:56112) [Danio rerio]
  misc_feature (1)..(110): Homolog of NCBI NO: 19115183 NR Description: similar to yeast Snf7 protein involved in glucose
  misc_feature (1)..(110): Homolog of NCBI NO: 28850339 NR Description: similar to C56C10.3.p
  misc_feature (1)..(110): Homolog of NCBI NO: 15224854 NR Description: copia-like retroelement pol polyprotein
  misc_feature (1)..(110): Homolog of NCBI NO: 21594892 NR Description: copia-like retroelement pol polyprotein
  misc_feature (1)..(110): Homolog of NCBI NO: 15233464 NR Description: putative protein
MKAMQKATNIDDVDKTMDEINEQTENMKQIQEALATPMGAAADFDEDELAAELDELESEELESQLLQPATTAPPLPSVPVPAGRQPARPVPQKRTAEEEELAALQAEMAL

SEQ ID NO: 27793 - DNA, 797 bp, Arabidopsis thaliana
  misc_feature (1)..(797): Ceres Seq. ID no. 12331684
  misc_feature: MA Experiment ID: 108434 Result: Up-regulated in Transcription
  misc_feature: MA Experiment 108434 PARAMETER Experiment Name: At_Root_Tips_cDNA_P Parameter: Tissue Value: Root Tips
  misc_feature: MA Experiment ID: 108463 Result: Down-regulated in Transcription
  misc_feature: MA Experiment 108463 PARAMETER Experiment Name: At_Germinating_Seeds_cDNA_P Parameter: Age (day) Value: 3 vs. 0
  misc_feature: MA Experiment 108463 PARAMETER Experiment Name: At_Germinating_Seeds_cDNA_P Parameter: Tissue Value: Germinating Seeds
  misc_feature: MA Experiment ID: 108668 Result: Up-regulated in Transcription
  misc_feature: MA Experiment 108668 PARAMETER Experiment Name: At_2mM_SA_cDNA_P Parameter: Plant Line Value: WS
  misc_feature: MA Experiment 108668 PARAMETER Experiment Name: At_2mM_SA_cDNA_P Parameter: Timepoint (hr) Value: 6
  misc_feature: MA Experiment 108668 PARAMETER Experiment Name: At_2mM_SA_cDNA_P Parameter: Treatment Value: 2mM SA vs. No Treatment
  misc_feature: MA Experiment ID: 20000090 Result: Up-regulated in Transcription
  misc_feature: MA Experiment ID: 20000224 Result: Down-regulated in Transcription
  misc_feature: MA Experiment ID: 20000794 Result: Down-regulated in Transcription
  misc_feature: MA Experiment 20000794 PARAMETER Experiment Name: At_Petals_P Parameter: Age (day) Value: 23-25 days
  misc_feature: MA Experiment 20000794 PARAMETER Experiment Name: At_Petals_P Parameter: Plant Line Value: WS
  misc_feature: MA Experiment 20000794 PARAMETER Experiment Name: At_Petals_P Parameter: Tissue Value: Petals vs. Whole plant
agaccgccgcgtctttgtgtatatcgcctccacagatctaatcgctaaagtcatcgtcgtcgtctcttctctcaaaatcaaaaaggttgttataaaaatggctgaggcaacgtctgctttgaggaagcctgtgttcacaaaggttaatgagttgagaccaggaaccaatggccactctctgaatgtgaaagttgtcaacacgaagatggtgatgcagagaggaggaggtcgtcccatgggtcctcagtcacgtcagatgcggattgccgaatgcttagttggtgatgagactggaatcataatctttactgcaagaaatgaccaagtggatatgatgaaagaaggcagtgtagtgactctgcgtaatgcgaagatcgacatgtacaagggttctatgaggcttgcagttgatagatggggacgtgttgaagttgcagaggagcccacagacatcaccgtgaaggatgataacaatctttcgctgatcgagtatgagcttgtgagcgtcgaaacttgatatggttcctccacaaacgaaaacagagcgactcaaaaaaagacttacgttctagttggagaaagcctctttggtttgggtttgagtcttttttatgtactatccggcttgcctctgatctactgttcttgttttgaaaatcaggttgccgtctttttgtagattgattctctatttaaatatcatgggatgatctttctcttgttttagtttttgttctcgtcttttttccttggaaacaaattattataaagacatactactttgtactttcacatcc

SEQ ID NO: 27794 - protein, 171 aa, Arabidopsis thaliana
  peptide (1)..(171): Ceres Seq. ID no. 12331685
  misc_feature (34)..(169): Homolog of NCBI NO: 24413970 NR Description: contains EST AU181579(C50456)~similar to Oryza
  misc_feature (33)..(169): Homolog of NCBI NO: 15235304 NR Description: putative protein
  misc_feature (39)..(169): Homolog of NCBI NO: 34904470 NR Description: OSJNBa0086P08.14 [Oryza sativa (japonica
  misc_feature (41)..(169): Homolog of NCBI NO: 18403397 NR Description: Expressed protein
  misc_feature (34)..(171): Homolog of NCBI NO: 34909622 NR Description: P0435B05.31 [Oryza sativa (japonica
  misc_feature (33)..(169): Homolog of NCBI NO: 18395285 NR Description: expressed protein
  misc_feature (33)..(171): Homolog of NCBI NO: 18391179 NR Description: expressed protein
  misc_feature (109)..(171): Homolog of NCBI NO: 6573753 NR Description: F20B24.1 [Arabidopsis thaliana]
  misc_feature (28)..(108): Homolog of NCBI NO: 6573753 NR Description: F20B24.1 [Arabidopsis thaliana]
  misc_feature (28)..(171): Homolog of NCBI NO: 30681801 NR Description: expressed protein [Arabidopsis thaliana]
DRRVFVYIASTDLIAKVIVVVSSLKIKKVVIKMAEATSALRKPVFTKVNELRPGTNGHSLNVKVVNTKMVMQRGGGRPMGPQSRQMRIAECLVGDETGIIIFTARNDQVDMMKEGSVVTLRNAKIDMYKGSMRLAVDRWGRVEVAEEPTDITVKDDNNLSLIEYELVSVET

SEQ ID NO: 27795 - protein, 139 aa, Arabidopsis thaliana
  peptide (1)..(139): Ceres Seq. ID no. 12331686
  misc_feature (2)..(137): Homolog of NCBI NO: 24413970 NR Description: contains EST AU181579(C50456)~similar to Oryza
  misc_feature (1)..(137): Homolog of NCBI NO: 15235304 NR Description: putative protein
  misc_feature (7)..(137): Homolog of NCBI NO: 34904470 NR Description: OSJNBa0086P08.14 [Oryza sativa (japonica
  misc_feature (9)..(137): Homolog of NCBI NO: 18403397 NR Description: Expressed protein
  misc_feature (2)..(139): Homolog of NCBI NO: 34909622 NR Description: P0435B05.31 [Oryza sativa (japonica
  misc_feature (1)..(137): Homolog of NCBI NO: 18395285 NR Description: expressed protein
  misc_feature (1)..(139): Homolog of NCBI NO: 18391179 NR Description: expressed protein
  misc_feature (77)..(139): Homolog of NCBI NO: 6573753 NR Description: F20B24.1 [Arabidopsis thaliana]
  misc_feature (1)..(76): Homolog of NCBI NO: 6573753 NR Description: F20B24.1 [Arabidopsis thaliana]
  misc_feature (1)..(139): Homolog of NCBI NO: 30681801 NR Description: expressed protein [Arabidopsis thaliana]
MAEATSALRKPVFTKVNELRPGTNGHSLNVKVVNTKMVMQRGGGRPMGPQSRQMRIAECLVGDETGIIIFTARNDQVDMMKEGSVVTLRNAKIDMYKGSMRLAVDRWGRVEVAEEPTDITVKDDNNLSLIEYELVSVET

SEQ ID NO: 27796 - protein, 103 aa, Arabidopsis thaliana
  peptide (1)..(103): Ceres Seq. ID no. 12331687
  misc_feature (1)..(101): Homolog of NCBI NO: 24413970 NR Description: contains EST AU181579(C50456)~similar to Oryza
  misc_feature (1)..(101): Homolog of NCBI NO: 15235304 NR Description: putative protein
  misc_feature (1)..(101): Homolog of NCBI NO: 34904470 NR Description: OSJNBa0086P08.14 [Oryza sativa (japonica
  misc_feature (1)..(101): Homolog of NCBI NO: 18403397 NR Description: Expressed protein
  misc_feature (1)..(103): Homolog of NCBI NO: 34909622 NR Description: P0435B05.31 [Oryza sativa (japonica
  misc_feature (1)..(101): Homolog of NCBI NO: 18395285 NR Description: expressed protein
  misc_feature (1)..(103): Homolog of NCBI NO: 18391179 NR Description: expressed protein
  misc_feature (41)..(103): Homolog of NCBI NO: 6573753 NR Description: F20B24.1 [Arabidopsis thaliana]
  misc_feature (1)..(40): Homolog of NCBI NO: 6573753 NR Description: F20B24.1 [Arabidopsis thaliana]
  misc_feature (1)..(103): Homolog of NCBI NO: 30681801 NR Description: expressed protein [Arabidopsis thaliana]
MVMQRGGGRPMGPQSRQMRIAECLVGDETGIIIFTARNDQVDMMKEGSVVTLRNAKIDMYKGSMRLAVDRWGRVEVAEEPTDITVKDDNNLSLIEYELVSVET

SEQ ID NO: 27797 - DNA, 1169 bp, Arabidopsis thaliana
  misc_feature (1)..(1169): Ceres Seq. ID no. 12579866
  misc_feature: MA Experiment ID: 108434 Result: Down-regulated in Transcription
  misc_feature: MA Experiment 108434 PARAMETER Experiment Name: At_Root_Tips_cDNA_P Parameter: Tissue Value: Root Tips
  misc_feature: MA Experiment ID: 108469 Result: Up-regulated in Transcription
  misc_feature: MA Experiment ID: 20000030 Result: Down-regulated in Transcription
  misc_feature: MA Experiment 20000030 PARAMETER Experiment Name: At_CS6630_Roots_cDNA_P Parameter: Plant Line Value: CS6630 vs. WS
  misc_feature: MA Experiment 20000030 PARAMETER Experiment Name: At_CS6630_Roots_cDNA_P Parameter: Tissue Value: Roots
  misc_feature: MA Experiment ID: 20000069 Result: Up-regulated in Transcription
  misc_feature: MA Experiment 20000069 PARAMETER Experiment Name: At_100uM_ABA_Mutants_cDNA_P Parameter: Plant Line Value: CS23
  misc_feature: MA Experiment 20000069 PARAMETER Experiment Name: At_100uM_ABA_Mutants_cDNA_P Parameter: Timepoint (hr) Value: 6
  misc_feature: MA Experiment 20000069 PARAMETER Experiment Name: At_100uM_ABA_Mutants_cDNA_P Parameter: Tissue Value: Aerial
  misc_feature: MA Experiment 20000069 PARAMETER Experiment Name: At_100uM_ABA_Mutants_cDNA_P Parameter: Treatment Value: 100uM ABA vs. No Treatment
  misc_feature: MA Experiment ID: 20000090 Result: Up-regulated in Transcription
  misc_feature: MA Experiment ID: 20000224 Result: Down-regulated in Transcription
  misc_feature: MA Experiment ID: 20000314 Result: Down-regulated in Transcription
  misc_feature: MA Experiment 20000314 PARAMETER Experiment Name: At_14day_Shoots-Roots_Sub_P Parameter: Age (day) Value: 14
  misc_feature: MA Experiment 20000314 PARAMETER Experiment Name: At_14day_Shoots-Roots_Sub_P Parameter: Organism Value: A. thaliana
  misc_feature: MA Experiment 20000314 PARAMETER Experiment Name: At_14day_Shoots-Roots_Sub_P Parameter: Plant Line Value: WS
  misc_feature: MA Experiment 20000314 PARAMETER Experiment Name: At_14day_Shoots-Roots_Sub_P Parameter: Tissue Value: Roots vs. Whole Plant
  misc_feature: MA Experiment ID: 20000315 Result: Down-regulated in Transcription
  misc_feature: MA Experiment 20000315 PARAMETER Experiment Name: At_14day_Shoots-Roots_Sub_P Parameter: Age (day) Value: 14
  misc_feature: MA Experiment 20000315 PARAMETER Experiment Name: At_14day_Shoots-Roots_Sub_P Parameter: Organism Value: A. thaliana
  misc_feature: MA Experiment 20000315 PARAMETER Experiment Name: At_14day_Shoots-Roots_Sub_P Parameter: Plant Line Value: WS
  misc_feature: MA Experiment 20000315 PARAMETER Experiment Name: At_14day_Shoots-Roots_Sub_P Parameter: Tissue Value: Shoots vs. Whole Plant
  misc_feature: MA Experiment ID: 20000347 Result: Up-regulated in Transcription
  misc_feature: MA Experiment 20000347 PARAMETER Experiment Name: At_2mM_SA_Sub_P Parameter: Age (day) Value: 14
  misc_feature: MA Experiment 20000347 PARAMETER Experiment Name: At_2mM_SA_Sub_P Parameter: Organism Value: A. thaliana
  misc_feature: MA Experiment 20000347 PARAMETER Experiment Name: At_2mM_SA_Sub_P Parameter: Plant Line Value: WS
  misc_feature: MA Experiment 20000347 PARAMETER Experiment Name: At_2mM_SA_Sub_P Parameter: Timepoint (hr) Value: 6
  misc_feature: MA Experiment 20000347 PARAMETER Experiment Name: At_2mM_SA_Sub_P Parameter: Tissue Value: Aerial
  misc_feature: MA Experiment 20000347 PARAMETER Experiment Name: At_2mM_SA_Sub_P Parameter: Treatment Value: 2mM SA vs. No Treatment
  misc_feature: MA Experiment ID: 20000355 Result: Down-regulated in Transcription
  misc_feature: MA Experiment 20000355 PARAMETER Experiment Name: At_Siliques_Sub_P Parameter: Age (day) Value: 21
  misc_feature: MA Experiment 20000355 PARAMETER Experiment Name: At_Siliques_Sub_P Parameter: Organism Value: A. thaliana
  misc_feature: MA Experiment 20000355 PARAMETER Experiment Name: At_Siliques_Sub_P Parameter: Plant Line Value: WS
  misc_feature: MA Experiment 20000355 PARAMETER Experiment Name: At_Siliques_Sub_P Parameter: Tissue Value: Less Than 5mm Siliques vs. Whole Plant
  misc_feature: MA Experiment ID: 20000440 Result: Down-regulated in Transcription
  misc_feature: MA Experiment 20000440 PARAMETER Experiment Name: At_Closed-Flower__Sub_P Parameter: Tissue Value: Closed Flower vs. Whole Plant
acgcggcacatagattattctctccaagagaaaaaaatgggtcaagctttgggttgtattcaagttgatcagtcgaatgtagcaatcaaagagacttttgggaagtttgacgaagttcttgagccgggttgtcactgtttgccatggtgtttgggaagtcaagtcgctggtcacctttctttacgtgttcaacagctcgatgttcgctgcgagacaaagactaaggataatgtgtttgtcacggttgttgcttccattcaataccgtgccttagcggagagtgctcaagatgctttttacaagctcagcaacacaaggaatcagattcaagcttatgtctttgatgtgatccgagcaagtgtacctaagctggatctagactctacctttgagcaaaagaatgacattgcaaaaaccgttgagactgagctcgaaaaggctatgtcgcattacggatatgagattgttcagacactgattgtggatatcgagcctgatgtgcatgtcaagagggcaatgaatgagatcaatgctgcttctagaatgagagaggcagcgagtgagaaagctgaggcagagaaaattctgcagatcaagcgtgctgagggagaagctgaatcgaaatacctttcaggtatgggtatagcccgtcagagacaagccattgtggatggtctgaggaacagcgtactcgccttctctgagtctgttccaggaacatcttccaaagacgtgatggatatggttcttgtgactcagtactttgacacattgaaggaaattggtgcttcttcgaagtcaaactcggtgttcataccgcacggtccaggcgctgttagggacattgcttcacagatcagggatggtcttcttcagggtaactctgctgctgagtagagaaatgtctcaaagtacaaaaaggctttttcagggttttagagttgtgttgctacttgcttactcagtttatcttttagcggtttgctctatatgatgggttcttaaatttcttatcgtttctctcttctaggcttgtggacttgatccattgtcttgttttctggtggtttgtggatagagtttgggcttgaaaaacatccgagttattttgggttttaatgtcattattaatgtttaatacgacagtggttaaagaatttgctaacggc

SEQ ID NO: 27798 - protein, 298 aa, Arabidopsis thaliana
  peptide (1)..(298): Ceres Seq. ID no. 12579867
  misc_feature (13)..(294): Homolog of NCBI NO: 13194676 NR Description: hypersensitivity-induced response-like protein
  misc_feature (13)..(294): Homolog of NCBI NO: 7716468 NR Description: hypersensitive-induced response protein [Zea mays]
  misc_feature (13)..(294): Homolog of NCBI NO: 9998903 NR Description: putative membrane protein [Zea mays]
  misc_feature (13)..(295): Homolog of NCBI NO: 28476864 NR Description: hypersensitive-induced reaction protein 2
  misc_feature (13)..(292): Homolog of NCBI NO: 14150732 NR Description: hypersensitive-induced response protein [Oryza
  misc_feature (13)..(293): Homolog of NCBI NO: 23345042 NR Description: hypersensitive-induced reaction protein 1
  misc_feature (13)..(296): Homolog of NCBI NO: 15241939 NR Description: putative protein
  misc_feature (13)..(294): Homolog of NCBI NO: 7716466 NR Description: hypersensitive-induced response protein [Zea mays]
  misc_feature (13)..(296): Homolog of NCBI NO: 3928150 NR Description: hypothetical protein [Cicer arietinum]
  misc_feature (13)..(298): Homolog of NCBI NO: 15222481 NR Description: unknown protein
TRHIDYSLQEKKMGQALGCIQVDQSNVAIKETFGKFDEVLEPGCHCLPWCLGSQVAGHLSLRVQQLDVRCETKTKDNVFVTVVASIQYRALAESAQDAFYKLSNTRNQIQAYVFDVIRASVPKLDLDSTFEQKNDIAKTVETELEKAMSHYGYEIVQTLIVDIEPDVHVKRAMNEINAASRMREAASEKAEAEKILQIKRAEGEAESKYLSGMGIARQRQAIVDGLRNSVLAFSESVPGTSSKDVMDMVLVTQYFDTLKEIGASSKSNSVFIPHGPGAVRDIASQIRDGLLQGNSAAE

SEQ ID NO: 27799 - protein, 286 aa, Arabidopsis thaliana; identical to SEQ ID NO: 23094
  peptide (1)..(286): Ceres Seq. ID no. 12579868
  misc_feature (1)..(282): Homolog of NCBI NO: 13194676 NR Description: hypersensitivity-induced response-like protein
  misc_feature (1)..(282): Homolog of NCBI NO: 7716468 NR Description: hypersensitive-induced response protein [Zea mays]
  misc_feature (1)..(282): Homolog of NCBI NO: 9998903 NR Description: putative membrane protein [Zea mays]
  misc_feature (1)..(283): Homolog of NCBI NO: 28476864 NR Description: hypersensitive-induced reaction protein 2
  misc_feature (1)..(280): Homolog of NCBI NO: 14150732 NR Description: hypersensitive-induced response protein [Oryza
  misc_feature (1)..(281): Homolog of NCBI NO: 23345042 NR Description: hypersensitive-induced reaction protein 1
  misc_feature (1)..(284): Homolog of NCBI NO: 15241939 NR Description: putative protein
  misc_feature (1)..(282): Homolog of NCBI NO: 7716466 NR Description: hypersensitive-induced response protein [Zea mays]
  misc_feature (1)..(284): Homolog of NCBI NO: 3928150 NR Description: hypothetical protein [Cicer arietinum]
  misc_feature (1)..(286): Homolog of NCBI NO: 15222481 NR Description: unknown protein

SEQ ID NO: 27800 - protein, 151 aa, Arabidopsis thaliana; identical to SEQ ID NO: 23095
  peptide (1)..(151): Ceres Seq. ID no. 12579869
  misc_feature (1)..(147): Homolog of NCBI NO: 13194676 NR Description: hypersensitivity-induced response-like protein
  misc_feature (1)..(147): Homolog of NCBI NO: 7716468 NR Description: hypersensitive-induced response protein [Zea mays]
  misc_feature (1)..(147): Homolog of NCBI NO: 9998903 NR Description: putative membrane protein [Zea mays]
  misc_feature (1)..(148): Homolog of NCBI NO: 28476864 NR Description: hypersensitive-induced reaction protein 2
  misc_feature (1)..(145): Homolog of NCBI NO: 14150732 NR Description: hypersensitive-induced response protein [Oryza
  misc_feature (1)..(146): Homolog of NCBI NO: 23345042 NR Description: hypersensitive-induced reaction protein 1
  misc_feature (1)..(149): Homolog of NCBI NO: 15241939 NR Description: putative protein
  misc_feature (1)..(147): Homolog of NCBI NO: 7716466 NR Description: hypersensitive-induced response protein [Zea mays]
  misc_feature (1)..(149): Homolog of NCBI NO: 3928150 NR Description: hypothetical protein [Cicer arietinum]
  misc_feature (1)..(151): Homolog of NCBI NO: 15222481 NR Description: unknown protein

SEQ ID NO: 27801 - DNA, 802 bp, Arabidopsis thaliana
  misc_feature (1)..(802): Ceres Seq. ID no. 12675009
  misc_feature: MA Experiment ID: 108595 Result: Down-regulated in Transcription
  misc_feature: MA Experiment 108595 PARAMETER Experiment Name: At_Ler-pi_Ovule_cDNA_P Parameter: Plant Line Value: null
  misc_feature: MA Experiment ID: 20000224 Result: Down-regulated in Transcription
  misc_feature: MA Experiment ID: 20000227 Result: Down-regulated in Transcription
  misc_feature: MA Experiment 20000227 PARAMETER Experiment Name: At_Root-Tips-vs-Tops_P Parameter: Tissue Value: Root Tips vs. Root Tops
atgattaatgtctgaaaaatttgatatttgaagcgaatcaacaacaacagtcgggttcgtgaaaaaaaaagatttgatcggctaaacttggtcgctttcaggtttatcgtggaaggacttgtcaatggcagacgtacctggatacctgcgcacttgtttggatatggggaagatagctttcttagcaatccttgtatctacagggattgtgttgcagattctggcttgtgctctgttcaataactggtggccaatgctaagtgttataatgtatgtgctcctcccaatgcctttgctcttctttggtggatcagacagtacatctctattcaacgagtcagataatagttggatcaatgcagccaagttcttgactggtgcatcagcagttggaagcgtcgcgataccatcgattctaaaacacgccggactcatcggttggggcgcattagcccttgatctctcatcctacgttgtcttcctcgtggctattttgggttacatttgcataggagatgccagtgacaactattacagctacatttaaaaagacacacacaaattcatcatcatttgtttaaacctcaacaaagtctcagccttttatcacttccccgttcgattgatgcttcgaaacgaaaacatcttgtttctatggaatgactcactgattggattttcacaagtttaagagtttgtgtgtcaagtgtatgtatgaatgattttttttttgggtggttttgttacgttttgatgtatagaacatatttattatttggtggaatatatataaattttcttt

SEQ ID NO: 27802 - protein, 140 aa, Arabidopsis thaliana
  peptide (1)..(140): Ceres Seq. ID no. 12675010
  misc_feature (27)..(136): Homolog of NCBI NO: 13386094 NR Description: RIKEN cDNA 1520402O14 [Mus musculus]
  misc_feature (13)..(124): Homolog of NCBI NO: 19113819 NR Description: Protein with similarity to Drosophila yakuba NADH
  misc_feature (16)..(105): Homolog of NCBI NO: 6322504 NR Description: Vacuolar Protein Sorting; Vps55p [Saccharomyces
  misc_feature (55)..(124): Homolog of NCBI NO: 34905898 NR Description: P0458E05.25 [Oryza sativa (japonica
  misc_feature (23)..(124): Homolog of NCBI NO: 18399269 NR Description: expressed protein
  misc_feature (17)..(124): Homolog of NCBI NO: 16648828 NR Description: AT3g11530/F24K9_21 [Arabidopsis thaliana]
  misc_feature (17)..(124): Homolog of NCBI NO: 12322900 NR Description: unknown protein; 72859-71336 [Arabidopsis
  misc_feature (1)..(139): Homolog of NCBI NO: 25518386 NR Description: hypothetical protein F5D14.18 - Arabidopsis
  misc_feature (1)..(140): Homolog of NCBI NO: 21554354 NR Description: unknown [Arabidopsis thaliana]
  misc_feature (1)..(140): Homolog of NCBI NO: 18398420 NR Description: Expressed protein
MADVPGYLRTCLDMGKIAFLAILVSTGIVLQILACALFNNWWPMLSVIMYVLLPMPLLFFGGSDSTSLFNESDNSWINAAKFLTGASAVGSVAIPSILKHAGLIGWGALALDLSSYVVFLVAILGYICIGDASDNYYSYI

SEQ ID NO: 27803 - protein, 127 aa, Arabidopsis thaliana
  peptide (1)..(127): Ceres Seq. ID no. 12675011
  misc_feature (14)..(123): Homolog of NCBI NO: 13386094 NR Description: RIKEN cDNA 1520402O14 [Mus musculus]
  misc_feature (1)..(111): Homolog of NCBI NO: 19113819 NR Description: Protein with similarity to Drosophila yakuba NADH
  misc_feature (3)..(92): Homolog of NCBI NO: 6322504 NR Description: Vacuolar Protein Sorting; Vps55p [Saccharomyces
  misc_feature (42)..(111): Homolog of NCBI NO: 34905898 NR Description: P0458E05.25 [Oryza sativa (japonica
  misc_feature (10)..(111): Homolog of NCBI NO: 18399269 NR Description: expressed protein
  misc_feature (4)..(111): Homolog of NCBI NO: 16648828 NR Description: AT3g11530/F24K9_21 [Arabidopsis thaliana]
  misc_feature (4)..(111): Homolog of NCBI NO: 12322900 NR Description: unknown protein; 72859-71336 [Arabidopsis
  misc_feature (1)..(126): Homolog of NCBI NO: 25518386 NR Description: hypothetical protein F5D14.18 - Arabidopsis
  misc_feature (1)..(127): Homolog of NCBI NO: 21554354 NR Description: unknown [Arabidopsis thaliana]
  misc_feature (1)..(127): Homolog of NCBI NO: 18398420 NR Description: Expressed protein
MGKIAFLAILVSTGIVLQILACALFNNWWPMLSVIMYVLLPMPLLFFGGSDSTSLFNESDNSWINAAKFLTGASAVGSVAIPSILKHAGLIGWGALALDLSSYVVFLVAILGYICIGDASDNYYSYI

SEQ ID NO: 27804 - protein, 97 aa, Arabidopsis thaliana
  peptide (1)..(97): Ceres Seq. ID no. 12675012
  misc_feature (1)..(93): Homolog of NCBI NO: 13386094 NR Description: RIKEN cDNA 1520402O14 [Mus musculus]
  misc_feature (1)..(81): Homolog of NCBI NO: 19113819 NR Description: Protein with similarity to Drosophila yakuba NADH
  misc_feature (1)..(62): Homolog of NCBI NO: 6322504 NR Description: Vacuolar Protein Sorting; Vps55p [Saccharomyces
  misc_feature (12)..(81): Homolog of NCBI NO: 34905898 NR Description: P0458E05.25 [Oryza sativa (japonica
  misc_feature (1)..(81): Homolog of NCBI NO: 18399269 NR Description: expressed protein
  misc_feature (1)..(81): Homolog of NCBI NO: 16648828 NR Description: AT3g11530/F24K9_21 [Arabidopsis thaliana]
  misc_feature (1)..(81): Homolog of NCBI NO: 12322900 NR Description: unknown protein; 72859-71336 [Arabidopsis
  misc_feature (1)..(96): Homolog of NCBI NO: 25518386 NR Description: hypothetical protein F5D14.18 - Arabidopsis
  misc_feature (1)..(97): Homolog of NCBI NO: 21554354 NR Description: unknown [Arabidopsis thaliana]
  misc_feature (1)..(97): Homolog of NCBI NO: 18398420 NR Description: Expressed protein
MLSVIMYVLLPMPLLFFGGSDSTSLFNESDNSWINAAKFLTGASAVGSVAIPSILKHAGLIGWGALALDLSSYVVFLVAILGYICIGDASDNYYSYI

SEQ ID NO: 27805 - DNA, 1514 bp, Arabidopsis thaliana
  misc_feature (1)..(1514): Ceres Seq. ID no. 12580052
  misc_feature: MA Experiment ID: 108434 Result: Down-regulated in Transcription
  misc_feature: MA Experiment 108434 PARAMETER Experiment Name: At_Root_Tips_cDNA_P Parameter: Tissue Value: Root Tips
  misc_feature: MA Experiment ID: 108461 Result: Down-regulated in Transcription
  misc_feature: MA Experiment 108461 PARAMETER Experiment Name: At_Germinating_Seeds_cDNA_P Parameter: Age (day) Value: 1 vs. 0
  misc_feature: MA Experiment 108461 PARAMETER Experiment Name: At_Germinating_Seeds_cDNA_P Parameter: Tissue Value: Germinating Seeds
  misc_feature: MA Experiment ID: 108488 Result: Down-regulated in Transcription
  misc_feature: MA Experiment ID: 108501 Result: Down-regulated in Transcription
  misc_feature: MA Experiment 108501 PARAMETER Experiment Name: At_ap2_floral_buds_cDNA_P Parameter: Plant Line Value: ap2 (Ler.)
  misc_feature: MA Experiment 108501 PARAMETER Experiment Name: At_ap2_floral_buds_cDNA_P Parameter: Tissue Value: Closed Flower
  misc_feature: MA Experiment ID: 108572 Result: Up-regulated in Transcription
  misc_feature: MA Experiment 108572 PARAMETER Experiment Name: At_Drought_cDNA_P Parameter: Timepoint (hr) Value: 1
  misc_feature: MA Experiment 108572 PARAMETER Experiment Name: At_Drought_cDNA_P Parameter: Tissue Value: Aerial
  misc_feature: MA Experiment 108572 PARAMETER Experiment Name: At_Drought_cDNA_P Parameter: Treatment Value: Drought vs. No Drought
  misc_feature: MA Experiment ID: 108573 Result: Up-regulated in Transcription
  misc_feature: MA Experiment 108573 PARAMETER Experiment Name: At_Drought_cDNA_P Parameter: Timepoint (hr) Value: 6
  misc_feature: MA Experiment 108573 PARAMETER Experiment Name: At_Drought_cDNA_P Parameter: Tissue Value: Aerial
  misc_feature: MA Experiment 108573 PARAMETER Experiment Name: At_Drought_cDNA_P Parameter: Treatment Value: Drought vs. No Drought
  misc_feature: MA Experiment ID: 108579 Result: Down-regulated in Transcription
  misc_feature: MA Experiment 108579 PARAMETER Experiment Name: At_4deg_Cold_cDNA_P Parameter: Temperature (deg C) Value: 4 vs. 22
  misc_feature: MA Experiment 108579 PARAMETER Experiment Name: At_4deg_Cold_cDNA_P Parameter: Timepoint (hr) Value: 6
  misc_feature: MA Experiment 108579 PARAMETER Experiment Name: At_4deg_Cold_cDNA_P Parameter: Tissue Value: Aerial
  misc_feature: MA Experiment ID: 108585 Result: Up-regulated in Transcription
  misc_feature: MA Experiment 108585 PARAMETER Experiment Name: At_5mM_NaNP_cDNA_P Parameter: Timepoint (hr) Value: 6
  misc_feature: MA Experiment 108585 PARAMETER Experiment Name: At_5mM_NaNP_cDNA_P Parameter: Tissue Value: Aerial
  misc_feature: MA Experiment 108585 PARAMETER Experiment Name: At_5mM_NaNP_cDNA_P Parameter: Treatment Value: null
  misc_feature: MA Experiment ID: 108605 Result: Up-regulated in Transcription
  misc_feature: MA Experiment 108605 PARAMETER Experiment Name: At_100uM_ABA_cDNA_P Parameter: Timepoint (hr) Value: 6
  misc_feature: MA Experiment 108605 PARAMETER Experiment Name: At_100uM_ABA_cDNA_P Parameter: Tissue Value: Aerial
  misc_feature: MA Experiment 108605 PARAMETER Experiment Name: At_100uM_ABA_cDNA_P Parameter: Treatment Value: 100uM ABA vs. No Treatment
  misc_feature: MA Experiment ID: 108607 Result: Up-regulated in Transcription
  misc_feature: MA Experiment 108607 PARAMETER Experiment Name: At_100uM_ABA_cDNA_P Parameter: Timepoint (hr) Value: 4
  misc_feature: MA Experiment 108607 PARAMETER Experiment Name: At_100uM_ABA_cDNA_P Parameter: Tissue Value: Aerial
  misc_feature: MA Experiment 108607 PARAMETER Experiment Name: At_100uM_ABA_cDNA_P Parameter: Treatment Value: 100uM ABA vs. No Treatment
  misc_feature: MA Experiment ID: 108608 Result: Up-regulated in Transcription
  misc_feature: MA Experiment 108608 PARAMETER Experiment Name: At_100uM_ABA_cDNA_P Parameter: Timepoint (hr) Value: 1
  misc_feature: MA Experiment 108608 PARAMETER Experiment Name: At_100uM_ABA_cDNA_P Parameter: Tissue Value: Aerial
  misc_feature: MA Experiment 108608 PARAMETER Experiment Name: At_100uM_ABA_cDNA_P Parameter: Treatment Value: 100uM ABA vs. No Treatment
  misc_feature: MA Experiment ID: 108609 Result: Up-regulated in Transcription
  misc_feature: MA Experiment 108609 PARAMETER Experiment Name: At_100uM_ABA_cDNA_P Parameter: Timepoint (hr) Value: 24
  misc_feature: MA Experiment 108609 PARAMETER Experiment Name: At_100uM_ABA_cDNA_P Parameter: Tissue Value: Aerial
  misc_feature: MA Experiment 108609 PARAMETER Experiment Name: At_100uM_ABA_cDNA_P Parameter: Treatment Value: 100uM ABA vs. No Treatment
  misc_feature: MA Experiment ID: 20000069 Result: Up-regulated in Transcription
  misc_feature: MA Experiment 20000069 PARAMETER Experiment Name: At_100uM_ABA_Mutants_cDNA_P Parameter: Plant Line Value: CS23
  misc_feature: MA Experiment 20000069 PARAMETER Experiment Name: At_100uM_ABA_Mutants_cDNA_P Parameter: Timepoint (hr) Value: 6
  misc_feature: MA Experiment 20000069 PARAMETER Experiment Name: At_100uM_ABA_Mutants_cDNA_P Parameter: Tissue Value: Aerial
  misc_feature: MA Experiment 20000069 PARAMETER Experiment Name: At_100uM_ABA_Mutants_cDNA_P Parameter: Treatment Value: 100uM ABA vs. No Treatment
  misc_feature: MA Experiment ID: 20000070 Result: Up-regulated in Transcription
  misc_feature: MA Experiment 20000070 PARAMETER Experiment Name: At_100uM_ABA_Mutants_cDNA_P Parameter: Plant Line Value: CS24
  misc_feature: MA Experiment 20000070 PARAMETER Experiment Name: At_100uM_ABA_Mutants_cDNA_P Parameter: Timepoint (hr) Value: 6
  misc_feature: MA Experiment 20000070 PARAMETER Experiment Name: At_100uM_ABA_Mutants_cDNA_P Parameter: Tissue Value: Aerial
  misc_feature: MA Experiment 20000070 PARAMETER Experiment Name: At_100uM_ABA_Mutants_cDNA_P Parameter: Treatment Value: 100uM ABA vs. No Treatment
  misc_feature: MA Experiment ID: 20000071 Result: Up-regulated in Transcription
  misc_feature: MA Experiment 20000071 PARAMETER Experiment Name: At_100uM_ABA_Mutants_cDNA_P Parameter: Plant Line Value: CS8104
  misc_feature: MA Experiment 20000071 PARAMETER Experiment Name: At_100uM_ABA_Mutants_cDNA_P Parameter: Timepoint (hr) Value: 6
  misc_feature: MA Experiment 20000071 PARAMETER Experiment Name: At_100uM_ABA_Mutants_cDNA_P Parameter: Tissue Value: Aerial
  misc_feature: MA Experiment 20000071 PARAMETER Experiment Name: At_100uM_ABA_Mutants_cDNA_P Parameter: Treatment Value: 100uM ABA vs. No Treatment
  misc_feature: MA Experiment ID: 20000072 Result: Up-regulated in Transcription
  misc_feature: MA Experiment 20000072 PARAMETER Experiment Name: At_100uM_ABA_Mutants_cDNA_P Parameter: Plant Line Value: CS8105
  misc_feature: MA Experiment 20000072 PARAMETER Experiment Name: At_100uM_ABA_Mutants_cDNA_P Parameter: Timepoint (hr) Value: 6
  misc_feature: MA Experiment 20000072 PARAMETER Experiment Name: At_100uM_ABA_Mutants_cDNA_P Parameter: Tissue Value: Aerial
  misc_feature: MA Experiment 20000072 PARAMETER Experiment Name: At_100uM_ABA_Mutants_cDNA_P Parameter: Treatment Value: 100uM ABA vs. No Treatment
  misc_feature: MA Experiment ID: 20000086 Result: Up-regulated in Transcription
  misc_feature: MA Experiment 20000086 PARAMETER Experiment Name: At_100uM_ABA_Mutants_cDNA_P Parameter: Plant Line Value: CS22
  misc_feature: MA Experiment 20000086 PARAMETER Experiment Name: At_100uM_ABA_Mutants_cDNA_P Parameter: Timepoint (hr) Value: 6
  misc_feature: MA Experiment 20000086 PARAMETER Experiment Name: At_100uM_ABA_Mutants_cDNA_P Parameter: Tissue Value: Aerial
  misc_feature: MA Experiment 20000086 PARAMETER Experiment Name: At_100uM_ABA_Mutants_cDNA_P Parameter: Treatment Value: 100uM ABA vs. No Treatment
  misc_feature: MA Experiment ID: 20000087 Result: Up-regulated in Transcription
  misc_feature: MA Experiment 20000087 PARAMETER Experiment Name: At_100uM_ABA_Mutants_cDNA_P Parameter: Plant Line Value: WS
  misc_feature: MA Experiment 20000087 PARAMETER Experiment Name: At_100uM_ABA_Mutants_cDNA_P Parameter: Timepoint (hr) Value: 6
  misc_feature: MA Experiment 20000087 PARAMETER Experiment Name: At_100uM_ABA_Mutants_cDNA_P Parameter: Tissue Value: Aerial
  misc_feature: MA Experiment 20000087 PARAMETER Experiment Name: At_100uM_ABA_Mutants_cDNA_P Parameter: Treatment Value: 100uM ABA vs. No Treatment
  misc_feature: MA Experiment ID: 20000088 Result: Up-regulated in Transcription
  misc_feature: MA Experiment 20000088 PARAMETER Experiment Name: At_100uM_ABA_Mutants_cDNA_P Parameter: Plant Line Value: Landsberg
  misc_feature: MA Experiment 20000088 PARAMETER Experiment Name: At_100uM_ABA_Mutants_cDNA_P Parameter: Timepoint (hr) Value: 6
  misc_feature: MA Experiment 20000088 PARAMETER Experiment Name: At_100uM_ABA_Mutants_cDNA_P Parameter: Tissue Value: Aerial
  misc_feature: MA Experiment 20000088 PARAMETER Experiment Name: At_100uM_ABA_Mutants_cDNA_P Parameter: Treatment Value: 100uM ABA vs. No Treatment
  misc_feature: MA Experiment ID: 20000089 Result: Up-regulated in Transcription
  misc_feature: MA Experiment ID: 20000111 Result: Down-regulated in Transcription
  misc_feature: MA Experiment 20000111 PARAMETER Experiment Name: At_42deg_Heat_cDNA_P Parameter: Temperature (deg C) Value: 42 vs. 22
  misc_feature: MA Experiment 20000111 PARAMETER Experiment Name: At_42deg_Heat_cDNA_P Parameter: Timepoint (hr) Value: 6
  misc_feature: MA Experiment 20000111 PARAMETER Experiment Name: At_42deg_Heat_cDNA_P Parameter: Tissue Value: Aerial
  misc_feature: MA Experiment ID: 20000113 Result: Down-regulated in Transcription
  misc_feature: MA Experiment 20000113 PARAMETER Experiment Name: At_42deg_Heat_cDNA_P Parameter: Temperature (deg C) Value: 42 vs. 22
  misc_feature: MA Experiment 20000113 PARAMETER Experiment Name: At_42deg_Heat_cDNA_P Parameter: Timepoint (hr) Value: 8
  misc_feature: MA Experiment 20000113 PARAMETER Experiment Name: At_42deg_Heat_cDNA_P Parameter: Tissue Value: Aerial
  misc_feature: MA Experiment ID: 20000117 Result: Up-regulated in Transcription
  misc_feature: MA Experiment 20000117 PARAMETER Experiment Name: At_100uM_ABA_Mutants_cDNA_P Parameter: Plant Line Value: Columbia
  misc_feature: MA Experiment 20000117 PARAMETER Experiment Name: At_100uM_ABA_Mutants_cDNA_P Parameter: Timepoint (hr) Value: 6
  misc_feature: MA Experiment 20000117 PARAMETER Experiment Name: At_100uM_ABA_Mutants_cDNA_P Parameter: Tissue Value: Aerial
  misc_feature: MA Experiment 20000117 PARAMETER Experiment Name: At_100uM_ABA_Mutants_cDNA_P Parameter: Treatment Value: 100uM ABA vs. No Treatment
  misc_feature: MA Experiment ID: 20000166 Result: Up-regulated in Transcription
  misc_feature: MA Experiment 20000166 PARAMETER Experiment Name: At_100uM_ABA_P Parameter: Age (day) Value: 14
  misc_feature: MA Experiment 20000166 PARAMETER Experiment Name: At_100uM_ABA_P Parameter: Organism Value: A. thaliana
  misc_feature: MA Experiment 20000166 PARAMETER Experiment Name: At_100uM_ABA_P Parameter: Plant Line Value: WS
  misc_feature: MA Experiment 20000166 PARAMETER Experiment Name: At_100uM_ABA_P Parameter: Timepoint (hr) Value: 1
  misc_feature: MA Experiment 20000166 PARAMETER Experiment Name: At_100uM_ABA_P Parameter: Tissue Value: Aerial
  misc_feature: MA Experiment 20000166 PARAMETER Experiment Name: At_100uM_ABA_P Parameter: Treatment Value: 100uM ABA vs. No Treatment
  misc_feature: MA Experiment ID: 20000169 Result: Up-regulated in Transcription
  misc_feature: MA Experiment 20000169 PARAMETER Experiment Name: At_100uM_ABA_P Parameter: Age (day) Value: 14
  misc_feature: MA Experiment 20000169 PARAMETER Experiment Name: At_100uM_ABA_P Parameter: Organism Value: A. thaliana
  misc_feature: MA Experiment 20000169 PARAMETER Experiment Name: At_100uM_ABA_P Parameter: Plant Line Value: WS
  misc_feature: MA Experiment 20000169 PARAMETER Experiment Name: At_100uM_ABA_P Parameter: Timepoint (hr) Value: 6
  misc_feature: MA Experiment 20000169 PARAMETER Experiment Name: At_100uM_ABA_P Parameter: Tissue Value: Aerial
  misc_feature: MA Experiment 20000169 PARAMETER Experiment Name: At_100uM_ABA_P Parameter: Treatment Value: 100uM ABA vs. No Treatment
  misc_feature: MA Experiment ID: 20000171 Result: Down-regulated in Transcription
  misc_feature: MA Experiment 20000171 PARAMETER Experiment Name: At_42deg_Heat_P Parameter: Age (day) Value: 14
  misc_feature: MA Experiment 20000171 PARAMETER Experiment Name: At_42deg_Heat_P Parameter: Organism Value: A. thaliana
  misc_feature: MA Experiment 20000171 PARAMETER Experiment Name: At_42deg_Heat_P Parameter: Plant Line Value: WS
  misc_feature: MA Experiment 20000171 PARAMETER Experiment Name: At_42deg_Heat_P Parameter: Temperature (deg C) Value: 42 vs. 22
  misc_feature: MA Experiment 20000171 PARAMETER Experiment Name: At_42deg_Heat_P Parameter: Timepoint (hr) Value: 1
  misc_feature: MA Experiment 20000171 PARAMETER Experiment Name: At_42deg_Heat_P Parameter: Tissue Value: Aerial
  misc_feature: MA Experiment ID: 20000173 Result: Down-regulated in Transcription
  misc_feature: MA Experiment 20000173 PARAMETER Experiment Name: At_42deg_Heat_P Parameter: Age (day) Value: 14
  misc_feature: MA Experiment 20000173 PARAMETER Experiment Name: At_42deg_Heat_P Parameter: Organism Value: A. thaliana
  misc_feature: MA Experiment 20000173 PARAMETER Experiment Name: At_42deg_Heat_P Parameter: Plant Line Value: WS
  misc_feature: MA Experiment 20000173 PARAMETER Experiment Name: At_42deg_Heat_P Parameter: Temperature (deg C) Value: 42 vs. 22
  misc_feature: MA Experiment 20000173 PARAMETER Experiment Name: At_42deg_Heat_P Parameter: Timepoint (hr) Value: 6
  misc_feature: MA Experiment 20000173 PARAMETER Experiment Name: At_42deg_Heat_P Parameter: Tissue Value: Aerial
  misc_feature: MA Experiment ID: 20000179 Result: Down-regulated in Transcription
  misc_feature: MA Experiment 20000179 PARAMETER Experiment Name: At_Germinating_Seeds_P Parameter: Age (hr) Value: 6 vs. 0
  misc_feature: MA Experiment 20000179 PARAMETER Experiment Name: At_Germinating_Seeds_P Parameter: Tissue Value: Germinating Seeds
  misc_feature: MA Experiment ID: 20000180 Result: Down-regulated in Transcription
  misc_feature: MA Experiment 20000180 PARAMETER Experiment Name: At_Germinating_Seeds_P Parameter: Age (hr) Value: 24 vs. 0
  misc_feature: MA Experiment 20000180 PARAMETER Experiment Name: At_Germinating_Seeds_P Parameter: Tissue Value: Germinating Seeds
  misc_feature: MA Experiment ID: 20000182 Result: Up-regulated in Transcription
  misc_feature: MA Experiment 20000182 PARAMETER Experiment Name: At_2mM_SA_P Parameter: Age (day) Value: 14
  misc_feature: MA Experiment 20000182 PARAMETER Experiment Name: At_2mM_SA_P Parameter: Organism Value: A. thaliana
  misc_feature: MA Experiment 20000182 PARAMETER Experiment Name: At_2mM_SA_P Parameter: Plant Line Value: WS
  misc_feature: MA Experiment 20000182 PARAMETER Experiment Name: At_2mM_SA_P Parameter: Timepoint (hr) Value: 6
  misc_feature: MA Experiment 20000182 PARAMETER Experiment Name: At_2mM_SA_P Parameter: Tissue Value: Aerial
  misc_feature: MA Experiment 20000182 PARAMETER Experiment Name: At_2mM_SA_P Parameter: Treatment Value: 2mM SA vs. No Treatment
  misc_feature: MA Experiment ID: 20000185 Result: Down-regulated in Transcription
  misc_feature: MA Experiment 20000185 PARAMETER Experiment Name: At_Roots__P Parameter: Age (day) Value: 7 vs. 21
  misc_feature: MA Experiment 20000185 PARAMETER Experiment Name: At_Roots__P Parameter: Organism Value: A. thaliana
  misc_feature: MA Experiment 20000185 PARAMETER Experiment Name: At_Roots__P Parameter: Tissue Value: Roots vs. Whole Plant
  misc_feature: MA Experiment ID: 20000234 Result: Down-regulated in Transcription
  misc_feature: MA Experiment 20000234 PARAMETER Experiment Name: At_Siliques_P Parameter: Age (day) Value: 21
  misc_feature: MA Experiment 20000234 PARAMETER Experiment Name: At_Siliques_P Parameter: Organism Value: A. thaliana
  misc_feature: MA Experiment 20000234 PARAMETER Experiment Name: At_Siliques_P Parameter: Plant Line Value: WS
  misc_feature: MA Experiment 20000234 PARAMETER Experiment Name: At_Siliques_P Parameter: Tissue Value: Less Than 5mm Siliques vs. Whole Plant
  misc_feature: MA Experiment ID: 20000235 Result: Down-regulated in Transcription
  misc_feature: MA Experiment 20000235 PARAMETER Experiment Name: At_Siliques_P Parameter: Age (day) Value: 21
  misc_feature: MA Experiment 20000235 PARAMETER Experiment Name: At_Siliques_P Parameter: Organism Value: A. thaliana
  misc_feature: MA Experiment 20000235 PARAMETER Experiment Name: At_Siliques_P Parameter: Plant Line Value: WS
  misc_feature: MA Experiment 20000235 PARAMETER Experiment Name: At_Siliques_P Parameter: Tissue Value: 5-10mm Siliques vs. Whole Plant
  misc_feature: MA Experiment ID: 20000265 Result: Down-regulated in Transcription
  misc_feature: MA Experiment 20000265 PARAMETER Experiment Name: At_Open_Flower_P Parameter: Age (day) Value: 21
  misc_feature: MA Experiment 20000265 PARAMETER Experiment Name: At_Open_Flower_P Parameter: Plant Line Value: WS
  misc_feature: MA Experiment 20000265 PARAMETER Experiment Name: At_Open_Flower_P Parameter: Tissue Value: Closed Flower vs. Whole Plant
  misc_feature: MA Experiment ID: 20000439 Result: Down-regulated in Transcription
  misc_feature: MA Experiment 20000439 PARAMETER Experiment Name: At_Roots__P Parameter: Age (day) Value: 14 vs. 21
  misc_feature: MA Experiment 20000439 PARAMETER Experiment Name: At_Roots__P Parameter: Organism Value: A. thaliana
  misc_feature: MA Experiment 20000439 PARAMETER Experiment Name: At_Roots__P Parameter: Tissue Value: Roots vs. Whole Plant
  misc_feature: MA Experiment ID: 20000445 Result: Up-regulated in Transcription
  misc_feature: MA Experiment 20000445 PARAMETER Experiment Name: At_100uM_NAA__P Parameter: Age (day) Value: 14
  misc_feature: MA Experiment 20000445 PARAMETER Experiment Name: At_100uM_NAA__P Parameter: Organism Value: A. thaliana
  misc_feature: MA Experiment 20000445 PARAMETER Experiment Name: At_100uM_NAA__P Parameter: Plant Line Value: WS
  misc_feature: MA Experiment 20000445 PARAMETER Experiment Name: At_100uM_NAA__P Parameter: Timepoint (hr) Value: 6
  misc_feature: MA Experiment 20000445 PARAMETER Experiment Name: At_100uM_NAA__P Parameter: Tissue Value: Aerial
  misc_feature: MA Experiment 20000445 PARAMETER Experiment Name: At_100uM_NAA__P Parameter: Treatment Value: 100uM NAA vs. No Treatment
  misc_feature: MA Experiment ID: 20000453 Result: Up-regulated in Transcription
  misc_feature: MA Experiment 20000453 PARAMETER Experiment Name: At_100uM_ABA_P Parameter: Age (day) Value: 15
  misc_feature: MA Experiment 20000453 PARAMETER Experiment Name: At_100uM_ABA_P Parameter: Organism Value: A. thaliana
  misc_feature: MA Experiment 20000453 PARAMETER Experiment Name: At_100uM_ABA_P Parameter: Plant Line Value: WS
  misc_feature: MA Experiment 20000453 PARAMETER Experiment Name: At_100uM_ABA_P Parameter: Timepoint (hr) Value: 24
  misc_feature: MA Experiment 20000453 PARAMETER Experiment Name: At_100uM_ABA_P Parameter: Tissue Value: Aerial
  misc_feature: MA Experiment 20000453 PARAMETER Experiment Name: At_100uM_ABA_P Parameter: Treatment Value: 100uM ABA vs. No Treatment
  misc_feature: MA Experiment ID: 20000455 Result: Up-regulated in Transcription
  misc_feature: MA Experiment 20000455 PARAMETER Experiment Name: At_100uM_ABA_P Parameter: Age (day) Value: 16
  misc_feature: MA Experiment 20000455 PARAMETER Experiment Name: At_100uM_ABA_P Parameter: Organism Value: A. thaliana
  misc_feature: MA Experiment 20000455 PARAMETER Experiment Name: At_100uM_ABA_P Parameter: Plant Line Value: WS
  misc_feature: MA Experiment 20000455 PARAMETER Experiment Name: At_100uM_ABA_P Parameter: Timepoint (hr) Value: 48
  misc_feature: MA Experiment 20000455 PARAMETER Experiment Name: At_100uM_ABA_P Parameter: Tissue Value: Aerial
  misc_feature: MA Experiment 20000455 PARAMETER Experiment Name: At_100uM_ABA_P Parameter: Treatment Value: 100uM ABA vs. No Treatment
  misc_feature: MA Experiment ID: 20000456 Result: Down-regulated in Transcription
  misc_feature: MA Experiment 20000456 PARAMETER Experiment Name: At_100uM_BA_P Parameter: Age (day) Value: 14
  misc_feature: MA Experiment 20000456 PARAMETER Experiment Name: At_100uM_BA_P Parameter: Organism Value: A. thaliana
  misc_feature: MA Experiment 20000456 PARAMETER Experiment Name: At_100uM_BA_P Parameter: Plant Line Value: WS
  misc_feature: MA Experiment 20000456 PARAMETER Experiment Name: At_100uM_BA_P Parameter: Timepoint (hr) Value: 6
  misc_feature: MA Experiment 20000456 PARAMETER Experiment Name: At_100uM_BA_P Parameter: Tissue Value: Aerial
  misc_feature: MA Experiment 20000456 PARAMETER Experiment Name: At_100uM_BA_P Parameter: Treatment Value: 100uM BA vs. No Treatment
  misc_feature: MA Experiment ID: 20000573 Result: Up-regulated in Transcription
  misc_feature: MA Experiment 20000573 PARAMETER Experiment Name: At_100uM_ABA_Mutants__P Parameter: Organism Value: A. thaliana
  misc_feature: MA Experiment 20000573 PARAMETER Experiment Name: At_100uM_ABA_Mutants__P Parameter: Plant Line Value: CS22 vs. Ler wt
  misc_feature: MA Experiment 20000573 PARAMETER Experiment Name: At_100uM_ABA_Mutants__P Parameter: Timepoint (hr) Value: N/A
  misc_feature: MA Experiment 20000573 PARAMETER Experiment Name: At_100uM_ABA_Mutants__P Parameter: Tissue Value: Whole Plant
  misc_feature: MA Experiment 20000573 PARAMETER Experiment Name: At_100uM_ABA_Mutants__P Parameter: Treatment Value: None
  misc_feature: MA Experiment ID: 20000574 Result: Up-regulated in Transcription
  misc_feature: MA Experiment 20000574 PARAMETER Experiment Name: At_100uM_ABA_Mutants__P Parameter: Organism Value: A. thaliana
  misc_feature: MA Experiment 20000574 PARAMETER Experiment Name: At_100uM_ABA_Mutants__P Parameter: Plant Line Value: CS23 vs. Ler wt
  misc_feature: MA Experiment 20000574 PARAMETER Experiment Name: At_100uM_ABA_Mutants__P Parameter: Timepoint (hr) Value: N/A
  misc_feature: MA Experiment 20000574 PARAMETER Experiment Name: At_100uM_ABA_Mutants__P Parameter: Tissue Value: Whole Plant
  misc_feature: MA Experiment 20000574 PARAMETER Experiment Name: At_100uM_ABA_Mutants__P Parameter: Treatment Value: None
  misc_feature: MA Experiment ID: 20000794 Result: Up-regulated in Transcription
  misc_feature: MA Experiment 20000794 PARAMETER Experiment Name: At_Petals_P Parameter: Age (day) Value: 23-25 days
  misc_feature: MA Experiment 20000794 PARAMETER Experiment Name: At_Petals_P Parameter: Plant Line Value: WS
  misc_feature: MA Experiment 20000794 PARAMETER Experiment Name: At_Petals_P Parameter: Tissue Value: Petals vs. Whole plant
  misc_feature: MA Experiment ID: 20001248 Result: Up-regulated in Transcription
  misc_feature: MA Experiment 20001248 PARAMETER Experiment Name: At_Far-red-induction_P Parameter: Age (day) Value: 7
  misc_feature: MA Experiment 20001248 PARAMETER Experiment Name: At_Far-red-induction_P Parameter: Light Value: Far-red vs. White
  misc_feature: MA Experiment 20001248 PARAMETER Experiment Name: At_Far-red-induction_P Parameter: Organism Value: A. thaliana
  misc_feature: MA Experiment 20001248 PARAMETER Experiment Name: At_Far-red-induction_P Parameter: Plant Line Value: Columbia
  misc_feature: MA Experiment 20001248 PARAMETER Experiment Name: At_Far-red-induction_P Parameter: Timepoint (hr) Value: 4
  misc_feature: MA Experiment 20001248 PARAMETER Experiment Name: At_Far-red-induction_P Parameter: Tissue Value: Whole Plant
  misc_feature: MA Experiment ID: 20001450 Result: Up-regulated in Transcription
  misc_feature: MA Experiment 20001450 PARAMETER Experiment Name: At_Far-red-induction_P Parameter: Age (day) Value: 7
  misc_feature: MA Experiment 20001450 PARAMETER Experiment Name: At_Far-red-induction_P Parameter: Light Value: Far-red vs. White
  misc_feature: MA Experiment 20001450 PARAMETER Experiment Name: At_Far-red-induction_P Parameter: Organism Value: A. thaliana
  misc_feature: MA Experiment 20001450 PARAMETER Experiment Name: At_Far-red-induction_P Parameter: Plant Line Value: Columbia
  misc_feature: MA Experiment 20001450 PARAMETER Experiment Name: At_Far-red-induction_P Parameter: Timepoint (hr) Value: 8
  misc_feature: MA Experiment 20001450 PARAMETER Experiment Name: At_Far-red-induction_P Parameter: Tissue Value: Whole Plant
  misc_feature: MA Experiment ID: 20001906 Result: Up-regulated in Transcription
  misc_feature: MA Experiment 20001906 PARAMETER Experiment Name: At_Drought_Reproduction_P Parameter: Age (day) Value: 35
  misc_feature: MA Experiment 20001906 PARAMETER Experiment Name: At_Drought_Reproduction_P Parameter: Organism Value: A. thaliana
  misc_feature: MA Experiment 20001906 PARAMETER Experiment Name: At_Drought_Reproduction_P Parameter: Plant Line Value: WS
  misc_feature: MA Experiment 20001906 PARAMETER Experiment Name: At_Drought_Reproduction_P Parameter: Timepoint (day) Value: 5
  misc_feature: MA Experiment 20001906 PARAMETER Experiment Name: At_Drought_Reproduction_P Parameter: Tissue Value: Siliques
  misc_feature: MA Experiment 20001906 PARAMETER Experiment Name: At_Drought_Reproduction_P Parameter: Treatment Value: Drought vs. No Drought
  misc_feature: MA Experiment ID: 20001908 Result: Up-regulated in Transcription
  misc_feature: MA Experiment 20001908 PARAMETER Experiment Name: At_Drought_Reproduction_P Parameter: Age (day) Value: 40
  misc_feature: MA Experiment 20001908 PARAMETER Experiment Name: At_Drought_Reproduction_P Parameter: Organism Value: A. thaliana
  misc_feature: MA Experiment 20001908 PARAMETER Experiment Name: At_Drought_Reproduction_P Parameter: Plant Line Value: WS
  misc_feature: MA Experiment 20001908 PARAMETER Experiment Name: At_Drought_Reproduction_P Parameter: Timepoint (day) Value: 10
  misc_feature: MA Experiment 20001908 PARAMETER Experiment Name: At_Drought_Reproduction_P Parameter: Tissue Value: Siliques
  misc_feature: MA Experiment 20001908 PARAMETER Experiment Name: At_Drought_Reproduction_P Parameter: Treatment Value: Drought vs. No Drought
  misc_feature: MA Experiment ID: 20001911 Result: Up-regulated in Transcription
  misc_feature: MA Experiment 20001911 PARAMETER Experiment Name: At_Drought_Reproduction_P Parameter: Age (day) Value: 40
  misc_feature: MA Experiment 20001911 PARAMETER Experiment Name: At_Drought_Reproduction_P Parameter: Organism Value: A. thaliana
  misc_feature: MA Experiment 20001911 PARAMETER Experiment Name: At_Drought_Reproduction_P Parameter: Plant Line Value: WS
  misc_feature: MA Experiment 20001911 PARAMETER Experiment Name: At_Drought_Reproduction_P Parameter: Timepoint (day) Value: 10
  misc_feature: MA Experiment 20001911 PARAMETER Experiment Name: At_Drought_Reproduction_P Parameter: Tissue Value: Flowers
  misc_feature: MA Experiment 20001911 PARAMETER Experiment Name: At_Drought_Reproduction_P Parameter: Treatment Value: Drought vs. No Drought
aaaaacaaaacaaaaatcgaccaaagagtaaccaaattgatatttatctcttctcaaccatggcgatgagacaagccgctaaggcaacgatcagggcctgttcttcctcttcttcttcgggttacttcgctcgacgtcagtttaatgcatcttctggtgatagcaaaaagattgtaggagttttctacaaggccaacgaatacgctaccaagaaccctaacttccctggctgcgtcgagaatgccttaggaatccgtgactggcttgaatcccaaggacatcagtacatcgtcactgatgacaaggaaggccctgattgcgaacttgagaaacatatcccggatcttcacgtcctaatctccactcccttccacccggcgtatgtaactgctgaaagaaccaagaaagccaaaaacttgaagcttctcctcacagctggtattggctcggatcatattgatctccaggcagctgcagctgctggcctgacggttgctgaagtcacgggaagcaacgtggtctcagtggcagaagatgagctcatgagaatcttaatcctcatgcgcaacttcgtaccagggtacaaccaggtcgtcaaaggcgagtggaacgtcgcgggcattgcgtacagagcttatgatcttgaagggaagacgataggaaccgtgggagctggaagaatcggaaagcttttgctgcagcggttgaaaccattcgggtgtaacttgttgtaccatgacaggcttcagatggcaccagagctggagaaagagactggagctaagttcgttgaggatctgaatgaaatgctccctaaatgtgacgttatagtcatcaacatgcctctcacggagaagacaagaggaatgttcaacaaagagttgatagggaaattgaagaaagtcgttttgatagaacaacgcaagaggagccatcatggagaggcaagcagtggtggatgcggtggagagtggacacattggagggtacagcggagacgtttgggacccacagccagctcctaaggaccatccatggcgttacatgcctaaccaggctatgacccctcatacctccggcaccaccattgacgctcagctacggtatgcggcggggacgaaagacatgttggagagatacttcaagggagaagacttccctactgagaattacatcgtcaaggacggtgaacttgctcctcagtaccggtaagcttttgaggaggtgacattgggaagatgatgagaaacgaccccaacgttcaagaaaacaaataaagaagtatttggactttgctaagtcgaatgacttgagtcatcttttggtttagtttttgttattatataagcacaataataataggagggcacttcccctgttctgagagtttgtgaacatattactcagtggtttaaatcacacatatgtatttgtttccccaatcgtaggaactcaatggtttcaaatctcattatataaacataaaaatgaataaaggcatattaaatttgtcc

SEQ ID NO: 27806 - protein, 340 aa, Arabidopsis thaliana
  peptide (1)..(340): Ceres Seq. ID no. 12580053
  misc_feature (72)..(169): Pfam Name: D-isomer specific 2-hydroxyacid dehydrogenase, Pfam Description: D-isomer specific 2-hydroxyacid dehydrogenase,
  misc_feature (56)..(300): Homolog of NCBI NO: 32405002 NR Description: FORMATE DEHYDROGENASE (NAD-DEPENDENT FORMATE
  misc_feature (60)..(299): Homolog of NCBI NO: 416574 NR Description: PROBABLE FORMATE DEHYDROGENASE (NAD-DEPENDENT
  misc_feature (60)..(299): Homolog of NCBI NO: 40738675 NR Description: FDH_EMENI Probable formate dehydrogenase
  misc_feature (18)..(300): Homolog of NCBI NO: 4572458 NR Description: NAD-dependent formate dehydrogenase
  misc_feature (45)..(309): Homolog of NCBI NO: 21263611 NR Description: Formate dehydrogenase, mitochondrial precursor
  misc_feature (45)..(309): Homolog of NCBI NO: 21263612 NR Description: Formate dehydrogenase, mitochondrial precursor
  misc_feature (45)..(309): Homolog of NCBI NO: 38636526 NR Description: formate dehydrogenase [Quercus robur]
  misc_feature (22)..(309): Homolog of NCBI NO: 542089 NR Description: formate dehydrogenase (EC 1.2.1.2) precursor,
  misc_feature (20)..(309): Homolog of NCBI NO: 26454627 NR Description: Formate dehydrogenase, mitochondrial precursor
  misc_feature (20)..(309): Homolog of NCBI NO: 15241492 NR Description: formate dehydrogenase (FDH)
KQNKNRPKSNQIDIYLFSTMAMRQAAKATIRACSSSSSSGYFARRQFNASSGDSKKIVGVFYKANEYATKNPNFPGCVENALGIRDWLESQGHQYIVTDDKEGPDCELEKHIPDLHVLISTPFHPAYVTAERTKKAKNLKLLLTAGIGSDHIDLQAAAAAGLTVAEVTGSNVVSVAEDELMRILILMRNFVPGYNQVVKGEWNVAGIAYRAYDLEGKTIGTVGAGRIGKLLLQRLKPFGCNLLYHDRLQMAPELEKETGAKFVEDLNEMLPKCDVIVINMPLTEKTRGMFNKELIGKLKKVVLIEQRKRSHHGEASSGGCGGEWTHWRVQRRRLGPTASS

SEQ ID NO: 27807 - protein, 321 aa, Arabidopsis thaliana
  peptide (1)..(321): Ceres Seq. ID no. 12580054
  misc_feature (53)..(150): Pfam Name: D-isomer specific 2-hydroxyacid dehydrogenase, Pfam Description: D-isomer specific 2-hydroxyacid dehydrogenase,
  misc_feature (37)..(281): Homolog of NCBI NO: 32405002 NR Description: FORMATE DEHYDROGENASE (NAD-DEPENDENT FORMATE
  misc_feature (41)..(280): Homolog of NCBI NO: 416574 NR Description: PROBABLE FORMATE DEHYDROGENASE (NAD-DEPENDENT
  misc_feature (41)..(280): Homolog of NCBI NO: 40738675 NR Description: FDH_EMENI Probable formate dehydrogenase
  misc_feature (1)..(281): Homolog of NCBI NO: 4572458 NR Description: NAD-dependent formate dehydrogenase
  misc_feature (26)..(290): Homolog of NCBI NO: 21263611 NR Description: Formate dehydrogenase, mitochondrial precursor
  misc_feature (26)..(290): Homolog of NCBI NO: 21263612 NR Description: Formate dehydrogenase, mitochondrial precursor
  misc_feature (26)..(290): Homolog of NCBI NO: 38636526 NR Description: formate dehydrogenase [Quercus robur]
  misc_feature (3)..(290): Homolog of NCBI NO: 542089 NR Description: formate dehydrogenase (EC 1.2.1.2) precursor,
  misc_feature (1)..(290): Homolog of NCBI NO: 26454627 NR Description: Formate dehydrogenase, mitochondrial precursor
  misc_feature (1)..(290): Homolog of NCBI NO: 15241492 NR Description: formate dehydrogenase (FDH)
MAMRQAAKATIRACSSSSSSGYFARRQFNASSGDSKKIVGVFYKANEYATKNPNFPGCVENALGIRDWLESQGHQYIVTDDKEGPDCELEKHIPDLHVLISTPFHPAYVTAERTKKAKNLKLLLTAGIGSDHIDLQAAAAAGLTVAEVTGSNVVSVAEDELMRILILMRNFVPGYNQVVKGEWNVAGIAYRAYDLEGKTIGTVGAGRIGKLLLQRLKPFGCNLLYHDRLQMAPELEKETGAKFVEDLNEMLPKCDVIVINMPLTEKTRGMFNKELIGKLKKVVLIEQRKRSHHGEASSGGCGGEWTHWRVQRRRLGPTASS

SEQ ID NO: 27808 - protein, 319 aa, Arabidopsis thaliana
  peptide (1)..(319): Ceres Seq. ID no. 12580055
  misc_feature (51)..(148): Pfam Name: D-isomer specific 2-hydroxyacid dehydrogenase, Pfam Description: D-isomer specific 2-hydroxyacid dehydrogenase,
  misc_feature (35)..(279): Homolog of NCBI NO: 32405002 NR Description: FORMATE DEHYDROGENASE (NAD-DEPENDENT FORMATE
  misc_feature (39)..(278): Homolog of NCBI NO: 416574 NR Description: PROBABLE FORMATE DEHYDROGENASE (NAD-DEPENDENT
  misc_feature (39)..(278): Homolog of NCBI NO: 40738675 NR Description: FDH_EMENI Probable formate dehydrogenase
  misc_feature (1)..(279): Homolog of NCBI NO: 4572458 NR Description: NAD-dependent formate dehydrogenase
  misc_feature (24)..(288): Homolog of NCBI NO: 21263611 NR Description: Formate dehydrogenase, mitochondrial precursor
  misc_feature (24)..(288): Homolog of NCBI NO: 21263612 NR Description: Formate dehydrogenase, mitochondrial precursor
  misc_feature (24)..(288): Homolog of NCBI NO: 38636526 NR Description: formate dehydrogenase [Quercus robur]
  misc_feature (1)..(288): Homolog of NCBI NO: 542089 NR Description: formate dehydrogenase (EC 1.2.1.2) precursor,
  misc_feature (1)..(288): Homolog of NCBI NO: 26454627 NR Description: Formate dehydrogenase, mitochondrial precursor
  misc_feature (1)..(288): Homolog of NCBI NO: 15241492 NR Description: formate dehydrogenase (FDH)
MRQAAKATIRACSSSSSSGYFARRQFNASSGDSKKIVGVFYKANEYATKNPNFPGCVENALGIRDWLESQGHQYIVTDDKEGPDCELEKHIPDLHVLISTPFHPAYVTAERTKKAKNLKLLLTAGIGSDHIDLQAAAAAGLTVAEVTGSNVVSVAEDELMRILILMRNFVPGYNQVVKGEWNVAGIAYRAYDLEGKTIGTVGAGRIGKLLLQRLKPFGCNLLYHDRLQMAPELEKETGAKFVEDLNEMLPKCDVIVINMPLTEKTRGMFNKELIGKLKKVVLIEQRKRSHHGEASSGGCGGEWTHWRVQRRRLGPTASS

SEQ ID NO: 27809 - DNA, 1159 bp, Arabidopsis thaliana
  misc_feature (1)..(1159): Ceres Seq. ID no. 13490301
  misc_feature: MA Experiment ID: 108434 Result: Up-regulated in Transcription
  misc_feature: MA Experiment 108434 PARAMETER Experiment Name: At_Root_Tips_cDNA_P Parameter: Tissue Value: Root Tips
  misc_feature: MA Experiment ID: 108464 Result: Down-regulated in Transcription
  misc_feature: MA Experiment 108464 PARAMETER Experiment Name: At_Germinating_Seeds_cDNA_P Parameter: Age (day) Value: 4 vs. 0
  misc_feature: MA Experiment 108464 PARAMETER Experiment Name: At_Germinating_Seeds_cDNA_P Parameter: Tissue Value: Germinating Seeds
  misc_feature: MA Experiment ID: 20000180 Result: Up-regulated in Transcription
  misc_feature: MA Experiment 20000180 PARAMETER Experiment Name: At_Germinating_Seeds_P Parameter: Age (hr) Value: 24 vs. 0
  misc_feature: MA Experiment 20000180 PARAMETER Experiment Name: At_Germinating_Seeds_P Parameter: Tissue Value: Germinating Seeds
  misc_feature: MA Experiment ID: 20000185 Result: Up-regulated in Transcription
  misc_feature: MA Experiment 20000185 PARAMETER Experiment Name: At_Roots__P Parameter: Age (day) Value: 7 vs. 21
  misc_feature: MA Experiment 20000185 PARAMETER Experiment Name: At_Roots__P Parameter: Organism Value: A. thaliana
  misc_feature: MA Experiment 20000185 PARAMETER Experiment Name: At_Roots__P Parameter: Tissue Value: Roots vs. Whole Plant
  misc_feature: MA Experiment ID: 20000234 Result: Up-regulated in Transcription
  misc_feature: MA Experiment 20000234 PARAMETER Experiment Name: At_Siliques_P Parameter: Age (day) Value: 21
  misc_feature: MA Experiment 20000234 PARAMETER Experiment Name: At_Siliques_P Parameter: Organism Value: A. thaliana
  misc_feature: MA Experiment 20000234 PARAMETER Experiment Name: At_Siliques_P Parameter: Plant Line Value: WS
  misc_feature: MA Experiment 20000234 PARAMETER Experiment Name: At_Siliques_P Parameter: Tissue Value: Less Than 5mm Siliques vs. Whole Plant
  misc_feature: MA Experiment ID: 20000235 Result: Up-regulated in Transcription
  misc_feature: MA Experiment 20000235 PARAMETER Experiment Name: At_Siliques_P Parameter: Age (day) Value: 21
  misc_feature: MA Experiment 20000235 PARAMETER Experiment Name: At_Siliques_P Parameter: Organism Value: A. thaliana
  misc_feature: MA Experiment 20000235 PARAMETER Experiment Name: At_Siliques_P Parameter: Plant Line Value: WS
  misc_feature: MA Experiment 20000235 PARAMETER Experiment Name: At_Siliques_P Parameter: Tissue Value: 5-10mm Siliques vs. Whole Plant
  misc_feature: MA Experiment ID: 20000264 Result: Up-regulated in Transcription
  misc_feature: MA Experiment 20000264 PARAMETER Experiment Name: At_Open_Flower_P Parameter: Age (day) Value: 21
  misc_feature: MA Experiment 20000264 PARAMETER Experiment Name: At_Open_Flower_P Parameter: Plant Line Value: WS
  misc_feature: MA Experiment 20000264 PARAMETER Experiment Name: At_Open_Flower_P Parameter: Tissue Value: Open Flower vs. Whole Plant
  misc_feature: MA Experiment ID: 20000265 Result: Up-regulated in Transcription
  misc_feature: MA Experiment 20000265 PARAMETER Experiment Name: At_Open_Flower_P Parameter: Age (day) Value: 21
  misc_feature: MA Experiment 20000265 PARAMETER Experiment Name: At_Open_Flower_P Parameter: Plant Line Value: WS
  misc_feature: MA Experiment 20000265 PARAMETER Experiment Name: At_Open_Flower_P Parameter: Tissue Value: Closed Flower vs. Whole Plant
  misc_feature: MA Experiment ID: 20000286 Result: Up-regulated in Transcription
  misc_feature: MA Experiment 20000286 PARAMETER Experiment Name: At_Open_Flower_P Parameter: Age (day) Value: 21
  misc_feature: MA Experiment 20000286 PARAMETER Experiment Name: At_Open_Flower_P Parameter: Plant Line Value: WS
  misc_feature: MA Experiment 20000286 PARAMETER Experiment Name: At_Open_Flower_P Parameter: Tissue Value: Half Open vs. Whole Plant
  misc_feature: MA Experiment ID: 20000438 Result: Up-regulated in Transcription
  misc_feature: MA Experiment 20000438 PARAMETER Experiment Name: At_Shoots__P Parameter: Age (day) Value: 14
  misc_feature: MA Experiment 20000438 PARAMETER Experiment Name: At_Shoots__P Parameter: Tissue Value: Shoots vs. Whole Plant
  misc_feature: MA Experiment ID: 20001247 Result: Down-regulated in Transcription
  misc_feature: MA Experiment 20001247 PARAMETER Experiment Name: At_Far-red-induction_P Parameter: Age (day) Value: 7
  misc_feature: MA Experiment 20001247 PARAMETER Experiment Name: At_Far-red-induction_P Parameter: Light Value: Far-red vs. White
  misc_feature: MA Experiment 20001247 PARAMETER Experiment Name: At_Far-red-induction_P Parameter: Organism Value: A. thaliana
  misc_feature: MA Experiment 20001247 PARAMETER Experiment Name: At_Far-red-induction_P Parameter: Plant Line Value: Columbia
  misc_feature: MA Experiment 20001247 PARAMETER Experiment Name: At_Far-red-induction_P Parameter: Timepoint (hr) Value: 1
  misc_feature: MA Experiment 20001247 PARAMETER Experiment Name: At_Far-red-induction_P Parameter: Tissue Value: Whole Plant
  misc_feature: MA Experiment ID: 20001248 Result: Down-regulated in Transcription
  misc_feature: MA Experiment 20001248 PARAMETER Experiment Name: At_Far-red-induction_P Parameter: Age (day) Value: 7
  misc_feature: MA Experiment 20001248 PARAMETER Experiment Name: At_Far-red-induction_P Parameter: Light Value: Far-red vs. White
  misc_feature: MA Experiment 20001248 PARAMETER Experiment Name: At_Far-red-induction_P Parameter: Organism Value: A. thaliana
  misc_feature: MA Experiment 20001248 PARAMETER Experiment Name: At_Far-red-induction_P Parameter: Plant Line Value: Columbia
  misc_feature: MA Experiment 20001248 PARAMETER Experiment Name: At_Far-red-induction_P Parameter: Timepoint (hr) Value: 4
  misc_feature: MA Experiment 20001248 PARAMETER Experiment Name: At_Far-red-induction_P Parameter: Tissue Value: Whole Plant
  misc_feature: MA Experiment ID: 20001451 Result: Down-regulated in Transcription
  misc_feature: MA Experiment 20001451 PARAMETER Experiment Name: At_Far-red-induction_P Parameter: Age (day) Value: 7
  misc_feature: MA Experiment 20001451 PARAMETER Experiment Name: At_Far-red-induction_P Parameter: Light Value: Far-red vs. White
  misc_feature: MA Experiment 20001451 PARAMETER Experiment Name: At_Far-red-induction_P Parameter: Organism Value: A. thaliana
  misc_feature: MA Experiment 20001451 PARAMETER Experiment Name: At_Far-red-induction_P Parameter: Plant Line Value: Columbia
  misc_feature: MA Experiment 20001451 PARAMETER Experiment Name: At_Far-red-induction_P Parameter: Timepoint (hr) Value: 24
  misc_feature: MA Experiment 20001451 PARAMETER Experiment Name: At_Far-red-induction_P Parameter: Tissue Value: Whole Plant
  misc_feature: MA Experiment ID: 20001555 Result: Down-regulated in Transcription
  misc_feature: MA Experiment 20001555 PARAMETER Experiment Name: At_Drought_Soil_Dry_P Parameter: Age (day) Value: 24
  misc_feature: MA Experiment 20001555 PARAMETER Experiment Name: At_Drought_Soil_Dry_P Parameter: Organism Value: A. thaliana
  misc_feature: MA Experiment 20001555 PARAMETER Experiment Name: At_Drought_Soil_Dry_P Parameter: Plant Line Value: WS
  misc_feature: MA Experiment 20001555 PARAMETER Experiment Name: At_Drought_Soil_Dry_P Parameter: Post Timepoint (hr) Value: None
  misc_feature: MA Experiment 20001555 PARAMETER Experiment Name: At_Drought_Soil_Dry_P Parameter: Post-Treatment Value: None
  misc_feature: MA Experiment 20001555 PARAMETER Experiment Name: At_Drought_Soil_Dry_P Parameter: Timepoint (day) Value: 10
  misc_feature: MA Experiment 20001555 PARAMETER Experiment Name: At_Drought_Soil_Dry_P Parameter: Treatment Value: Drought vs. No Drought
  misc_feature: MA Experiment ID: 20001560 Result: Up-regulated in Transcription
  misc_feature: MA Experiment 20001560 PARAMETER Experiment Name: At_Drought_Soil_Dry_P Parameter: Age (day) Value: 28
  misc_feature: MA Experiment 20001560 PARAMETER Experiment Name: At_Drought_Soil_Dry_P Parameter: Organism Value: A. thaliana
  misc_feature: MA Experiment 20001560 PARAMETER Experiment Name: At_Drought_Soil_Dry_P Parameter: Plant Line Value: WS
  misc_feature: MA Experiment 20001560 PARAMETER Experiment Name: At_Drought_Soil_Dry_P Parameter: Post Timepoint (hr) Value: None
  misc_feature: MA Experiment 20001560 PARAMETER Experiment Name: At_Drought_Soil_Dry_P Parameter: Post-Treatment Value: None
  misc_feature: MA Experiment 20001560 PARAMETER Experiment Name: At_Drought_Soil_Dry_P Parameter: Timepoint (day) Value: 14
  misc_feature: MA Experiment 20001560 PARAMETER Experiment Name: At_Drought_Soil_Dry_P Parameter: Treatment Value: Drought vs. No Drought
  misc_feature: MA Experiment ID: 20001905 Result: Up-regulated in Transcription
  misc_feature: MA Experiment 20001905 PARAMETER Experiment Name: At_Drought_Reproduction_P Parameter: Age (day) Value: 40
  misc_feature: MA Experiment 20001905 PARAMETER Experiment Name: At_Drought_Reproduction_P Parameter: Organism Value: A. thaliana
  misc_feature: MA Experiment 20001905 PARAMETER Experiment Name: At_Drought_Reproduction_P Parameter: Plant Line Value: WS
  misc_feature: MA Experiment 20001905 PARAMETER Experiment Name: At_Drought_Reproduction_P Parameter: Timepoint (day) Value: 10
  misc_feature: MA Experiment 20001905 PARAMETER Experiment Name: At_Drought_Reproduction_P Parameter: Tissue Value: Rosettes
  misc_feature: MA Experiment 20001905 PARAMETER Experiment Name: At_Drought_Reproduction_P Parameter: Treatment Value: Drought vs. No Drought
  misc_feature: MA Experiment ID: 20001911 Result: Down-regulated in Transcription
  misc_feature: MA Experiment 20001911 PARAMETER Experiment Name: At_Drought_Reproduction_P Parameter: Age (day) Value: 40
  misc_feature: MA Experiment 20001911 PARAMETER Experiment Name: At_Drought_Reproduction_P Parameter: Organism Value: A. thaliana
  misc_feature: MA Experiment 20001911 PARAMETER Experiment Name: At_Drought_Reproduction_P Parameter: Plant Line Value: WS
  misc_feature: MA Experiment 20001911 PARAMETER Experiment Name: At_Drought_Reproduction_P Parameter: Timepoint (day) Value: 10
  misc_feature: MA Experiment 20001911 PARAMETER Experiment Name: At_Drought_Reproduction_P Parameter: Tissue Value: Flowers
  misc_feature: MA Experiment 20001911 PARAMETER Experiment Name: At_Drought_Reproduction_P Parameter: Treatment Value: Drought vs. No Drought
actttgatcacttttcaacttcctaaatctcttcacagttactttcgattttccgatttcgtagcttcgaaaatgttctccagcagccaattcgagcctaattccggcttctccggcggcggattcatgtcttctcaaccttctcaagcctacgaatcctcctcctccaccgctaagaatcgtgattttcaaggtcttgttccagtgacggtgaagcaaatcaccgaatgtttccaatccagtggtgaaaaatctggtctcgtcatcaatggaatctcactaacaaacgtttcacttgttggattagtgtgtgacaaagatgaatctaaagtcacagaagttagattcactcttgatgatggaacaggacgaattgactgtaaaagatgggtgagtgaaactttcgacgctagagaaatggagtctgtgcgagatggaacttatgtgcgcctcagtggtcatttgaagacttttcagggcaaaactcagcttcttgttttctctgtgaggcctattatggacttcaatgaggttacttttcactacattgagtgtatacacttctactcccagaactctgaatcacagagacaacaagtcggtgatgtcactcagtcagttaacaccacatttcaaggtggatcaaacacaaaccaggcaacactattgaaccctgtggtttcttctcaaaacaatgatggcaatgggcgcaagaacttggatgatatgattctagactatctaaagcaacctgcttgcactgcaagacaacaggggatacatatcgatgaaattgctcagcagttgaagatcccaaaaaacaagctagagggcgttgttcaatcactggaaggagatggtctaatatactcgacaatcgatgagtatcacttcaagcacgtggagctttgatctatctaatagtcatctagagtttggttaatccgtagatagagtcattagtattgtctggtgatttaaaagatgtttcaatatccagaactattaggatcacgtctagttcacttctgaaactttggtagtgtcatgcttaattctggtgttggattgtttccttgtttctttcaatttggtaagccaacttcaaaagttcaaagttgattttttgtttaatctgaaactatatttggtttaagac

SEQ ID NO: 27810 - protein, 303 aa, Arabidopsis thaliana
  peptide (1)..(303): Ceres Seq. ID no. 13490302
  misc_feature (97)..(172): Pfam Name: OB-fold nucleic acid binding domain Pfam Description: OB-fold nucleic acid binding domain
  misc_feature (26)..(302): Homolog of NCBI NO: 34871794 NR Description: p32-subunit of replication protein A [Rattus
  misc_feature (26)..(302): Homolog of NCBI NO: 2498847 NR Description: REPLICATION PROTEIN A 32 KD SUBUNIT (RP-A) (RF-A)
  misc_feature (25)..(299): Homolog of NCBI NO: 13516746 NR Description: replication protein A 30kDa
  misc_feature (25)..(299): Homolog of NCBI NO: 9801268 NR Description: replication protein A2 [Oryza sativa]
  misc_feature (31)..(299): Homolog of NCBI NO: 6728969 NR Description: putative replication factor A [Arabidopsis
  misc_feature (31)..(299): Homolog of NCBI NO: 18396383 NR Description: replication factor - related [Arabidopsis
  misc_feature (25)..(299): Homolog of NCBI NO: 31790111 NR Description: RPA 32kDa [Pisum sativum]
  misc_feature (226)..(303): Homolog of NCBI NO: 25347925 NR Description: probable replication protein A1 [imported] -
  misc_feature (25)..(222): Homolog of NCBI NO: 25347925 NR Description: probable replication protein A1 [imported] -
  misc_feature (25)..(303): Homolog of NCBI NO: 18400560 NR Description: replication protein, putative [Arabidopsis
TLITFQLPKSLHSYFRFSDFVASKMFSSSQFEPNSGFSGGGFMSSQPSQAYESSSSTAKNRDFQGLVPVTVKQITECFQSSGEKSGLVINGISLTNVSLVGLVCDKDESKVTEVRFTLDDGTGRIDCKRWVSETFDAREMESVRDGTYVRLSGHLKTFQGKTQLLVFSVRPIMDFNEVTFHYIECIHFYSQNSESQRQQVGDVTQSVNTTFQGGSNTNQATLLNPVVSSQNNDGNGRKNLDDMILDYLKQPACTARQQGIHIDEIAQQLKIPKNKLEGVVQSLEGDGLIYSTIDEYHFKHVEL

SEQ ID NO: 27811 - protein, 279 aa, Arabidopsis thaliana
  peptide (1)..(279): Ceres Seq. ID no. 13490303
  misc_feature (73)..(148): Pfam Name: OB-fold nucleic acid binding domain Pfam Description: OB-fold nucleic acid binding domain
  misc_feature (2)..(278): Homolog of NCBI NO: 34871794 NR Description: p32-subunit of replication protein A [Rattus
  misc_feature (2)..(278): Homolog of NCBI NO: 2498847 NR Description: REPLICATION PROTEIN A 32 KD SUBUNIT (RP-A) (RF-A)
  misc_feature (1)..(275): Homolog of NCBI NO: 13516746 NR Description: replication protein A 30kDa
  misc_feature (1)..(275): Homolog of NCBI NO: 9801268 NR Description: replication protein A2 [Oryza sativa]
  misc_feature (7)..(275): Homolog of NCBI NO: 6728969 NR Description: putative replication factor A [Arabidopsis
  misc_feature (7)..(275): Homolog of NCBI NO: 18396383 NR Description: replication factor - related [Arabidopsis
  misc_feature (1)..(275): Homolog of NCBI NO: 31790111 NR Description: RPA 32kDa [Pisum sativum]
  misc_feature (202)..(279): Homolog of NCBI NO: 25347925 NR Description: probable replication protein A1 [imported] -
  misc_feature (1)..(198): Homolog of NCBI NO: 25347925 NR Description: probable replication protein A1 [imported] -
  misc_feature (1)..(279): Homolog of NCBI NO: 18400560 NR Description: replication protein, putative [Arabidopsis
MFSSSQFEPNSGFSGGGFMSSQPSQAYESSSSTAKNRDFQGLVPVTVKQITECFQSSGEKSGLVINGISLTNVSLVGLVCDKDESKVTEVRFTLDDGTGRIDCKRWVSETFDAREMESVRDGTYVRLSGHLKTFQGKTQLLVFSVRPIMDFNEVTFHYIECIHFYSQNSESQRQQVGDVTQSVNTTFQGGSNTNQATLLNPVVSSQNNDGNGRKNLDDMILDYLKQPACTARQQGIHIDEIAQQLKIPKNKLEGVVQSLEGDGLIYSTIDEYHFKHVEL

SEQ ID NO: 27812 - protein, 261 aa, Arabidopsis thaliana
  peptide (1)..(261): Ceres Seq. ID no. 13490304
  misc_feature (55)..(130): Pfam Name: OB-fold nucleic acid binding domain Pfam Description: OB-fold nucleic acid binding domain
  misc_feature (1)..(260): Homolog of NCBI NO: 34871794 NR Description: p32-subunit of replication protein A [Rattus
  misc_feature (1)..(260): Homolog of NCBI NO: 2498847 NR Description: REPLICATION PROTEIN A 32 KD SUBUNIT (RP-A) (RF-A)
  misc_feature (1)..(257): Homolog of NCBI NO: 13516746 NR Description: replication protein A 30kDa
  misc_feature (1)..(257): Homolog of NCBI NO: 9801268 NR Description: replication protein A2 [Oryza sativa]
  misc_feature (1)..(257): Homolog of NCBI NO: 6728969 NR Description: putative replication factor A [Arabidopsis
  misc_feature (1)..(257): Homolog of NCBI NO: 18396383 NR Description: replication factor - related [Arabidopsis
  misc_feature (1)..(257): Homolog of NCBI NO: 31790111 NR Description: RPA 32kDa [Pisum sativum]
  misc_feature (184)..(261): Homolog of NCBI NO: 25347925 NR Description: probable replication protein A1 [imported] -
  misc_feature (1)..(180): Homolog of NCBI NO: 25347925 NR Description: probable replication protein A1 [imported] -
  misc_feature (1)..(261): Homolog of NCBI NO: 18400560 NR Description: replication protein, putative [Arabidopsis
MSSQPSQAYESSSSTAKNRDFQGLVPVTVKQITECFQSSGEKSGLVINGISLTNVSLVGLVCDKDESKVTEVRFTLDDGTGRIDCKRWVSETFDAREMESVRDGTYVRLSGHLKTFQGKTQLLVFSVRPIMDFNEVTFHYIECIHFYSQNSESQRQQVGDVTQSVNTTFQGGSNTNQATLLNPVVSSQNNDGNGRKNLDDMILDYLKQPACTARQQGIHIDEIAQQLKIPKNKLEGVVQSLEGDGLIYSTIDEYHFKHVEL

SEQ ID NO: 27813 - DNA, 604 bp, Arabidopsis thaliana
  misc_feature (1)..(604): Ceres Seq. ID no. 12395010
  misc_feature: MA Experiment ID: 108573 Result: Down-regulated in Transcription
  misc_feature: MA Experiment 108573 PARAMETER Experiment Name: At_Drought_cDNA_P Parameter: Timepoint (hr) Value: 6
  misc_feature: MA Experiment 108573 PARAMETER Experiment Name: At_Drought_cDNA_P Parameter: Tissue Value: Aerial
  misc_feature: MA Experiment 108573 PARAMETER Experiment Name: At_Drought_cDNA_P Parameter: Treatment Value: Drought vs. No Drought
  misc_feature: MA Experiment ID: 108576 Result: Down-regulated in Transcription
  misc_feature: MA Experiment 108576 PARAMETER Experiment Name: At_42deg_Heat_cDNA_P Parameter: Temperature (deg C) Value: 42 vs. 22
  misc_feature: MA Experiment 108576 PARAMETER Experiment Name: At_42deg_Heat_cDNA_P Parameter: Timepoint (hr) Value: 1
  misc_feature: MA Experiment 108576 PARAMETER Experiment Name: At_42deg_Heat_cDNA_P Parameter: Tissue Value: Aerial
  misc_feature: MA Experiment ID: 108577 Result: Down-regulated in Transcription
  misc_feature: MA Experiment 108577 PARAMETER Experiment Name: At_42deg_Heat_cDNA_P Parameter: Temperature (deg C) Value: 42 vs. 22
  misc_feature: MA Experiment 108577 PARAMETER Experiment Name: At_42deg_Heat_cDNA_P Parameter: Timepoint (hr) Value: 6
  misc_feature: MA Experiment 108577 PARAMETER Experiment Name: At_42deg_Heat_cDNA_P Parameter: Tissue Value: Aerial
  misc_feature: MA Experiment ID: 20000093 Result: Down-regulated in Transcription
  misc_feature: MA Experiment 20000093 PARAMETER Experiment Name: At_42deg_Heat_cDNA_P Parameter: Temperature (deg C) Value: 42 vs. 22
  misc_feature: MA Experiment 20000093 PARAMETER Experiment Name: At_42deg_Heat_cDNA_P Parameter: Timepoint (hr) Value: 0.5
  misc_feature: MA Experiment 20000093 PARAMETER Experiment Name: At_42deg_Heat_cDNA_P Parameter: Tissue Value: Aerial
  misc_feature: MA Experiment ID: 20000111 Result: Down-regulated in Transcription
  misc_feature: MA Experiment 20000111 PARAMETER Experiment Name: At_42deg_Heat_cDNA_P Parameter: Temperature (deg C) Value: 42 vs. 22
  misc_feature: MA Experiment 20000111 PARAMETER Experiment Name: At_42deg_Heat_cDNA_P Parameter: Timepoint (hr) Value: 6
  misc_feature: MA Experiment 20000111 PARAMETER Experiment Name: At_42deg_Heat_cDNA_P Parameter: Tissue Value: Aerial
  misc_feature: MA Experiment ID: 20000113 Result: Down-regulated in Transcription
  misc_feature: MA Experiment 20000113 PARAMETER Experiment Name: At_42deg_Heat_cDNA_P Parameter: Temperature (deg C) Value: 42 vs. 22
  misc_feature: MA Experiment 20000113 PARAMETER Experiment Name: At_42deg_Heat_cDNA_P Parameter: Timepoint (hr) Value: 8
  misc_feature: MA Experiment 20000113 PARAMETER Experiment Name: At_42deg_Heat_cDNA_P Parameter: Tissue Value: Aerial
  misc_feature: MA Experiment ID: 20000144 Result: Down-regulated in Transcription
  misc_feature: MA Experiment 20000144 PARAMETER Experiment Name: At_42deg_Heat_cDNA_P Parameter: Temperature (deg C) Value: 42 vs. 22
  misc_feature: MA Experiment 20000144 PARAMETER Experiment Name: At_42deg_Heat_cDNA_P Parameter: Timepoint (hr) Value: 1
  misc_feature: MA Experiment 20000144 PARAMETER Experiment Name: At_42deg_Heat_cDNA_P Parameter: Tissue Value: Aerial
  misc_feature: MA Experiment ID: 20000224 Result: Down-regulated in Transcription
  misc_feature: MA Experiment ID: 20000495 Result: Down-regulated in Transcription
  misc_feature: MA Experiment 20000495 PARAMETER Experiment Name: At_Guard_Cells_P Parameter: Harvest Date Value: 8/2/2002
  misc_feature: MA Experiment 20000495 PARAMETER Experiment Name: At_Guard_Cells_P Parameter: Organism Value: A. thaliana
  misc_feature: MA Experiment 20000495 PARAMETER Experiment Name: At_Guard_Cells_P Parameter: Tissue Value: Guard Cells vs. Leaves
  misc_feature: MA Experiment ID: 20001451 Result: Down-regulated in Transcription
  misc_feature: MA Experiment 20001451 PARAMETER Experiment Name: At_Far-red-induction_P Parameter: Age (day) Value: 7
  misc_feature: MA Experiment 20001451 PARAMETER Experiment Name: At_Far-red-induction_P Parameter: Light Value: Far-red vs. White
  misc_feature: MA Experiment 20001451 PARAMETER Experiment Name: At_Far-red-induction_P Parameter: Organism Value: A. thaliana
  misc_feature: MA Experiment 20001451 PARAMETER Experiment Name: At_Far-red-induction_P Parameter: Plant Line Value: Columbia
  misc_feature: MA Experiment 20001451 PARAMETER Experiment Name: At_Far-red-induction_P Parameter: Timepoint (hr) Value: 24
  misc_feature: MA Experiment 20001451 PARAMETER Experiment Name: At_Far-red-induction_P Parameter: Tissue Value: Whole Plant
gaagtaacatactttttacaatcacatttttgaagaactttcattccataaatctacagatctttgtgtatcaagtaaagagatgtcaggaagaggaaagggaggaaaaggattgggaaagggaggagcgaagaggcacaggaaggttctgagggataacattcaaggaatcaccaagcctgctattcgtcgtcttgctcgtagaggtggtgtcaagcgtatcagtggtctcatctactaagagaccagaggtgtcctcaagatcttcctcgagaatgttatccgtgacgccgttacctacactgagcacgccaggaggaagacggtgaccgccatggatgttatctacgctttgaagaggcaaggtcgtactctctacggtttcggaggttaatccgatttgggggattagggtttatgcaagtttggggatttcttcttgtttctgagatccgtgttaaatggtttgaattagtcaaaagtaaattcaggagttagtttttgtttctcgtttttcgttgttgttagccaatgtgatgtagtagttaattatcttttgcaagctttgtgctaagaaaatctaatgagaatgatccatttgctt

SEQ ID NO: 27814 - protein, 52 aa, Arabidopsis thaliana
  peptide (1)..(52): Ceres Seq. ID no. 12395011
  misc_feature (1)..(52): Homolog of NCBI NO: 37590121 NR Description: Hist1h4h protein [Mus musculus]
  misc_feature (1)..(52): Homolog of NCBI NO: 34858262 NR Description: similar to germinal histone H4 gene [Rattus
  misc_feature (1)..(52): Homolog of NCBI NO: 27692935 NR Description: Similar to germinal histone H4 gene [Mus musculus]
  misc_feature (1)..(52): Homolog of NCBI NO: 4504301 NR Description: H4 histone family, member A [Homo sapiens]
  misc_feature (1)..(52): Homolog of NCBI NO: 1806283 NR Description: Histone H4 homologue [Sesbania rostrata]
  misc_feature (1)..(52): Homolog of NCBI NO: 462243 NR Description: Histone H4
  misc_feature (1)..(52): Homolog of NCBI NO: 27692960 NR Description: Similar to germinal histone H4 gene [Mus musculus]
  misc_feature (1)..(52): Homolog of NCBI NO: 17540668 NR Description: Histone H4 family member [Caenorhabditis elegans]
  misc_feature (1)..(52): Homolog of NCBI NO: 15226944 NR Description: histone H4
  misc_feature (1)..(52): Homolog of NCBI NO: 34876368 NR Description: similar to germinal histone H4 gene [Rattus
MSGRGKGGKGLGKGGAKRHRKVLRDNIQGITKPAIRRLARRGGVKRISGLIY

SEQ ID NO: 27815 - protein, 49 aa, Arabidopsis thaliana
  peptide (1)..(49): Ceres Seq. ID no. 12395012
SNILFTITFLKNFHSINLQIFVYQVKRCQEEEREEKDWEREERRGTGRF

SEQ ID NO: 27816 - DNA, 1204 bp, Arabidopsis thaliana
  misc_feature (1)..(1204): Ceres Seq. ID no. 12384946
  misc_feature: MA Experiment ID: 20000171 Result: Up-regulated in Transcription
  misc_feature: MA Experiment 20000171 PARAMETER Experiment Name: At_42deg_Heat_P Parameter: Age (day) Value: 14
  misc_feature: MA Experiment 20000171 PARAMETER Experiment Name: At_42deg_Heat_P Parameter: Organism Value: A. thaliana
  misc_feature: MA Experiment 20000171 PARAMETER Experiment Name: At_42deg_Heat_P Parameter: Plant Line Value: WS
  misc_feature: MA Experiment 20000171 PARAMETER Experiment Name: At_42deg_Heat_P Parameter: Temperature (deg C) Value: 42 vs. 22
  misc_feature: MA Experiment 20000171 PARAMETER Experiment Name: At_42deg_Heat_P Parameter: Timepoint (hr) Value: 1
  misc_feature: MA Experiment 20000171 PARAMETER Experiment Name: At_42deg_Heat_P Parameter: Tissue Value: Aerial
  misc_feature: MA Experiment ID: 20000173 Result: Up-regulated in Transcription
  misc_feature: MA Experiment 20000173 PARAMETER Experiment Name: At_42deg_Heat_P Parameter: Age (day) Value: 14
  misc_feature: MA Experiment 20000173 PARAMETER Experiment Name: At_42deg_Heat_P Parameter: Organism Value: A. thaliana
  misc_feature: MA Experiment 20000173 PARAMETER Experiment Name: At_42deg_Heat_P Parameter: Plant Line Value: WS
  misc_feature: MA Experiment 20000173 PARAMETER Experiment Name: At_42deg_Heat_P Parameter: Temperature (deg C) Value: 42 vs. 22
  misc_feature: MA Experiment 20000173 PARAMETER Experiment Name: At_42deg_Heat_P Parameter: Timepoint (hr) Value: 6
  misc_feature: MA Experiment 20000173 PARAMETER Experiment Name: At_42deg_Heat_P Parameter: Tissue Value: Aerial
  misc_feature: MA Experiment ID: 20000185 Result: Up-regulated in Transcription
  misc_feature: MA Experiment 20000185 PARAMETER Experiment Name: At_Roots__P Parameter: Age (day) Value: 7 vs. 21
  misc_feature: MA Experiment 20000185 PARAMETER Experiment Name: At_Roots__P Parameter: Organism Value: A. thaliana
  misc_feature: MA Experiment 20000185 PARAMETER Experiment Name: At_Roots__P Parameter: Tissue Value: Roots vs. Whole Plant
  misc_feature: MA Experiment ID: 20000265 Result: Up-regulated in Transcription
  misc_feature: MA Experiment 20000265 PARAMETER Experiment Name: At_Open_Flower_P Parameter: Age (day) Value: 21
  misc_feature: MA Experiment 20000265 PARAMETER Experiment Name: At_Open_Flower_P Parameter: Plant Line Value: WS
  misc_feature: MA Experiment 20000265 PARAMETER Experiment Name: At_Open_Flower_P Parameter: Tissue Value: Closed Flower vs. Whole Plant
  misc_feature: MA Experiment ID: 20000437 Result: Up-regulated in Transcription
  misc_feature: MA Experiment 20000437 PARAMETER Experiment Name: At_Drought_P Parameter: Age (day) Value: 8
  misc_feature: MA Experiment 20000437 PARAMETER Experiment Name: At_Drought_P Parameter: Organism Value: A. thaliana
  misc_feature: MA Experiment 20000437 PARAMETER Experiment Name: At_Drought_P Parameter: Plant Line Value: WS
  misc_feature: MA Experiment 20000437 PARAMETER Experiment Name: At_Drought_P Parameter: Timepoint (hr) Value: 24
  misc_feature: MA Experiment 20000437 PARAMETER Experiment Name: At_Drought_P Parameter: Tissue Value: Whole Plant
  misc_feature: MA Experiment 20000437 PARAMETER Experiment Name: At_Drought_P Parameter: Treatment Value: Drought vs. No Drought
  misc_feature: MA Experiment ID: 20000794 Result: Up-regulated in Transcription
  misc_feature: MA Experiment 20000794 PARAMETER Experiment Name: At_Petals_P Parameter: Age (day) Value: 23-25 days
  misc_feature: MA Experiment 20000794 PARAMETER Experiment Name: At_Petals_P Parameter: Plant Line Value: WS
  misc_feature: MA Experiment 20000794 PARAMETER Experiment Name: At_Petals_P Parameter: Tissue Value: Petals vs. Whole plant
  misc_feature: MA Experiment ID: 20001248 Result: Down-regulated in Transcription
  misc_feature: MA Experiment 20001248 PARAMETER Experiment Name: At_Far-red-induction_P Parameter: Age (day) Value: 7
  misc_feature: MA Experiment 20001248 PARAMETER Experiment Name: At_Far-red-induction_P Parameter: Light Value: Far-red vs. White
  misc_feature: MA Experiment 20001248 PARAMETER Experiment Name: At_Far-red-induction_P Parameter: Organism Value: A. thaliana
  misc_feature: MA Experiment 20001248 PARAMETER Experiment Name: At_Far-red-induction_P Parameter: Plant Line Value: Columbia
  misc_feature: MA Experiment 20001248 PARAMETER Experiment Name: At_Far-red-induction_P Parameter: Timepoint (hr) Value: 4
  misc_feature: MA Experiment 20001248 PARAMETER Experiment Name: At_Far-red-induction_P Parameter: Tissue Value: Whole Plant
  misc_feature: MA Experiment ID: 20001559 Result: Up-regulated in Transcription
  misc_feature: MA Experiment 20001559 PARAMETER Experiment Name: At_Drought_Soil_Dry_P Parameter: Age (day) Value: 28
  misc_feature: MA Experiment 20001559 PARAMETER Experiment Name: At_Drought_Soil_Dry_P Parameter: Organism Value: A. thaliana
  misc_feature: MA Experiment 20001559 PARAMETER Experiment Name: At_Drought_Soil_Dry_P Parameter: Plant Line Value: WS
  misc_feature: MA Experiment 20001559 PARAMETER Experiment Name: At_Drought_Soil_Dry_P Parameter: Post Timepoint (hr) Value: 29
  misc_feature: MA Experiment 20001559 PARAMETER Experiment Name: At_Drought_Soil_Dry_P Parameter: Post-Treatment Value: Re-Water vs. No Drought
  misc_feature: MA Experiment 20001559 PARAMETER Experiment Name: At_Drought_Soil_Dry_P Parameter: Timepoint (day) Value: 14
  misc_feature: MA Experiment 20001559 PARAMETER Experiment Name: At_Drought_Soil_Dry_P Parameter: Treatment Value: Drought vs. No Drought
  misc_feature: MA Experiment ID: 20001757 Result: Down-regulated in Transcription
  misc_feature: MA Experiment 20001757 PARAMETER Experiment Name: At_50mM_NH4NO3_L-to-H_P Parameter: Timepoint (hr) Value: 6
  misc_feature: MA Experiment 20001757 PARAMETER Experiment Name: At_50mM_NH4NO3_L-to-H_P Parameter: Tissue Value: Leaf
  misc_feature: MA Experiment 20001757 PARAMETER Experiment Name: At_50mM_NH4NO3_L-to-H_P Parameter: Treatment Value: 50mM NH4NO3 vs 100mM Mannitol
  misc_feature: MA Experiment ID: 20001905 Result: Up-regulated in Transcription
  misc_feature: MA Experiment 20001905 PARAMETER Experiment Name: At_Drought_Reproduction_P Parameter: Age (day) Value: 40
  misc_feature: MA Experiment 20001905 PARAMETER Experiment Name: At_Drought_Reproduction_P Parameter: Organism Value: A. thaliana
  misc_feature: MA Experiment 20001905 PARAMETER Experiment Name: At_Drought_Reproduction_P Parameter: Plant Line Value: WS
  misc_feature: MA Experiment 20001905 PARAMETER Experiment Name: At_Drought_Reproduction_P Parameter: Timepoint (day) Value: 10
  misc_feature: MA Experiment 20001905 PARAMETER Experiment Name: At_Drought_Reproduction_P Parameter: Tissue Value: Rosettes
  misc_feature: MA Experiment 20001905 PARAMETER Experiment Name: At_Drought_Reproduction_P Parameter: Treatment Value: Drought vs. No Drought
  misc_feature: MA Experiment ID: 20001911 Result: Up-regulated in Transcription
  misc_feature: MA Experiment 20001911 PARAMETER Experiment Name: At_Drought_Reproduction_P Parameter: Age (day) Value: 40
  misc_feature: MA Experiment 20001911 PARAMETER Experiment Name: At_Drought_Reproduction_P Parameter: Organism Value: A. thaliana
  misc_feature: MA Experiment 20001911 PARAMETER Experiment Name: At_Drought_Reproduction_P Parameter: Plant Line Value: WS
  misc_feature: MA Experiment 20001911 PARAMETER Experiment Name: At_Drought_Reproduction_P Parameter: Timepoint (day) Value: 10
  misc_feature: MA Experiment 20001911 PARAMETER Experiment Name: At_Drought_Reproduction_P Parameter: Tissue Value: Flowers
  misc_feature: MA Experiment 20001911 PARAMETER Experiment Name: At_Drought_Reproduction_P Parameter: Treatment Value: Drought vs. No Drought
gtctcctttccagaacaatctaacgctttctcgaacatcttcttcttcttctttctcgaaattatttttccagtgatcaatttcttctcttctagatttttacaggaactaattttctgctctgaggtatcagatgagtagccgatggaatcgtacgatctacgttgggaatttgcctggagatattcgcaagtgtgaggttgaagatctcttctacaagtatggaccaattgtggacattgatttgaagattccaccgagacctcctggttatgcctttgtcgagtttgaagatcctcgtgatgcagacgatgcaatttatggacgtgatggttatgattttgatgggtgtcgacttcgggttgagattgcacatggtggtcgtagattttcaccatcagttgataggtacagcagcagctacagtgcgagccgtgcaccttcaagacgctctgactatcgcgtgcttgtgaccggattaccgccttctgcttcgtggcaggaccttaaggatcacatgcgcaaagctggagatgtctgcttctctgaagttttccctgaccgtaaaggcatgtctggggttgtggattatagcaactatgatgatatgaagtacgcaataaggaaacttgatgccactgaatttcgaaatgctttctctagtgcttatatacgggtgagggaatatgagtcgaggagtgtgagtcgaagcccagatgattctaaaagctatagaagcaggagtcggagccgtggtccaagctgtagctatagtagcaagagcaggagtgtgtcacctgctagatccatttccccgcgttcacggccccttagtcgttctcgctcgccatacagctctgtctcaaggtcccaatcaagatcaaaatcaagatcaagatcaagatcgaattctccagtttcacctgtgatatctggatgaaaatgaaaactggccactggctgtacccgaatcgtctcaagcttctcaggctccactgctaatagaatttgattccgatttgggattattatactggtcttcttgtatgggacgaccaatatgtctttctagttttagttgtgaacctggaattggtctgttattgtgtcattaaaaagccggaaactctgtctcggctgcataataaagttcatcagacgttgtgttgggtgtggtgaggtttttccatacatatacatttac

SEQ ID NO: 27817 - protein, 268 aa, Arabidopsis thaliana
  peptide (1)..(268): Ceres Seq. ID no. 12384947
  misc_feature (9)..(77): Pfam Name: RNA recognition motif. (a.k.a. RRM, RBD, or RNP domain) Pfam Description: RNA recognition motif. (a.k.a. RRM, RBD, or RNP
  misc_feature (1)..(261): Homolog of NCBI NO: 33146854 NR Description: putative pre-mRNA splicing factor SF2
  misc_feature (1)..(256): Homolog of NCBI NO: 30678395 NR Description: pre-mRNA splicing factor SF2 (SR1 protein)
  misc_feature (1)..(256): Homolog of NCBI NO: 2443473 NR Description: ASF/SF2 homolog [Arabidopsis thaliana]
  misc_feature (1)..(265): Homolog of NCBI NO: 5815235 NR Description: splicing factor SR1 [Arabidopsis thaliana]
  misc_feature (1)..(265): Homolog of NCBI NO: 30678391 NR Description: pre-mRNA splicing factor SF2 (SR1 protein)
  misc_feature (62)..(268): Homolog of NCBI NO: 21954085 NR Description: putative SF2/ASF splicing modulator Srp30 protein
  misc_feature (1)..(218): Homolog of NCBI NO: 25386570 NR Description: hypothetical protein [imported] - Arabidopsis
  misc_feature (1)..(248): Homolog of NCBI NO: 4775271 NR Description: SF2/ASF-like splicing modulator Srp30, variant 1
  misc_feature (1)..(265): Homolog of NCBI NO: 22329428 NR Description: arginine/serine-rich splicing factor, atSRp30
  misc_feature (1)..(268): Homolog of NCBI NO: 4775270 NR Description: SF2/ASF-like splicing modulator Srp30
MSSRWNRTIYVGNLPGDIRKCEVEDLFYKYGPIVDIDLKIPPRPPGYAFVEFEDPRDADDAIYGRDGYDFDGCRLRVEIAHGGRRFSPSVDRYSSSYSASRAPSRRSDYRVLVTGLPPSASWQDLKDHMRKAGDVCFSEVFPDRKGMSGVVDYSNYDDMKYAIRKLDATEFRNAFSSAYIRVREYESRSVSRSPDDSKSYRSRSRSRGPSCSYSSKSRSVSPARSISPRSRPLSRSRSPYSSVSRSQSRSKSRSRSRSNSPVSPVISG

SEQ ID NO: 27818 - protein, 140 aa, Arabidopsis thaliana
  peptide (1)..(140): Ceres Seq. ID no. 12384948
  misc_feature (1)..(133): Homolog of NCBI NO: 33146854 NR Description: putative pre-mRNA splicing factor SF2
  misc_feature (1)..(128): Homolog of NCBI NO: 30678395 NR Description: pre-mRNA splicing factor SF2 (SR1 protein)
  misc_feature (1)..(128): Homolog of NCBI NO: 2443473 NR Description: ASF/SF2 homolog [Arabidopsis thaliana]
  misc_feature (1)..(137): Homolog of NCBI NO: 5815235 NR Description: splicing factor SR1 [Arabidopsis thaliana]
  misc_feature (1)..(137): Homolog of NCBI NO: 30678391 NR Description: pre-mRNA splicing factor SF2 (SR1 protein)
  misc_feature (1)..(140): Homolog of NCBI NO: 21954085 NR Description: putative SF2/ASF splicing modulator Srp30 protein
  misc_feature (1)..(90): Homolog of NCBI NO: 25386570 NR Description: hypothetical protein [imported] - Arabidopsis
  misc_feature (1)..(120): Homolog of NCBI NO: 4775271 NR Description: SF2/ASF-like splicing modulator Srp30, variant 1
  misc_feature (1)..(137): Homolog of NCBI NO: 22329428 NR Description: arginine/serine-rich splicing factor, atSRp30
  misc_feature (1)..(140): Homolog of NCBI NO: 4775270 NR Description: SF2/ASF-like splicing modulator Srp30
MRKAGDVCFSEVFPDRKGMSGVVDYSNYDDMKYAIRKLDATEFRNAFSSAYIRVREYESRSVSRSPDDSKSYRSRSRSRGPSCSYSSKSRSVSPARSISPRSRPLSRSRSPYSSVSRSQSRSKSRSRSRSNSPVSPVISG

SEQ ID NO: 27819 - DNA, 1164 bp, Arabidopsis thaliana
  misc_feature (1)..(1164): Ceres Seq. ID no. 12421667
  misc_feature: MA Experiment ID: 108595 Result: Down-regulated in Transcription
  misc_feature: MA Experiment 108595 PARAMETER Experiment Name: At_Ler-pi_Ovule_cDNA_P Parameter: Plant Line Value: null
  misc_feature: MA Experiment ID: 20000224 Result: Down-regulated in Transcription
gaagaagatcgatcaatcaatcatcaaactctctgtgtgccacatgcattactactgttgacttgttcaataaaggtaaagtaagatcaatccggcgaatcttctttcgttttccggcaccgatctcggtggatctccgattcacatggcggcggataatgcttatctgatgcagtttgttgacgaaacctctttttacaaccgaatcgttctgagtcatcttttgccggcgaatctatgggaacccttacctcattttctccagacatggctccgaaattacctcgccggaaccctactatacttcatctccggtttcctctggtgcttctacatctattaccttaaaatcaacgtttaccttcccaaagatgcaattcctacaataaaggctatgcgtttgcaaatgtttgtggcaatgaaggctatgcatggtacactctttcttccaactgtctccgagagtatgattgaacgtggttggaccaaatgttttgctagcataggcgaatttcggttggattctgtattttgtttacatcgccatctatcttgttttcgttgagtttggtatttattggatgcacagagagcttcatgacattaagcctctctataagtatctccatgccacccatcatatctacaacaagcagaatacactctctccatttgccgggcttgcatttcacccagtagacgggatacttcaggctgtaccgcatgtgatagcgctgtttatagtgccaattcatttcacaactcatataggtcttttgttcatggaagcgatatggacggcgaacatccatgactgcatccatggcaacatctggccagtaatgggtgcaggataccatacgatacaccacacgacatacaagcataactatggtcattataccatatggatggattggatgtttggctctcttagggatcctctcttagaagaagatgacaacaaagacagcttcaagaaagcagagtgagaatgcccacttgggttttgttcttctgttttgtcttgtgttgttgttgttcaaagtttcagcctttcttgttctttttcttcttcttcttattcatgtgtctctctcaacctttccaattatattgttacaaacatttgctgtctagtttaaaacatgtaaatgtttgatg

SEQ ID NO: 27820 - protein, 139 aa, Arabidopsis thaliana
  peptide (1)..(139): Ceres Seq. ID no. 12421668
  misc_feature (7)..(122): Homolog of NCBI NO: 34895618 NR Description: putative sterol-C5(6)-desaturase
  misc_feature (7)..(122): Homolog of NCBI NO: 4426627 NR Description: sterol-C5(6)-desaturase homolog [Nicotiana
  misc_feature (7)..(122): Homolog of NCBI NO: 33301670 NR Description: Delta-7-sterol-C5(6)-desaturase (Delta-7-C-5
  misc_feature (1)..(123): Homolog of NCBI NO: 15232937 NR Description: putative sterol-C5-desaturase; protein id:
  misc_feature (1)..(123): Homolog of NCBI NO: 2129741 NR Description: C-5 sterol desaturase (EC 1.-.-.-) - Arabidopsis
  misc_feature (1)..(123): Homolog of NCBI NO: 5031219 NR Description: delta7 sterol C-5 desaturase [Arabidopsis
  misc_feature (1)..(123): Homolog of NCBI NO: 21594971 NR Description: sterol-C5-desaturase [Arabidopsis thaliana]
  misc_feature (1)..(123): Homolog of NCBI NO: 15232935 NR Description: sterol-C5-desaturase
MAADNAYLMQFVDETSFYNRIVLSHLLPANLWEPLPHFLQTWLRNYLAGTLLYFISGFLWCFYIYYLKINVYLPKDAIPTIKAMRLQMFVAMKAMHGTLFLPTVSESMIERGWTKCFASIGEFRLDSVFCLHRHLSCFR

SEQ ID NO: 27821 - protein, 136 aa, Arabidopsis thaliana
  peptide (1)..(136): Ceres Seq. ID no. 12421669
  misc_feature (1)..(134): Homolog of NCBI NO: 25742651 NR Description: sterol-C5-desaturase (fungal ERG3,
  misc_feature (1)..(32): Homolog of NCBI NO: 34895618 NR Description: putative sterol-C5(6)-desaturase
  misc_feature (67)..(126): Homolog of NCBI NO: 34895618 NR Description: putative sterol-C5(6)-desaturase
  misc_feature (1)..(125): Homolog of NCBI NO: 4426627 NR Description: sterol-C5(6)-desaturase homolog [Nicotiana
  misc_feature (1)..(129): Homolog of NCBI NO: 33301670 NR Description: Delta-7-sterol-C5(6)-desaturase (Delta-7-C-5
  misc_feature (1)..(136): Homolog of NCBI NO: 15232937 NR Description: putative sterol-C5-desaturase; protein id:
  misc_feature (1)..(136): Homolog of NCBI NO: 2129741 NR Description: C-5 sterol desaturase (EC 1.-.-.-) - Arabidopsis
  misc_feature (1)..(136): Homolog of NCBI NO: 5031219 NR Description: delta7 sterol C-5 desaturase [Arabidopsis
  misc_feature (1)..(136): Homolog of NCBI NO: 21594971 NR Description: sterol-C5-desaturase [Arabidopsis thaliana]
  misc_feature (1)..(136): Homolog of NCBI NO: 15232935 NR Description: sterol-C5-desaturase
MHRELHDIKPLYKYLHATHHIYNKQNTLSPFAGLAFHPVDGILQAVPHVIALFIVPIHFTTHIGLLFMEAIWTANIHDCIHGNIWPVMGAGYHTIHHTTYKHNYGHYTIWMDWMFGSLRDPLLEEDDNKDSFKKAE

SEQ ID NO: 27822 - protein, 131 aa, Arabidopsis thaliana
  peptide (1)..(131): Ceres Seq. ID no. 12421670
  misc_feature (1)..(114): Homolog of NCBI NO: 34895618 NR Description: putative sterol-C5(6)-desaturase
  misc_feature (1)..(114): Homolog of NCBI NO: 4426627 NR Description: sterol-C5(6)-desaturase homolog [Nicotiana
  misc_feature (1)..(114): Homolog of NCBI NO: 33301670 NR Description: Delta-7-sterol-C5(6)-desaturase (Delta-7-C-5
  misc_feature (1)..(115): Homolog of NCBI NO: 15232937 NR Description: putative sterol-C5-desaturase; protein id:
  misc_feature (1)..(115): Homolog of NCBI NO: 2129741 NR Description: C-5 sterol desaturase (EC 1.-.-.-) - Arabidopsis
  misc_feature (1)..(115): Homolog of NCBI NO: 5031219 NR Description: delta7 sterol C-5 desaturase [Arabidopsis
  misc_feature (1)..(115): Homolog of NCBI NO: 21594971 NR Description: sterol-C5-desaturase [Arabidopsis thaliana]
  misc_feature (1)..(115): Homolog of NCBI NO: 15232935 NR Description: sterol-C5-desaturase
MQFVDETSFYNRIVLSHLLPANLWEPLPHFLQTWLRNYLAGTLLYFISGFLWCFYIYYLKINVYLPKDAIPTIKAMRLQMFVAMKAMHGTLFLPTVSESMIERGWTKCFASIGEFRLDSVFCLHRHLSCFR

SEQ ID NO: 27823 - DNA, 1598 bp, Arabidopsis thaliana
  misc_feature (1)..(1598): Ceres Seq. ID no. 12738448
  misc_feature: MA Experiment ID: 108462 Result: Down-regulated in Transcription
  misc_feature: MA Experiment 108462 PARAMETER Experiment Name: At_Germinating_Seeds_cDNA_P Parameter: Age (day) Value: 2 vs. 0
  misc_feature: MA Experiment 108462 PARAMETER Experiment Name: At_Germinating_Seeds_cDNA_P Parameter: Tissue Value: Germinating Seeds
  misc_feature: MA Experiment ID: 108463 Result: Down-regulated in Transcription
  misc_feature: MA Experiment 108463 PARAMETER Experiment Name: At_Germinating_Seeds_cDNA_P Parameter: Age (day) Value: 3 vs. 0
  misc_feature: MA Experiment 108463 PARAMETER Experiment Name: At_Germinating_Seeds_cDNA_P Parameter: Tissue Value: Germinating Seeds
  misc_feature: MA Experiment ID: 108464 Result: Down-regulated in Transcription
  misc_feature: MA Experiment 108464 PARAMETER Experiment Name: At_Germinating_Seeds_cDNA_P Parameter: Age (day) Value: 4 vs. 0
  misc_feature: MA Experiment 108464 PARAMETER Experiment Name: At_Germinating_Seeds_cDNA_P Parameter: Tissue Value: Germinating Seeds
  misc_feature: MA Experiment ID: 108488 Result: Up-regulated in Transcription
  misc_feature: MA Experiment ID: 108579 Result: Up-regulated in Transcription
  misc_feature: MA Experiment 108579 PARAMETER Experiment Name: At_4deg_Cold_cDNA_P Parameter: Temperature (deg C) Value: 4 vs. 22
  misc_feature: MA Experiment 108579 PARAMETER Experiment Name: At_4deg_Cold_cDNA_P Parameter: Timepoint (hr) Value: 6
  misc_feature: MA Experiment 108579 PARAMETER Experiment Name: At_4deg_Cold_cDNA_P Parameter: Tissue Value: Aerial
  misc_feature: MA Experiment ID: 20000112 Result: Down-regulated in Transcription
  misc_feature: MA Experiment 20000112 PARAMETER Experiment Name: At_42deg_Heat_cDNA_P Parameter: Temperature (deg C) Value: 42 vs. 22
  misc_feature: MA Experiment 20000112 PARAMETER Experiment Name: At_42deg_Heat_cDNA_P Parameter: Timepoint (hr) Value: 2
  misc_feature: MA Experiment 20000112 PARAMETER Experiment Name: At_42deg_Heat_cDNA_P Parameter: Tissue Value: Aerial
  misc_feature: MA Experiment ID: 20000113 Result: Down-regulated in Transcription
  misc_feature: MA Experiment 20000113 PARAMETER Experiment Name: At_42deg_Heat_cDNA_P Parameter: Temperature (deg C) Value: 42 vs. 22
  misc_feature: MA Experiment 20000113 PARAMETER Experiment Name: At_42deg_Heat_cDNA_P Parameter: Timepoint (hr) Value: 8
  misc_feature: MA Experiment 20000113 PARAMETER Experiment Name: At_42deg_Heat_cDNA_P Parameter: Tissue Value: Aerial
  misc_feature: MA Experiment ID: 20000144 Result: Down-regulated in Transcription
  misc_feature: MA Experiment 20000144 PARAMETER Experiment Name: At_42deg_Heat_cDNA_P Parameter: Temperature (deg C) Value: 42 vs. 22
  misc_feature: MA Experiment 20000144 PARAMETER Experiment Name: At_42deg_Heat_cDNA_P Parameter: Timepoint (hr) Value: 1
  misc_feature: MA Experiment 20000144 PARAMETER Experiment Name: At_42deg_Heat_cDNA_P Parameter: Tissue Value: Aerial
  misc_feature: MA Experiment ID: 20000171 Result: Down-regulated in Transcription
  misc_feature: MA Experiment 20000171 PARAMETER Experiment Name: At_42deg_Heat_P Parameter: Age (day) Value: 14
  misc_feature: MA Experiment 20000171 PARAMETER Experiment Name: At_42deg_Heat_P Parameter: Organism Value: A. thaliana
  misc_feature: MA Experiment 20000171 PARAMETER Experiment Name: At_42deg_Heat_P Parameter: Plant Line Value: WS
  misc_feature: MA Experiment 20000171 PARAMETER Experiment Name: At_42deg_Heat_P Parameter: Temperature (deg C) Value: 42 vs. 22
  misc_feature: MA Experiment 20000171 PARAMETER Experiment Name: At_42deg_Heat_P Parameter: Timepoint (hr) Value: 1
  misc_feature: MA Experiment 20000171 PARAMETER Experiment Name: At_42deg_Heat_P Parameter: Tissue Value: Aerial
  misc_feature: MA Experiment ID: 20000173 Result: Down-regulated in Transcription
  misc_feature: MA Experiment 20000173 PARAMETER Experiment Name: At_42deg_Heat_P Parameter: Age (day) Value: 14
  misc_feature: MA Experiment 20000173 PARAMETER Experiment Name: At_42deg_Heat_P Parameter: Organism Value: A. thaliana
  misc_feature: MA Experiment 20000173 PARAMETER Experiment Name: At_42deg_Heat_P Parameter: Plant Line Value: WS
  misc_feature: MA Experiment 20000173 PARAMETER Experiment Name: At_42deg_Heat_P Parameter: Temperature (deg C) Value: 42 vs. 22
  misc_feature: MA Experiment 20000173 PARAMETER Experiment Name: At_42deg_Heat_P Parameter: Timepoint (hr) Value: 6
  misc_feature: MA Experiment 20000173 PARAMETER Experiment Name: At_42deg_Heat_P Parameter: Tissue Value: Aerial
  misc_feature: MA Experiment ID: 20000185 Result: Down-regulated in Transcription
  misc_feature: MA Experiment 20000185 PARAMETER Experiment Name: At_Roots__P Parameter: Age (day) Value: 7 vs. 21
  misc_feature: MA Experiment 20000185 PARAMETER Experiment Name: At_Roots__P Parameter: Organism Value: A. thaliana
  misc_feature: MA Experiment 20000185 PARAMETER Experiment Name: At_Roots__P Parameter: Tissue Value: Roots vs. Whole Plant
  misc_feature: MA Experiment ID: 20000213 Result: Up-regulated in Transcription
  misc_feature: MA Experiment 20000213 PARAMETER Experiment Name: At_4deg_Cold_P Parameter: Timepoint (hr) Value: 2
  misc_feature: MA Experiment ID: 20000224 Result: Down-regulated in Transcription
  misc_feature: MA Experiment ID: 20000227 Result: Down-regulated in Transcription
  misc_feature: MA Experiment 20000227 PARAMETER Experiment Name: At_Root-Tips-vs-Tops_P Parameter: Tissue Value: Root Tips vs. Root Tops
  misc_feature: MA Experiment ID: 20000234 Result: Up-regulated in Transcription
  misc_feature: MA Experiment 20000234 PARAMETER Experiment Name: At_Siliques_P Parameter: Age (day) Value: 21
  misc_feature: MA Experiment 20000234 PARAMETER Experiment Name: At_Siliques_P Parameter: Organism Value: A. thaliana
  misc_feature: MA Experiment 20000234 PARAMETER Experiment Name: At_Siliques_P Parameter: Plant Line Value: WS
  misc_feature: MA Experiment 20000234 PARAMETER Experiment Name: At_Siliques_P Parameter: Tissue Value: Less Than 5mm Siliques vs. Whole Plant
  misc_feature: MA Experiment ID: 20000264 Result: Up-regulated in Transcription
  misc_feature: MA Experiment 20000264 PARAMETER Experiment Name: At_Open_Flower_P Parameter: Age (day) Value: 21
  misc_feature: MA Experiment 20000264 PARAMETER Experiment Name: At_Open_Flower_P Parameter: Plant Line Value: WS
  misc_feature: MA Experiment 20000264 PARAMETER Experiment Name: At_Open_Flower_P Parameter: Tissue Value: Open Flower vs. Whole Plant
  misc_feature: MA Experiment ID: 20000265 Result: Up-regulated in Transcription
  misc_feature: MA Experiment 20000265 PARAMETER Experiment Name: At_Open_Flower_P Parameter: Age (day) Value: 21
  misc_feature: MA Experiment 20000265 PARAMETER Experiment Name: At_Open_Flower_P Parameter: Plant Line Value: WS
  misc_feature: MA Experiment 20000265 PARAMETER Experiment Name: At_Open_Flower_P Parameter: Tissue Value: Closed Flower vs. Whole Plant
  misc_feature: MA Experiment ID: 20000286 Result: Up-regulated in Transcription
  misc_feature: MA Experiment 20000286 PARAMETER Experiment Name: At_Open_Flower_P Parameter: Age (day) Value: 21
  misc_feature: MA Experiment 20000286 PARAMETER Experiment Name: At_Open_Flower_P Parameter: Plant Line Value: WS
  misc_feature: MA Experiment 20000286 PARAMETER Experiment Name: At_Open_Flower_P Parameter: Tissue Value: Half Open vs. Whole Plant
  misc_feature: MA Experiment ID: 20000327 Result: Down-regulated in Transcription
  misc_feature: MA Experiment 20000327 PARAMETER Experiment Name: At_42deg_Heat_Sub_P Parameter: Age (day) Value: 14
  misc_feature: MA Experiment 20000327 PARAMETER Experiment Name: At_42deg_Heat_Sub_P Parameter: Organism Value: A. thaliana
  misc_feature: MA Experiment 20000327 PARAMETER Experiment Name: At_42deg_Heat_Sub_P Parameter: Plant Line Value: WS
  misc_feature: MA Experiment 20000327 PARAMETER Experiment Name: At_42deg_Heat_Sub_P Parameter: Temperature (deg C) Value: 42 vs. 22
  misc_feature: MA Experiment 20000327 PARAMETER Experiment Name: At_42deg_Heat_Sub_P Parameter: Timepoint (hr) Value: 1
  misc_feature: MA Experiment 20000327 PARAMETER Experiment Name: At_42deg_Heat_Sub_P Parameter: Tissue Value: Aerial
  misc_feature: MA Experiment ID: 20000328 Result: Down-regulated in Transcription
  misc_feature: MA Experiment 20000328 PARAMETER Experiment Name: At_42deg_Heat_Sub_P Parameter: Age (day) Value: 14
  misc_feature: MA Experiment 20000328 PARAMETER Experiment Name: At_42deg_Heat_Sub_P Parameter: Organism Value: A. thaliana
  misc_feature: MA Experiment 20000328 PARAMETER Experiment Name: At_42deg_Heat_Sub_P Parameter: Plant Line Value: WS
  misc_feature: MA Experiment 20000328 PARAMETER Experiment Name: At_42deg_Heat_Sub_P Parameter: Temperature (deg C) Value: 42 vs. 22
  misc_feature: MA Experiment 20000328 PARAMETER Experiment Name: At_42deg_Heat_Sub_P Parameter: Timepoint (hr) Value: 6
  misc_feature: MA Experiment 20000328 PARAMETER Experiment Name: At_42deg_Heat_Sub_P Parameter: Tissue Value: Aerial
  misc_feature: MA Experiment ID: 20000329 Result: Up-regulated in Transcription
  misc_feature: MA Experiment 20000329 PARAMETER Experiment Name: At_4deg_Cold_Sub_P Parameter: Age (day) Value: 14
  misc_feature: MA Experiment 20000329 PARAMETER Experiment Name: At_4deg_Cold_Sub_P Parameter: Organism Value: A. thaliana
  misc_feature: MA Experiment 20000329 PARAMETER Experiment Name: At_4deg_Cold_Sub_P Parameter: Plant Line Value: WS
  misc_feature: MA Experiment 20000329 PARAMETER Experiment Name: At_4deg_Cold_Sub_P Parameter: Temperature (deg C) Value: 4 vs. 22
  misc_feature: MA Experiment 20000329 PARAMETER Experiment Name: At_4deg_Cold_Sub_P Parameter: Timepoint (hr) Value: 6
  misc_feature: MA Experiment 20000329 PARAMETER Experiment Name: At_4deg_Cold_Sub_P Parameter: Tissue Value: Aerial
  misc_feature: MA Experiment ID: 20000332 Result: Up-regulated in Transcription
  misc_feature: MA Experiment 20000332 PARAMETER Experiment Name: At_4deg_Cold_Sub_P Parameter: Age (day) Value: 14
  misc_feature: MA Experiment 20000332 PARAMETER Experiment Name: At_4deg_Cold_Sub_P Parameter: Organism Value: A. thaliana
  misc_feature: MA Experiment 20000332 PARAMETER Experiment Name: At_4deg_Cold_Sub_P Parameter: Plant Line Value: WS
  misc_feature: MA Experiment 20000332 PARAMETER Experiment Name: At_4deg_Cold_Sub_P Parameter: Temperature (deg C) Value: 4 vs. 22
  misc_feature: MA Experiment 20000332 PARAMETER Experiment Name: At_4deg_Cold_Sub_P Parameter: Timepoint (hr) Value: 2
  misc_feature: MA Experiment 20000332 PARAMETER Experiment Name: At_4deg_Cold_Sub_P Parameter: Tissue Value: Aerial
  misc_feature: MA Experiment ID: 20000349 Result: Down-regulated in Transcription
  misc_feature: MA Experiment 20000349 PARAMETER Experiment Name: At_100uM_ABA_Sub_P Parameter: Age (day) Value: 14
  misc_feature: MA Experiment 20000349 PARAMETER Experiment Name: At_100uM_ABA_Sub_P Parameter: Organism Value: A. thaliana
  misc_feature: MA Experiment 20000349 PARAMETER Experiment Name: At_100uM_ABA_Sub_P Parameter: Plant Line Value: WS
  misc_feature: MA Experiment 20000349 PARAMETER Experiment Name: At_100uM_ABA_Sub_P Parameter: Timepoint (hr) Value: 6
  misc_feature: MA Experiment 20000349 PARAMETER Experiment Name: At_100uM_ABA_Sub_P Parameter: Tissue Value: Aerial
  misc_feature: MA Experiment 20000349 PARAMETER Experiment Name: At_100uM_ABA_Sub_P Parameter: Treatment Value: 100uM ABA vs. No Treatment
  misc_feature: MA Experiment ID: 20000355 Result: Up-regulated in Transcription
  misc_feature: MA Experiment 20000355 PARAMETER Experiment Name: At_Siliques_Sub_P Parameter: Age (day) Value: 21
  misc_feature: MA Experiment 20000355 PARAMETER Experiment Name: At_Siliques_Sub_P Parameter: Organism Value: A. thaliana
  misc_feature: MA Experiment 20000355 PARAMETER Experiment Name: At_Siliques_Sub_P Parameter: Plant Line Value: WS
  misc_feature: MA Experiment 20000355 PARAMETER Experiment Name: At_Siliques_Sub_P Parameter: Tissue Value: Less Than 5mm Siliques vs. Whole Plant
  misc_feature: MA Experiment ID: 20000437 Result: Down-regulated in Transcription
  misc_feature: MA Experiment 20000437 PARAMETER Experiment Name: At_Drought_P Parameter: Age (day) Value: 8
  misc_feature: MA Experiment 20000437 PARAMETER Experiment Name: At_Drought_P Parameter: Organism Value: A. thaliana
  misc_feature: MA Experiment 20000437 PARAMETER Experiment Name: At_Drought_P Parameter: Plant Line Value: WS
  misc_feature: MA Experiment 20000437 PARAMETER Experiment Name: At_Drought_P Parameter: Timepoint (hr) Value: 24
  misc_feature: MA Experiment 20000437 PARAMETER Experiment Name: At_Drought_P Parameter: Tissue Value: Whole Plant
  misc_feature: MA Experiment 20000437 PARAMETER Experiment Name: At_Drought_P Parameter: Treatment Value: Drought vs. No Drought
  misc_feature: MA Experiment ID: 20000440 Result: Up-regulated in Transcription
  misc_feature: MA Experiment 20000440 PARAMETER Experiment Name: At_Closed-Flower__Sub_P Parameter: Tissue Value: Closed Flower vs. Whole Plant
  misc_feature: MA Experiment ID: 20001554 Result: Down-regulated in Transcription
  misc_feature: MA Experiment 20001554 PARAMETER Experiment Name: At_Drought_Soil_Dry_P Parameter: Age (day) Value: 21
  misc_feature: MA Experiment 20001554 PARAMETER Experiment Name: At_Drought_Soil_Dry_P Parameter: Organism Value: A. thaliana
  misc_feature: MA Experiment 20001554 PARAMETER Experiment Name: At_Drought_Soil_Dry_P Parameter: Plant Line Value: WS
  misc_feature: MA Experiment 20001554 PARAMETER Experiment Name: At_Drought_Soil_Dry_P Parameter: Post Timepoint (hr) Value: None
  misc_feature: MA Experiment 20001554 PARAMETER Experiment Name: At_Drought_Soil_Dry_P Parameter: Post-Treatment Value: None
  misc_feature: MA Experiment 20001554 PARAMETER Experiment Name: At_Drought_Soil_Dry_P Parameter: Timepoint (day) Value: 7
  misc_feature: MA Experiment 20001554 PARAMETER Experiment Name: At_Drought_Soil_Dry_P Parameter: Treatment Value: Drought vs. No Drought
  misc_feature: MA Experiment ID: 20001555 Result: Down-regulated in Transcription
  misc_feature: MA Experiment 20001555 PARAMETER Experiment Name: At_Drought_Soil_Dry_P Parameter: Age (day) Value: 24
  misc_feature: MA Experiment 20001555 PARAMETER Experiment Name: At_Drought_Soil_Dry_P Parameter: Organism Value: A. thaliana
  misc_feature: MA Experiment 20001555 PARAMETER Experiment Name: At_Drought_Soil_Dry_P Parameter: Plant Line Value: WS
  misc_feature: MA Experiment 20001555 PARAMETER Experiment Name: At_Drought_Soil_Dry_P Parameter: Post Timepoint (hr) Value: None
  misc_feature: MA Experiment 20001555 PARAMETER Experiment Name: At_Drought_Soil_Dry_P Parameter: Post-Treatment Value: None
  misc_feature: MA Experiment 20001555 PARAMETER Experiment Name: At_Drought_Soil_Dry_P Parameter: Timepoint (day) Value: 10
  misc_feature: MA Experiment 20001555 PARAMETER Experiment Name: At_Drought_Soil_Dry_P Parameter: Treatment Value: Drought vs. No Drought
  misc_feature: MA Experiment ID: 20001557 Result: Up-regulated in Transcription
  misc_feature: MA Experiment 20001557 PARAMETER Experiment Name: At_Drought_Soil_Dry_P Parameter: Age (day) Value: 27
  misc_feature: MA Experiment 20001557 PARAMETER Experiment Name: At_Drought_Soil_Dry_P Parameter: Organism Value: A. thaliana
  misc_feature: MA Experiment 20001557 PARAMETER Experiment Name: At_Drought_Soil_Dry_P Parameter: Plant Line Value: WS
  misc_feature: MA Experiment 20001557 PARAMETER Experiment Name: At_Drought_Soil_Dry_P Parameter: Post Timepoint (hr) Value: 3
  misc_feature: MA Experiment 20001557 PARAMETER Experiment Name: At_Drought_Soil_Dry_P Parameter: Post-Treatment Value: Re-Water vs. No Drought
  misc_feature: MA Experiment 20001557 PARAMETER Experiment Name: At_Drought_Soil_Dry_P Parameter: Timepoint (day) Value: 13
  misc_feature: MA Experiment 20001557 PARAMETER Experiment Name: At_Drought_Soil_Dry_P Parameter: Treatment Value: Drought vs. No Drought
  misc_feature: MA Experiment ID: 20001558 Result: Up-regulated in Transcription
  misc_feature: MA Experiment 20001558 PARAMETER Experiment Name: At_Drought_Soil_Dry_P Parameter: Age (day) Value: 27
  misc_feature: MA Experiment 20001558 PARAMETER Experiment Name: At_Drought_Soil_Dry_P Parameter: Organism Value: A. thaliana
  misc_feature: MA Experiment 20001558 PARAMETER Experiment Name: At_Drought_Soil_Dry_P Parameter: Plant Line Value: WS
  misc_feature: MA Experiment 20001558 PARAMETER Experiment Name: At_Drought_Soil_Dry_P Parameter: Post Timepoint (hr) Value: 6
  misc_feature: MA Experiment 20001558 PARAMETER Experiment Name: At_Drought_Soil_Dry_P Parameter: Post-Treatment Value: Re-Water vs. No Drought
  misc_feature: MA Experiment 20001558 PARAMETER Experiment Name: At_Drought_Soil_Dry_P Parameter: Timepoint (day) Value: 13
  misc_feature: MA Experiment 20001558 PARAMETER Experiment Name: At_Drought_Soil_Dry_P Parameter: Treatment Value: Drought vs. No Drought
  misc_feature: MA Experiment ID: 20001757 Result: Up-regulated in Transcription
  misc_feature: MA Experiment 20001757 PARAMETER Experiment Name: At_50mM_NH4NO3_L-to-H_P Parameter: Timepoint (hr) Value: 6
  misc_feature: MA Experiment 20001757 PARAMETER Experiment Name: At_50mM_NH4NO3_L-to-H_P Parameter: Tissue Value: Leaf
  misc_feature: MA Experiment 20001757 PARAMETER Experiment Name: At_50mM_NH4NO3_L-to-H_P Parameter: Treatment Value: 50mM NH4NO3 vs 100mM Mannitol
  misc_feature: MA Experiment ID: 20001807 Result: Up-regulated in Transcription
  misc_feature: MA Experiment 20001807 PARAMETER Experiment Name: At_50mM_NH4NO3_L-to-H_Sub_P Parameter: Timepoint (hr) Value: 6
  misc_feature: MA Experiment 20001807 PARAMETER Experiment Name: At_50mM_NH4NO3_L-to-H_Sub_P Parameter: Tissue Value: Leaf
  misc_feature: MA Experiment 20001807 PARAMETER Experiment Name: At_50mM_NH4NO3_L-to-H_Sub_P Parameter: Treatment Value: 50mM NH4NO3 vs 100mM Mannitol
  misc_feature: MA Experiment ID: 20001904 Result: Down-regulated in Transcription
  misc_feature: MA Experiment 20001904 PARAMETER Experiment Name: At_Drought_Reproduction_P Parameter: Age (day) Value: 37
  misc_feature: MA Experiment 20001904 PARAMETER Experiment Name: At_Drought_Reproduction_P Parameter: Organism Value: A. thaliana
  misc_feature: MA Experiment 20001904 PARAMETER Experiment Name: At_Drought_Reproduction_P Parameter: Plant Line Value: WS
  misc_feature: MA Experiment 20001904 PARAMETER Experiment Name: At_Drought_Reproduction_P Parameter: Timepoint (day) Value: 7
  misc_feature: MA Experiment 20001904 PARAMETER Experiment Name: At_Drought_Reproduction_P Parameter: Tissue Value: Rosettes
  misc_feature: MA Experiment 20001904 PARAMETER Experiment Name: At_Drought_Reproduction_P Parameter: Treatment Value: Drought vs. No Drought
  misc_feature: MA Experiment ID: 20001906 Result: Down-regulated in Transcription
  misc_feature: MA Experiment 20001906 PARAMETER Experiment Name: At_Drought_Reproduction_P Parameter: Age (day) Value: 35
  misc_feature: MA Experiment 20001906 PARAMETER Experiment Name: At_Drought_Reproduction_P Parameter: Organism Value: A. thaliana
  misc_feature: MA Experiment 20001906 PARAMETER Experiment Name: At_Drought_Reproduction_P Parameter: Plant Line Value: WS
  misc_feature: MA Experiment 20001906 PARAMETER Experiment Name: At_Drought_Reproduction_P Parameter: Timepoint (day) Value: 5
  misc_feature: MA Experiment 20001906 PARAMETER Experiment Name: At_Drought_Reproduction_P Parameter: Tissue Value: Siliques
  misc_feature: MA Experiment 20001906 PARAMETER Experiment Name: At_Drought_Reproduction_P Parameter: Treatment Value: Drought vs. No Drought
  misc_feature: MA Experiment ID: 20001908 Result: Down-regulated in Transcription
  misc_feature: MA Experiment 20001908 PARAMETER Experiment Name: At_Drought_Reproduction_P Parameter: Age (day) Value: 40
  misc_feature: MA Experiment 20001908 PARAMETER Experiment Name: At_Drought_Reproduction_P Parameter: Organism Value: A. thaliana
  misc_feature: MA Experiment 20001908 PARAMETER Experiment Name: At_Drought_Reproduction_P Parameter: Plant Line Value: WS
  misc_feature: MA Experiment 20001908 PARAMETER Experiment Name: At_Drought_Reproduction_P Parameter: Timepoint (day) Value: 10
  misc_feature: MA Experiment 20001908 PARAMETER Experiment Name: At_Drought_Reproduction_P Parameter: Tissue Value: Siliques
  misc_feature: MA Experiment 20001908 PARAMETER Experiment Name: At_Drought_Reproduction_P Parameter: Treatment Value: Drought vs. No Drought
  misc_feature: MA Experiment ID: 20001911 Result: Down-regulated in Transcription
  misc_feature: MA Experiment 20001911 PARAMETER Experiment Name: At_Drought_Reproduction_P Parameter: Age (day) Value: 40
  misc_feature: MA Experiment 20001911 PARAMETER Experiment Name: At_Drought_Reproduction_P Parameter: Organism Value: A. thaliana
  misc_feature: MA Experiment 20001911 PARAMETER Experiment Name: At_Drought_Reproduction_P Parameter: Plant Line Value: WS
  misc_feature: MA Experiment 20001911 PARAMETER Experiment Name: At_Drought_Reproduction_P Parameter: Timepoint (day) Value: 10
  misc_feature: MA Experiment 20001911 PARAMETER Experiment Name: At_Drought_Reproduction_P Parameter: Tissue Value: Flowers
  misc_feature: MA Experiment 20001911 PARAMETER Experiment Name: At_Drought_Reproduction_P Parameter: Treatment Value: Drought vs. No Drought
actcgccactttcctcgagaaaacgaaaaaaaaagatggtaggaagaagaaaagctttactcttttctctctgtttcttcttcctctctcttccttccttctcttcccttccatccttccaaaccctattccccaattctcattcccttccttgtgcttctcccgtctccttccaacccgactccgactccgagtcactgctagaatccgaatttgaatccggatccgactccgagtcttcttcttccattactctaaacctcgaccacatcgatgctctctcctccaacaaaacacctcaagagctattcagctcccgtctccaacgtgactcccggcgcgtgagatcaatcgccacactcgccgctcaaatccccggaagaaacgtgactcacgcgccacgacccggtggattcagcagctcagtcgtctctggtctctctcaaggaagcggtgaatacttcacgcgcctcggtgtcggtactccggcgagatatgtttacatggtgctcgacaccggcagcgacatcgtctggctacaatgcgctccttgtcggagatgttactctcaatccgacccgatattcgacccgagaaaatccaagacctatgccacaatcccctgttcttcacctcactgccgccgattagactccgccggatgcaacacccgtcgtaagacttgtctctaccaagtctcttacggagatggttctttcaccgtcggcgatttctccaccgaaacgctaactttccggcgaaatcgcgttaaaggcgttgctctcggatgtggccacgacaacgaaggtctcttcgtcggagccgccggtttattaggactcggtaaaggtaaattatcgttccccggtcaaaccggtcaccggtttaatcagaaattctcttactgtttagtcgacagatccgcttcttcgaaaccttcctcggtcgtcttcggaaacgccgccgtttcacgaatcgcgagattcacgccacttttgtcaaacccaaaactcgacactttctactacgtcgggcttctgggaattagcgtcggagggacacgtgtccccggcgtaacggcttctctttttaaacttgaccagatcggtaacggtggagttattatcgattcgggtacgtctgtgacccggttgatccgaccagcttatattgctatgagagacgcgttccgggtcggagctaagacattgaaaagagctccgaatttctcactcttcgacacgtgtttcgatctctccaatatgaacgaggttaaagtaccgacggtggttttacatttccgtagagctgacgtatcacttccggcgacgaattacctgatccctgtggataccaacggcaagttctgttttgcgtttgccggtacgatgggcggactatccataattggaaatatccagcaacagggtttccgggttgtatacgacttagcgagttcccgggtcgggtttgctccaggaggatgcgcttaataattagatctgaccggagccggtacggataatgtacttttgttttctcaatttaatgcttagacttgtttttttttcttttataaatcggacaagtgaatcttt

SEQ ID NO: 27824 - protein, 496 aa, Arabidopsis thaliana
  peptide (1)..(496): Ceres Seq. ID no. 12738449
  misc_feature (102)..(490): Pfam Name: Eukaryotic aspartyl protease Pfam Description: Eukaryotic aspartyl protease
  misc_feature (17)..(346): Homolog of NCBI NO: 14532550 NR Description: AT3g61820/F15G16_210 [Arabidopsis thaliana]
  misc_feature (100)..(495): Homolog of NCBI NO: 34895664 NR Description: nucleoid DNA-binding protein cnd41-like protein
  misc_feature (19)..(495): Homolog of NCBI NO: 28392860 NR Description: unknown protein [Arabidopsis thaliana]
  misc_feature (60)..(495): Homolog of NCBI NO: 19424106 NR Description: putative chloroplast nucleoid DNA-binding protein
  misc_feature (60)..(495): Homolog of NCBI NO: 15229656 NR Description: putative chloroplast nucleoid DNA-binding protein
  misc_feature (21)..(495): Homolog of NCBI NO: 15222611 NR Description: hypothetical protein
  misc_feature (52)..(495): Homolog of NCBI NO: 15290061 NR Description: nucleoid DNA-binding protein cnd41-like protein
  misc_feature (17)..(495): Homolog of NCBI NO: 15228618 NR Description: putative protein
  misc_feature (12)..(496): Homolog of NCBI NO: 15223368 NR Description: chloroplast nucleoid DNA binding protein, putative
  misc_feature (12)..(496): Homolog of NCBI NO: 21594980 NR Description: chloroplast nucleoid DNA binding protein,
SPLSSRKRKKKMVGRRKALLFSLCFFFLSLPSFSSLPSFQTLFPNSHSLPCASPVSFQPDSDSESLLESEFESGSDSESSSSITLNLDHIDALSSNKTPQELFSSRLQRDSRRVRSIATLAAQIPGRNVTHAPRPGGFSSSVVSGLSQGSGEYFTRLGVGTPARYVYMVLDTGSDIVWLQCAPCRRCYSQSDPIFDPRKSKTYATIPCSSPHCRRLDSAGCNTRRKTCLYQVSYGDGSFTVGDFSTETLTFRRNRVKGVALGCGHDNEGLFVGAAGLLGLGKGKLSFPGQTGHRFNQKFSYCLVDRSASSKPSSVVFGNAAVSRIARFTPLLSNPKLDTFYYVGLLGISVGGTRVPGVTASLFKLDQIGNGGVIIDSGTSVTRLIRPAYIAMRDAFRVGAKTLKRAPNFSLFDTCFDLSNMNEVKVPTVVLHFRRADVSLPATNYLIPVDTNGKFCFAFAGTMGGLSIIGNIQQQGFRVVYDLASSRVGFAPGGCA

SEQ ID NO: 27825 - protein, 485 aa, Arabidopsis thaliana
  peptide (1)..(485): Ceres Seq. ID no. 12738450
  misc_feature (91)..(479): Pfam Name: Eukaryotic aspartyl protease Pfam Description: Eukaryotic aspartyl protease
  misc_feature (6)..(335): Homolog of NCBI NO: 14532550 NR Description: AT3g61820/F15G16_210 [Arabidopsis thaliana]
  misc_feature (89)..(484): Homolog of NCBI NO: 34895664 NR Description: nucleoid DNA-binding protein cnd41-like protein
  misc_feature (8)..(484): Homolog of NCBI NO: 28392860 NR Description: unknown protein [Arabidopsis thaliana]
  misc_feature (49)..(484): Homolog of NCBI NO: 19424106 NR Description: putative chloroplast nucleoid DNA-binding protein
  misc_feature (49)..(484): Homolog of NCBI NO: 15229656 NR Description: putative chloroplast nucleoid DNA-binding protein
  misc_feature (10)..(484): Homolog of NCBI NO: 15222611 NR Description: hypothetical protein
  misc_feature (41)..(484): Homolog of NCBI NO: 15290061 NR Description: nucleoid DNA-binding protein cnd41-like protein
  misc_feature (6)..(484): Homolog of NCBI NO: 15228618 NR Description: putative protein
  misc_feature (1)..(485): Homolog of NCBI NO: 15223368 NR Description: chloroplast nucleoid DNA binding protein, putative
  misc_feature (1)..(485): Homolog of NCBI NO: 21594980 NR Description: chloroplast nucleoid DNA binding protein,
MVGRRKALLFSLCFFFLSLPSFSSLPSFQTLFPNSHSLPCASPVSFQPDSDSESLLESEFESGSDSESSSSITLNLDHIDALSSNKTPQELFSSRLQRDSRRVRSIATLAAQIPGRNVTHAPRPGGFSSSVVSGLSQGSGEYFTRLGVGTPARYVYMVLDTGSDIVWLQCAPCRRCYSQSDPIFDPRKSKTYATIPCSSPHCRRLDSAGCNTRRKTCLYQVSYGDGSFTVGDFSTETLTFRRNRVKGVALGCGHDNEGLFVGAAGLLGLGKGKLSFPGQTGHRFNQKFSYCLVDRSASSKPSSVVFGNAAVSRIARFTPLLSNPKLDTFYYVGLLGISVGGTRVPGVTASLFKLDQIGNGGVIIDSGTSVTRLIRPAYIAMRDAFRVGAKTLKRAPNFSLFDTCFDLSNMNEVKVPTVVLHFRRADVSLPATNYLIPVDTNGKFCFAFAGTMGGLSIIGNIQQQGFRVVYDLASSRVGFAPGGCA

SEQ ID NO: 27826 - protein, 329 aa, Arabidopsis thaliana
  peptide (1)..(329): Ceres Seq. ID no. 12738451
  misc_feature (1)..(323): Pfam Name: Eukaryotic aspartyl protease Pfam Description: Eukaryotic aspartyl protease
  misc_feature (1)..(179): Homolog of NCBI NO: 14532550 NR Description: AT3g61820/F15G16_210 [Arabidopsis thaliana]
  misc_feature (1)..(328): Homolog of NCBI NO: 34895664 NR Description: nucleoid DNA-binding protein cnd41-like protein
  misc_feature (1)..(328): Homolog of NCBI NO: 28392860 NR Description: unknown protein [Arabidopsis thaliana]
  misc_feature (1)..(328): Homolog of NCBI NO: 19424106 NR Description: putative chloroplast nucleoid DNA-binding protein
  misc_feature (1)..(328): Homolog of NCBI NO: 15229656 NR Description: putative chloroplast nucleoid DNA-binding protein
  misc_feature (1)..(328): Homolog of NCBI NO: 15222611 NR Description: hypothetical protein
  misc_feature (1)..(328): Homolog of NCBI NO: 15290061 NR Description: nucleoid DNA-binding protein cnd41-like protein
  misc_feature (1)..(328): Homolog of NCBI NO: 15228618 NR Description: putative protein
  misc_feature (1)..(329): Homolog of NCBI NO: 15223368 NR Description: chloroplast nucleoid DNA binding protein, putative
  misc_feature (1)..(329): Homolog of NCBI NO: 21594980 NR Description: chloroplast nucleoid DNA binding protein,
MVLDTGSDIVWLQCAPCRRCYSQSDPIFDPRKSKTYATIPCSSPHCRRLDSAGCNTRRKTCLYQVSYGDGSFTVGDFSTETLTFRRNRVKGVALGCGHDNEGLFVGAAGLLGLGKGKLSFPGQTGHRFNQKFSYCLVDRSASSKPSSVVFGNAAVSRIARFTPLLSNPKLDTFYYVGLLGISVGGTRVPGVTASLFKLDQIGNGGVIIDSGTSVTRLIRPAYIAMRDAFRVGAKTLKRAPNFSLFDTCFDLSNMNEVKVPTVVLHFRRADVSLPATNYLIPVDTNGKFCFAFAGTMGGLSIIGNIQQQGFRVVYDLASSRVGFAPGGCA

SEQ ID NO: 27827 - DNA, 1496 bp, Arabidopsis thaliana
  misc_feature (1)..(1496): Ceres Seq. ID no. 12421656
  misc_feature: MA Experiment ID: 108435 Result: Down-regulated in Transcription
  misc_feature: MA Experiment 108435 PARAMETER Experiment Name: At_stm_Mutants_cDNA_P Parameter: Plant Line Value: wt Landsburg vs stm
  misc_feature: MA Experiment 108435 PARAMETER Experiment Name: At_stm_Mutants_cDNA_P Parameter: Tissue Value: Shoot Apical Meristem Region
  misc_feature: MA Experiment ID: 108569 Result: Up-regulated in Transcription
  misc_feature: MA Experiment 108569 PARAMETER Experiment Name: At_0.001%_MeJA__cDNA_P Parameter: Timepoint (hr) Value: 6
  misc_feature: MA Experiment 108569 PARAMETER Experiment Name: At_0.001%_MeJA__cDNA_P Parameter: Tissue Value: Aerial
  misc_feature: MA Experiment 108569 PARAMETER Experiment Name: At_0.001%_MeJA__cDNA_P Parameter: Treatment Value: 0.001% MeJA vs. No Treatment
  misc_feature: MA Experiment ID: 108573 Result: Up-regulated in Transcription
  misc_feature: MA Experiment 108573 PARAMETER Experiment Name: At_Drought_cDNA_P Parameter: Timepoint (hr) Value: 6
  misc_feature: MA Experiment 108573 PARAMETER Experiment Name: At_Drought_cDNA_P Parameter: Tissue Value: Aerial
  misc_feature: MA Experiment 108573 PARAMETER Experiment Name: At_Drought_cDNA_P Parameter: Treatment Value: Drought vs. No Drought
  misc_feature: MA Experiment ID: 108595 Result: Down-regulated in Transcription
  misc_feature: MA Experiment 108595 PARAMETER Experiment Name: At_Ler-pi_Ovule_cDNA_P Parameter: Plant Line Value: null
  misc_feature: MA Experiment ID: 20000113 Result: Up-regulated in Transcription
  misc_feature: MA Experiment 20000113 PARAMETER Experiment Name: At_42deg_Heat_cDNA_P Parameter: Temperature (deg C) Value: 42 vs. 22
  misc_feature: MA Experiment 20000113 PARAMETER Experiment Name: At_42deg_Heat_cDNA_P Parameter: Timepoint (hr) Value: 8
  misc_feature: MA Experiment 20000113 PARAMETER Experiment Name: At_42deg_Heat_cDNA_P Parameter: Tissue Value: Aerial
  misc_feature: MA Experiment ID: 20000234 Result: Up-regulated in Transcription
  misc_feature: MA Experiment 20000234 PARAMETER Experiment Name: At_Siliques_P Parameter: Age (day) Value: 21
  misc_feature: MA Experiment 20000234 PARAMETER Experiment Name: At_Siliques_P Parameter: Organism Value: A. thaliana
  misc_feature: MA Experiment 20000234 PARAMETER Experiment Name: At_Siliques_P Parameter: Plant Line Value: WS
  misc_feature: MA Experiment 20000234 PARAMETER Experiment Name: At_Siliques_P Parameter: Tissue Value: Less Than 5mm Siliques vs. Whole Plant
  misc_feature: MA Experiment ID: 20000264 Result: Up-regulated in Transcription
  misc_feature: MA Experiment 20000264 PARAMETER Experiment Name: At_Open_Flower_P Parameter: Age (day) Value: 21
  misc_feature: MA Experiment 20000264 PARAMETER Experiment Name: At_Open_Flower_P Parameter: Plant Line Value: WS
  misc_feature: MA Experiment 20000264 PARAMETER Experiment Name: At_Open_Flower_P Parameter: Tissue Value: Open Flower vs. Whole Plant
  misc_feature: MA Experiment ID: 20000265 Result: Up-regulated in Transcription
  misc_feature: MA Experiment 20000265 PARAMETER Experiment Name: At_Open_Flower_P Parameter: Age (day) Value: 21
  misc_feature: MA Experiment 20000265 PARAMETER Experiment Name: At_Open_Flower_P Parameter: Plant Line Value: WS
  misc_feature: MA Experiment 20000265 PARAMETER Experiment Name: At_Open_Flower_P Parameter: Tissue Value: Closed Flower vs. Whole Plant
  misc_feature: MA Experiment ID: 20000286 Result: Up-regulated in Transcription
  misc_feature: MA Experiment 20000286 PARAMETER Experiment Name: At_Open_Flower_P Parameter: Age (day) Value: 21
  misc_feature: MA Experiment 20000286 PARAMETER Experiment Name: At_Open_Flower_P Parameter: Plant Line Value: WS
  misc_feature: MA Experiment 20000286 PARAMETER Experiment Name: At_Open_Flower_P Parameter: Tissue Value: Half Open vs. Whole Plant
  misc_feature: MA Experiment ID: 20000438 Result: Up-regulated in Transcription
  misc_feature: MA Experiment 20000438 PARAMETER Experiment Name: At_Shoots__P Parameter: Age (day) Value: 14
  misc_feature: MA Experiment 20000438 PARAMETER Experiment Name: At_Shoots__P Parameter: Tissue Value: Shoots vs. Whole Plant
  misc_feature: MA Experiment ID: 20000573 Result: Up-regulated in Transcription
  misc_feature: MA Experiment 20000573 PARAMETER Experiment Name: At_100uM_ABA_Mutants__P Parameter: Organism Value: A. thaliana
  misc_feature: MA Experiment 20000573 PARAMETER Experiment Name: At_100uM_ABA_Mutants__P Parameter: Plant Line Value: CS22 vs. Ler wt
  misc_feature: MA Experiment 20000573 PARAMETER Experiment Name: At_100uM_ABA_Mutants__P Parameter: Timepoint (hr) Value: N/A
  misc_feature: MA Experiment 20000573 PARAMETER Experiment Name: At_100uM_ABA_Mutants__P Parameter: Tissue Value: Whole Plant
  misc_feature: MA Experiment 20000573 PARAMETER Experiment Name: At_100uM_ABA_Mutants__P Parameter: Treatment Value: None
  misc_feature: MA Experiment ID: 20000794 Result: Up-regulated in Transcription
  misc_feature: MA Experiment 20000794 PARAMETER Experiment Name: At_Petals_P Parameter: Age (day) Value: 23-25 days
  misc_feature: MA Experiment 20000794 PARAMETER Experiment Name: At_Petals_P Parameter: Plant Line Value: WS
  misc_feature: MA Experiment 20000794 PARAMETER Experiment Name: At_Petals_P Parameter: Tissue Value: Petals vs. Whole plant
acaaacaaaaaagctttaatttttggggacaaagtttttatcttttcgttgtttggaatttgggggaggaagaaggaaaggtttaaggatagggtcgtgcgtgtcaacgagaggtgctgctggacgtgaagcctcctcctccgcatcggcgaggaggcttccgtcccagcaccacctcagcggtagccttagctcttctggctacggcggagaaccgtcggatcaatctgatatcggcggtgcgaagatgaaagggcttttcaagtctaagccacgcactcctgctgaccttgttcgacaaacccgcgagctccttctcttctccgatcgatctacctctttgcctgacctccgagattccaaacgcgacgaaaagatggcggaattaagccggaatatccgtgacatgaagtcgattctctacgggaacagcgaagcagagcctgtggcagaagcttgtgcacagttgactcaagaattctttaaagaggatactctacgtctcttgattacttgtctccctaaacttaacttggagacgaggaaggatgctacacaagttgttgcaaatctacagaggcaacaggttaattcacggttgattgcttctgattatttagaagccaacattgatctcatggatgttttgattgaaggcttcgagaacacagacatggctttacactatggtgctatgtttagggagtgtatccgtcatcagattgtggctaaatatgttttggagtctgaccatgtgaagaaattctttgattacatacagcttccaaatttcgacattgctgccgatgctgctgctacttttaaggaactgctgacaaggcataagtctactgttgccgagtttctcaccaagaatgaagactggtttttcgcagactacaactcaaagcttcttgaatcaagtaattatataaccagacggcaagctattaagttgttgggtgatatattattggatcgatcaaattcagctgtgatgacgaaatatgtgagctcgagggataacttgaggattctcatgaatcttctaagagagtcaagcaagagtatccaaatagaagcattccatgtctttaagctgtttgcagcgaaccaaaacaagcctgcggatatagtcaacattctggtggccaacagaagcaagcttctgagattgttggctgatttgaaaccagacaaagaggatgagaggtttgaagcagacaaaagtcaggttttgagagaaatcgcagcccttgaacctcgagatcttgcttgaaccaactaatgcaattcatccttccttcccttttaaaacactcgaaaagacatttttgaagcatcttgttgtttttttacattaggtaaccaatcttcctctcactttctcaccacacacacacacacacacacacacatacacatacgagatatctattcgatatatgtattcatatgtacactacttcactgtcgatgaaataaaatggtttgcc

SEQ ID NO: 27828 - protein, 343 aa, Arabidopsis thaliana
  peptide (1)..(343): Ceres Seq. ID no. 12421657
  misc_feature (39)..(339): Pfam Name: Mo25 protein family Pfam Description: Mo25 protein family
  misc_feature (4)..(338): Homolog of NCBI NO: 17569177 NR Description: Mouse Mo25 protein like family member
  misc_feature (4)..(338): Homolog of NCBI NO: 7459568 NR Description: hypothetical protein R02E12.2 - Caenorhabditis
  misc_feature (5)..(338): Homolog of NCBI NO: 34877516 NR Description: similar to MO25 protein [Rattus norvegicus]
  misc_feature (5)..(338): Homolog of NCBI NO: 7706481 NR Description: MO25 protein [Homo sapiens]
  misc_feature (1)..(342): Homolog of NCBI NO: 15227629 NR Description: unknown protein; protein id: At2g03410.1
  misc_feature (1)..(337): Homolog of NCBI NO: 34901086 NR Description: putative MO25 protein (CGI-66)
  misc_feature (44)..(343): Homolog of NCBI NO: 7485184 NR Description: hypothetical protein - Arabidopsis thaliana
  misc_feature (1)..(343): Homolog of NCBI NO: 15236013 NR Description: putative protein
  misc_feature (1)..(343): Homolog of NCBI NO: 15238126 NR Description: putative protein; protein id: At5g47540.1
  misc_feature (1)..(343): Homolog of NCBI NO: 15214076 NR Description: Hypothetical MO25-like protein At5g47540
MKGLFKSKPRTPADLVRQTRELLLFSDRSTSLPDLRDSKRDEKMAELSRNIRDMKSILYGNSEAEPVAEACAQLTQEFFKEDTLRLLITCLPKLNLETRKDATQVVANLQRQQVNSRLIASDYLEANIDLMDVLIEGFENTDMALHYGAMFRECIRHQIVAKYVLESDHVKKFFDYIQLPNFDIAADAAATFKELLTRHKSTVAEFLTKNEDWFFADYNSKLLESSNYITRRQAIKLLGDILLDRSNSAVMTKYVSSRDNLRILMNLLRESSKSIQIEAFHVFKLFAANQNKPADIVNILVANRSKLLRLLADLKPDKEDERFEADKSQVLREIAALEPRDLA

SEQ ID NO: 27829 - protein, 300 aa, Arabidopsis thaliana
  peptide (1)..(300): Ceres Seq. ID no. 12421658
  misc_feature (1)..(296): Pfam Name: Mo25 protein family Pfam Description: Mo25 protein family
  misc_feature (1)..(295): Homolog of NCBI NO: 17569177 NR Description: Mouse Mo25 protein like family member
  misc_feature (1)..(295): Homolog of NCBI NO: 7459568 NR Description: hypothetical protein R02E12.2 - Caenorhabditis
  misc_feature (1)..(295): Homolog of NCBI NO: 34877516 NR Description: similar to MO25 protein [Rattus norvegicus]
  misc_feature (1)..(295): Homolog of NCBI NO: 7706481 NR Description: MO25 protein [Homo sapiens]
  misc_feature (1)..(299): Homolog of NCBI NO: 15227629 NR Description: unknown protein; protein id: At2g03410.1
  misc_feature (1)..(294): Homolog of NCBI NO: 34901086 NR Description: putative MO25 protein (CGI-66)
  misc_feature (1)..(300): Homolog of NCBI NO: 7485184 NR Description: hypothetical protein - Arabidopsis thaliana
  misc_feature (1)..(300): Homolog of NCBI NO: 15236013 NR Description: putative protein
  misc_feature (1)..(300): Homolog of NCBI NO: 15238126 NR Description: putative protein; protein id: At5g47540.1
  misc_feature (1)..(300): Homolog of NCBI NO: 15214076 NR Description: Hypothetical MO25-like protein At5g47540
MAELSRNIRDMKSILYGNSEAEPVAEACAQLTQEFFKEDTLRLLITCLPKLNLETRKDATQVVANLQRQQVNSRLIASDYLEANIDLMDVLIEGFENTDMALHYGAMFRECIRHQIVAKYVLESDHVKKFFDYIQLPNFDIAADAAATFKELLTRHKSTVAEFLTKNEDWFFADYNSKLLESSNYITRRQAIKLLGDILLDRSNSAVMTKYVSSRDNLRILMNLLRESSKSIQIEAFHVFKLFAANQNKPADIVNILVANRSKLLRLLADLKPDKEDERFEADKSQVLREIAALEPRDLA

SEQ ID NO: 27830 - protein, 290 aa, Arabidopsis thaliana
  peptide (1)..(290): Ceres Seq. ID no. 12421659
  misc_feature (1)..(286): Pfam Name: Mo25 protein family Pfam Description: Mo25 protein family
  misc_feature (1)..(285): Homolog of NCBI NO: 17569177 NR Description: Mouse Mo25 protein like family member
  misc_feature (1)..(285): Homolog of NCBI NO: 7459568 NR Description: hypothetical protein R02E12.2 - Caenorhabditis
  misc_feature (1)..(285): Homolog of NCBI NO: 34877516 NR Description: similar to MO25 protein [Rattus norvegicus]
  misc_feature (1)..(285): Homolog of NCBI NO: 7706481 NR Description: MO25 protein [Homo sapiens]
  misc_feature (1)..(289): Homolog of NCBI NO: 15227629 NR Description: unknown protein; protein id: At2g03410.1
  misc_feature (1)..(284): Homolog of NCBI NO: 34901086 NR Description: putative MO25 protein (CGI-66)
  misc_feature (1)..(290): Homolog of NCBI NO: 7485184 NR Description: hypothetical protein - Arabidopsis thaliana
  misc_feature (1)..(290): Homolog of NCBI NO: 15236013 NR Description: putative protein
  misc_feature (1)..(290): Homolog of NCBI NO: 15238126 NR Description: putative protein; protein id: At5g47540.1
  misc_feature (1)..(290): Homolog of NCBI NO: 15214076 NR Description: Hypothetical MO25-like protein At5g47540
MKSILYGNSEAEPVAEACAQLTQEFFKEDTLRLLITCLPKLNLETRKDATQVVANLQRQQVNSRLIASDYLEANIDLMDVLIEGFENTDMALHYGAMFRECIRHQIVAKYVLESDHVKKFFDYIQLPNFDIAADAAATFKELLTRHKSTVAEFLTKNEDWFFADYNSKLLESSNYITRRQAIKLLGDILLDRSNSAVMTKYVSSRDNLRILMNLLRESSKSIQIEAFHVFKLFAANQNKPADIVNILVANRSKLLRLLADLKPDKEDERFEADKSQVLREIAALEPRDLA

SEQ ID NO: 27831 - DNA, 1367 bp, Arabidopsis thaliana
  misc_feature (1)..(1367): Ceres Seq. ID no. 12333764
  misc_feature: MA Experiment ID: 20000179 Result: Up-regulated in Transcription
  misc_feature: MA Experiment 20000179 PARAMETER Experiment Name: At_Germinating_Seeds_P Parameter: Age (hr) Value: 6 vs. 0
  misc_feature: MA Experiment 20000179 PARAMETER Experiment Name: At_Germinating_Seeds_P Parameter: Tissue Value: Germinating Seeds
  misc_feature: MA Experiment ID: 20000180 Result: Up-regulated in Transcription
  misc_feature: MA Experiment 20000180 PARAMETER Experiment Name: At_Germinating_Seeds_P Parameter: Age (hr) Value: 24 vs. 0
  misc_feature: MA Experiment 20000180 PARAMETER Experiment Name: At_Germinating_Seeds_P Parameter: Tissue Value: Germinating Seeds
  misc_feature: MA Experiment ID: 20000185 Result: Down-regulated in Transcription
  misc_feature: MA Experiment 20000185 PARAMETER Experiment Name: At_Roots__P Parameter: Age (day) Value: 7 vs. 21
  misc_feature: MA Experiment 20000185 PARAMETER Experiment Name: At_Roots__P Parameter: Organism Value: A. thaliana
  misc_feature: MA Experiment 20000185 PARAMETER Experiment Name: At_Roots__P Parameter: Tissue Value: Roots vs. Whole Plant
  misc_feature: MA Experiment ID: 20000234 Result: Up-regulated in Transcription
  misc_feature: MA Experiment 20000234 PARAMETER Experiment Name: At_Siliques_P Parameter: Age (day) Value: 21
  misc_feature: MA Experiment 20000234 PARAMETER Experiment Name: At_Siliques_P Parameter: Organism Value: A. thaliana
  misc_feature: MA Experiment 20000234 PARAMETER Experiment Name: At_Siliques_P Parameter: Plant Line Value: WS
  misc_feature: MA Experiment 20000234 PARAMETER Experiment Name: At_Siliques_P Parameter: Tissue Value: Less Than 5mm Siliques vs. Whole Plant
  misc_feature: MA Experiment ID: 20000235 Result: Up-regulated in Transcription
  misc_feature: MA Experiment 20000235 PARAMETER Experiment Name: At_Siliques_P Parameter: Age (day) Value: 21
  misc_feature: MA Experiment 20000235 PARAMETER Experiment Name: At_Siliques_P Parameter: Organism Value: A. thaliana
  misc_feature: MA Experiment 20000235 PARAMETER Experiment Name: At_Siliques_P Parameter: Plant Line Value: WS
  misc_feature: MA Experiment 20000235 PARAMETER Experiment Name: At_Siliques_P Parameter: Tissue Value: 5-10mm Siliques vs. Whole Plant
  misc_feature: MA Experiment ID: 20000437 Result: Down-regulated in Transcription
  misc_feature: MA Experiment 20000437 PARAMETER Experiment Name: At_Drought_P Parameter: Age (day) Value: 8
  misc_feature: MA Experiment 20000437 PARAMETER Experiment Name: At_Drought_P Parameter: Organism Value: A. thaliana
  misc_feature: MA Experiment 20000437 PARAMETER Experiment Name: At_Drought_P Parameter: Plant Line Value: WS
  misc_feature: MA Experiment 20000437 PARAMETER Experiment Name: At_Drought_P Parameter: Timepoint (hr) Value: 24
  misc_feature: MA Experiment 20000437 PARAMETER Experiment Name: At_Drought_P Parameter: Tissue Value: Whole Plant
  misc_feature: MA Experiment 20000437 PARAMETER Experiment Name: At_Drought_P Parameter: Treatment Value: Drought vs. No Drought
  misc_feature: MA Experiment ID: 20000438 Result: Up-regulated in Transcription
  misc_feature: MA Experiment 20000438 PARAMETER Experiment Name: At_Shoots__P Parameter: Age (day) Value: 14
  misc_feature: MA Experiment 20000438 PARAMETER Experiment Name: At_Shoots__P Parameter: Tissue Value: Shoots vs. Whole Plant
  misc_feature: MA Experiment ID: 20000439 Result: Down-regulated in Transcription
  misc_feature: MA Experiment 20000439 PARAMETER Experiment Name: At_Roots__P Parameter: Age (day) Value: 14 vs. 21
  misc_feature: MA Experiment 20000439 PARAMETER Experiment Name: At_Roots__P Parameter: Organism Value: A. thaliana
  misc_feature: MA Experiment 20000439 PARAMETER Experiment Name: At_Roots__P Parameter: Tissue Value: Roots vs. Whole Plant
  misc_feature: MA Experiment ID: 20000794 Result: Down-regulated in Transcription
  misc_feature: MA Experiment 20000794 PARAMETER Experiment Name: At_Petals_P Parameter: Age (day) Value: 23-25 days
  misc_feature: MA Experiment 20000794 PARAMETER Experiment Name: At_Petals_P Parameter: Plant Line Value: WS
  misc_feature: MA Experiment 20000794 PARAMETER Experiment Name: At_Petals_P Parameter: Tissue Value: Petals vs. Whole plant
  misc_feature: MA Experiment ID: 20001248 Result: Down-regulated in Transcription
  misc_feature: MA Experiment 20001248 PARAMETER Experiment Name: At_Far-red-induction_P Parameter: Age (day) Value: 7
  misc_feature: MA Experiment 20001248 PARAMETER Experiment Name: At_Far-red-induction_P Parameter: Light Value: Far-red vs. White
  misc_feature: MA Experiment 20001248 PARAMETER Experiment Name: At_Far-red-induction_P Parameter: Organism Value: A. thaliana
  misc_feature: MA Experiment 20001248 PARAMETER Experiment Name: At_Far-red-induction_P Parameter: Plant Line Value: Columbia
  misc_feature: MA Experiment 20001248 PARAMETER Experiment Name: At_Far-red-induction_P Parameter: Timepoint (hr) Value: 4
  misc_feature: MA Experiment 20001248 PARAMETER Experiment Name: At_Far-red-induction_P Parameter: Tissue Value: Whole Plant
  misc_feature: MA Experiment ID: 20001450 Result: Down-regulated in Transcription
  misc_feature: MA Experiment 20001450 PARAMETER Experiment Name: At_Far-red-induction_P Parameter: Age (day) Value: 7
  misc_feature: MA Experiment 20001450 PARAMETER Experiment Name: At_Far-red-induction_P Parameter: Light Value: Far-red vs. White
  misc_feature: MA Experiment 20001450 PARAMETER Experiment Name: At_Far-red-induction_P Parameter: Organism Value: A. thaliana
  misc_feature: MA Experiment 20001450 PARAMETER Experiment Name: At_Far-red-induction_P Parameter: Plant Line Value: Columbia
  misc_feature: MA Experiment 20001450 PARAMETER Experiment Name: At_Far-red-induction_P Parameter: Timepoint (hr) Value: 8
  misc_feature: MA Experiment 20001450 PARAMETER Experiment Name: At_Far-red-induction_P Parameter: Tissue Value: Whole Plant
  misc_feature: MA Experiment ID: 20001451 Result: Down-regulated in Transcription
  misc_feature: MA Experiment 20001451 PARAMETER Experiment Name: At_Far-red-induction_P Parameter: Age (day) Value: 7
  misc_feature: MA Experiment 20001451 PARAMETER Experiment Name: At_Far-red-induction_P Parameter: Light Value: Far-red vs. White
  misc_feature: MA Experiment 20001451 PARAMETER Experiment Name: At_Far-red-induction_P Parameter: Organism Value: A. thaliana
  misc_feature: MA Experiment 20001451 PARAMETER Experiment Name: At_Far-red-induction_P Parameter: Plant Line Value: Columbia
  misc_feature: MA Experiment 20001451 PARAMETER Experiment Name: At_Far-red-induction_P Parameter: Timepoint (hr) Value: 24
  misc_feature: MA Experiment 20001451 PARAMETER Experiment Name: At_Far-red-induction_P Parameter: Tissue Value: Whole Plant
  misc_feature: MA Experiment ID: 20001557 Result: Down-regulated in Transcription
  misc_feature: MA Experiment 20001557 PARAMETER Experiment Name: At_Drought_Soil_Dry_P Parameter: Age (day) Value: 27
  misc_feature: MA Experiment 20001557 PARAMETER Experiment Name: At_Drought_Soil_Dry_P Parameter: Organism Value: A. thaliana
  misc_feature: MA Experiment 20001557 PARAMETER Experiment Name: At_Drought_Soil_Dry_P Parameter: Plant Line Value: WS
  misc_feature: MA Experiment 20001557 PARAMETER Experiment Name: At_Drought_Soil_Dry_P Parameter: Post Timepoint (hr) Value: 3
  misc_feature: MA Experiment 20001557 PARAMETER Experiment Name: At_Drought_Soil_Dry_P Parameter: Post-Treatment Value: Re-Water vs. No Drought
  misc_feature: MA Experiment 20001557 PARAMETER Experiment Name: At_Drought_Soil_Dry_P Parameter: Timepoint (day) Value: 13
  misc_feature: MA Experiment 20001557 PARAMETER Experiment Name: At_Drought_Soil_Dry_P Parameter: Treatment Value: Drought vs. No Drought
  misc_feature: MA Experiment ID: 20001904 Result: Down-regulated in Transcription
  misc_feature: MA Experiment 20001904 PARAMETER Experiment Name: At_Drought_Reproduction_P Parameter: Age (day) Value: 37
  misc_feature: MA Experiment 20001904 PARAMETER Experiment Name: At_Drought_Reproduction_P Parameter: Organism Value: A. thaliana
  misc_feature: MA Experiment 20001904 PARAMETER Experiment Name: At_Drought_Reproduction_P Parameter: Plant Line Value: WS
  misc_feature: MA Experiment 20001904 PARAMETER Experiment Name: At_Drought_Reproduction_P Parameter: Timepoint (day) Value: 7
  misc_feature: MA Experiment 20001904 PARAMETER Experiment Name: At_Drought_Reproduction_P Parameter: Tissue Value: Rosettes
  misc_feature: MA Experiment 20001904 PARAMETER Experiment Name: At_Drought_Reproduction_P Parameter: Treatment Value: Drought vs. No Drought
  misc_feature: MA Experiment ID: 20001905 Result: Down-regulated in Transcription
  misc_feature: MA Experiment 20001905 PARAMETER Experiment Name: At_Drought_Reproduction_P Parameter: Age (day) Value: 40
  misc_feature: MA Experiment 20001905 PARAMETER Experiment Name: At_Drought_Reproduction_P Parameter: Organism Value: A. thaliana
  misc_feature: MA Experiment 20001905 PARAMETER Experiment Name: At_Drought_Reproduction_P Parameter: Plant Line Value: WS
  misc_feature: MA Experiment 20001905 PARAMETER Experiment Name: At_Drought_Reproduction_P Parameter: Timepoint (day) Value: 10
  misc_feature: MA Experiment 20001905 PARAMETER Experiment Name: At_Drought_Reproduction_P Parameter: Tissue Value: Rosettes
  misc_feature: MA Experiment 20001905 PARAMETER Experiment Name: At_Drought_Reproduction_P Parameter: Treatment Value: Drought vs. No Drought
  misc_feature: MA Experiment ID: 20001906 Result: Down-regulated in Transcription
  misc_feature: MA Experiment 20001906 PARAMETER Experiment Name: At_Drought_Reproduction_P Parameter: Age (day) Value: 35
  misc_feature: MA Experiment 20001906 PARAMETER Experiment Name: At_Drought_Reproduction_P Parameter: Organism Value: A. thaliana
  misc_feature: MA Experiment 20001906 PARAMETER Experiment Name: At_Drought_Reproduction_P Parameter: Plant Line Value: WS
  misc_feature: MA Experiment 20001906 PARAMETER Experiment Name: At_Drought_Reproduction_P Parameter: Timepoint (day) Value: 5
  misc_feature: MA Experiment 20001906 PARAMETER Experiment Name: At_Drought_Reproduction_P Parameter: Tissue Value: Siliques
  misc_feature: MA Experiment 20001906 PARAMETER Experiment Name: At_Drought_Reproduction_P Parameter: Treatment Value: Drought vs. No Drought
  misc_feature: MA Experiment ID: 20001908 Result: Down-regulated in Transcription
  misc_feature: MA Experiment 20001908 PARAMETER Experiment Name: At_Drought_Reproduction_P Parameter: Age (day) Value: 40
  misc_feature: MA Experiment 20001908 PARAMETER Experiment Name: At_Drought_Reproduction_P Parameter: Organism Value: A. thaliana
  misc_feature: MA Experiment 20001908 PARAMETER Experiment Name: At_Drought_Reproduction_P Parameter: Plant Line Value: WS
  misc_feature: MA Experiment 20001908 PARAMETER Experiment Name: At_Drought_Reproduction_P Parameter: Timepoint (day) Value: 10
  misc_feature: MA Experiment 20001908 PARAMETER Experiment Name: At_Drought_Reproduction_P Parameter: Tissue Value: Siliques
  misc_feature: MA Experiment 20001908 PARAMETER Experiment Name: At_Drought_Reproduction_P Parameter: Treatment Value: Drought vs. No Drought
aaaatcgaagacactgtgacactctagcaccttcagttccgtacaacaatggctctccaagctgcctattctcttcttccttctaccatttcaatccaaaaagagggcaaattcaatgcttctctaaaggagacgacttttactggttcttcattttcaaaccatcttagagctgaaaagatatccaccctgttgaccatcaaggaacagagaagacagaaaccgcgattttccaccggtattcgtgcacagacagttacagccacgccgccggcaaacgaagcatcgccggagcaaaagaagactgagagaaaaggcactgcagtgatcactggagcttcgtctggtttaggtttagctacggccaaagctttagcagacacagggaaatggcatgtgatcatggcttgcaggaactttctcaaggccgagaaggcagcgagatctgttggaatgtccaaggaagattacacagtgatgcatcttgatcttgcttcgcttgaaagcgtgaagcaattcgttgaaaatttccggagaacagaacaaccactcgatgttcttgtctgcaatgccgcggtttaccaaccaactgctaaagagccttcttttacagctgaaggctttgagataagcgttggaaccaaccatctcggtcactttcttctctcaagattgcttcttgatgacctgaaaaaatctgattatccatcaaaacgtatgatcatcgtaggatctataacaggaaacacaaatactttggctgggaatgtaccgccaaaggcaaaccttggagacctaagaggcttagcgtcaggattgaatgggcaaaacagttcaatgatagatggaggagagtttgatggagcaaaggcttacaaagacagcaaagtatgcaatatgctgacaatgcaggagcttcacagacgttaccacgaggaaacaggagtcacgtttgcttctctttaccctggttgcatcgctacaacagggttgttcagagaacacataccgctgtttcggcttctttttccgccttttcaaaagtatatcaccaaaggttacgtatctgaagaggaagctggcaaaagactagcacaggttgtgagtgaccctagtcttgggaagtcaggagtgtattggagttggaacaataactcgtcttcgtttgagaatcagctttctaaagaagcaagtgatgcggagaaggcaaagaaactgtgggaggttagcgagaagcttgttggtttggcatgaactcaagatttttgatatgcaaattcatatagattactatgttttgtgacatgtacaataagtatgatcaatcagactaatcattcgaatgcatttcaatagagttaatcatc

SEQ ID NO: 27832 - protein, 401 aa, Arabidopsis thaliana
  peptide (1)..(401): Ceres Seq. ID no. 12333765
  misc_feature (1)..(401): Homolog of NCBI NO: 15239574 NR Description: NADPH:protochlorophyllide oxidoreductase A
  misc_feature (1)..(401): Homolog of NCBI NO: 968975 NR Description: NADPH:protochlorophyllide oxidoreductase A
  misc_feature (1)..(401): Homolog of NCBI NO: 15234129 NR Description: protochlorophyllide reductase precursor
  misc_feature (1)..(401): Homolog of NCBI NO: 21068895 NR Description: NADPH:protochlorophyllide oxidoreductase
  misc_feature (1)..(401): Homolog of NCBI NO: 266742 NR Description: Protochlorophyllide reductase, chloroplast
  misc_feature (1)..(401): Homolog of NCBI NO: 21068893 NR Description: NADPH:protochlorophyllide oxidoreductase
  misc_feature (1)..(401): Homolog of NCBI NO: 81946 NR Description: protochlorophyllide reductase (EC 1.3.1.33)
  misc_feature (1)..(401): Homolog of NCBI NO: 10720220 NR Description: Protochlorophyllide reductase, chloroplast
  misc_feature (1)..(401): Homolog of NCBI NO: 10720233 NR Description: Protochlorophyllide reductase, chloroplast
  misc_feature (1)..(401): Homolog of NCBI NO: 15218860 NR Description: putative protochlorophyllide reductase
MALQAAYSLLPSTISIQKEGKFNASLKETTFTGSSFSNHLRAEKISTLLTIKEQRRQKPRFSTGIRAQTVTATPPANEASPEQKKTERKGTAVITGASSGLGLATAKALADTGKWHVIMACRNFLKAEKAARSVGMSKEDYTVMHLDLASLESVKQFVENFRRTEQPLDVLVCNAAVYQPTAKEPSFTAEGFEISVGTNHLGHFLLSRLLLDDLKKSDYPSKRMIIVGSITGNTNTLAGNVPPKANLGDLRGLASGLNGQNSSMIDGGEFDGAKAYKDSKVCNMLTMQELHRRYHEETGVTFASLYPGCIATTGLFREHIPLFRLLFPPFQKYITKGYVSEEEAGKRLAQVVSDPSLGKSGVYWSWNNNSSSFENQLSKEASDAEKAKKLWEVSEKLVGLA

SEQ ID NO: 27833 - protein, 283 aa, Arabidopsis thaliana
  peptide (1)..(283): Ceres Seq. ID no. 12333766
  misc_feature (1)..(283): Homolog of NCBI NO: 15239574 NR Description: NADPH:protochlorophyllide oxidoreductase A
  misc_feature (1)..(283): Homolog of NCBI NO: 968975 NR Description: NADPH:protochlorophyllide oxidoreductase A
  misc_feature (1)..(283): Homolog of NCBI NO: 15234129 NR Description: protochlorophyllide reductase precursor
  misc_feature (1)..(283): Homolog of NCBI NO: 21068895 NR Description: NADPH:protochlorophyllide oxidoreductase
  misc_feature (1)..(283): Homolog of NCBI NO: 266742 NR Description: Protochlorophyllide reductase, chloroplast
  misc_feature (1)..(283): Homolog of NCBI NO: 21068893 NR Description: NADPH:protochlorophyllide oxidoreductase
  misc_feature (1)..(283): Homolog of NCBI NO: 81946 NR Description: protochlorophyllide reductase (EC 1.3.1.33)
  misc_feature (1)..(283): Homolog of NCBI NO: 10720220 NR Description: Protochlorophyllide reductase, chloroplast
  misc_feature (1)..(283): Homolog of NCBI NO: 10720233 NR Description: Protochlorophyllide reductase, chloroplast
  misc_feature (1)..(283): Homolog of NCBI NO: 15218860 NR Description: putative protochlorophyllide reductase
MACRNFLKAEKAARSVGMSKEDYTVMHLDLASLESVKQFVENFRRTEQPLDVLVCNAAVYQPTAKEPSFTAEGFEISVGTNHLGHFLLSRLLLDDLKKSDYPSKRMIIVGSITGNTNTLAGNVPPKANLGDLRGLASGLNGQNSSMIDGGEFDGAKAYKDSKVCNMLTMQELHRRYHEETGVTFASLYPGCIATTGLFREHIPLFRLLFPPFQKYITKGYVSEEEAGKRLAQVVSDPSLGKSGVYWSWNNNSSSFENQLSKEASDAEKAKKLWEVSEKLVGLA

SEQ ID NO: 27834 - protein, 266 aa, Arabidopsis thaliana
  peptide (1)..(266): Ceres Seq. ID no. 12333767
  misc_feature (1)..(266): Homolog of NCBI NO: 15239574 NR Description: NADPH:protochlorophyllide oxidoreductase A
  misc_feature (1)..(266): Homolog of NCBI NO: 968975 NR Description: NADPH:protochlorophyllide oxidoreductase A
  misc_feature (1)..(266): Homolog of NCBI NO: 15234129 NR Description: protochlorophyllide reductase precursor
  misc_feature (1)..(266): Homolog of NCBI NO: 21068895 NR Description: NADPH:protochlorophyllide oxidoreductase
  misc_feature (1)..(266): Homolog of NCBI NO: 266742 NR Description: Protochlorophyllide reductase, chloroplast
  misc_feature (1)..(266): Homolog of NCBI NO: 21068893 NR Description: NADPH:protochlorophyllide oxidoreductase
  misc_feature (1)..(266): Homolog of NCBI NO: 81946 NR Description: protochlorophyllide reductase (EC 1.3.1.33)
  misc_feature (1)..(266): Homolog of NCBI NO: 10720220 NR Description: Protochlorophyllide reductase, chloroplast
  misc_feature (1)..(266): Homolog of NCBI NO: 10720233 NR Description: Protochlorophyllide reductase, chloroplast
  misc_feature (1)..(266): Homolog of NCBI NO: 15218860 NR Description: putative protochlorophyllide reductase
MSKEDYTVMHLDLASLESVKQFVENFRRTEQPLDVLVCNAAVYQPTAKEPSFTAEGFEISVGTNHLGHFLLSRLLLDDLKKSDYPSKRMIIVGSITGNTNTLAGNVPPKANLGDLRGLASGLNGQNSSMIDGGEFDGAKAYKDSKVCNMLTMQELHRRYHEETGVTFASLYPGCIATTGLFREHIPLFRLLFPPFQKYITKGYVSEEEAGKRLAQVVSDPSLGKSGVYWSWNNNSSSFENQLSKEASDAEKAKKLWEVSEKLVGLA

SEQ ID NO: 27835 - DNA, 1148 bp, Arabidopsis thaliana
  misc_feature (1)..(1148): Ceres Seq. ID no. 13497523
  misc_feature: MA Experiment ID: 108462 Result: Down-regulated in Transcription
  misc_feature: MA Experiment 108462 PARAMETER Experiment Name: At_Germinating_Seeds_cDNA_P Parameter: Age (day) Value: 2 vs. 0
  misc_feature: MA Experiment 108462 PARAMETER Experiment Name: At_Germinating_Seeds_cDNA_P Parameter: Tissue Value: Germinating Seeds
  misc_feature: MA Experiment ID: 108572 Result: Up-regulated in Transcription
  misc_feature: MA Experiment 108572 PARAMETER Experiment Name: At_Drought_cDNA_P Parameter: Timepoint (hr) Value: 1
  misc_feature: MA Experiment 108572 PARAMETER Experiment Name: At_Drought_cDNA_P Parameter: Tissue Value: Aerial
  misc_feature: MA Experiment 108572 PARAMETER Experiment Name: At_Drought_cDNA_P Parameter: Treatment Value: Drought vs. No Drought
  misc_feature: MA Experiment ID: 108573 Result: Up-regulated in Transcription
  misc_feature: MA Experiment 108573 PARAMETER Experiment Name: At_Drought_cDNA_P Parameter: Timepoint (hr) Value: 6
  misc_feature: MA Experiment 108573 PARAMETER Experiment Name: At_Drought_cDNA_P Parameter: Tissue Value: Aerial
  misc_feature: MA Experiment 108573 PARAMETER Experiment Name: At_Drought_cDNA_P Parameter: Treatment Value: Drought vs. No Drought
  misc_feature: MA Experiment ID: 108585 Result: Up-regulated in Transcription
  misc_feature: MA Experiment 108585 PARAMETER Experiment Name: At_5mM_NaNP_cDNA_P Parameter: Timepoint (hr) Value: 6
  misc_feature: MA Experiment 108585 PARAMETER Experiment Name: At_5mM_NaNP_cDNA_P Parameter: Tissue Value: Aerial
  misc_feature: MA Experiment 108585 PARAMETER Experiment Name: At_5mM_NaNP_cDNA_P Parameter: Treatment Value: null
  misc_feature: MA Experiment ID: 108595 Result: Up-regulated in Transcription
  misc_feature: MA Experiment 108595 PARAMETER Experiment Name: At_Ler-pi_Ovule_cDNA_P Parameter: Plant Line Value: null
  misc_feature: MA Experiment ID: 108667 Result: Up-regulated in Transcription
  misc_feature: MA Experiment 108667 PARAMETER Experiment Name: At_2mM_SA_cDNA_P Parameter: Plant Line Value: WS
  misc_feature: MA Experiment 108667 PARAMETER Experiment Name: At_2mM_SA_cDNA_P Parameter: Timepoint (hr) Value: 1
  misc_feature: MA Experiment 108667 PARAMETER Experiment Name: At_2mM_SA_cDNA_P Parameter: Treatment Value: 2mM SA vs. No Treatment
  misc_feature: MA Experiment ID: 20000069 Result: Up-regulated in Transcription
  misc_feature: MA Experiment 20000069 PARAMETER Experiment Name: At_100uM_ABA_Mutants_cDNA_P Parameter: Plant Line Value: CS23
  misc_feature: MA Experiment 20000069 PARAMETER Experiment Name: At_100uM_ABA_Mutants_cDNA_P Parameter: Timepoint (hr) Value: 6
  misc_feature: MA Experiment 20000069 PARAMETER Experiment Name: At_100uM_ABA_Mutants_cDNA_P Parameter: Tissue Value: Aerial
  misc_feature: MA Experiment 20000069 PARAMETER Experiment Name: At_100uM_ABA_Mutants_cDNA_P Parameter: Treatment Value: 100uM ABA vs. No Treatment
  misc_feature: MA Experiment ID: 20000070 Result: Up-regulated in Transcription
  misc_feature: MA Experiment 20000070 PARAMETER Experiment Name: At_100uM_ABA_Mutants_cDNA_P Parameter: Plant Line Value: CS24
  misc_feature: MA Experiment 20000070 PARAMETER Experiment Name: At_100uM_ABA_Mutants_cDNA_P Parameter: Timepoint (hr) Value: 6
  misc_feature: MA Experiment 20000070 PARAMETER Experiment Name: At_100uM_ABA_Mutants_cDNA_P Parameter: Tissue Value: Aerial
  misc_feature: MA Experiment 20000070 PARAMETER Experiment Name: At_100uM_ABA_Mutants_cDNA_P Parameter: Treatment Value: 100uM ABA vs. No Treatment
  misc_feature: MA Experiment ID: 20000071 Result: Up-regulated in Transcription
  misc_feature: MA Experiment 20000071 PARAMETER Experiment Name: At_100uM_ABA_Mutants_cDNA_P Parameter: Plant Line Value: CS8104
  misc_feature: MA Experiment 20000071 PARAMETER Experiment Name: At_100uM_ABA_Mutants_cDNA_P Parameter: Timepoint (hr) Value: 6
  misc_feature: MA Experiment 20000071 PARAMETER Experiment Name: At_100uM_ABA_Mutants_cDNA_P Parameter: Tissue Value: Aerial
  misc_feature: MA Experiment 20000071 PARAMETER Experiment Name: At_100uM_ABA_Mutants_cDNA_P Parameter: Treatment Value: 100uM ABA vs. No Treatment
  misc_feature: MA Experiment ID: 20000072 Result: Up-regulated in Transcription
  misc_feature: MA Experiment 20000072 PARAMETER Experiment Name: At_100uM_ABA_Mutants_cDNA_P Parameter: Plant Line Value: CS8105
  misc_feature: MA Experiment 20000072 PARAMETER Experiment Name: At_100uM_ABA_Mutants_cDNA_P Parameter: Timepoint (hr) Value: 6
  misc_feature: MA Experiment 20000072 PARAMETER Experiment Name: At_100uM_ABA_Mutants_cDNA_P Parameter: Tissue Value: Aerial
  misc_feature: MA Experiment 20000072 PARAMETER Experiment Name: At_100uM_ABA_Mutants_cDNA_P Parameter: Treatment Value: 100uM ABA vs. No Treatment
  misc_feature: MA Experiment ID: 20000086 Result: Up-regulated in Transcription
  misc_feature: MA Experiment 20000086 PARAMETER Experiment Name: At_100uM_ABA_Mutants_cDNA_P Parameter: Plant Line Value: CS22
  misc_feature: MA Experiment 20000086 PARAMETER Experiment Name: At_100uM_ABA_Mutants_cDNA_P Parameter: Timepoint (hr) Value: 6
  misc_feature: MA Experiment 20000086 PARAMETER Experiment Name: At_100uM_ABA_Mutants_cDNA_P Parameter: Tissue Value: Aerial
  misc_feature: MA Experiment 20000086 PARAMETER Experiment Name: At_100uM_ABA_Mutants_cDNA_P Parameter: Treatment Value: 100uM ABA vs. No Treatment
  misc_feature: MA Experiment ID: 20000088 Result: Up-regulated in Transcription
  misc_feature: MA Experiment 20000088 PARAMETER Experiment Name: At_100uM_ABA_Mutants_cDNA_P Parameter: Plant Line Value: Landsberg
  misc_feature: MA Experiment 20000088 PARAMETER Experiment Name: At_100uM_ABA_Mutants_cDNA_P Parameter: Timepoint (hr) Value: 6
  misc_feature: MA Experiment 20000088 PARAMETER Experiment Name: At_100uM_ABA_Mutants_cDNA_P Parameter: Tissue Value: Aerial
  misc_feature: MA Experiment 20000088 PARAMETER Experiment Name: At_100uM_ABA_Mutants_cDNA_P Parameter: Treatment Value: 100uM ABA vs. No Treatment
  misc_feature: MA Experiment ID: 20000111 Result: Down-regulated in Transcription
  misc_feature: MA Experiment 20000111 PARAMETER Experiment Name: At_42deg_Heat_cDNA_P Parameter: Temperature (deg C) Value: 42 vs. 22
  misc_feature: MA Experiment 20000111 PARAMETER Experiment Name: At_42deg_Heat_cDNA_P Parameter: Timepoint (hr) Value: 6
  misc_feature: MA Experiment 20000111 PARAMETER Experiment Name: At_42deg_Heat_cDNA_P Parameter: Tissue Value: Aerial
  misc_feature: MA Experiment ID: 20000113 Result: Down-regulated in Transcription
  misc_feature: MA Experiment 20000113 PARAMETER Experiment Name: At_42deg_Heat_cDNA_P Parameter: Temperature (deg C) Value: 42 vs. 22
  misc_feature: MA Experiment 20000113 PARAMETER Experiment Name: At_42deg_Heat_cDNA_P Parameter: Timepoint (hr) Value: 8
  misc_feature: MA Experiment 20000113 PARAMETER Experiment Name: At_42deg_Heat_cDNA_P Parameter: Tissue Value: Aerial
  misc_feature: MA Experiment ID: 20000117 Result: Up-regulated in Transcription
  misc_feature: MA Experiment 20000117 PARAMETER Experiment Name: At_100uM_ABA_Mutants_cDNA_P Parameter: Plant Line Value: Columbia
  misc_feature: MA Experiment 20000117 PARAMETER Experiment Name: At_100uM_ABA_Mutants_cDNA_P Parameter: Timepoint (hr) Value: 6
  misc_feature: MA Experiment 20000117 PARAMETER Experiment Name: At_100uM_ABA_Mutants_cDNA_P Parameter: Tissue Value: Aerial
  misc_feature: MA Experiment 20000117 PARAMETER Experiment Name: At_100uM_ABA_Mutants_cDNA_P Parameter: Treatment Value: 100uM ABA vs. No Treatment
  misc_feature: MA Experiment ID: 20000144 Result: Down-regulated in Transcription
  misc_feature: MA Experiment 20000144 PARAMETER Experiment Name: At_42deg_Heat_cDNA_P Parameter: Temperature (deg C) Value: 42 vs. 22
  misc_feature: MA Experiment 20000144 PARAMETER Experiment Name: At_42deg_Heat_cDNA_P Parameter: Timepoint (hr) Value: 1
  misc_feature: MA Experiment 20000144 PARAMETER Experiment Name: At_42deg_Heat_cDNA_P Parameter: Tissue Value: Aerial
  misc_feature: MA Experiment ID: 20000171 Result: Down-regulated in Transcription
  misc_feature: MA Experiment 20000171 PARAMETER Experiment Name: At_42deg_Heat_P Parameter: Age (day) Value: 14
  misc_feature: MA Experiment 20000171 PARAMETER Experiment Name: At_42deg_Heat_P Parameter: Organism Value: A. thaliana
  misc_feature: MA Experiment 20000171 PARAMETER Experiment Name: At_42deg_Heat_P Parameter: Plant Line Value: WS
  misc_feature: MA Experiment 20000171 PARAMETER Experiment Name: At_42deg_Heat_P Parameter: Temperature (deg C) Value: 42 vs. 22
  misc_feature: MA Experiment 20000171 PARAMETER Experiment Name: At_42deg_Heat_P Parameter: Timepoint (hr) Value: 1
  misc_feature: MA Experiment 20000171 PARAMETER Experiment Name: At_42deg_Heat_P Parameter: Tissue Value: Aerial
  misc_feature: MA Experiment ID: 20000173 Result: Down-regulated in Transcription
  misc_feature: MA Experiment 20000173 PARAMETER Experiment Name: At_42deg_Heat_P Parameter: Age (day) Value: 14
  misc_feature: MA Experiment 20000173 PARAMETER Experiment Name: At_42deg_Heat_P Parameter: Organism Value: A. thaliana
  misc_feature: MA Experiment 20000173 PARAMETER Experiment Name: At_42deg_Heat_P Parameter: Plant Line Value: WS
  misc_feature: MA Experiment 20000173 PARAMETER Experiment Name: At_42deg_Heat_P Parameter: Temperature (deg C) Value: 42 vs. 22
  misc_feature: MA Experiment 20000173 PARAMETER Experiment Name: At_42deg_Heat_P Parameter: Timepoint (hr) Value: 6
  misc_feature: MA Experiment 20000173 PARAMETER Experiment Name: At_42deg_Heat_P Parameter: Tissue Value: Aerial
  misc_feature: MA Experiment ID: 20000180 Result: Down-regulated in Transcription
  misc_feature: MA Experiment 20000180 PARAMETER Experiment Name: At_Germinating_Seeds_P Parameter: Age (hr) Value: 24 vs. 0
  misc_feature: MA Experiment 20000180 PARAMETER Experiment Name: At_Germinating_Seeds_P Parameter: Tissue Value: Germinating Seeds
  misc_feature: MA Experiment ID: 20000184 Result: Down-regulated in Transcription
  misc_feature: MA Experiment 20000184 PARAMETER Experiment Name: At_Shoots__P Parameter: Age (day) Value: 7
  misc_feature: MA Experiment 20000184 PARAMETER Experiment Name: At_Shoots__P Parameter: Tissue Value: Shoots vs. Whole Plant
  misc_feature: MA Experiment ID: 20000227 Result: Down-regulated in Transcription
  misc_feature: MA Experiment 20000227 PARAMETER Experiment Name: At_Root-Tips-vs-Tops_P Parameter: Tissue Value: Root Tips vs. Root Tops
  misc_feature: MA Experiment ID: 20000234 Result: Down-regulated in Transcription
  misc_feature: MA Experiment 20000234 PARAMETER Experiment Name: At_Siliques_P Parameter: Age (day) Value: 21
  misc_feature: MA Experiment 20000234 PARAMETER Experiment Name: At_Siliques_P Parameter: Organism Value: A. thaliana
  misc_feature: MA Experiment 20000234 PARAMETER Experiment Name: At_Siliques_P Parameter: Plant Line Value: WS
  misc_feature: MA Experiment 20000234 PARAMETER Experiment Name: At_Siliques_P Parameter: Tissue Value: Less Than 5mm Siliques vs. Whole Plant
  misc_feature: MA Experiment ID: 20000235 Result: Down-regulated in Transcription
  misc_feature: MA Experiment 20000235 PARAMETER Experiment Name: At_Siliques_P Parameter: Age (day) Value: 21
  misc_feature: MA Experiment 20000235 PARAMETER Experiment Name: At_Siliques_P Parameter: Organism Value: A. thaliana
  misc_feature: MA Experiment 20000235 PARAMETER Experiment Name: At_Siliques_P Parameter: Plant Line Value: WS
  misc_feature: MA Experiment 20000235 PARAMETER Experiment Name: At_Siliques_P Parameter: Tissue Value: 5-10mm Siliques vs. Whole Plant
  misc_feature: MA Experiment ID: 20000264 Result: Down-regulated in Transcription
  misc_feature: MA Experiment 20000264 PARAMETER Experiment Name: At_Open_Flower_P Parameter: Age (day) Value: 21
  misc_feature: MA Experiment 20000264 PARAMETER Experiment Name: At_Open_Flower_P Parameter: Plant Line Value: WS
  misc_feature: MA Experiment 20000264 PARAMETER Experiment Name: At_Open_Flower_P Parameter: Tissue Value: Open Flower vs. Whole Plant
  misc_feature: MA Experiment ID: 20000265 Result: Down-regulated in Transcription
  misc_feature: MA Experiment 20000265 PARAMETER Experiment Name: At_Open_Flower_P Parameter: Age (day) Value: 21
  misc_feature: MA Experiment 20000265 PARAMETER Experiment Name: At_Open_Flower_P Parameter: Plant Line Value: WS
  misc_feature: MA Experiment 20000265 PARAMETER Experiment Name: At_Open_Flower_P Parameter: Tissue Value: Closed Flower vs. Whole Plant
  misc_feature: MA Experiment ID: 20000286 Result: Down-regulated in Transcription
  misc_feature: MA Experiment 20000286 PARAMETER Experiment Name: At_Open_Flower_P Parameter: Age (day) Value: 21
  misc_feature: MA Experiment 20000286 PARAMETER Experiment Name: At_Open_Flower_P Parameter: Plant Line Value: WS
  misc_feature: MA Experiment 20000286 PARAMETER Experiment Name: At_Open_Flower_P Parameter: Tissue Value: Half Open vs. Whole Plant
  misc_feature: MA Experiment ID: 20000437 Result: Up-regulated in Transcription
  misc_feature: MA Experiment 20000437 PARAMETER Experiment Name: At_Drought_P Parameter: Age (day) Value: 8
  misc_feature: MA Experiment 20000437 PARAMETER Experiment Name: At_Drought_P Parameter: Organism Value: A. thaliana
  misc_feature: MA Experiment 20000437 PARAMETER Experiment Name: At_Drought_P Parameter: Plant Line Value: WS
  misc_feature: MA Experiment 20000437 PARAMETER Experiment Name: At_Drought_P Parameter: Timepoint (hr) Value: 24
  misc_feature: MA Experiment 20000437 PARAMETER Experiment Name: At_Drought_P Parameter: Tissue Value: Whole Plant
  misc_feature: MA Experiment 20000437 PARAMETER Experiment Name: At_Drought_P Parameter: Treatment Value: Drought vs. No Drought
  misc_feature: MA Experiment ID: 20000438 Result: Down-regulated in Transcription
  misc_feature: MA Experiment 20000438 PARAMETER Experiment Name: At_Shoots__P Parameter: Age (day) Value: 14
  misc_feature: MA Experiment 20000438 PARAMETER Experiment Name: At_Shoots__P Parameter: Tissue Value: Shoots vs. Whole Plant
  misc_feature: MA Experiment ID: 20000439 Result: Down-regulated in Transcription
  misc_feature: MA Experiment 20000439 PARAMETER Experiment Name: At_Roots__P Parameter: Age (day) Value: 14 vs. 21
  misc_feature: MA Experiment 20000439 PARAMETER Experiment Name: At_Roots__P Parameter: Organism Value: A. thaliana
  misc_feature: MA Experiment 20000439 PARAMETER Experiment Name: At_Roots__P Parameter: Tissue Value: Roots vs. Whole Plant
  misc_feature: MA Experiment ID: 20000441 Result: Up-regulated in Transcription
  misc_feature: MA Experiment 20000441 PARAMETER Experiment Name: At_1uM_BR-BRZ__P Parameter: Tissue Value: Shoot Apices
  misc_feature: MA Experiment 20000441 PARAMETER Experiment Name: At_1uM_BR-BRZ__P Parameter: Treatment Value: 1uM BR vs. No Treatment
  misc_feature: MA Experiment ID: 20000443 Result: Up-regulated in Transcription
  misc_feature: MA Experiment 20000443 PARAMETER Experiment Name: At_1uM_BR-BRZ__P Parameter: Tissue Value: Shoot Apices
  misc_feature: MA Experiment 20000443 PARAMETER Experiment Name: At_1uM_BR-BRZ__P Parameter: Treatment Value: 1uM BRZ vs. No Treatment
  misc_feature: MA Experiment ID: 20000452 Result: Up-regulated in Transcription
  misc_feature: MA Experiment 20000452 PARAMETER Experiment Name: At_CS6879_Shoots-Roots_P Parameter: Age (day) Value: 14
  misc_feature: MA Experiment 20000452 PARAMETER Experiment Name: At_CS6879_Shoots-Roots_P Parameter: Organism Value: A. thaliana
  misc_feature: MA Experiment 20000452 PARAMETER Experiment Name: At_CS6879_Shoots-Roots_P Parameter: Plant Line Value: CS6879 vs. WS
  misc_feature: MA Experiment 20000452 PARAMETER Experiment Name: At_CS6879_Shoots-Roots_P Parameter: Tissue Value: Shoots
  misc_feature: MA Experiment ID: 20000495 Result: Down-regulated in Transcription
  misc_feature: MA Experiment 20000495 PARAMETER Experiment Name: At_Guard_Cells_P Parameter: Harvest Date Value: 8/2/2002
  misc_feature: MA Experiment 20000495 PARAMETER Experiment Name: At_Guard_Cells_P Parameter: Organism Value: A. thaliana
  misc_feature: MA Experiment 20000495 PARAMETER Experiment Name: At_Guard_Cells_P Parameter: Tissue Value: Guard Cells vs. Leaves
  misc_feature: MA Experiment ID: 20000574 Result: Down-regulated in Transcription
  misc_feature: MA Experiment 20000574 PARAMETER Experiment Name: At_100uM_ABA_Mutants__P Parameter: Organism Value: A. thaliana
  misc_feature: MA Experiment 20000574 PARAMETER Experiment Name: At_100uM_ABA_Mutants__P Parameter: Plant Line Value: CS23 vs. Ler wt
  misc_feature: MA Experiment 20000574 PARAMETER Experiment Name: At_100uM_ABA_Mutants__P Parameter: Timepoint (hr) Value: N/A
  misc_feature: MA Experiment 20000574 PARAMETER Experiment Name: At_100uM_ABA_Mutants__P Parameter: Tissue Value: Whole Plant
  misc_feature: MA Experiment 20000574 PARAMETER Experiment Name: At_100uM_ABA_Mutants__P Parameter: Treatment Value: None
  misc_feature: MA Experiment ID: 20001248 Result: Up-regulated in Transcription
  misc_feature: MA Experiment 20001248 PARAMETER Experiment Name: At_Far-red-induction_P Parameter: Age (day) Value: 7
  misc_feature: MA Experiment 20001248 PARAMETER Experiment Name: At_Far-red-induction_P Parameter: Light Value: Far-red vs. White
  misc_feature: MA Experiment 20001248 PARAMETER Experiment Name: At_Far-red-induction_P Parameter: Organism Value: A. thaliana
  misc_feature: MA Experiment 20001248 PARAMETER Experiment Name: At_Far-red-induction_P Parameter: Plant Line Value: Columbia
  misc_feature: MA Experiment 20001248 PARAMETER Experiment Name: At_Far-red-induction_P Parameter: Timepoint (hr) Value: 4
  misc_feature: MA Experiment 20001248 PARAMETER Experiment Name: At_Far-red-induction_P Parameter: Tissue Value: Whole Plant
  misc_feature: MA Experiment ID: 20001911 Result: Up-regulated in Transcription
  misc_feature: MA Experiment 20001911 PARAMETER Experiment Name: At_Drought_Reproduction_P Parameter: Age (day) Value: 40
  misc_feature: MA Experiment 20001911 PARAMETER Experiment Name: At_Drought_Reproduction_P Parameter: Organism Value: A. thaliana
  misc_feature: MA Experiment 20001911 PARAMETER Experiment Name: At_Drought_Reproduction_P Parameter: Plant Line Value: WS
  misc_feature: MA Experiment 20001911 PARAMETER Experiment Name: At_Drought_Reproduction_P Parameter: Timepoint (day) Value: 10
  misc_feature: MA Experiment 20001911 PARAMETER Experiment Name: At_Drought_Reproduction_P Parameter: Tissue Value: Flowers
  misc_feature: MA Experiment 20001911 PARAMETER Experiment Name: At_Drought_Reproduction_P Parameter: Treatment Value: Drought vs. No Drought
actatctatttcttctttcatcatcatcatcatcatcatcatcactctctcttcttcttctctctattccatggctttagtacgtgaacgtcgtcagctaaatctccgtcttcctcttcctccaatctccgaccgccgcttctccacctcttcctcctcagccaccaccaccaccgtcgctggctgtaacggaatctccgcttgtgatctcgagaaactcaacgttctcggatgcggaaacggcgggattgtttacaaagtccgtcataaaaccacatcggagatctacgctttgaaaacagttaacggcgacatggatccgattttcacaagacagttgatgcgagagatggagattctccgacgtacagattcaccgtacgtcgttaaatgtcacggaatcttcgagaaacctgtcgtcggtgaagtatcgattctaatggagtatatggacggcggaaccctagaatcactacgcggcggtgtaacggagcaaaaactcgccggattcgctaaacagatcttaaaaggattaagctatttacacgctcttaagatcgttcatcgtgatataaaacccgcgaatcttcttctcaattcgaaaaacgaagttaaaatcgccgatttcggagttagtaagatattagtccgatcattagattcgtgtaattcgtatgttggtacttgtgcttatatgagtccggagaggtttgattcggaatcttccggtggaagctctgatatctacgccggagatatctggagttttggattgatgatgcttgagcttctcgttggtcattttccgttgcttccgccgggacagagacctgattgggcaacgttgatgtgcgcggtgtgttttggagaaccgccgcgagcgccggagggttgttctgaagagtttaggagcttcgttgagtgttgtctccgtaaagattcgagtaagcgatggacggcgccgcagcttcttgctcatccttttctccgggaagatctttgattcgattccttttgtaacagaatctggaatcttaaaagttggaatattagatttgaaattattttaatttttgtagagttttctggagatatttatgatcgtgatttttgtacatactgtataatatactccagaatgttagggc

SEQ ID NO: 27836 - protein, 333 aa, Arabidopsis thaliana
  peptide (1)..(333): Ceres Seq. ID no. 13497524
  misc_feature (70)..(329): Pfam Name: Protein kinase domain Pfam Description: Protein kinase domain
  misc_feature (33)..(329): Homolog of NCBI NO: 15217998 NR Description: mitogen-activated protein kinase kinase (MAPKK),
  misc_feature (24)..(329): Homolog of NCBI NO: 15528439 NR Description: MEK map kinase kinsae [Medicago sativa subsp. x
  misc_feature (33)..(332): Homolog of NCBI NO: 12484128 NR Description: mitogen-activated protein kinase 2 [Nicotiana
  misc_feature (23)..(329): Homolog of NCBI NO: 25287595 NR Description: mitogen-activated protein kinase kinase (EC
  misc_feature (23)..(329): Homolog of NCBI NO: 19698851 NR Description: MAP kinase kinase 5 [Arabidopsis thaliana]
  misc_feature (23)..(329): Homolog of NCBI NO: 15232491 NR Description: mitogen-activated protein kinase kinase (MAPKK),
  misc_feature (33)..(332): Homolog of NCBI NO: 33563103 NR Description: mitogen-activated protein kinase kinase [Solanum
  misc_feature (24)..(317): Homolog of NCBI NO: 15230671 NR Description: mitogen-activated protein kinase kinase (MAPKK),
  misc_feature (24)..(333): Homolog of NCBI NO: 15221060 NR Description: mitogen-activated protein kinase kinase (MAPKK),
  misc_feature (24)..(333): Homolog of NCBI NO: 15219482 NR Description: mitogen-activated protein kinase kinase (MAPKK),
LSISSFIIIIIIIITLSSSSLYSMALVRERRQLNLRLPLPPISDRRFSTSSSSATTTTVAGCNGISACDLEKLNVLGCGNGGIVYKVRHKTTSEIYALKTVNGDMDPIFTRQLMREMEILRRTDSPYVVKCHGIFEKPVVGEVSILMEYMDGGTLESLRGGVTEQKLAGFAKQILKGLSYLHALKIVHRDIKPANLLLNSKNEVKIADFGVSKILVRSLDSCNSYVGTCAYMSPERFDSESSGGSSDIYAGDIWSFGLMMLELLVGHFPLLPPGQRPDWATLMCAVCFGEPPRAPEGCSEEFRSFVECCLRKDSSKRWTAPQLLAHPFLREDL

SEQ ID NO: 27837 - protein, 310 aa, Arabidopsis thaliana
  peptide (1)..(310): Ceres Seq. ID no. 13497525
  misc_feature (47)..(306): Pfam Name: Protein kinase domain Pfam Description: Protein kinase domain
  misc_feature (10)..(306): Homolog of NCBI NO: 15217998 NR Description: mitogen-activated protein kinase kinase (MAPKK),
  misc_feature (1)..(306): Homolog of NCBI NO: 15528439 NR Description: MEK map kinase kinsae [Medicago sativa subsp. x
  misc_feature (10)..(309): Homolog of NCBI NO: 12484128 NR Description: mitogen-activated protein kinase 2 [Nicotiana
  misc_feature (1)..(306): Homolog of NCBI NO: 25287595 NR Description: mitogen-activated protein kinase kinase (EC
  misc_feature (1)..(306): Homolog of NCBI NO: 19698851 NR Description: MAP kinase kinase 5 [Arabidopsis thaliana]
  misc_feature (1)..(306): Homolog of NCBI NO: 15232491 NR Description: mitogen-activated protein kinase kinase (MAPKK),
  misc_feature (10)..(309): Homolog of NCBI NO: 33563103 NR Description: mitogen-activated protein kinase kinase [Solanum
  misc_feature (1)..(294): Homolog of NCBI NO: 15230671 NR Description: mitogen-activated protein kinase kinase (MAPKK),
  misc_feature (1)..(310): Homolog of NCBI NO: 15221060 NR Description: mitogen-activated protein kinase kinase (MAPKK),
  misc_feature (1)..(310): Homolog of NCBI NO: 15219482 NR Description: mitogen-activated protein kinase kinase (MAPKK),
MALVRERRQLNLRLPLPPISDRRFSTSSSSATTTTVAGCNGISACDLEKLNVLGCGNGGIVYKVRHKTTSEIYALKTVNGDMDPIFTRQLMREMEILRRTDSPYVVKCHGIFEKPVVGEVSILMEYMDGGTLESLRGGVTEQKLAGFAKQILKGLSYLHALKIVHRDIKPANLLLNSKNEVKIADFGVSKILVRSLDSCNSYVGTCAYMSPERFDSESSGGSSDIYAGDIWSFGLMMLELLVGHFPLLPPGQRPDWATLMCAVCFGEPPRAPEGCSEEFRSFVECCLRKDSSKRWTAPQLLAHPFLREDL

SEQ ID NO: 27838 - protein, 229 aa, Arabidopsis thaliana
  peptide (1)..(229): Ceres Seq. ID no. 13497526
  misc_feature (1)..(225): Pfam Name: Protein kinase domain Pfam Description: Protein kinase domain
  misc_feature (1)..(225): Homolog of NCBI NO: 15217998 NR Description: mitogen-activated protein kinase kinase (MAPKK),
  misc_feature (1)..(225): Homolog of NCBI NO: 15528439 NR Description: MEK map kinase kinsae [Medicago sativa subsp. x
  misc_feature (1)..(228): Homolog of NCBI NO: 12484128 NR Description: mitogen-activated protein kinase 2 [Nicotiana
  misc_feature (1)..(225): Homolog of NCBI NO: 25287595 NR Description: mitogen-activated protein kinase kinase (EC
  misc_feature (1)..(225): Homolog of NCBI NO: 19698851 NR Description: MAP kinase kinase 5 [Arabidopsis thaliana]
  misc_feature (1)..(225): Homolog of NCBI NO: 15232491 NR Description: mitogen-activated protein kinase kinase (MAPKK),
  misc_feature (1)..(228): Homolog of NCBI NO: 33563103 NR Description: mitogen-activated protein kinase kinase [Solanum
  misc_feature (1)..(213): Homolog of NCBI NO: 15230671 NR Description: mitogen-activated protein kinase kinase (MAPKK),
  misc_feature (1)..(229): Homolog of NCBI NO: 15221060 NR Description: mitogen-activated protein kinase kinase (MAPKK),
  misc_feature (1)..(229): Homolog of NCBI NO: 15219482 NR Description: mitogen-activated protein kinase kinase (MAPKK),
MDPIFTRQLMREMEILRRTDSPYVVKCHGIFEKPVVGEVSILMEYMDGGTLESLRGGVTEQKLAGFAKQILKGLSYLHALKIVHRDIKPANLLLNSKNEVKIADFGVSKILVRSLDSCNSYVGTCAYMSPERFDSESSGGSSDIYAGDIWSFGLMMLELLVGHFPLLPPGQRPDWATLMCAVCFGEPPRAPEGCSEEFRSFVECCLRKDSSKRWTAPQLLAHPFLREDL

SEQ ID NO: 27839 - DNA, 1266 bp, Arabidopsis thaliana
  misc_feature (1)..(1266): Ceres Seq. ID no. 12327432
  misc_feature: MA Experiment ID: 108434 Result: Up-regulated in Transcription
  misc_feature: MA Experiment 108434 PARAMETER Experiment Name: At_Root_Tips_cDNA_P Parameter: Tissue Value: Root Tips
  misc_feature: MA Experiment ID: 20000794 Result: Down-regulated in Transcription
  misc_feature: MA Experiment 20000794 PARAMETER Experiment Name: At_Petals_P Parameter: Age (day) Value: 23-25 days
  misc_feature: MA Experiment 20000794 PARAMETER Experiment Name: At_Petals_P Parameter: Plant Line Value: WS
  misc_feature: MA Experiment 20000794 PARAMETER Experiment Name: At_Petals_P Parameter: Tissue Value: Petals vs. Whole plant
gtttctctctacagttttttgtgtttatcgtatgtttcacacagtacacgcttcagtgggagttgttgggtgatcggtccgaggcgacatacaagatgaccggaaactcttttaactcgatgaaagatttcctgaagcagacaggcggctatgcggtaatagacggagggcttgcaacggagttcgagagacatggagcagatctcaacgatcctctctggagcgccaaatgccttgtcacctctcctcacctcattcacaccgtgcatctcgattaccttgaagctggtgctgatatcatctccagcgcttcttatcaggccacgattcaggggtttgaagcaaagggattttctagagaagagagcgaatctttgcttaaaaagagcgtagaaatagcgactgaagctcggaactcgtattatgacaaatgcggaactagctcttccatggatgataagattctcaaaaagcgccctatattagttgcagcatcagttggtagctacggtgcatacttggctgatgggtctgaatacagtggaatctatggtgattcgatcacgctggaaaagctgaaggattttcaccgcagacgactccaagttctggcggaatctggtgctgatttaatagcatttgagaccattccaaacaagatagaggctcaggcatttgctgatctattagaagagggagatgtgaagattcctgggtggttttcattcaactcaaaggatggcgtaaacgtggttagcggggattccatcaaggagtgtatctccatagctgaaaattgtgagaaagtagtggcggttggaatcaactgtacccctccaagattcatagaggggctagttttggagatagaaaaggtgacaagcaagcccatactagtgtacccaaacagcggagaaagctatgatgctgatcggaaggagtgggtggaaaacaccggagttggggatgaagactttgtatcatacgtagagaaatggatggatgcaggagtgtctctcctgggaggttgctgccgcacaacaccaaccaccatcagagccatccacaagagactcgtcaaccgcagatctctttagcattcaacttcactctcttctatgaatctctagaaccttggcaatagatttctaccaaaaacatgaatgtttgtcttccctttgccaattacaaatctaatttcaaggataggcgtgactgcatttaagcttggatgttaatttgaaagttttcatcttgcatgggaag

SEQ ID NO: 27840 - protein, 364 aa, Arabidopsis thaliana
  peptide (1)..(364): Ceres Seq. ID no. 12327433
  misc_feature (50)..(360): Pfam Name: Homocysteine S-methyltransferase Pfam Description: Homocysteine S-methyltransferase
  misc_feature (39)..(363): Homolog of NCBI NO: 22748320 NR Description: Putative homocysteine S-methyltransferase-1
  misc_feature (39)..(354): Homolog of NCBI NO: 10732791 NR Description: homocysteine S-methyltransferase-4 [Zea mays]
  misc_feature (34)..(358): Homolog of NCBI NO: 10732789 NR Description: homocysteine S-methyltransferase-3 [Zea mays]
  misc_feature (34)..(358): Homolog of NCBI NO: 10732787 NR Description: homocysteine S-methyltransferase-2 [Zea mays]
  misc_feature (40)..(358): Homolog of NCBI NO: 37534456 NR Description: putative homocysteine S-methyltransferase-2
  misc_feature (40)..(363): Homolog of NCBI NO: 21593147 NR Description: putative selenocysteine methyltransferase
  misc_feature (40)..(363): Homolog of NCBI NO: 18403505 NR Description: putative selenocysteine methyltransferase
  misc_feature (42)..(363): Homolog of NCBI NO: 6094303 NR Description: Selenocysteine methyltransferase
  misc_feature (32)..(364): Homolog of NCBI NO: 25453566 NR Description: homocysteine S-methyltransferase (EC 2.1.1.10)
  misc_feature (32)..(364): Homolog of NCBI NO: 15229396 NR Description: homocysteine S-methyltransferase AtHMT-2
FSLQFFVFIVCFTQYTLQWELLGDRSEATYKMTGNSFNSMKDFLKQTGGYAVIDGGLATEFERHGADLNDPLWSAKCLVTSPHLIHTVHLDYLEAGADIISSASYQATIQGFEAKGFSREESESLLKKSVEIATEARNSYYDKCGTSSSMDDKILKKRPILVAASVGSYGAYLADGSEYSGIYGDSITLEKLKDFHRRRLQVLAESGADLIAFETIPNKIEAQAFADLLEEGDVKIPGWFSFNSKDGVNVVSGDSIKECISIAENCEKVVAVGINCTPPRFIEGLVLEIEKVTSKPILVYPNSGESYDADRKEWVENTGVGDEDFVSYVEKWMDAGVSLLGGCCRTTPTTIRAIHKRLVNRRSL

SEQ ID NO: 27841 - protein, 333 aa, Arabidopsis thaliana
  peptide (1)..(333): Ceres Seq. ID no. 12327434
  misc_feature (19)..(329): Pfam Name: Homocysteine S-methyltransferase Pfam Description: Homocysteine S-methyltransferase
  misc_feature (8)..(332): Homolog of NCBI NO: 22748320 NR Description: Putative homocysteine S-methyltransferase-1
  misc_feature (8)..(323): Homolog of NCBI NO: 10732791 NR Description: homocysteine S-methyltransferase-4 [Zea mays]
  misc_feature (3)..(327): Homolog of NCBI NO: 10732789 NR Description: homocysteine S-methyltransferase-3 [Zea mays]
  misc_feature (3)..(327): Homolog of NCBI NO: 10732787 NR Description: homocysteine S-methyltransferase-2 [Zea mays]
  misc_feature (9)..(327): Homolog of NCBI NO: 37534456 NR Description: putative homocysteine S-methyltransferase-2
  misc_feature (9)..(332): Homolog of NCBI NO: 21593147 NR Description: putative selenocysteine methyltransferase
  misc_feature (9)..(332): Homolog of NCBI NO: 18403505 NR Description: putative selenocysteine methyltransferase
  misc_feature (11)..(332): Homolog of NCBI NO: 6094303 NR Description: Selenocysteine methyltransferase
  misc_feature (1)..(333): Homolog of NCBI NO: 25453566 NR Description: homocysteine S-methyltransferase (EC 2.1.1.10)
  misc_feature (1)..(333): Homolog of NCBI NO: 15229396 NR Description: homocysteine S-methyltransferase AtHMT-2
MTGNSFNSMKDFLKQTGGYAVIDGGLATEFERHGADLNDPLWSAKCLVTSPHLIHTVHLDYLEAGADIISSASYQATIQGFEAKGFSREESESLLKKSVEIATEARNSYYDKCGTSSSMDDKILKKRPILVAASVGSYGAYLADGSEYSGIYGDSITLEKLKDFHRRRLQVLAESGADLIAFETIPNKIEAQAFADLLEEGDVKIPGWFSFNSKDGVNVVSGDSIKECISIAENCEKVVAVGINCTPPRFIEGLVLEIEKVTSKPILVYPNSGESYDADRKEWVENTGVGDEDFVSYVEKWMDAGVSLLGGCCRTTPTTIRAIHKRLVNRRSL

SEQ ID NO: 27842 - protein, 325 aa, Arabidopsis thaliana
  peptide (1)..(325): Ceres Seq. ID no. 12327435
  misc_feature (11)..(321): Pfam Name: Homocysteine S-methyltransferase Pfam Description: Homocysteine S-methyltransferase
  misc_feature (1)..(324): Homolog of NCBI NO: 22748320 NR Description: Putative homocysteine S-methyltransferase-1
  misc_feature (1)..(315): Homolog of NCBI NO: 10732791 NR Description: homocysteine S-methyltransferase-4 [Zea mays]
  misc_feature (1)..(319): Homolog of NCBI NO: 10732789 NR Description: homocysteine S-methyltransferase-3 [Zea mays]
  misc_feature (1)..(319): Homolog of NCBI NO: 10732787 NR Description: homocysteine S-methyltransferase-2 [Zea mays]
  misc_feature (1)..(319): Homolog of NCBI NO: 37534456 NR Description: putative homocysteine S-methyltransferase-2
  misc_feature (1)..(324): Homolog of NCBI NO: 21593147 NR Description: putative selenocysteine methyltransferase
  misc_feature (1)..(324): Homolog of NCBI NO: 18403505 NR Description: putative selenocysteine methyltransferase
  misc_feature (3)..(324): Homolog of NCBI NO: 6094303 NR Description: Selenocysteine methyltransferase
  misc_feature (1)..(325): Homolog of NCBI NO: 25453566 NR Description: homocysteine S-methyltransferase (EC 2.1.1.10)
  misc_feature (1)..(325): Homolog of NCBI NO: 15229396 NR Description: homocysteine S-methyltransferase AtHMT-2
MKDFLKQTGGYAVIDGGLATEFERHGADLNDPLWSAKCLVTSPHLIHTVHLDYLEAGADIISSASYQATIQGFEAKGFSREESESLLKKSVEIATEARNSYYDKCGTSSSMDDKILKKRPILVAASVGSYGAYLADGSEYSGIYGDSITLEKLKDFHRRRLQVLAESGADLIAFETIPNKIEAQAFADLLEEGDVKIPGWFSFNSKDGVNVVSGDSIKECISIAENCEKVVAVGINCTPPRFIEGLVLEIEKVTSKPILVYPNSGESYDADRKEWVENTGVGDEDFVSYVEKWMDAGVSLLGGCCRTTPTTIRAIHKRLVNRRSL

SEQ ID NO: 27843 - DNA, 771 bp, Arabidopsis thaliana
  misc_feature (1)..(771): Ceres Seq. ID no. 12333364
  misc_feature: MA Experiment ID: 108501 Result: Down-regulated in Transcription
  misc_feature: MA Experiment 108501 PARAMETER Experiment Name: At_ap2_floral_buds_cDNA_P Parameter: Plant Line Value: ap2 (Ler.)
  misc_feature: MA Experiment 108501 PARAMETER Experiment Name: At_ap2_floral_buds_cDNA_P Parameter: Tissue Value: Closed Flower
actcgctcaaaaatttagagaaaggaagaagaagacagatcaatggctccgacgatcaaaagaatcggaagtttccgtactcaccaaaaacactttgtcgattttttcggagacgacttgatcgtcaccgttacgccgactgcttccgttatccgccgctggattcgtagcgtccgctcctacaaccgtaatcactcggtacatcctctcgtcgttggaatcggtgttcagtggagaccggatagttccgatccagatccaccaccaaaaactctccagttgtgcgtcggtagtcgctgtctcatcatccaactaggttacaattacggtctcccaaaagtcctccgcactttccttgccgatcccaaaacgactttcgtcggcgtttggaacggccaagaccagaaaaaactcgagaaatgtaggcatcgagtggagatcgggaagcttctggacataaggatgttcgtgagagattcgagaggggctaggatgtgtttttgttcgtttgaacagatcgtgaaggagcgtttgggtcgcgtaggagtgaggttagatccggcgatttgtatgagcgattggggcgtttataaccttaaccattatcaggtacttcaggcgtcgattgagtcgtatgtttgctttaagctcgctgttgaggaacgtctctggaacttaaaagttgctgctaatcttgtgatttgaatttgttgttgttcttctctctttatcaatcaacgtcttcttctaattcatgaaagttttcatgtt

SEQ ID NO: 27844 - protein, 220 aa, Arabidopsis thaliana
  peptide (1)..(220): Ceres Seq. ID no. 12333365
  misc_feature (1)..(68): Homolog of NCBI NO: 15795162 NR Description: gb|AAD26968.1~gene_id:MQC3.25~similar to unknown
  misc_feature (1)..(68): Homolog of NCBI NO: 15230481 NR Description: hypothetical protein; protein id: At3g12430.1
  misc_feature (62)..(210): Homolog of NCBI NO: 15795162 NR Description: gb|AAD26968.1~gene_id:MQC3.25~similar to unknown
  misc_feature (62)..(210): Homolog of NCBI NO: 15230481 NR Description: hypothetical protein; protein id: At3g12430.1
  misc_feature (1)..(75): Homolog of NCBI NO: 15230500 NR Description: hypothetical protein; protein id: At3g12460.1
  misc_feature (72)..(213): Homolog of NCBI NO: 15230500 NR Description: hypothetical protein; protein id: At3g12460.1
  misc_feature (2)..(75): Homolog of NCBI NO: 15230479 NR Description: hypothetical protein; protein id: At3g12410.1
  misc_feature (72)..(212): Homolog of NCBI NO: 15230479 NR Description: hypothetical protein; protein id: At3g12410.1
  misc_feature (1)..(220): Homolog of NCBI NO: 18399624 NR Description: expressed protein
  misc_feature (1)..(220): Homolog of NCBI NO: 21595009 NR Description: unknown [Arabidopsis thaliana]
MAPTIKRIGSFRTHQKHFVDFFGDDLIVTVTPTASVIRRWIRSVRSYNRNHSVHPLVVGIGVQWRPDSSDPDPPPKTLQLCVGSRCLIIQLGYNYGLPKVLRTFLADPKTTFVGVWNGQDQKKLEKCRHRVEIGKLLDIRMFVRDSRGARMCFCSFEQIVKERLGRVGVRLDPAICMSDWGVYNLNHYQVLQASIESYVCFKLAVEERLWNLKVAANLVI

SEQ ID NO: 27845 - DNA, 698 bp, Arabidopsis thaliana
  misc_feature (1)..(698): Ceres Seq. ID no. 12340193
  misc_feature: MA Experiment ID: 20000173 Result: Down-regulated in Transcription
  misc_feature: MA Experiment 20000173 PARAMETER Experiment Name: At_42deg_Heat_P Parameter: Age (day) Value: 14
  misc_feature: MA Experiment 20000173 PARAMETER Experiment Name: At_42deg_Heat_P Parameter: Organism Value: A. thaliana
  misc_feature: MA Experiment 20000173 PARAMETER Experiment Name: At_42deg_Heat_P Parameter: Plant Line Value: WS
  misc_feature: MA Experiment 20000173 PARAMETER Experiment Name: At_42deg_Heat_P Parameter: Temperature (deg C) Value: 42 vs. 22
  misc_feature: MA Experiment 20000173 PARAMETER Experiment Name: At_42deg_Heat_P Parameter: Timepoint (hr) Value: 6
  misc_feature: MA Experiment 20000173 PARAMETER Experiment Name: At_42deg_Heat_P Parameter: Tissue Value: Aerial
  misc_feature: MA Experiment ID: 20000182 Result: Up-regulated in Transcription
  misc_feature: MA Experiment 20000182 PARAMETER Experiment Name: At_2mM_SA_P Parameter: Age (day) Value: 14
  misc_feature: MA Experiment 20000182 PARAMETER Experiment Name: At_2mM_SA_P Parameter: Organism Value: A. thaliana
  misc_feature: MA Experiment 20000182 PARAMETER Experiment Name: At_2mM_SA_P Parameter: Plant Line Value: WS
  misc_feature: MA Experiment 20000182 PARAMETER Experiment Name: At_2mM_SA_P Parameter: Timepoint (hr) Value: 6
  misc_feature: MA Experiment 20000182 PARAMETER Experiment Name: At_2mM_SA_P Parameter: Tissue Value: Aerial
  misc_feature: MA Experiment 20000182 PARAMETER Experiment Name: At_2mM_SA_P Parameter: Treatment Value: 2mM SA vs. No Treatment
  misc_feature: MA Experiment ID: 20000184 Result: Down-regulated in Transcription
  misc_feature: MA Experiment 20000184 PARAMETER Experiment Name: At_Shoots__P Parameter: Age (day) Value: 7
  misc_feature: MA Experiment 20000184 PARAMETER Experiment Name: At_Shoots__P Parameter: Tissue Value: Shoots vs. Whole Plant
  misc_feature: MA Experiment ID: 20000185 Result: Up-regulated in Transcription
  misc_feature: MA Experiment 20000185 PARAMETER Experiment Name: At_Roots__P Parameter: Age (day) Value: 7 vs. 21
  misc_feature: MA Experiment 20000185 PARAMETER Experiment Name: At_Roots__P Parameter: Organism Value: A. thaliana
  misc_feature: MA Experiment 20000185 PARAMETER Experiment Name: At_Roots__P Parameter: Tissue Value: Roots vs. Whole Plant
  misc_feature: MA Experiment ID: 20000227 Result: Down-regulated in Transcription
  misc_feature: MA Experiment 20000227 PARAMETER Experiment Name: At_Root-Tips-vs-Tops_P Parameter: Tissue Value: Root Tips vs. Root Tops
  misc_feature: MA Experiment ID: 20000234 Result: Down-regulated in Transcription
  misc_feature: MA Experiment 20000234 PARAMETER Experiment Name: At_Siliques_P Parameter: Age (day) Value: 21
  misc_feature: MA Experiment 20000234 PARAMETER Experiment Name: At_Siliques_P Parameter: Organism Value: A. thaliana
  misc_feature: MA Experiment 20000234 PARAMETER Experiment Name: At_Siliques_P Parameter: Plant Line Value: WS
  misc_feature: MA Experiment 20000234 PARAMETER Experiment Name: At_Siliques_P Parameter: Tissue Value: Less Than 5mm Siliques vs. Whole Plant
  misc_feature: MA Experiment ID: 20000235 Result: Down-regulated in Transcription
  misc_feature: MA Experiment 20000235 PARAMETER Experiment Name: At_Siliques_P Parameter: Age (day) Value: 21
  misc_feature: MA Experiment 20000235 PARAMETER Experiment Name: At_Siliques_P Parameter: Organism Value: A. thaliana
  misc_feature: MA Experiment 20000235 PARAMETER Experiment Name: At_Siliques_P Parameter: Plant Line Value: WS
  misc_feature: MA Experiment 20000235 PARAMETER Experiment Name: At_Siliques_P Parameter: Tissue Value: 5-10mm Siliques vs. Whole Plant
  misc_feature: MA Experiment ID: 20000264 Result: Down-regulated in Transcription
  misc_feature: MA Experiment 20000264 PARAMETER Experiment Name: At_Open_Flower_P Parameter: Age (day) Value: 21
  misc_feature: MA Experiment 20000264 PARAMETER Experiment Name: At_Open_Flower_P Parameter: Plant Line Value: WS
  misc_feature: MA Experiment 20000264 PARAMETER Experiment Name: At_Open_Flower_P Parameter: Tissue Value: Open Flower vs. Whole Plant
  misc_feature: MA Experiment ID: 20000269 Result: Down-regulated in Transcription
  misc_feature: MA Experiment 20000269 PARAMETER Experiment Name: At_1mM_KNO3_L-vs-H_Roots_P Parameter: Age (day) Value: 7,10,12
  misc_feature: MA Experiment 20000269 PARAMETER Experiment Name: At_1mM_KNO3_L-vs-H_Roots_P Parameter: Organism Value: A. thaliana
  misc_feature: MA Experiment 20000269 PARAMETER Experiment Name: At_1mM_KNO3_L-vs-H_Roots_P Parameter: Plant Line Value: WS
  misc_feature: MA Experiment 20000269 PARAMETER Experiment Name: At_1mM_KNO3_L-vs-H_Roots_P Parameter: Timepoint (day) Value: 7,10,12
  misc_feature: MA Experiment 20000269 PARAMETER Experiment Name: At_1mM_KNO3_L-vs-H_Roots_P Parameter: Tissue Value: Roots
  misc_feature: MA Experiment 20000269 PARAMETER Experiment Name: At_1mM_KNO3_L-vs-H_Roots_P Parameter: Treatment Value: 1mM KNO3 vs. 50mM KNO3
  misc_feature: MA Experiment ID: 20000286 Result: Down-regulated in Transcription
  misc_feature: MA Experiment 20000286 PARAMETER Experiment Name: At_Open_Flower_P Parameter: Age (day) Value: 21
  misc_feature: MA Experiment 20000286 PARAMETER Experiment Name: At_Open_Flower_P Parameter: Plant Line Value: WS
  misc_feature: MA Experiment 20000286 PARAMETER Experiment Name: At_Open_Flower_P Parameter: Tissue Value: Half Open vs. Whole Plant
  misc_feature: MA Experiment ID: 20000308 Result: Up-regulated in Transcription
  misc_feature: MA Experiment 20000308 PARAMETER Experiment Name: At_100mM_NaCl__P Parameter: Age (day) Value: 17
  misc_feature: MA Experiment 20000308 PARAMETER Experiment Name: At_100mM_NaCl__P Parameter: Organism Value: A. thaliana
  misc_feature: MA Experiment 20000308 PARAMETER Experiment Name: At_100mM_NaCl__P Parameter: Plant Line Value: WS
  misc_feature: MA Experiment 20000308 PARAMETER Experiment Name: At_100mM_NaCl__P Parameter: Timepoint (hr) Value: 72
  misc_feature: MA Experiment 20000308 PARAMETER Experiment Name: At_100mM_NaCl__P Parameter: Tissue Value: Whole Plant
  misc_feature: MA Experiment 20000308 PARAMETER Experiment Name: At_100mM_NaCl__P Parameter: Treatment Value: 100mM NaCl vs. No Treatment
  misc_feature: MA Experiment ID: 20000438 Result: Down-regulated in Transcription
  misc_feature: MA Experiment 20000438 PARAMETER Experiment Name: At_Shoots__P Parameter: Age (day) Value: 14
  misc_feature: MA Experiment 20000438 PARAMETER Experiment Name: At_Shoots__P Parameter: Tissue Value: Shoots vs. Whole Plant
  misc_feature: MA Experiment ID: 20000439 Result: Up-regulated in Transcription
  misc_feature: MA Experiment 20000439 PARAMETER Experiment Name: At_Roots__P Parameter: Age (day) Value: 14 vs. 21
  misc_feature: MA Experiment 20000439 PARAMETER Experiment Name: At_Roots__P Parameter: Organism Value: A. thaliana
  misc_feature: MA Experiment 20000439 PARAMETER Experiment Name: At_Roots__P Parameter: Tissue Value: Roots vs. Whole Plant
  misc_feature: MA Experiment ID: 20000453 Result: Up-regulated in Transcription
  misc_feature: MA Experiment 20000453 PARAMETER Experiment Name: At_100uM_ABA_P Parameter: Age (day) Value: 15
  misc_feature: MA Experiment 20000453 PARAMETER Experiment Name: At_100uM_ABA_P Parameter: Organism Value: A. thaliana
  misc_feature: MA Experiment 20000453 PARAMETER Experiment Name: At_100uM_ABA_P Parameter: Plant Line Value: WS
  misc_feature: MA Experiment 20000453 PARAMETER Experiment Name: At_100uM_ABA_P Parameter: Timepoint (hr) Value: 24
  misc_feature: MA Experiment 20000453 PARAMETER Experiment Name: At_100uM_ABA_P Parameter: Tissue Value: Aerial
  misc_feature: MA Experiment 20000453 PARAMETER Experiment Name: At_100uM_ABA_P Parameter: Treatment Value: 100uM ABA vs. No Treatment
  misc_feature: MA Experiment ID: 20000456 Result: Down-regulated in Transcription
  misc_feature: MA Experiment 20000456 PARAMETER Experiment Name: At_100uM_BA_P Parameter: Age (day) Value: 14
  misc_feature: MA Experiment 20000456 PARAMETER Experiment Name: At_100uM_BA_P Parameter: Organism Value: A. thaliana
  misc_feature: MA Experiment 20000456 PARAMETER Experiment Name: At_100uM_BA_P Parameter: Plant Line Value: WS
  misc_feature: MA Experiment 20000456 PARAMETER Experiment Name: At_100uM_BA_P Parameter: Timepoint (hr) Value: 6
  misc_feature: MA Experiment 20000456 PARAMETER Experiment Name: At_100uM_BA_P Parameter: Tissue Value: Aerial
  misc_feature: MA Experiment 20000456 PARAMETER Experiment Name: At_100uM_BA_P Parameter: Treatment Value: 100uM BA vs. No Treatment
  misc_feature: MA Experiment ID: 20000527 Result: Down-regulated in Transcription
  misc_feature: MA Experiment 20000527 PARAMETER Experiment Name: At_10percent_PEG_P Parameter: Age (day) Value: 20
  misc_feature: MA Experiment 20000527 PARAMETER Experiment Name: At_10percent_PEG_P Parameter: Organism Value: A. thaliana
  misc_feature: MA Experiment 20000527 PARAMETER Experiment Name: At_10percent_PEG_P Parameter: Plant Line Value: WS
  misc_feature: MA Experiment 20000527 PARAMETER Experiment Name: At_10percent_PEG_P Parameter: Timepoint (day) Value: 20
  misc_feature: MA Experiment 20000527 PARAMETER Experiment Name: At_10percent_PEG_P Parameter: Tissue Value: Whole Plant
  misc_feature: MA Experiment 20000527 PARAMETER Experiment Name: At_10percent_PEG_P Parameter: Treatment Value: 10percent PEG vs. No Treatment
  misc_feature: MA Experiment ID: 20000794 Result: Down-regulated in Transcription
  misc_feature: MA Experiment 20000794 PARAMETER Experiment Name: At_Petals_P Parameter: Age (day) Value: 23-25 days
  misc_feature: MA Experiment 20000794 PARAMETER Experiment Name: At_Petals_P Parameter: Plant Line Value: WS
  misc_feature: MA Experiment 20000794 PARAMETER Experiment Name: At_Petals_P Parameter: Tissue Value: Petals vs. Whole plant
  misc_feature: MA Experiment ID: 20001450 Result: Down-regulated in Transcription
  misc_feature: MA Experiment 20001450 PARAMETER Experiment Name: At_Far-red-induction_P Parameter: Age (day) Value: 7
  misc_feature: MA Experiment 20001450 PARAMETER Experiment Name: At_Far-red-induction_P Parameter: Light Value: Far-red vs. White
  misc_feature: MA Experiment 20001450 PARAMETER Experiment Name: At_Far-red-induction_P Parameter: Organism Value: A. thaliana
  misc_feature: MA Experiment 20001450 PARAMETER Experiment Name: At_Far-red-induction_P Parameter: Plant Line Value: Columbia
  misc_feature: MA Experiment 20001450 PARAMETER Experiment Name: At_Far-red-induction_P Parameter: Timepoint (hr) Value: 8
  misc_feature: MA Experiment 20001450 PARAMETER Experiment Name: At_Far-red-induction_P Parameter: Tissue Value: Whole Plant
  misc_feature: MA Experiment ID: 20001451 Result: Up-regulated in Transcription
  misc_feature: MA Experiment 20001451 PARAMETER Experiment Name: At_Far-red-induction_P Parameter: Age (day) Value: 7
  misc_feature: MA Experiment 20001451 PARAMETER Experiment Name: At_Far-red-induction_P Parameter: Light Value: Far-red vs. White
  misc_feature: MA Experiment 20001451 PARAMETER Experiment Name: At_Far-red-induction_P Parameter: Organism Value: A. thaliana
  misc_feature: MA Experiment 20001451 PARAMETER Experiment Name: At_Far-red-induction_P Parameter: Plant Line Value: Columbia
  misc_feature: MA Experiment 20001451 PARAMETER Experiment Name: At_Far-red-induction_P Parameter: Timepoint (hr) Value: 24
  misc_feature: MA Experiment 20001451 PARAMETER Experiment Name: At_Far-red-induction_P Parameter: Tissue Value: Whole Plant
  misc_feature: MA Experiment ID: 20001554 Result: Down-regulated in Transcription
  misc_feature: MA Experiment 20001554 PARAMETER Experiment Name: At_Drought_Soil_Dry_P Parameter: Age (day) Value: 21
  misc_feature: MA Experiment 20001554 PARAMETER Experiment Name: At_Drought_Soil_Dry_P Parameter: Organism Value: A. thaliana
  misc_feature: MA Experiment 20001554 PARAMETER Experiment Name: At_Drought_Soil_Dry_P Parameter: Plant Line Value: WS
  misc_feature: MA Experiment 20001554 PARAMETER Experiment Name: At_Drought_Soil_Dry_P Parameter: Post Timepoint (hr) Value: None
  misc_feature: MA Experiment 20001554 PARAMETER Experiment Name: At_Drought_Soil_Dry_P Parameter: Post-Treatment Value: None
  misc_feature: MA Experiment 20001554 PARAMETER Experiment Name: At_Drought_Soil_Dry_P Parameter: Timepoint (day) Value: 7
  misc_feature: MA Experiment 20001554 PARAMETER Experiment Name: At_Drought_Soil_Dry_P Parameter: Treatment Value: Drought vs. No Drought
  misc_feature: MA Experiment ID: 20001555 Result: Down-regulated in Transcription
  misc_feature: MA Experiment 20001555 PARAMETER Experiment Name: At_Drought_Soil_Dry_P Parameter: Age (day) Value: 24
  misc_feature: MA Experiment 20001555 PARAMETER Experiment Name: At_Drought_Soil_Dry_P Parameter: Organism Value: A. thaliana
  misc_feature: MA Experiment 20001555 PARAMETER Experiment Name: At_Drought_Soil_Dry_P Parameter: Plant Line Value: WS
  misc_feature: MA Experiment 20001555 PARAMETER Experiment Name: At_Drought_Soil_Dry_P Parameter: Post Timepoint (hr) Value: None
  misc_feature: MA Experiment 20001555 PARAMETER Experiment Name: At_Drought_Soil_Dry_P Parameter: Post-Treatment Value: None
  misc_feature: MA Experiment 20001555 PARAMETER Experiment Name: At_Drought_Soil_Dry_P Parameter: Timepoint (day) Value: 10
  misc_feature: MA Experiment 20001555 PARAMETER Experiment Name: At_Drought_Soil_Dry_P Parameter: Treatment Value: Drought vs. No Drought
  misc_feature: MA Experiment ID: 20001556 Result: Down-regulated in Transcription
  misc_feature: MA Experiment 20001556 PARAMETER Experiment Name: At_Drought_Soil_Dry_P Parameter: Age (day) Value: 26
  misc_feature: MA Experiment 20001556 PARAMETER Experiment Name: At_Drought_Soil_Dry_P Parameter: Organism Value: A. thaliana
  misc_feature: MA Experiment 20001556 PARAMETER Experiment Name: At_Drought_Soil_Dry_P Parameter: Plant Line Value: WS
  misc_feature: MA Experiment 20001556 PARAMETER Experiment Name: At_Drought_Soil_Dry_P Parameter: Post Timepoint (hr) Value: None
  misc_feature: MA Experiment 20001556 PARAMETER Experiment Name: At_Drought_Soil_Dry_P Parameter: Post-Treatment Value: None
  misc_feature: MA Experiment 20001556 PARAMETER Experiment Name: At_Drought_Soil_Dry_P Parameter: Timepoint (day) Value: 12
  misc_feature: MA Experiment 20001556 PARAMETER Experiment Name: At_Drought_Soil_Dry_P Parameter: Treatment Value: Drought vs. No Drought
  misc_feature: MA Experiment ID: 20001557 Result: Down-regulated in Transcription
  misc_feature: MA Experiment 20001557 PARAMETER Experiment Name: At_Drought_Soil_Dry_P Parameter: Age (day) Value: 27
  misc_feature: MA Experiment 20001557 PARAMETER Experiment Name: At_Drought_Soil_Dry_P Parameter: Organism Value: A. thaliana
  misc_feature: MA Experiment 20001557 PARAMETER Experiment Name: At_Drought_Soil_Dry_P Parameter: Plant Line Value: WS
  misc_feature: MA Experiment 20001557 PARAMETER Experiment Name: At_Drought_Soil_Dry_P Parameter: Post Timepoint (hr) Value: 3
  misc_feature: MA Experiment 20001557 PARAMETER Experiment Name: At_Drought_Soil_Dry_P Parameter: Post-Treatment Value: Re-Water vs. No Drought
  misc_feature: MA Experiment 20001557 PARAMETER Experiment Name: At_Drought_Soil_Dry_P Parameter: Timepoint (day) Value: 13
  misc_feature: MA Experiment 20001557 PARAMETER Experiment Name: At_Drought_Soil_Dry_P Parameter: Treatment Value: Drought vs. No Drought
  misc_feature: MA Experiment ID: 20001558 Result: Down-regulated in Transcription
  misc_feature: MA Experiment 20001558 PARAMETER Experiment Name: At_Drought_Soil_Dry_P Parameter: Age (day) Value: 27
  misc_feature: MA Experiment 20001558 PARAMETER Experiment Name: At_Drought_Soil_Dry_P Parameter: Organism Value: A. thaliana
  misc_feature: MA Experiment 20001558 PARAMETER Experiment Name: At_Drought_Soil_Dry_P Parameter: Plant Line Value: WS
  misc_feature: MA Experiment 20001558 PARAMETER Experiment Name: At_Drought_Soil_Dry_P Parameter: Post Timepoint (hr) Value: 6
  misc_feature: MA Experiment 20001558 PARAMETER Experiment Name: At_Drought_Soil_Dry_P Parameter: Post-Treatment Value: Re-Water vs. No Drought
  misc_feature: MA Experiment 20001558 PARAMETER Experiment Name: At_Drought_Soil_Dry_P Parameter: Timepoint (day) Value: 13
  misc_feature: MA Experiment 20001558 PARAMETER Experiment Name: At_Drought_Soil_Dry_P Parameter: Treatment Value: Drought vs. No Drought
  misc_feature: MA Experiment ID: 20001559 Result: Down-regulated in Transcription
  misc_feature: MA Experiment 20001559 PARAMETER Experiment Name: At_Drought_Soil_Dry_P Parameter: Age (day) Value: 28
  misc_feature: MA Experiment 20001559 PARAMETER Experiment Name: At_Drought_Soil_Dry_P Parameter: Organism Value: A. thaliana
  misc_feature: MA Experiment 20001559 PARAMETER Experiment Name: At_Drought_Soil_Dry_P Parameter: Plant Line Value: WS
  misc_feature: MA Experiment 20001559 PARAMETER Experiment Name: At_Drought_Soil_Dry_P Parameter: Post Timepoint (hr) Value: 29
  misc_feature: MA Experiment 20001559 PARAMETER Experiment Name: At_Drought_Soil_Dry_P Parameter: Post-Treatment Value: Re-Water vs. No Drought
  misc_feature: MA Experiment 20001559 PARAMETER Experiment Name: At_Drought_Soil_Dry_P Parameter: Timepoint (day) Value: 14
  misc_feature: MA Experiment 20001559 PARAMETER Experiment Name: At_Drought_Soil_Dry_P Parameter: Treatment Value: Drought vs. No Drought
  misc_feature: MA Experiment ID: 20001560 Result: Down-regulated in Transcription
  misc_feature: MA Experiment 20001560 PARAMETER Experiment Name: At_Drought_Soil_Dry_P Parameter: Age (day) Value: 28
  misc_feature: MA Experiment 20001560 PARAMETER Experiment Name: At_Drought_Soil_Dry_P Parameter: Organism Value: A. thaliana
  misc_feature: MA Experiment 20001560 PARAMETER Experiment Name: At_Drought_Soil_Dry_P Parameter: Plant Line Value: WS
  misc_feature: MA Experiment 20001560 PARAMETER Experiment Name: At_Drought_Soil_Dry_P Parameter: Post Timepoint (hr) Value: None
  misc_feature: MA Experiment 20001560 PARAMETER Experiment Name: At_Drought_Soil_Dry_P Parameter: Post-Treatment Value: None
  misc_feature: MA Experiment 20001560 PARAMETER Experiment Name: At_Drought_Soil_Dry_P Parameter: Timepoint (day) Value: 14
  misc_feature: MA Experiment 20001560 PARAMETER Experiment Name: At_Drought_Soil_Dry_P Parameter: Treatment Value: Drought vs. No Drought
attgattggaaactctttccctccttcctccggagagtttcgtggtgacgttagatggtatatcgatcccgtcatcgggtttcttacgagtacgaactcagcgttactagccaacatctatccttacttcagctacgttgacaatccacgtgacatatctctctcttacgctctcttcacttctccttccgtcgtcgtatgggacggctctcgtggctaccaaaacctctttgacgctttacttgacgttgtttactctgccgttgaacgctcaggcggtggatctctcccagtggttgtttccgagagcggatggccttctaacggtggaaacgccgcgagtttcgataacgcgcgagctttttacacgaatcttgcgtcgcgtgtgagagagaacagaggaacaccgaagagacctggaagaggagtggaaacgtatttgttcgctatgtttgatgagaatcaaaagagtcctgagatcgagaagaattttggtttgttttttcctaataaacaaccaaaatttccgatcacattctctgccgcgagagacggtacggcggttgagtgatgattttatatgctgagatttatgtgaataattgggagattatcccataaaaggttccaaataaagacaaatttcaaataaaacctgttagtccaagttaaattaaatactcggctttgttttgggc

SEQ ID NO: 27846 - protein, 189 aa, Arabidopsis thaliana
  peptide (1)..(189): Ceres Seq. ID no. 12340194
  misc_feature (1)..(179): Pfam Name: Glycosyl hydrolases family 17 Pfam Description: Glycosyl hydrolases family 17
  misc_feature (1)..(147): Homolog of NCBI NO: 15234880 NR Description: glycosyl hydrolase family 17
  misc_feature (1)..(179): Homolog of NCBI NO: 2506467 NR Description: Lichenase precursor (Endo-beta-1,3-1,4 glucanase)
  misc_feature (1)..(179): Homolog of NCBI NO: 82131 NR Description: beta-glucanase (EC 3.2.1.-) precursor -
  misc_feature (1)..(179): Homolog of NCBI NO: 82130 NR Description: beta-1,3-glucanase (EC 3.2.1.-) precursor -
  misc_feature (1)..(179): Homolog of NCBI NO: 10946499 NR Description: beta-1,3-glucanase [Hevea brasiliensis]
  misc_feature (1)..(179): Homolog of NCBI NO: 4469175 NR Description: beta-1,3-glucanase [Hevea brasiliensis]
  misc_feature (1)..(183): Homolog of NCBI NO: 22550395 NR Description: beta-1,3-glucanase [Vitis vinifera]
  misc_feature (1)..(184): Homolog of NCBI NO: 1706547 NR Description: Glucan endo-1,3-beta-glucosidase, basic vacuolar
  misc_feature (1)..(184): Homolog of NCBI NO: 32765543 NR Description: beta-1,3-glucanase [Hevea brasiliensis]
  misc_feature (1)..(189): Homolog of NCBI NO: 17381238 NR Description: AT4g16260/dl4170c [Arabidopsis thaliana]
LIGNSFPPSSGEFRGDVRWYIDPVIGFLTSTNSALLANIYPYFSYVDNPRDISLSYALFTSPSVVVWDGSRGYQNLFDALLDVVYSAVERSGGGSLPVVVSESGWPSNGGNAASFDNARAFYTNLASRVRENRGTPKRPGRGVETYLFAMFDENQKSPEIEKNFGLFFPNKQPKFPITFSAARDGTAVE

SEQ ID NO: 27847 - DNA, 707 bp, Arabidopsis thaliana
  misc_feature (1)..(707): Ceres Seq. ID no. 12370068
  misc_feature: MA Experiment ID: 20000069 Result: Up-regulated in Transcription
  misc_feature: MA Experiment 20000069 PARAMETER Experiment Name: At_100uM_ABA_Mutants_cDNA_P Parameter: Plant Line Value: CS23
  misc_feature: MA Experiment 20000069 PARAMETER Experiment Name: At_100uM_ABA_Mutants_cDNA_P Parameter: Timepoint (hr) Value: 6
  misc_feature: MA Experiment 20000069 PARAMETER Experiment Name: At_100uM_ABA_Mutants_cDNA_P Parameter: Tissue Value: Aerial
  misc_feature: MA Experiment 20000069 PARAMETER Experiment Name: At_100uM_ABA_Mutants_cDNA_P Parameter: Treatment Value: 100uM ABA vs. No Treatment
  misc_feature: MA Experiment ID: 20000070 Result: Up-regulated in Transcription
  misc_feature: MA Experiment 20000070 PARAMETER Experiment Name: At_100uM_ABA_Mutants_cDNA_P Parameter: Plant Line Value: CS24
  misc_feature: MA Experiment 20000070 PARAMETER Experiment Name: At_100uM_ABA_Mutants_cDNA_P Parameter: Timepoint (hr) Value: 6
  misc_feature: MA Experiment 20000070 PARAMETER Experiment Name: At_100uM_ABA_Mutants_cDNA_P Parameter: Tissue Value: Aerial
  misc_feature: MA Experiment 20000070 PARAMETER Experiment Name: At_100uM_ABA_Mutants_cDNA_P Parameter: Treatment Value: 100uM ABA vs. No Treatment
  misc_feature: MA Experiment ID: 20000314 Result: Up-regulated in Transcription
  misc_feature: MA Experiment 20000314 PARAMETER Experiment Name: At_14day_Shoots-Roots_Sub_P Parameter: Age (day) Value: 14
  misc_feature: MA Experiment 20000314 PARAMETER Experiment Name: At_14day_Shoots-Roots_Sub_P Parameter: Organism Value: A. thaliana
  misc_feature: MA Experiment 20000314 PARAMETER Experiment Name: At_14day_Shoots-Roots_Sub_P Parameter: Plant Line Value: WS
  misc_feature: MA Experiment 20000314 PARAMETER Experiment Name: At_14day_Shoots-Roots_Sub_P Parameter: Tissue Value: Roots vs. Whole Plant
  misc_feature: MA Experiment ID: 20000327 Result: Down-regulated in Transcription
  misc_feature: MA Experiment 20000327 PARAMETER Experiment Name: At_42deg_Heat_Sub_P Parameter: Age (day) Value: 14
  misc_feature: MA Experiment 20000327 PARAMETER Experiment Name: At_42deg_Heat_Sub_P Parameter: Organism Value: A. thaliana
  misc_feature: MA Experiment 20000327 PARAMETER Experiment Name: At_42deg_Heat_Sub_P Parameter: Plant Line Value: WS
  misc_feature: MA Experiment 20000327 PARAMETER Experiment Name: At_42deg_Heat_Sub_P Parameter: Temperature (deg C) Value: 42 vs. 22
  misc_feature: MA Experiment 20000327 PARAMETER Experiment Name: At_42deg_Heat_Sub_P Parameter: Timepoint (hr) Value: 1
  misc_feature: MA Experiment 20000327 PARAMETER Experiment Name: At_42deg_Heat_Sub_P Parameter: Tissue Value: Aerial
  misc_feature: MA Experiment ID: 20000328 Result: Down-regulated in Transcription
  misc_feature: MA Experiment 20000328 PARAMETER Experiment Name: At_42deg_Heat_Sub_P Parameter: Age (day) Value: 14
  misc_feature: MA Experiment 20000328 PARAMETER Experiment Name: At_42deg_Heat_Sub_P Parameter: Organism Value: A. thaliana
  misc_feature: MA Experiment 20000328 PARAMETER Experiment Name: At_42deg_Heat_Sub_P Parameter: Plant Line Value: WS
  misc_feature: MA Experiment 20000328 PARAMETER Experiment Name: At_42deg_Heat_Sub_P Parameter: Temperature (deg C) Value: 42 vs. 22
  misc_feature: MA Experiment 20000328 PARAMETER Experiment Name: At_42deg_Heat_Sub_P Parameter: Timepoint (hr) Value: 6
  misc_feature: MA Experiment 20000328 PARAMETER Experiment Name: At_42deg_Heat_Sub_P Parameter: Tissue Value: Aerial
  misc_feature: MA Experiment ID: 20000355 Result: Up-regulated in Transcription
  misc_feature: MA Experiment 20000355 PARAMETER Experiment Name: At_Siliques_Sub_P Parameter: Age (day) Value: 21
  misc_feature: MA Experiment 20000355 PARAMETER Experiment Name: At_Siliques_Sub_P Parameter: Organism Value: A. thaliana
  misc_feature: MA Experiment 20000355 PARAMETER Experiment Name: At_Siliques_Sub_P Parameter: Plant Line Value: WS
  misc_feature: MA Experiment 20000355 PARAMETER Experiment Name: At_Siliques_Sub_P Parameter: Tissue Value: Less Than 5mm Siliques vs. Whole Plant
caaaggagccagaaagcatagtcttccatgtcgtgactgattcacttaattacccagcaatctcaatgtggtttctgctaaacattcaaaattcatttctacactcaatcacgcacgcttctatctcccggatatattccccggtttgaacaagatggtactcttggaccatgatgtagttgttcaaagagatttaagtagactgtggagcattgatatgaaaggaaaggtggttggagctgtagagacttgtcttgaaggtgaatcttcatttcgatcaatgagcacatttattaatttctcagacacatgggtcgctgggaaatttagtcctagagcttgcacatgggctttcgggatgaatctaattgatctcgaagaatggagaatacggaagttgacttctacatacataaaatacttcaacctgggaacaaagagaccattgtggaaagctgggagcttaccaataggttggttgactttctataggcaaacattagcattggacaagagatggcatgtgatggggttaggtcgcgaatcaggagtcaaagcggttgacatcgaacaagcggcagttatacactacgatggggtcatgaagccgtggttggacattggaaaagagaattacaaacgttactggaacatacacgtcccttaccatcacacctacttgcaacagtgcaatcttcaagcttgat

SEQ ID NO: 27848 - protein, 183 aa, Arabidopsis thaliana
  peptide (1)..(183): Ceres Seq. ID no. 12370069
  misc_feature (1)..(179): Homolog of NCBI NO: 37533460 NR Description: hypothetical protein [Oryza sativa (japonica
  misc_feature (1)..(181): Homolog of NCBI NO: 30691875 NR Description: glycosyltransferase family 8 [Arabidopsis
  misc_feature (1)..(181): Homolog of NCBI NO: 7485958 NR Description: hypothetical protein F22I13.40 - Arabidopsis
  misc_feature (1)..(181): Homolog of NCBI NO: 7271113 NR Description: 68 kDa protein [Cicer arietinum]
  misc_feature (1)..(181): Homolog of NCBI NO: 38423965 NR Description: putative glycosyltransferase
  misc_feature (1)..(181): Homolog of NCBI NO: 15233046 NR Description: putative protein
  misc_feature (1)..(181): Homolog of NCBI NO: 18422837 NR Description: putative protein
  misc_feature (1)..(181): Homolog of NCBI NO: 10177914 NR Description: emb|CAB71043.1~gene_id:MCA23.10~strong similarity
  misc_feature (1)..(181): Homolog of NCBI NO: 30684642 NR Description: glycosyltransferase family 8 [Arabidopsis
  misc_feature (1)..(183): Homolog of NCBI NO: 18390688 NR Description: expressed protein
MVLLDHDVVVQRDLSRLWSIDMKGKVVGAVETCLEGESSFRSMSTFINFSDTWVAGKFSPRACTWAFGMNLIDLEEWRIRKLTSTYIKYFNLGTKRPLWKAGSLPIGWLTFYRQTLALDKRWHVMGLGRESGVKAVDIEQAAVIHYDGVMKPWLDIGKENYKRYWNIHVPYHHTYLQQCNLQA

SEQ ID NO: 27849 - protein, 162 aa, Arabidopsis thaliana
  peptide (1)..(162): Ceres Seq. ID no. 12370070
  misc_feature (1)..(158): Homolog of NCBI NO: 37533460 NR Description: hypothetical protein [Oryza sativa (japonica
  misc_feature (1)..(160): Homolog of NCBI NO: 30691875 NR Description: glycosyltransferase family 8 [Arabidopsis
  misc_feature (1)..(160): Homolog of NCBI NO: 7485958 NR Description: hypothetical protein F22I13.40 - Arabidopsis
  misc_feature (1)..(160): Homolog of NCBI NO: 7271113 NR Description: 68 kDa protein [Cicer arietinum]
  misc_feature (1)..(160): Homolog of NCBI NO: 38423965 NR Description: putative glycosyltransferase
  misc_feature (1)..(160): Homolog of NCBI NO: 15233046 NR Description: putative protein
  misc_feature (1)..(160): Homolog of NCBI NO: 18422837 NR Description: putative protein
  misc_feature (1)..(160): Homolog of NCBI NO: 10177914 NR Description: emb|CAB71043.1~gene_id:MCA23.10~strong similarity
  misc_feature (1)..(160): Homolog of NCBI NO: 30684642 NR Description: glycosyltransferase family 8 [Arabidopsis
  misc_feature (1)..(162): Homolog of NCBI NO: 18390688 NR Description: expressed protein
MKGKVVGAVETCLEGESSFRSMSTFINFSDTWVAGKFSPRACTWAFGMNLIDLEEWRIRKLTSTYIKYFNLGTKRPLWKAGSLPIGWLTFYRQTLALDKRWHVMGLGRESGVKAVDIEQAAVIHYDGVMKPWLDIGKENYKRYWNIHVPYHHTYLQQCNLQA

SEQ ID NO: 27850 - protein, 141 aa, Arabidopsis thaliana
  peptide (1)..(141): Ceres Seq. ID no. 12370071
  misc_feature (1)..(137): Homolog of NCBI NO: 37533460 NR Description: hypothetical protein [Oryza sativa (japonica
  misc_feature (1)..(139): Homolog of NCBI NO: 30691875 NR Description: glycosyltransferase family 8 [Arabidopsis
  misc_feature (1)..(139): Homolog of NCBI NO: 7485958 NR Description: hypothetical protein F22I13.40 - Arabidopsis
  misc_feature (1)..(139): Homolog of NCBI NO: 7271113 NR Description: 68 kDa protein [Cicer arietinum]
  misc_feature (1)..(139): Homolog of NCBI NO: 38423965 NR Description: putative glycosyltransferase
  misc_feature (1)..(139): Homolog of NCBI NO: 15233046 NR Description: putative protein
  misc_feature (1)..(139): Homolog of NCBI NO: 18422837 NR Description: putative protein
  misc_feature (1)..(139): Homolog of NCBI NO: 10177914 NR Description: emb|CAB71043.1~gene_id:MCA23.10~strong similarity
  misc_feature (1)..(139): Homolog of NCBI NO: 30684642 NR Description: glycosyltransferase family 8 [Arabidopsis
  misc_feature (1)..(141): Homolog of NCBI NO: 18390688 NR Description: expressed protein
MSTFINFSDTWVAGKFSPRACTWAFGMNLIDLEEWRIRKLTSTYIKYFNLGTKRPLWKAGSLPIGWLTFYRQTLALDKRWHVMGLGRESGVKAVDIEQAAVIHYDGVMKPWLDIGKENYKRYWNIHVPYHHTYLQQCNLQA

SEQ ID NO: 27851 - DNA, 763 bp, Arabidopsis thaliana
  misc_feature (1)..(763): Ceres Seq. ID no. 13491922
  misc_feature: MA Experiment ID: 108434 Result: Down-regulated in Transcription
  misc_feature: MA Experiment 108434 PARAMETER Experiment Name: At_Root_Tips_cDNA_P Parameter: Tissue Value: Root Tips
  misc_feature: MA Experiment ID: 108435 Result: Down-regulated in Transcription
  misc_feature: MA Experiment 108435 PARAMETER Experiment Name: At_stm_Mutants_cDNA_P Parameter: Plant Line Value: wt Landsburg vs stm
  misc_feature: MA Experiment 108435 PARAMETER Experiment Name: At_stm_Mutants_cDNA_P Parameter: Tissue Value: Shoot Apical Meristem Region
  misc_feature: MA Experiment ID: 108461 Result: Up-regulated in Transcription
  misc_feature: MA Experiment 108461 PARAMETER Experiment Name: At_Germinating_Seeds_cDNA_P Parameter: Age (day) Value: 1 vs. 0
  misc_feature: MA Experiment 108461 PARAMETER Experiment Name: At_Germinating_Seeds_cDNA_P Parameter: Tissue Value: Germinating Seeds
  misc_feature: MA Experiment ID: 108462 Result: Up-regulated in Transcription
  misc_feature: MA Experiment 108462 PARAMETER Experiment Name: At_Germinating_Seeds_cDNA_P Parameter: Age (day) Value: 2 vs. 0
  misc_feature: MA Experiment 108462 PARAMETER Experiment Name: At_Germinating_Seeds_cDNA_P Parameter: Tissue Value: Germinating Seeds
  misc_feature: MA Experiment ID: 108464 Result: Up-regulated in Transcription
  misc_feature: MA Experiment 108464 PARAMETER Experiment Name: At_Germinating_Seeds_cDNA_P Parameter: Age (day) Value: 4 vs. 0
  misc_feature: MA Experiment 108464 PARAMETER Experiment Name: At_Germinating_Seeds_cDNA_P Parameter: Tissue Value: Germinating Seeds
  misc_feature: MA Experiment ID: 108488 Result: Up-regulated in Transcription
  misc_feature: MA Experiment ID: 108489 Result: Down-regulated in Transcription
  misc_feature: MA Experiment ID: 20000179 Result: Up-regulated in Transcription
  misc_feature: MA Experiment 20000179 PARAMETER Experiment Name: At_Germinating_Seeds_P Parameter: Age (hr) Value: 6 vs. 0
  misc_feature: MA Experiment 20000179 PARAMETER Experiment Name: At_Germinating_Seeds_P Parameter: Tissue Value: Germinating Seeds
  misc_feature: MA Experiment ID: 20000180 Result: Up-regulated in Transcription
  misc_feature: MA Experiment 20000180 PARAMETER Experiment Name: At_Germinating_Seeds_P Parameter: Age (hr) Value: 24 vs. 0
  misc_feature: MA Experiment 20000180 PARAMETER Experiment Name: At_Germinating_Seeds_P Parameter: Tissue Value: Germinating Seeds
  misc_feature: MA Experiment ID: 20000185 Result: Down-regulated in Transcription
  misc_feature: MA Experiment 20000185 PARAMETER Experiment Name: At_Roots__P Parameter: Age (day) Value: 7 vs. 21
  misc_feature: MA Experiment 20000185 PARAMETER Experiment Name: At_Roots__P Parameter: Organism Value: A. thaliana
  misc_feature: MA Experiment 20000185 PARAMETER Experiment Name: At_Roots__P Parameter: Tissue Value: Roots vs. Whole Plant
  misc_feature: MA Experiment ID: 20000286 Result: Down-regulated in Transcription
  misc_feature: MA Experiment 20000286 PARAMETER Experiment Name: At_Open_Flower_P Parameter: Age (day) Value: 21
  misc_feature: MA Experiment 20000286 PARAMETER Experiment Name: At_Open_Flower_P Parameter: Plant Line Value: WS
  misc_feature: MA Experiment 20000286 PARAMETER Experiment Name: At_Open_Flower_P Parameter: Tissue Value: Half Open vs. Whole Plant
  misc_feature: MA Experiment ID: 20000437 Result: Down-regulated in Transcription
  misc_feature: MA Experiment 20000437 PARAMETER Experiment Name: At_Drought_P Parameter: Age (day) Value: 8
  misc_feature: MA Experiment 20000437 PARAMETER Experiment Name: At_Drought_P Parameter: Organism Value: A. thaliana
  misc_feature: MA Experiment 20000437 PARAMETER Experiment Name: At_Drought_P Parameter: Plant Line Value: WS
  misc_feature: MA Experiment 20000437 PARAMETER Experiment Name: At_Drought_P Parameter: Timepoint (hr) Value: 24
  misc_feature: MA Experiment 20000437 PARAMETER Experiment Name: At_Drought_P Parameter: Tissue Value: Whole Plant
  misc_feature: MA Experiment 20000437 PARAMETER Experiment Name: At_Drought_P Parameter: Treatment Value: Drought vs. No Drought
  misc_feature: MA Experiment ID: 20000438 Result: Up-regulated in Transcription
  misc_feature: MA Experiment 20000438 PARAMETER Experiment Name: At_Shoots__P Parameter: Age (day) Value: 14
  misc_feature: MA Experiment 20000438 PARAMETER Experiment Name: At_Shoots__P Parameter: Tissue Value: Shoots vs. Whole Plant
  misc_feature: MA Experiment ID: 20000439 Result: Down-regulated in Transcription
  misc_feature: MA Experiment 20000439 PARAMETER Experiment Name: At_Roots__P Parameter: Age (day) Value: 14 vs. 21
  misc_feature: MA Experiment 20000439 PARAMETER Experiment Name: At_Roots__P Parameter: Organism Value: A. thaliana
  misc_feature: MA Experiment 20000439 PARAMETER Experiment Name: At_Roots__P Parameter: Tissue Value: Roots vs. Whole Plant
  misc_feature: MA Experiment ID: 20000496 Result: Down-regulated in Transcription
  misc_feature: MA Experiment 20000496 PARAMETER Experiment Name: At_Guard_Cells_P Parameter: Harvest Date Value: 7/19/2002
  misc_feature: MA Experiment 20000496 PARAMETER Experiment Name: At_Guard_Cells_P Parameter: Organism Value: Canola
  misc_feature: MA Experiment 20000496 PARAMETER Experiment Name: At_Guard_Cells_P Parameter: Tissue Value: Guard Cells vs. Leaves
  misc_feature: MA Experiment ID: 20000794 Result: Down-regulated in Transcription
  misc_feature: MA Experiment 20000794 PARAMETER Experiment Name: At_Petals_P Parameter: Age (day) Value: 23-25 days
  misc_feature: MA Experiment 20000794 PARAMETER Experiment Name: At_Petals_P Parameter: Plant Line Value: WS
  misc_feature: MA Experiment 20000794 PARAMETER Experiment Name: At_Petals_P Parameter: Tissue Value: Petals vs. Whole plant
  misc_feature: MA Experiment ID: 20001248 Result: Down-regulated in Transcription
  misc_feature: MA Experiment 20001248 PARAMETER Experiment Name: At_Far-red-induction_P Parameter: Age (day) Value: 7
  misc_feature: MA Experiment 20001248 PARAMETER Experiment Name: At_Far-red-induction_P Parameter: Light Value: Far-red vs. White
  misc_feature: MA Experiment 20001248 PARAMETER Experiment Name: At_Far-red-induction_P Parameter: Organism Value: A. thaliana
  misc_feature: MA Experiment 20001248 PARAMETER Experiment Name: At_Far-red-induction_P Parameter: Plant Line Value: Columbia
  misc_feature: MA Experiment 20001248 PARAMETER Experiment Name: At_Far-red-induction_P Parameter: Timepoint (hr) Value: 4
  misc_feature: MA Experiment 20001248 PARAMETER Experiment Name: At_Far-red-induction_P Parameter: Tissue Value: Whole Plant
  misc_feature: MA Experiment ID: 20001451 Result: Down-regulated in Transcription
  misc_feature: MA Experiment 20001451 PARAMETER Experiment Name: At_Far-red-induction_P Parameter: Age (day) Value: 7
  misc_feature: MA Experiment 20001451 PARAMETER Experiment Name: At_Far-red-induction_P Parameter: Light Value: Far-red vs. White
  misc_feature: MA Experiment 20001451 PARAMETER Experiment Name: At_Far-red-induction_P Parameter: Organism Value: A. thaliana
  misc_feature: MA Experiment 20001451 PARAMETER Experiment Name: At_Far-red-induction_P Parameter: Plant Line Value: Columbia
  misc_feature: MA Experiment 20001451 PARAMETER Experiment Name: At_Far-red-induction_P Parameter: Timepoint (hr) Value: 24
  misc_feature: MA Experiment 20001451 PARAMETER Experiment Name: At_Far-red-induction_P Parameter: Tissue Value: Whole Plant
  misc_feature: MA Experiment ID: 20001558 Result: Down-regulated in Transcription
  misc_feature: MA Experiment 20001558 PARAMETER Experiment Name: At_Drought_Soil_Dry_P Parameter: Age (day) Value: 27
  misc_feature: MA Experiment 20001558 PARAMETER Experiment Name: At_Drought_Soil_Dry_P Parameter: Organism Value: A. thaliana
  misc_feature: MA Experiment 20001558 PARAMETER Experiment Name: At_Drought_Soil_Dry_P Parameter: Plant Line Value: WS
  misc_feature: MA Experiment 20001558 PARAMETER Experiment Name: At_Drought_Soil_Dry_P Parameter: Post Timepoint (hr) Value: 6
  misc_feature: MA Experiment 20001558 PARAMETER Experiment Name: At_Drought_Soil_Dry_P Parameter: Post-Treatment Value: Re-Water vs. No Drought
  misc_feature: MA Experiment 20001558 PARAMETER Experiment Name: At_Drought_Soil_Dry_P Parameter: Timepoint (day) Value: 13
  misc_feature: MA Experiment 20001558 PARAMETER Experiment Name: At_Drought_Soil_Dry_P Parameter: Treatment Value: Drought vs. No Drought
  misc_feature: MA Experiment ID: 20001757 Result: Up-regulated in Transcription
  misc_feature: MA Experiment 20001757 PARAMETER Experiment Name: At_50mM_NH4NO3_L-to-H_P Parameter: Timepoint (hr) Value: 6
  misc_feature: MA Experiment 20001757 PARAMETER Experiment Name: At_50mM_NH4NO3_L-to-H_P Parameter: Tissue Value: Leaf
  misc_feature: MA Experiment 20001757 PARAMETER Experiment Name: At_50mM_NH4NO3_L-to-H_P Parameter: Treatment Value: 50mM NH4NO3 vs 100mM Mannitol
  misc_feature: MA Experiment ID: 20001905 Result: Down-regulated in Transcription
  misc_feature: MA Experiment 20001905 PARAMETER Experiment Name: At_Drought_Reproduction_P Parameter: Age (day) Value: 40
  misc_feature: MA Experiment 20001905 PARAMETER Experiment Name: At_Drought_Reproduction_P Parameter: Organism Value: A. thaliana
  misc_feature: MA Experiment 20001905 PARAMETER Experiment Name: At_Drought_Reproduction_P Parameter: Plant Line Value: WS
  misc_feature: MA Experiment 20001905 PARAMETER Experiment Name: At_Drought_Reproduction_P Parameter: Timepoint (day) Value: 10
  misc_feature: MA Experiment 20001905 PARAMETER Experiment Name: At_Drought_Reproduction_P Parameter: Tissue Value: Rosettes
  misc_feature: MA Experiment 20001905 PARAMETER Experiment Name: At_Drought_Reproduction_P Parameter: Treatment Value: Drought vs. No Drought
  misc_feature: MA Experiment ID: 20001906 Result: Down-regulated in Transcription
  misc_feature: MA Experiment 20001906 PARAMETER Experiment Name: At_Drought_Reproduction_P Parameter: Age (day) Value: 35
  misc_feature: MA Experiment 20001906 PARAMETER Experiment Name: At_Drought_Reproduction_P Parameter: Organism Value: A. thaliana
  misc_feature: MA Experiment 20001906 PARAMETER Experiment Name: At_Drought_Reproduction_P Parameter: Plant Line Value: WS
  misc_feature: MA Experiment 20001906 PARAMETER Experiment Name: At_Drought_Reproduction_P Parameter: Timepoint (day) Value: 5
  misc_feature: MA Experiment 20001906 PARAMETER Experiment Name: At_Drought_Reproduction_P Parameter: Tissue Value: Siliques
  misc_feature: MA Experiment 20001906 PARAMETER Experiment Name: At_Drought_Reproduction_P Parameter: Treatment Value: Drought vs. No Drought
  misc_feature: MA Experiment ID: 20001908 Result: Down-regulated in Transcription
  misc_feature: MA Experiment 20001908 PARAMETER Experiment Name: At_Drought_Reproduction_P Parameter: Age (day) Value: 40
  misc_feature: MA Experiment 20001908 PARAMETER Experiment Name: At_Drought_Reproduction_P Parameter: Organism Value: A. thaliana
  misc_feature: MA Experiment 20001908 PARAMETER Experiment Name: At_Drought_Reproduction_P Parameter: Plant Line Value: WS
  misc_feature: MA Experiment 20001908 PARAMETER Experiment Name: At_Drought_Reproduction_P Parameter: Timepoint (day) Value: 10
  misc_feature: MA Experiment 20001908 PARAMETER Experiment Name: At_Drought_Reproduction_P Parameter: Tissue Value: Siliques
  misc_feature: MA Experiment 20001908 PARAMETER Experiment Name: At_Drought_Reproduction_P Parameter: Treatment Value: Drought vs. No Drought
ataccaataagcaatttgctcattagagaacagagaaaaaaaaaacaatggcaactcaagccgccgggatcttcaactccgccataacaaccgccgcaacctccggcgtcaagaaactccactttttctcaacaacccaccgtcccaaatccctctccttcaccaaaaccgcaatccgcgccgagaaaacagattcctccgccgccgctgctgcatcccccgccacgaaagaagctcccgtgggattcacgccaccgcagctagacccaaacacaccgtctccgatcttcgctggaagcaccggtggtcttctacgtaaagcgcaagtggaagagttctacgttatcacgtggaactcaccgaaagaacagatctttgagatgccgacaggaggagcagcgatcatgagagaaggtccgaatcttctgaagctagcgaggaaagagcagtgtttagctttggggacaaggcttagatccaagtacaagatcacttaccagttttacagagtgtttcctaacggtgaggttcaatatcttcatcctaaagatggtgtttatccagagaaggcgaatccaggaagagaaggtgttggtctcaacatgagatctattgggaaaaatgttagtcccattgaagttaagtttactggcaaacaaagttatgatttgtaagatctgtaaactaaaaaaaccaaaaactatgtgcatgtggtgatgattatgactatgtttcatgttaatttttaatggattttgttttg

SEQ ID NO: 27852 - protein, 208 aa, Arabidopsis thaliana
  peptide (1)..(208): Ceres Seq. ID no. 13491923
  misc_feature (70)..(207): Pfam Name: PsaD Pfam Description: PsaD
  misc_feature (1)..(208): Homolog of NCBI NO: 131166 NR Description: Photosystem I reaction center subunit II,
  misc_feature (1)..(208): Homolog of NCBI NO: 34787117 NR Description: putative photosystem I reaction centre PSI-D
  misc_feature (1)..(208): Homolog of NCBI NO: 417544 NR Description: Photosystem I reaction center subunit II,
  misc_feature (1)..(208): Homolog of NCBI NO: 19855891 NR Description: Photosystem I reaction center subunit II,
  misc_feature (1)..(208): Homolog of NCBI NO: 21293 NR Description: 20 kDa protein (AA 1-212) [Spinacia oleracea]
  misc_feature (1)..(208): Homolog of NCBI NO: 72680 NR Description: photosystem I chain II precursor - spinach
  misc_feature (1)..(208): Homolog of NCBI NO: 5732201 NR Description: photosystem I subunit II precursor [Arabidopsis
  misc_feature (1)..(208): Homolog of NCBI NO: 15218708 NR Description: photosystem I reaction center subunit II
  misc_feature (1)..(208): Homolog of NCBI NO: 15235503 NR Description: photosystem I reaction center subunit II
  misc_feature (1)..(208): Homolog of NCBI NO: 21595031 NR Description: putative photosystem I reaction center subunit II
MATQAAGIFNSAITTAATSGVKKLHFFSTTHRPKSLSFTKTAIRAEKTDSSAAAAASPATKEAPVGFTPPQLDPNTPSPIFAGSTGGLLRKAQVEEFYVITWNSPKEQIFEMPTGGAAIMREGPNLLKLARKEQCLALGTRLRSKYKITYQFYRVFPNGEVQYLHPKDGVYPEKANPGREGVGLNMRSIGKNVSPIEVKFTGKQSYDL

SEQ ID NO: 27853 - DNA, 1267 bp, Arabidopsis thaliana
  misc_feature (1)..(1267): Ceres Seq. ID no. 12338433
  misc_feature: MA Experiment ID: 108594 Result: Down-regulated in Transcription
  misc_feature: MA Experiment 108594 PARAMETER Experiment Name: At_Ler-rhl_Root_cDNA_P Parameter: Plant Line Value: null
  misc_feature: MA Experiment ID: 108595 Result: Down-regulated in Transcription
  misc_feature: MA Experiment 108595 PARAMETER Experiment Name: At_Ler-pi_Ovule_cDNA_P Parameter: Plant Line Value: null
  misc_feature: MA Experiment ID: 20000180 Result: Up-regulated in Transcription
  misc_feature: MA Experiment 20000180 PARAMETER Experiment Name: At_Germinating_Seeds_P Parameter: Age (hr) Value: 24 vs. 0
  misc_feature: MA Experiment 20000180 PARAMETER Experiment Name: At_Germinating_Seeds_P Parameter: Tissue Value: Germinating Seeds
  misc_feature: MA Experiment ID: 20000185 Result: Down-regulated in Transcription
  misc_feature: MA Experiment 20000185 PARAMETER Experiment Name: At_Roots__P Parameter: Age (day) Value: 7 vs. 21
  misc_feature: MA Experiment 20000185 PARAMETER Experiment Name: At_Roots__P Parameter: Organism Value: A. thaliana
  misc_feature: MA Experiment 20000185 PARAMETER Experiment Name: At_Roots__P Parameter: Tissue Value: Roots vs. Whole Plant
  misc_feature: MA Experiment ID: 20000439 Result: Down-regulated in Transcription
  misc_feature: MA Experiment 20000439 PARAMETER Experiment Name: At_Roots__P Parameter: Age (day) Value: 14 vs. 21
  misc_feature: MA Experiment 20000439 PARAMETER Experiment Name: At_Roots__P Parameter: Organism Value: A. thaliana
  misc_feature: MA Experiment 20000439 PARAMETER Experiment Name: At_Roots__P Parameter: Tissue Value: Roots vs. Whole Plant
  misc_feature: MA Experiment ID: 20000794 Result: Down-regulated in Transcription
  misc_feature: MA Experiment 20000794 PARAMETER Experiment Name: At_Petals_P Parameter: Age (day) Value: 23-25 days
  misc_feature: MA Experiment 20000794 PARAMETER Experiment Name: At_Petals_P Parameter: Plant Line Value: WS
  misc_feature: MA Experiment 20000794 PARAMETER Experiment Name: At_Petals_P Parameter: Tissue Value: Petals vs. Whole plant
  misc_feature: MA Experiment ID: 20001248 Result: Down-regulated in Transcription
  misc_feature: MA Experiment 20001248 PARAMETER Experiment Name: At_Far-red-induction_P Parameter: Age (day) Value: 7
  misc_feature: MA Experiment 20001248 PARAMETER Experiment Name: At_Far-red-induction_P Parameter: Light Value: Far-red vs. White
  misc_feature: MA Experiment 20001248 PARAMETER Experiment Name: At_Far-red-induction_P Parameter: Organism Value: A. thaliana
  misc_feature: MA Experiment 20001248 PARAMETER Experiment Name: At_Far-red-induction_P Parameter: Plant Line Value: Columbia
  misc_feature: MA Experiment 20001248 PARAMETER Experiment Name: At_Far-red-induction_P Parameter: Timepoint (hr) Value: 4
  misc_feature: MA Experiment 20001248 PARAMETER Experiment Name: At_Far-red-induction_P Parameter: Tissue Value: Whole Plant
  misc_feature: MA Experiment ID: 20001450 Result: Down-regulated in Transcription
  misc_feature: MA Experiment 20001450 PARAMETER Experiment Name: At_Far-red-induction_P Parameter: Age (day) Value: 7
  misc_feature: MA Experiment 20001450 PARAMETER Experiment Name: At_Far-red-induction_P Parameter: Light Value: Far-red vs. White
  misc_feature: MA Experiment 20001450 PARAMETER Experiment Name: At_Far-red-induction_P Parameter: Organism Value: A. thaliana
  misc_feature: MA Experiment 20001450 PARAMETER Experiment Name: At_Far-red-induction_P Parameter: Plant Line Value: Columbia
  misc_feature: MA Experiment 20001450 PARAMETER Experiment Name: At_Far-red-induction_P Parameter: Timepoint (hr) Value: 8
  misc_feature: MA Experiment 20001450 PARAMETER Experiment Name: At_Far-red-induction_P Parameter: Tissue Value: Whole Plant
  misc_feature: MA Experiment ID: 20001451 Result: Down-regulated in Transcription
  misc_feature: MA Experiment 20001451 PARAMETER Experiment Name: At_Far-red-induction_P Parameter: Age (day) Value: 7
  misc_feature: MA Experiment 20001451 PARAMETER Experiment Name: At_Far-red-induction_P Parameter: Light Value: Far-red vs. White
  misc_feature: MA Experiment 20001451 PARAMETER Experiment Name: At_Far-red-induction_P Parameter: Organism Value: A. thaliana
  misc_feature: MA Experiment 20001451 PARAMETER Experiment Name: At_Far-red-induction_P Parameter: Plant Line Value: Columbia
  misc_feature: MA Experiment 20001451 PARAMETER Experiment Name: At_Far-red-induction_P Parameter: Timepoint (hr) Value: 24
  misc_feature: MA Experiment 20001451 PARAMETER Experiment Name: At_Far-red-induction_P Parameter: Tissue Value: Whole Plant
  misc_feature: MA Experiment ID: 20001557 Result: Down-regulated in Transcription
  misc_feature: MA Experiment 20001557 PARAMETER Experiment Name: At_Drought_Soil_Dry_P Parameter: Age (day) Value: 27
  misc_feature: MA Experiment 20001557 PARAMETER Experiment Name: At_Drought_Soil_Dry_P Parameter: Organism Value: A. thaliana
  misc_feature: MA Experiment 20001557 PARAMETER Experiment Name: At_Drought_Soil_Dry_P Parameter: Plant Line Value: WS
  misc_feature: MA Experiment 20001557 PARAMETER Experiment Name: At_Drought_Soil_Dry_P Parameter: Post Timepoint (hr) Value: 3
  misc_feature: MA Experiment 20001557 PARAMETER Experiment Name: At_Drought_Soil_Dry_P Parameter: Post-Treatment Value: Re-Water vs. No Drought
  misc_feature: MA Experiment 20001557 PARAMETER Experiment Name: At_Drought_Soil_Dry_P Parameter: Timepoint (day) Value: 13
  misc_feature: MA Experiment 20001557 PARAMETER Experiment Name: At_Drought_Soil_Dry_P Parameter: Treatment Value: Drought vs. No Drought
  misc_feature: MA Experiment ID: 20001904 Result: Down-regulated in Transcription
  misc_feature: MA Experiment 20001904 PARAMETER Experiment Name: At_Drought_Reproduction_P Parameter: Age (day) Value: 37
  misc_feature: MA Experiment 20001904 PARAMETER Experiment Name: At_Drought_Reproduction_P Parameter: Organism Value: A. thaliana
  misc_feature: MA Experiment 20001904 PARAMETER Experiment Name: At_Drought_Reproduction_P Parameter: Plant Line Value: WS
  misc_feature: MA Experiment 20001904 PARAMETER Experiment Name: At_Drought_Reproduction_P Parameter: Timepoint (day) Value: 7
  misc_feature: MA Experiment 20001904 PARAMETER Experiment Name: At_Drought_Reproduction_P Parameter: Tissue Value: Rosettes
  misc_feature: MA Experiment 20001904 PARAMETER Experiment Name: At_Drought_Reproduction_P Parameter: Treatment Value: Drought vs. No Drought
  misc_feature: MA Experiment ID: 20001905 Result: Down-regulated in Transcription
  misc_feature: MA Experiment 20001905 PARAMETER Experiment Name: At_Drought_Reproduction_P Parameter: Age (day) Value: 40
  misc_feature: MA Experiment 20001905 PARAMETER Experiment Name: At_Drought_Reproduction_P Parameter: Organism Value: A. thaliana
  misc_feature: MA Experiment 20001905 PARAMETER Experiment Name: At_Drought_Reproduction_P Parameter: Plant Line Value: WS
  misc_feature: MA Experiment 20001905 PARAMETER Experiment Name: At_Drought_Reproduction_P Parameter: Timepoint (day) Value: 10
  misc_feature: MA Experiment 20001905 PARAMETER Experiment Name: At_Drought_Reproduction_P Parameter: Tissue Value: Rosettes
  misc_feature: MA Experiment 20001905 PARAMETER Experiment Name: At_Drought_Reproduction_P Parameter: Treatment Value: Drought vs. No Drought
  misc_feature: MA Experiment ID: 20001906 Result: Down-regulated in Transcription
  misc_feature: MA Experiment 20001906 PARAMETER Experiment Name: At_Drought_Reproduction_P Parameter: Age (day) Value: 35
  misc_feature: MA Experiment 20001906 PARAMETER Experiment Name: At_Drought_Reproduction_P Parameter: Organism Value: A. thaliana
  misc_feature: MA Experiment 20001906 PARAMETER Experiment Name: At_Drought_Reproduction_P Parameter: Plant Line Value: WS
  misc_feature: MA Experiment 20001906 PARAMETER Experiment Name: At_Drought_Reproduction_P Parameter: Timepoint (day) Value: 5
  misc_feature: MA Experiment 20001906 PARAMETER Experiment Name: At_Drought_Reproduction_P Parameter: Tissue Value: Siliques
  misc_feature: MA Experiment 20001906 PARAMETER Experiment Name: At_Drought_Reproduction_P Parameter: Treatment Value: Drought vs. No Drought
  misc_feature: MA Experiment ID: 20001908 Result: Down-regulated in Transcription
  misc_feature: MA Experiment 20001908 PARAMETER Experiment Name: At_Drought_Reproduction_P Parameter: Age (day) Value: 40
  misc_feature: MA Experiment 20001908 PARAMETER Experiment Name: At_Drought_Reproduction_P Parameter: Organism Value: A. thaliana
  misc_feature: MA Experiment 20001908 PARAMETER Experiment Name: At_Drought_Reproduction_P Parameter: Plant Line Value: WS
  misc_feature: MA Experiment 20001908 PARAMETER Experiment Name: At_Drought_Reproduction_P Parameter: Timepoint (day) Value: 10
  misc_feature: MA Experiment 20001908 PARAMETER Experiment Name: At_Drought_Reproduction_P Parameter: Tissue Value: Siliques
  misc_feature: MA Experiment 20001908 PARAMETER Experiment Name: At_Drought_Reproduction_P Parameter: Treatment Value: Drought vs. No Drought
  misc_feature: MA Experiment ID: 20001911 Result: Down-regulated in Transcription
  misc_feature: MA Experiment 20001911 PARAMETER Experiment Name: At_Drought_Reproduction_P Parameter: Age (day) Value: 40
  misc_feature: MA Experiment 20001911 PARAMETER Experiment Name: At_Drought_Reproduction_P Parameter: Organism Value: A. thaliana
  misc_feature: MA Experiment 20001911 PARAMETER Experiment Name: At_Drought_Reproduction_P Parameter: Plant Line Value: WS
  misc_feature: MA Experiment 20001911 PARAMETER Experiment Name: At_Drought_Reproduction_P Parameter: Timepoint (day) Value: 10
  misc_feature: MA Experiment 20001911 PARAMETER Experiment Name: At_Drought_Reproduction_P Parameter: Tissue Value: Flowers
  misc_feature: MA Experiment 20001911 PARAMETER Experiment Name: At_Drought_Reproduction_P Parameter: Treatment Value: Drought vs. No Drought
ctttaaaaaaaaaaaataccaaaagaagcggaaacagagaaaaagagagaaaaatgctgagtagatcagttgcttctgctgttacaccggtctcatcttcttctctcttaccaaactcaaagcctatcttctgtctgaaaaccctctccggttatcgttcttcttctttctgtggcggctgtattcgtaaaatcaaccataagcctcttcgaatgacgagttccaatattacaccaagagctatggccacacaacagcttgagaacgctgatcagctcattgattctgtcgaaacttttatcttcgattgtgatggtgtgatttggaagggagataaattgatagagggagttcctgaaactcttgatatgcttcgtgccaagggaaagagattggtttttgtgacaaacaactcaacaaaatctaggaaacagtatggaaaaaagttcgagactcttggcctgaatgttaacgaggaggagatatttgcttcatcttttgctgctgctgcatacttgcagtctattaatttcccaaaagataagaaggtctatgtgattggtgaggaaggtatcttgaaagagctagagcttgctggttttcaataccttggaggtccggatgatggtaaaagacagattgaattgaagccaggttttctaatggagcatgatcatgatgttggagctgttgtggttggatttgatcgctatttcaactactacaaaattcagtatggaacactctgtatccgtgaaaacccggggtgtcttttcatcgctacaaaccgagatgctgtcactcaccttactgatgctcaagaatgggcaggtggtggctctatggttggtgctcttgttggatccactcaacgtgagcctcttgttgttggaaaaccctcaacttttatgatggactatttagcagacaaatttggaatccaaaagtcacagatatgcatggttggtgatagattggacactgacattttattcgggcagaatggcggttgtaagactctactcgtcctctcgggtgttacttcaatctctatgttggaaagccctgagaacaagatacaaccagatttctacaccagcaagatctccgattttctgtctccgaaagccgcaactgtataatctagtaagccccgcgtcaatcactctgtagaactcagggtactgaatctatttatgggtatacaactacagtctattcatttttctttgtgactatgtgtataataataagaactttcttgctg

SEQ ID NO: 27854 - protein, 379 aa, Arabidopsis thaliana; identical to SEQ ID NO: 26380
  peptide (1)..(379): Ceres Seq. ID no. 12338434
  misc_feature (96)..(345): Pfam Name: haloacid dehalogenase-like hydrolase Pfam Description: haloacid dehalogenase-like hydrolase
  misc_feature (81)..(372): Homolog of NCBI NO: 15238800 NR Description: 4-nitrophenylphosphatase-like protein
  misc_feature (81)..(372): Homolog of NCBI NO: 10177912 NR Description: 4-nitrophenylphosphatase-like protein
  misc_feature (81)..(372): Homolog of NCBI NO: 21593203 NR Description: 4-nitrophenylphosphatase-like protein
  misc_feature (67)..(375): Homolog of NCBI NO: 15982558 NR Description: phosphoglycolate phosphatase precursor
  misc_feature (80)..(379): Homolog of NCBI NO: 38345235 NR Description: OSJNBa0084K20.14 [Oryza sativa (japonica
  misc_feature (71)..(206): Homolog of NCBI NO: 8885622 NR Description: N-glyceraldehyde-2-phosphotransferase-like
  misc_feature (202)..(379): Homolog of NCBI NO: 8885622 NR Description: N-glyceraldehyde-2-phosphotransferase-like
  misc_feature (71)..(379): Homolog of NCBI NO: 26450878 NR Description: putative p-nitrophenylphosphatase [Arabidopsis
  misc_feature (18)..(379): Homolog of NCBI NO: 15239406 NR Description: p-nitrophenylphosphatase-like protein
  misc_feature (18)..(349): Homolog of NCBI NO: 8953699 NR Description: 4-nitrophenylphosphatase-like [Arabidopsis

SEQ ID NO: 27855 - protein, 362 aa, Arabidopsis thaliana; identical to SEQ ID NO: 26381
  peptide (1)..(362): Ceres Seq. ID no. 12338436
  misc_feature (79)..(328): Pfam Name: haloacid dehalogenase-like hydrolase Pfam Description: haloacid dehalogenase-like hydrolase
  misc_feature (64)..(355): Homolog of NCBI NO: 15238800 NR Description: 4-nitrophenylphosphatase-like protein
  misc_feature (64)..(355): Homolog of NCBI NO: 10177912 NR Description: 4-nitrophenylphosphatase-like protein
  misc_feature (64)..(355): Homolog of NCBI NO: 21593203 NR Description: 4-nitrophenylphosphatase-like protein
  misc_feature (50)..(358): Homolog of NCBI NO: 15982558 NR Description: phosphoglycolate phosphatase precursor
  misc_feature (63)..(362): Homolog of NCBI NO: 38345235 NR Description: OSJNBa0084K20.14 [Oryza sativa (japonica
  misc_feature (54)..(189): Homolog of NCBI NO: 8885622 NR Description: N-glyceraldehyde-2-phosphotransferase-like
  misc_feature (185)..(362): Homolog of NCBI NO: 8885622 NR Description: N-glyceraldehyde-2-phosphotransferase-like
  misc_feature (54)..(362): Homolog of NCBI NO: 26450878 NR Description: putative p-nitrophenylphosphatase [Arabidopsis
  misc_feature (1)..(362): Homolog of NCBI NO: 15239406 NR Description: p-nitrophenylphosphatase-like protein
  misc_feature (1)..(332): Homolog of NCBI NO: 8953699 NR Description: 4-nitrophenylphosphatase-like [Arabidopsis

SEQ ID NO: 27856 - protein, 309 aa, Arabidopsis thaliana; identical to SEQ ID NO: 26382
  peptide (1)..(309): Ceres Seq. ID no. 12338437
  misc_feature (26)..(275): Pfam Name: haloacid dehalogenase-like hydrolase Pfam Description: haloacid dehalogenase-like hydrolase
  misc_feature (11)..(302): Homolog of NCBI NO: 15238800 NR Description: 4-nitrophenylphosphatase-like protein
  misc_feature (11)..(302): Homolog of NCBI NO: 10177912 NR Description: 4-nitrophenylphosphatase-like protein
  misc_feature (11)..(302): Homolog of NCBI NO: 21593203 NR Description: 4-nitrophenylphosphatase-like protein
  misc_feature (1)..(305): Homolog of NCBI NO: 15982558 NR Description: phosphoglycolate phosphatase precursor
  misc_feature (10)..(309): Homolog of NCBI NO: 38345235 NR Description: OSJNBa0084K20.14 [Oryza sativa (japonica
  misc_feature (1)..(136): Homolog of NCBI NO: 8885622 NR Description: N-glyceraldehyde-2-phosphotransferase-like
  misc_feature (132)..(309): Homolog of NCBI NO: 8885622 NR Description: N-glyceraldehyde-2-phosphotransferase-like
  misc_feature (1)..(309): Homolog of NCBI NO: 26450878 NR Description: putative p-nitrophenylphosphatase [Arabidopsis
  misc_feature (1)..(309): Homolog of NCBI NO: 15239406 NR Description: p-nitrophenylphosphatase-like protein
  misc_feature (1)..(279): Homolog of NCBI NO: 8953699 NR Description: 4-nitrophenylphosphatase-like [Arabidopsis

SEQ ID NO: 27857 - DNA, 1400 bp, Arabidopsis thaliana
  misc_feature (1)..(1400): Ceres Seq. ID no. 12335141
  misc_feature: MA Experiment ID: 108434 Result: Up-regulated in Transcription
  misc_feature: MA Experiment 108434 PARAMETER Experiment Name: At_Root_Tips_cDNA_P Parameter: Tissue Value: Root Tips
  misc_feature: MA Experiment ID: 108577 Result: Down-regulated in Transcription
  misc_feature: MA Experiment 108577 PARAMETER Experiment Name: At_42deg_Heat_cDNA_P Parameter: Temperature (deg C) Value: 42 vs. 22
  misc_feature: MA Experiment 108577 PARAMETER Experiment Name: At_42deg_Heat_cDNA_P Parameter: Timepoint (hr) Value: 6
  misc_feature: MA Experiment 108577 PARAMETER Experiment Name: At_42deg_Heat_cDNA_P Parameter: Tissue Value: Aerial
  misc_feature: MA Experiment ID: 20000171 Result: Down-regulated in Transcription
  misc_feature: MA Experiment 20000171 PARAMETER Experiment Name: At_42deg_Heat_P Parameter: Age (day) Value: 14
  misc_feature: MA Experiment 20000171 PARAMETER Experiment Name: At_42deg_Heat_P Parameter: Organism Value: A. thaliana
  misc_feature: MA Experiment 20000171 PARAMETER Experiment Name: At_42deg_Heat_P Parameter: Plant Line Value: WS
  misc_feature: MA Experiment 20000171 PARAMETER Experiment Name: At_42deg_Heat_P Parameter: Temperature (deg C) Value: 42 vs. 22
  misc_feature: MA Experiment 20000171 PARAMETER Experiment Name: At_42deg_Heat_P Parameter: Timepoint (hr) Value: 1
  misc_feature: MA Experiment 20000171 PARAMETER Experiment Name: At_42deg_Heat_P Parameter: Tissue Value: Aerial
  misc_feature: MA Experiment ID: 20000173 Result: Down-regulated in Transcription
  misc_feature: MA Experiment 20000173 PARAMETER Experiment Name: At_42deg_Heat_P Parameter: Age (day) Value: 14
  misc_feature: MA Experiment 20000173 PARAMETER Experiment Name: At_42deg_Heat_P Parameter: Organism Value: A. thaliana
  misc_feature: MA Experiment 20000173 PARAMETER Experiment Name: At_42deg_Heat_P Parameter: Plant Line Value: WS
  misc_feature: MA Experiment 20000173 PARAMETER Experiment Name: At_42deg_Heat_P Parameter: Temperature (deg C) Value: 42 vs. 22
  misc_feature: MA Experiment 20000173 PARAMETER Experiment Name: At_42deg_Heat_P Parameter: Timepoint (hr) Value: 6
  misc_feature: MA Experiment 20000173 PARAMETER Experiment Name: At_42deg_Heat_P Parameter: Tissue Value: Aerial
  misc_feature: MA Experiment ID: 20001560 Result: Up-regulated in Transcription
  misc_feature: MA Experiment 20001560 PARAMETER Experiment Name: At_Drought_Soil_Dry_P Parameter: Age (day) Value: 28
  misc_feature: MA Experiment 20001560 PARAMETER Experiment Name: At_Drought_Soil_Dry_P Parameter: Organism Value: A. thaliana
  misc_feature: MA Experiment 20001560 PARAMETER Experiment Name: At_Drought_Soil_Dry_P Parameter: Plant Line Value: WS
  misc_feature: MA Experiment 20001560 PARAMETER Experiment Name: At_Drought_Soil_Dry_P Parameter: Post Timepoint (hr) Value: None
  misc_feature: MA Experiment 20001560 PARAMETER Experiment Name: At_Drought_Soil_Dry_P Parameter: Post-Treatment Value: None
  misc_feature: MA Experiment 20001560 PARAMETER Experiment Name: At_Drought_Soil_Dry_P Parameter: Timepoint (day) Value: 14
  misc_feature: MA Experiment 20001560 PARAMETER Experiment Name: At_Drought_Soil_Dry_P Parameter: Treatment Value: Drought vs. No Drought
acgcttcccaaccgcctgcctttttcagattacctccggtttctaccactctcgccgtcgccgtcaccggtactccgatcacctccgcacgattcatttcctatttgcatttttcacctctctagcggaaagtgagtcttctggagaatgggagattgaagaagtaagagattcactgattgaggaagagagaaagttagttcagaaaaatggctccagtgagtaaagctgataagaaggcagccgtagatgctgctgcgtggatgttcaatgtcgtcacttctgttggtatcatcattgttaataaagctttaatggcgacttatggttatagctttgctacaacgttaaccggtttacatttcgctacaacgactctgatgacgcttgttttaagatgtcttggttacattcagccttctcatcttccgtttacggagcttttgagatttattctgtttgctaatttctccattgttggaatgaatgtcagtcttatgtggaactctgttggtttttatcagattgctaagctcagcatgattcctgtatcttgtttgttggaaatggttttcgataagattcgttattccagagatacaaagcttagcataggactggttcttgtgggtgttggtgtttgcactgtcactgatgttagtgtaaacactaaaagatttgtagccgctttcgttgctgtgtggagtactgctctgcaacaatactatgtacattaccttcagcgcaagtactcgcttaactcattcaacctattgggacataccgctccagcccaagccgcaacattactggtaattggcccgtttcttgattattggctgacagaaaaaagagtagacatgtacgattacaacttggtttcagtgctgtttataaccctgtcgtgcacaatagcgattggaaccaacctaagccagttcatctgcatcggaagattcacagctgtatcgttccaagtgctgggacacatgaagacgatcctggtgctgataatgggcttcttcttctttggtagagaaggtcttaacttgcacgtggttgttggaatgataattgcagtactgggtatgatctggtacggtaatgcctcttcgaagccaggaggcaaagagcgacgaaactattctcttccaactacccgtcaacagaaactcggagctgcttcggattctgacgacaacgaagacaaagcctagtagtaagtagtatattatcaggaacatcacatagttacgtctctgttttgagttgtttttttattagcttaatttatgattctcgtgctaaattttggtttggtacgaaagaaagcgaattttttcatacagacgtttgagatttttgtaatgcatttttgcggaatcaagttacatcaacgc

SEQ ID NO: 27858 - protein, 335 aa, Arabidopsis thaliana
  peptide (1)..(335): Ceres Seq. ID no. 12335142
  misc_feature (1)..(297): Homolog of NCBI NO: 15238957 NR Description: putative protein; protein id: At5g42420.1
  misc_feature (1)..(315): Homolog of NCBI NO: 21536703 NR Description: unknown [Arabidopsis thaliana]
  misc_feature (1)..(315): Homolog of NCBI NO: 18394949 NR Description: expressed protein
  misc_feature (1)..(329): Homolog of NCBI NO: 30313364 NR Description: putative transmembrane protein [Oryza sativa]
  misc_feature (2)..(330): Homolog of NCBI NO: 7486049 NR Description: hypothetical protein F23K16.20 - Arabidopsis
  misc_feature (2)..(330): Homolog of NCBI NO: 21593003 NR Description: unknown [Arabidopsis thaliana]
  misc_feature (1)..(330): Homolog of NCBI NO: 18420440 NR Description: putative protein
  misc_feature (1)..(335): Homolog of NCBI NO: 15234794 NR Description: hypothetical protein; protein id: At4g09810.1
  misc_feature (1)..(335): Homolog of NCBI NO: 18399097 NR Description: expressed protein
  misc_feature (1)..(335): Homolog of NCBI NO: 21595054 NR Description: unknown [Arabidopsis thaliana]
MAPVSKADKKAAVDAAAWMFNVVTSVGIIIVNKALMATYGYSFATTLTGLHFATTTLMTLVLRCLGYIQPSHLPFTELLRFILFANFSIVGMNVSLMWNSVGFYQIAKLSMIPVSCLLEMVFDKIRYSRDTKLSIGLVLVGVGVCTVTDVSVNTKRFVAAFVAVWSTALQQYYVHYLQRKYSLNSFNLLGHTAPAQAATLLVIGPFLDYWLTEKRVDMYDYNLVSVLFITLSCTIAIGTNLSQFICIGRFTAVSFQVLGHMKTILVLIMGFFFFGREGLNLHVVVGMIIAVLGMIWYGNASSKPGGKERRNYSLPTTRQQKLGAASDSDDNEDKA

SEQ ID NO: 27859 - protein, 317 aa, Arabidopsis thaliana
  peptide (1)..(317): Ceres Seq. ID no. 12335143
  misc_feature (1)..(279): Homolog of NCBI NO: 15238957 NR Description: putative protein; protein id: At5g42420.1
  misc_feature (1)..(297): Homolog of NCBI NO: 21536703 NR Description: unknown [Arabidopsis thaliana]
  misc_feature (1)..(297): Homolog of NCBI NO: 18394949 NR Description: expressed protein
  misc_feature (1)..(311): Homolog of NCBI NO: 30313364 NR Description: putative transmembrane protein [Oryza sativa]
  misc_feature (1)..(312): Homolog of NCBI NO: 7486049 NR Description: hypothetical protein F23K16.20 - Arabidopsis
  misc_feature (1)..(312): Homolog of NCBI NO: 21593003 NR Description: unknown [Arabidopsis thaliana]
  misc_feature (1)..(312): Homolog of NCBI NO: 18420440 NR Description: putative protein
  misc_feature (1)..(317): Homolog of NCBI NO: 15234794 NR Description: hypothetical protein; protein id: At4g09810.1
  misc_feature (1)..(317): Homolog of NCBI NO: 18399097 NR Description: expressed protein
  misc_feature (1)..(317): Homolog of NCBI NO: 21595054 NR Description: unknown [Arabidopsis thaliana]
MFNVVTSVGIIIVNKALMATYGYSFATTLTGLHFATTTLMTLVLRCLGYIQPSHLPFTELLRFILFANFSIVGMNVSLMWNSVGFYQIAKLSMIPVSCLLEMVFDKIRYSRDTKLSIGLVLVGVGVCTVTDVSVNTKRFVAAFVAVWSTALQQYYVHYLQRKYSLNSFNLLGHTAPAQAATLLVIGPFLDYWLTEKRVDMYDYNLVSVLFITLSCTIAIGTNLSQFICIGRFTAVSFQVLGHMKTILVLIMGFFFFGREGLNLHVVVGMIIAVLGMIWYGNASSKPGGKERRNYSLPTTRQQKLGAASDSDDNEDKA

SEQ ID NO: 27860 - protein, 300 aa, Arabidopsis thaliana
  peptide (1)..(300): Ceres Seq. ID no. 12335144
  misc_feature (1)..(262): Homolog of NCBI NO: 15238957 NR Description: putative protein; protein id: At5g42420.1
  misc_feature (1)..(280): Homolog of NCBI NO: 21536703 NR Description: unknown [Arabidopsis thaliana]
  misc_feature (1)..(280): Homolog of NCBI NO: 18394949 NR Description: expressed protein
  misc_feature (1)..(294): Homolog of NCBI NO: 30313364 NR Description: putative transmembrane protein [Oryza sativa]
  misc_feature (1)..(295): Homolog of NCBI NO: 7486049 NR Description: hypothetical protein F23K16.20 - Arabidopsis
  misc_feature (1)..(295): Homolog of NCBI NO: 21593003 NR Description: unknown [Arabidopsis thaliana]
  misc_feature (1)..(295): Homolog of NCBI NO: 18420440 NR Description: putative protein
  misc_feature (1)..(300): Homolog of NCBI NO: 15234794 NR Description: hypothetical protein; protein id: At4g09810.1
  misc_feature (1)..(300): Homolog of NCBI NO: 18399097 NR Description: expressed protein
  misc_feature (1)..(300): Homolog of NCBI NO: 21595054 NR Description: unknown [Arabidopsis thaliana]
MATYGYSFATTLTGLHFATTTLMTLVLRCLGYIQPSHLPFTELLRFILFANFSIVGMNVSLMWNSVGFYQIAKLSMIPVSCLLEMVFDKIRYSRDTKLSIGLVLVGVGVCTVTDVSVNTKRFVAAFVAVWSTALQQYYVHYLQRKYSLNSFNLLGHTAPAQAATLLVIGPFLDYWLTEKRVDMYDYNLVSVLFITLSCTIAIGTNLSQFICIGRFTAVSFQVLGHMKTILVLIMGFFFFGREGLNLHVVVGMIIAVLGMIWYGNASSKPGGKERRNYSLPTTRQQKLGAASDSDDNEDKA

SEQ ID NO: 27861 - DNA, 1681 bp, Arabidopsis thaliana
  misc_feature (1)..(1681): Ceres Seq. ID no. 12332449
  misc_feature: MA Experiment ID: 108462 Result: Up-regulated in Transcription
  misc_feature: MA Experiment 108462 PARAMETER Experiment Name: At_Germinating_Seeds_cDNA_P Parameter: Age (day) Value: 2 vs. 0
  misc_feature: MA Experiment 108462 PARAMETER Experiment Name: At_Germinating_Seeds_cDNA_P Parameter: Tissue Value: Germinating Seeds
  misc_feature: MA Experiment ID: 108463 Result: Up-regulated in Transcription
  misc_feature: MA Experiment 108463 PARAMETER Experiment Name: At_Germinating_Seeds_cDNA_P Parameter: Age (day) Value: 3 vs. 0
  misc_feature: MA Experiment 108463 PARAMETER Experiment Name: At_Germinating_Seeds_cDNA_P Parameter: Tissue Value: Germinating Seeds
  misc_feature: MA Experiment ID: 108464 Result: Up-regulated in Transcription
  misc_feature: MA Experiment 108464 PARAMETER Experiment Name: At_Germinating_Seeds_cDNA_P Parameter: Age (day) Value: 4 vs. 0
  misc_feature: MA Experiment 108464 PARAMETER Experiment Name: At_Germinating_Seeds_cDNA_P Parameter: Tissue Value: Germinating Seeds
  misc_feature: MA Experiment ID: 20000089 Result: Down-regulated in Transcription
  misc_feature: MA Experiment ID: 20000090 Result: Down-regulated in Transcription
  misc_feature: MA Experiment ID: 20000111 Result: Down-regulated in Transcription
  misc_feature: MA Experiment 20000111 PARAMETER Experiment Name: At_42deg_Heat_cDNA_P Parameter: Temperature (deg C) Value: 42 vs. 22
  misc_feature: MA Experiment 20000111 PARAMETER Experiment Name: At_42deg_Heat_cDNA_P Parameter: Timepoint (hr) Value: 6
  misc_feature: MA Experiment 20000111 PARAMETER Experiment Name: At_42deg_Heat_cDNA_P Parameter: Tissue Value: Aerial
  misc_feature: MA Experiment ID: 20000112 Result: Down-regulated in Transcription
  misc_feature: MA Experiment 20000112 PARAMETER Experiment Name: At_42deg_Heat_cDNA_P Parameter: Temperature (deg C) Value: 42 vs. 22
  misc_feature: MA Experiment 20000112 PARAMETER Experiment Name: At_42deg_Heat_cDNA_P Parameter: Timepoint (hr) Value: 2
  misc_feature: MA Experiment 20000112 PARAMETER Experiment Name: At_42deg_Heat_cDNA_P Parameter: Tissue Value: Aerial
  misc_feature: MA Experiment ID: 20000113 Result: Down-regulated in Transcription
  misc_feature: MA Experiment 20000113 PARAMETER Experiment Name: At_42deg_Heat_cDNA_P Parameter: Temperature (deg C) Value: 42 vs. 22
  misc_feature: MA Experiment 20000113 PARAMETER Experiment Name: At_42deg_Heat_cDNA_P Parameter: Timepoint (hr) Value: 8
  misc_feature: MA Experiment 20000113 PARAMETER Experiment Name: At_42deg_Heat_cDNA_P Parameter: Tissue Value: Aerial
  misc_feature: MA Experiment ID: 20000144 Result: Down-regulated in Transcription
  misc_feature: MA Experiment 20000144 PARAMETER Experiment Name: At_42deg_Heat_cDNA_P Parameter: Temperature (deg C) Value: 42 vs. 22
  misc_feature: MA Experiment 20000144 PARAMETER Experiment Name: At_42deg_Heat_cDNA_P Parameter: Timepoint (hr) Value: 1
  misc_feature: MA Experiment 20000144 PARAMETER Experiment Name: At_42deg_Heat_cDNA_P Parameter: Tissue Value: Aerial
  misc_feature: MA Experiment ID: 20000184 Result: Up-regulated in Transcription
  misc_feature: MA Experiment 20000184 PARAMETER Experiment Name: At_Shoots__P Parameter: Age (day) Value: 7
  misc_feature: MA Experiment 20000184 PARAMETER Experiment Name: At_Shoots__P Parameter: Tissue Value: Shoots vs. Whole Plant
  misc_feature: MA Experiment ID: 20000227 Result: Up-regulated in Transcription
  misc_feature: MA Experiment 20000227 PARAMETER Experiment Name: At_Root-Tips-vs-Tops_P Parameter: Tissue Value: Root Tips vs. Root Tops
  misc_feature: MA Experiment ID: 20000437 Result: Down-regulated in Transcription
  misc_feature: MA Experiment 20000437 PARAMETER Experiment Name: At_Drought_P Parameter: Age (day) Value: 8
  misc_feature: MA Experiment 20000437 PARAMETER Experiment Name: At_Drought_P Parameter: Organism Value: A. thaliana
  misc_feature: MA Experiment 20000437 PARAMETER Experiment Name: At_Drought_P Parameter: Plant Line Value: WS
  misc_feature: MA Experiment 20000437 PARAMETER Experiment Name: At_Drought_P Parameter: Timepoint (hr) Value: 24
  misc_feature: MA Experiment 20000437 PARAMETER Experiment Name: At_Drought_P Parameter: Tissue Value: Whole Plant
  misc_feature: MA Experiment 20000437 PARAMETER Experiment Name: At_Drought_P Parameter: Treatment Value: Drought vs. No Drought
  misc_feature: MA Experiment ID: 20000439 Result: Down-regulated in Transcription
  misc_feature: MA Experiment 20000439 PARAMETER Experiment Name: At_Roots__P Parameter: Age (day) Value: 14 vs. 21
  misc_feature: MA Experiment 20000439 PARAMETER Experiment Name: At_Roots__P Parameter: Organism Value: A. thaliana
  misc_feature: MA Experiment 20000439 PARAMETER Experiment Name: At_Roots__P Parameter: Tissue Value: Roots vs. Whole Plant
  misc_feature: MA Experiment ID: 20001247 Result: Up-regulated in Transcription
  misc_feature: MA Experiment 20001247 PARAMETER Experiment Name: At_Far-red-induction_P Parameter: Age (day) Value: 7
  misc_feature: MA Experiment 20001247 PARAMETER Experiment Name: At_Far-red-induction_P Parameter: Light Value: Far-red vs. White
  misc_feature: MA Experiment 20001247 PARAMETER Experiment Name: At_Far-red-induction_P Parameter: Organism Value: A. thaliana
  misc_feature: MA Experiment 20001247 PARAMETER Experiment Name: At_Far-red-induction_P Parameter: Plant Line Value: Columbia
  misc_feature: MA Experiment 20001247 PARAMETER Experiment Name: At_Far-red-induction_P Parameter: Timepoint (hr) Value: 1
  misc_feature: MA Experiment 20001247 PARAMETER Experiment Name: At_Far-red-induction_P Parameter: Tissue Value: Whole Plant
  misc_feature: MA Experiment ID: 20001555 Result: Down-regulated in Transcription
  misc_feature: MA Experiment 20001555 PARAMETER Experiment Name: At_Drought_Soil_Dry_P Parameter: Age (day) Value: 24
  misc_feature: MA Experiment 20001555 PARAMETER Experiment Name: At_Drought_Soil_Dry_P Parameter: Organism Value: A. thaliana
  misc_feature: MA Experiment 20001555 PARAMETER Experiment Name: At_Drought_Soil_Dry_P Parameter: Plant Line Value: WS
  misc_feature: MA Experiment 20001555 PARAMETER Experiment Name: At_Drought_Soil_Dry_P Parameter: Post Timepoint (hr) Value: None
  misc_feature: MA Experiment 20001555 PARAMETER Experiment Name: At_Drought_Soil_Dry_P Parameter: Post-Treatment Value: None
  misc_feature: MA Experiment 20001555 PARAMETER Experiment Name: At_Drought_Soil_Dry_P Parameter: Timepoint (day) Value: 10
  misc_feature: MA Experiment 20001555 PARAMETER Experiment Name: At_Drought_Soil_Dry_P Parameter: Treatment Value: Drought vs. No Drought
  misc_feature: MA Experiment ID: 20001556 Result: Down-regulated in Transcription
  misc_feature: MA Experiment 20001556 PARAMETER Experiment Name: At_Drought_Soil_Dry_P Parameter: Age (day) Value: 26
  misc_feature: MA Experiment 20001556 PARAMETER Experiment Name: At_Drought_Soil_Dry_P Parameter: Organism Value: A. thaliana
  misc_feature: MA Experiment 20001556 PARAMETER Experiment Name: At_Drought_Soil_Dry_P Parameter: Plant Line Value: WS
  misc_feature: MA Experiment 20001556 PARAMETER Experiment Name: At_Drought_Soil_Dry_P Parameter: Post Timepoint (hr) Value: None
  misc_feature: MA Experiment 20001556 PARAMETER Experiment Name: At_Drought_Soil_Dry_P Parameter: Post-Treatment Value: None
  misc_feature: MA Experiment 20001556 PARAMETER Experiment Name: At_Drought_Soil_Dry_P Parameter: Timepoint (day) Value: 12
  misc_feature: MA Experiment 20001556 PARAMETER Experiment Name: At_Drought_Soil_Dry_P Parameter: Treatment Value: Drought vs. No Drought
  misc_feature: MA Experiment ID: 20001559 Result: Down-regulated in Transcription
  misc_feature: MA Experiment 20001559 PARAMETER Experiment Name: At_Drought_Soil_Dry_P Parameter: Age (day) Value: 28
  misc_feature: MA Experiment 20001559 PARAMETER Experiment Name: At_Drought_Soil_Dry_P Parameter: Organism Value: A. thaliana
  misc_feature: MA Experiment 20001559 PARAMETER Experiment Name: At_Drought_Soil_Dry_P Parameter: Plant Line Value: WS
  misc_feature: MA Experiment 20001559 PARAMETER Experiment Name: At_Drought_Soil_Dry_P Parameter: Post Timepoint (hr) Value: 29
  misc_feature: MA Experiment 20001559 PARAMETER Experiment Name: At_Drought_Soil_Dry_P Parameter: Post-Treatment Value: Re-Water vs. No Drought
  misc_feature: MA Experiment 20001559 PARAMETER Experiment Name: At_Drought_Soil_Dry_P Parameter: Timepoint (day) Value: 14
  misc_feature: MA Experiment 20001559 PARAMETER Experiment Name: At_Drought_Soil_Dry_P Parameter: Treatment Value: Drought vs. No Drought
  misc_feature: MA Experiment ID: 20001904 Result: Down-regulated in Transcription
  misc_feature: MA Experiment 20001904 PARAMETER Experiment Name: At_Drought_Reproduction_P Parameter: Age (day) Value: 37
  misc_feature: MA Experiment 20001904 PARAMETER Experiment Name: At_Drought_Reproduction_P Parameter: Organism Value: A. thaliana
  misc_feature: MA Experiment 20001904 PARAMETER Experiment Name: At_Drought_Reproduction_P Parameter: Plant Line Value: WS
  misc_feature: MA Experiment 20001904 PARAMETER Experiment Name: At_Drought_Reproduction_P Parameter: Timepoint (day) Value: 7
  misc_feature: MA Experiment 20001904 PARAMETER Experiment Name: At_Drought_Reproduction_P Parameter: Tissue Value: Rosettes
  misc_feature: MA Experiment 20001904 PARAMETER Experiment Name: At_Drought_Reproduction_P Parameter: Treatment Value: Drought vs. No Drought
  misc_feature: MA Experiment ID: 20001905 Result: Down-regulated in Transcription
  misc_feature: MA Experiment 20001905 PARAMETER Experiment Name: At_Drought_Reproduction_P Parameter: Age (day) Value: 40
  misc_feature: MA Experiment 20001905 PARAMETER Experiment Name: At_Drought_Reproduction_P Parameter: Organism Value: A. thaliana
  misc_feature: MA Experiment 20001905 PARAMETER Experiment Name: At_Drought_Reproduction_P Parameter: Plant Line Value: WS
  misc_feature: MA Experiment 20001905 PARAMETER Experiment Name: At_Drought_Reproduction_P Parameter: Timepoint (day) Value: 10
  misc_feature: MA Experiment 20001905 PARAMETER Experiment Name: At_Drought_Reproduction_P Parameter: Tissue Value: Rosettes
  misc_feature: MA Experiment 20001905 PARAMETER Experiment Name: At_Drought_Reproduction_P Parameter: Treatment Value: Drought vs. No Drought
  misc_feature: MA Experiment ID: 20001911 Result: Down-regulated in Transcription
  misc_feature: MA Experiment 20001911 PARAMETER Experiment Name: At_Drought_Reproduction_P Parameter: Age (day) Value: 40
  misc_feature: MA Experiment 20001911 PARAMETER Experiment Name: At_Drought_Reproduction_P Parameter: Organism Value: A. thaliana
  misc_feature: MA Experiment 20001911 PARAMETER Experiment Name: At_Drought_Reproduction_P Parameter: Plant Line Value: WS
  misc_feature: MA Experiment 20001911 PARAMETER Experiment Name: At_Drought_Reproduction_P Parameter: Timepoint (day) Value: 10
  misc_feature: MA Experiment 20001911 PARAMETER Experiment Name: At_Drought_Reproduction_P Parameter: Tissue Value: Flowers
  misc_feature: MA Experiment 20001911 PARAMETER Experiment Name: At_Drought_Reproduction_P Parameter: Treatment Value: Drought vs. No Drought
actacctccaaacttcccaagaatctctctttctctcctctcttctctctcgcctcttctttaatttcctctgaagagaatcctccttacgaaaatgttcaagaaagcaacattgaatctttcacttgctcctttgctacttgtttttcttttccttctctcgtgtgttgttcatggcgtcgatgagaagaagattctcagtgtacataacaacatctggtctcccaagaaatcatacgaagcttcaacttcatgtttttctcgcagtcttggaaaaggaagagaatccactacattggagatgaaacatagagaactttgctcaggaaagactatagatttgggtaagaagatgagaagagccttagttttggataacattcgagttcagtcacttcaactcaaaatcaaagcaatgacctcaagcaccactgaacaatctgtttccgaaactcagattccgttaacctcagggataaaacttgagtctttgaactacatcgttacagttgaattaggagggaaaaacatgagtttgatcgttgacactggaagtgacctgacttgggtccaatgccagccttgcagatcctgttacaaccaacaaggtcctttgtatgacccatcagtctcatcttcttacaagacggtgttctgtaactcatccacttgtcaggaccttgtggcagctaccagcaattccggcccttgtggaggtaacaatggtgttgtaaagacaccttgtgagtacgttgtcagctatggagatggatcatacactcgaggagacttggcaagtgaaagcatcctattgggcgacacaaaacttgaaaactttgtctttggttgtggccgaaacaacaaaggtctgtttgggggatcctctggtttaatgggtttgggaagaagttcagtctctttagtctcccaaactttgaaaactttcaacggagttttctcatactgtttaccttctcttgaggatggagcttctggctcattgtcctttggtaacgattcctctgtttacacgaattcaacttcagtttcctacacgccgttagtacaaaaccctcagcttcgttccttttacattctgaatctcactggtgctagcattggtggcgtggaactgaaatcttcaagctttggcagagggattctaatcgattcaggaacggttatcacaagattgccaccttccatttacaaagctgtgaagatagagtttctgaaacagttttccgggtttcctactgctcctggttattcaatcttagacacttgctttaacctcacaagttatgaagacataagcattcccattatcaaaatgatcttccaaggtaacgctgagctcgaagtggatgtcactggtgtgttctactttgtcaagcctgacgcatctctagtctgcttggccttagcaagtctgtcatatgaaaatgaagtcgggatcatcggaaattatcagcagaaaaaccagagagtaatatatgataccacacaagagaggctaggaattgtcggagaaaactgcagagtctgatgcctacaccataacttaatatccatttgtgtgctcccttcatatcatgaaagccaatcatctcttttggcaaagccaatttgaattctcccactaatcttataaataaatatatttctgtatcggtatagc

SEQ ID NO: 27862 - protein, 484 aa, Arabidopsis thaliana
  peptide (1)..(484): Ceres Seq. ID no. 12332450
  misc_feature (79)..(478): Pfam Name: Eukaryotic aspartyl protease Pfam Description: Eukaryotic aspartyl protease
  misc_feature (14)..(351): Homolog of NCBI NO: 38344196 NR Description: OSJNBa0064G10.12 [Oryza sativa (japonica
  misc_feature (11)..(482): Homolog of NCBI NO: 15238250 NR Description: nucleoid DNA-binding protein cnd41 - like protein
  misc_feature (11)..(482): Homolog of NCBI NO: 24417232 NR Description: unknown [Arabidopsis thaliana]
  misc_feature (66)..(482): Homolog of NCBI NO: 11358588 NR Description: nucleoid DNA-binding protein cnd41-like protein -
  misc_feature (6)..(482): Homolog of NCBI NO: 22326716 NR Description: nucleoid DNA-binding protein cnd41 - like protein
  misc_feature (7)..(482): Homolog of NCBI NO: 7489168 NR Description: nucleoid DNA-binding protein cnd41, chloroplast -
  misc_feature (27)..(482): Homolog of NCBI NO: 24430421 NR Description: 41 kD chloroplast nucleoid DNA binding protein
  misc_feature (57)..(484): Homolog of NCBI NO: 25406599 NR Description: probable aspartyl proteinase, 105611-106921
  misc_feature (1)..(484): Homolog of NCBI NO: 21595063 NR Description: putative aspartyl protease [Arabidopsis thaliana]
  misc_feature (1)..(484): Homolog of NCBI NO: 18412482 NR Description: putative aspartyl protease
MFKKATLNLSLAPLLLVFLFLLSCVVHGVDEKKILSVHNNIWSPKKSYEASTSCFSRSLGKGRESTTLEMKHRELCSGKTIDLGKKMRRALVLDNIRVQSLQLKIKAMTSSTTEQSVSETQIPLTSGIKLESLNYIVTVELGGKNMSLIVDTGSDLTWVQCQPCRSCYNQQGPLYDPSVSSSYKTVFCNSSTCQDLVAATSNSGPCGGNNGVVKTPCEYVVSYGDGSYTRGDLASESILLGDTKLENFVFGCGRNNKGLFGGSSGLMGLGRSSVSLVSQTLKTFNGVFSYCLPSLEDGASGSLSFGNDSSVYTNSTSVSYTPLVQNPQLRSFYILNLTGASIGGVELKSSSFGRGILIDSGTVITRLPPSIYKAVKIEFLKQFSGFPTAPGYSILDTCFNLTSYEDISIPIIKMIFQGNAELEVDVTGVFYFVKPDASLVCLALASLSYENEVGIIGNYQQKNQRVIYDTTQERLGIVGENCRV

SEQ ID NO: 27863 - protein, 415 aa, Arabidopsis thaliana
  peptide (1)..(415): Ceres Seq. ID no. 12332451
  misc_feature (10)..(409): Pfam Name: Eukaryotic aspartyl protease Pfam Description: Eukaryotic aspartyl protease
  misc_feature (1)..(282): Homolog of NCBI NO: 38344196 NR Description: OSJNBa0064G10.12 [Oryza sativa (japonica
  misc_feature (1)..(413): Homolog of NCBI NO: 15238250 NR Description: nucleoid DNA-binding protein cnd41 - like protein
  misc_feature (1)..(413): Homolog of NCBI NO: 24417232 NR Description: unknown [Arabidopsis thaliana]
  misc_feature (1)..(413): Homolog of NCBI NO: 11358588 NR Description: nucleoid DNA-binding protein cnd41-like protein -
  misc_feature (1)..(413): Homolog of NCBI NO: 22326716 NR Description: nucleoid DNA-binding protein cnd41 - like protein
  misc_feature (1)..(413): Homolog of NCBI NO: 7489168 NR Description: nucleoid DNA-binding protein cnd41, chloroplast -
  misc_feature (1)..(413): Homolog of NCBI NO: 24430421 NR Description: 41 kD chloroplast nucleoid DNA binding protein
  misc_feature (1)..(415): Homolog of NCBI NO: 25406599 NR Description: probable aspartyl proteinase, 105611-106921
  misc_feature (1)..(415): Homolog of NCBI NO: 21595063 NR Description: putative aspartyl protease [Arabidopsis thaliana]
  misc_feature (1)..(415): Homolog of NCBI NO: 18412482 NR Description: putative aspartyl protease
MKHRELCSGKTIDLGKKMRRALVLDNIRVQSLQLKIKAMTSSTTEQSVSETQIPLTSGIKLESLNYIVTVELGGKNMSLIVDTGSDLTWVQCQPCRSCYNQQGPLYDPSVSSSYKTVFCNSSTCQDLVAATSNSGPCGGNNGVVKTPCEYVVSYGDGSYTRGDLASESILLGDTKLENFVFGCGRNNKGLFGGSSGLMGLGRSSVSLVSQTLKTFNGVFSYCLPSLEDGASGSLSFGNDSSVYTNSTSVSYTPLVQNPQLRSFYILNLTGASIGGVELKSSSFGRGILIDSGTVITRLPPSIYKAVKIEFLKQFSGFPTAPGYSILDTCFNLTSYEDISIPIIKMIFQGNAELEVDVTGVFYFVKPDASLVCLALASLSYENEVGIIGNYQQKNQRVIYDTTQERLGIVGENCRV

SEQ ID NO: 27864 - protein, 398 aa, Arabidopsis thaliana
  peptide (1)..(398): Ceres Seq. ID no. 12332452
  misc_feature (1)..(392): Pfam Name: Eukaryotic aspartyl protease Pfam Description: Eukaryotic aspartyl protease
  misc_feature (1)..(265): Homolog of NCBI NO: 38344196 NR Description: OSJNBa0064G10.12 [Oryza sativa (japonica
  misc_feature (1)..(396): Homolog of NCBI NO: 15238250 NR Description: nucleoid DNA-binding protein cnd41 - like protein
  misc_feature (1)..(396): Homolog of NCBI NO: 24417232 NR Description: unknown [Arabidopsis thaliana]
  misc_feature (1)..(396): Homolog of NCBI NO: 11358588 NR Description: nucleoid DNA-binding protein cnd41-like protein -
  misc_feature (1)..(396): Homolog of NCBI NO: 22326716 NR Description: nucleoid DNA-binding protein cnd41 - like protein
  misc_feature (1)..(396): Homolog of NCBI NO: 7489168 NR Description: nucleoid DNA-binding protein cnd41, chloroplast -
  misc_feature (1)..(396): Homolog of NCBI NO: 24430421 NR Description: 41 kD chloroplast nucleoid DNA binding protein
  misc_feature (1)..(398): Homolog of NCBI NO: 25406599 NR Description: probable aspartyl proteinase, 105611-106921
  misc_feature (1)..(398): Homolog of NCBI NO: 21595063 NR Description: putative aspartyl protease [Arabidopsis thaliana]
  misc_feature (1)..(398): Homolog of NCBI NO: 18412482 NR Description: putative aspartyl protease
MRRALVLDNIRVQSLQLKIKAMTSSTTEQSVSETQIPLTSGIKLESLNYIVTVELGGKNMSLIVDTGSDLTWVQCQPCRSCYNQQGPLYDPSVSSSYKTVFCNSSTCQDLVAATSNSGPCGGNNGVVKTPCEYVVSYGDGSYTRGDLASESILLGDTKLENFVFGCGRNNKGLFGGSSGLMGLGRSSVSLVSQTLKTFNGVFSYCLPSLEDGASGSLSFGNDSSVYTNSTSVSYTPLVQNPQLRSFYILNLTGASIGGVELKSSSFGRGILIDSGTVITRLPPSIYKAVKIEFLKQFSGFPTAPGYSILDTCFNLTSYEDISIPIIKMIFQGNAELEVDVTGVFYFVKPDASLVCLALASLSYENEVGIIGNYQQKNQRVIYDTTQERLGIVGENCRV

SEQ ID NO: 27865 - DNA, 1451 bp, Arabidopsis thaliana
  misc_feature (1)..(1451): Ceres Seq. ID no. 12333516
  misc_feature: MA Experiment ID: 108585 Result: Up-regulated in Transcription
  misc_feature: MA Experiment 108585 PARAMETER Experiment Name: At_5mM_NaNP_cDNA_P Parameter: Timepoint (hr) Value: 6
  misc_feature: MA Experiment 108585 PARAMETER Experiment Name: At_5mM_NaNP_cDNA_P Parameter: Tissue Value: Aerial
  misc_feature: MA Experiment 108585 PARAMETER Experiment Name: At_5mM_NaNP_cDNA_P Parameter: Treatment Value: null
  misc_feature: MA Experiment ID: 108595 Result: Down-regulated in Transcription
  misc_feature: MA Experiment 108595 PARAMETER Experiment Name: At_Ler-pi_Ovule_cDNA_P Parameter: Plant Line Value: null
  misc_feature: MA Experiment ID: 20000090 Result: Up-regulated in Transcription
  misc_feature: MA Experiment ID: 20000182 Result: Up-regulated in Transcription
  misc_feature: MA Experiment 20000182 PARAMETER Experiment Name: At_2mM_SA_P Parameter: Age (day) Value: 14
  misc_feature: MA Experiment 20000182 PARAMETER Experiment Name: At_2mM_SA_P Parameter: Organism Value: A. thaliana
  misc_feature: MA Experiment 20000182 PARAMETER Experiment Name: At_2mM_SA_P Parameter: Plant Line Value: WS
  misc_feature: MA Experiment 20000182 PARAMETER Experiment Name: At_2mM_SA_P Parameter: Timepoint (hr) Value: 6
  misc_feature: MA Experiment 20000182 PARAMETER Experiment Name: At_2mM_SA_P Parameter: Tissue Value: Aerial
  misc_feature: MA Experiment 20000182 PARAMETER Experiment Name: At_2mM_SA_P Parameter: Treatment Value: 2mM SA vs. No Treatment
accgttcaataaaaaaaaaagggtaaaggtagagactttataacgaaatgtcaacacccatcttctcgattcctcaatttctctagggttcttcgttttcgttgttgtgaggaattttgctccgatgtcggcggagagttgtttcggaagctcgggtgatcaaagcagcagcaaaggagtggctactcatggtggtagctatgttcagtataatgtctatggcaatctcttcgaagtttctagaaagtatgttcctcctcttcgtcctatcggtagaggcgcttatggaattgtctgtgctgctacaaactcagagactggagaggaggtagctatcaagaagattggtaatgcttttgacaatattatcgatgctaaaaggactttgagagagattaagcttctcaagcatatggatcatgaaaatgtgattgctgtaaaggatataataaaaccaccgcagagagagaacttcaatgatgtttacattgtttatgagcttatggacactgatctccaccaaattattcgctctaaccaacccttaactgatgatcattgtcggttttttctgtatcagttgttgcgtgggctcaaatatgttcattcagctaatgtattgcatcgagatttgaaacctagcaatttgctcctgaatgcaaattgtgatctaaagcttggggatttcgggcttgcgaggaccaaatccgagactgactttatgactgaatatgttgttacacgttggtatcgagctccagagctgctacttaattgctctgaatacacagcagcaattgatatttggtctgtcggttgtatactcggtgaaacaatgacacgagagcccttgtttcccggtaaagattatgttcatcagcttagactcatcactgagcttataggatctcctgatgactcaagcttgggattcttaagaagtgacaatgcaagaagatacgttagacagcttccacagtaccctagacagaactttgctgctagattcccaaacatgtcggctggtgcagtcgatttgctggagaaaatgcttgtttttgatccaagcagacgcatcacagttgatgaggcgttgtgccacccatatttggcgccgctgcatgatatcaacgaagaaccggtatgtgtgaggccgttcaattttgatttcgagcaacctactttgacagaagagaacattaaggagcttatataccgtgaaacagtcaagttcaatcctcaagactcagtgtgagagaaagagagagagatatatatccttaaaaggaaactcatcaaaatgctatgttttgttttgctctgcttttgttatcaaatctctgataagtttgataatatgtctgtaatttgaataacatcctaaaaaattggaaaaaaagaaaagaacaacctttgagctgtgttttgcaatagagtgtatttaaatttcc

SEQ ID NO: 27866 - protein, 376 aa, Arabidopsis thaliana
  peptide (1)..(376): Ceres Seq. ID no. 12333517
  misc_feature (43)..(329): Pfam Name: Protein kinase domain Pfam Description: Protein kinase domain
  misc_feature (1)..(372): Homolog of NCBI NO: 21165527 NR Description: mitogen-activated protein kinase [Solanum
  misc_feature (1)..(373): Homolog of NCBI NO: 27312014 NR Description: mitogen-activated protein kinase [Malus
  misc_feature (13)..(376): Homolog of NCBI NO: 2499613 NR Description: MITOGEN-ACTIVATED PROTEIN KINASE HOMOLOG MMK2
  misc_feature (13)..(376): Homolog of NCBI NO: 2129855 NR Description: mitogen-activated protein kinase MMK2 (EC
  misc_feature (4)..(372): Homolog of NCBI NO: 25052804 NR Description: mitogen-activated protein kinase 4 [Petroselinum
  misc_feature (1)..(372): Homolog of NCBI NO: 18378855 NR Description: MAP kinase, putative; protein id: At1g01560.1
  misc_feature (1)..(40): Homolog of NCBI NO: 2191146 NR Description: MAP Kinase [Arabidopsis thaliana]
  misc_feature (59)..(376): Homolog of NCBI NO: 2191146 NR Description: MAP Kinase [Arabidopsis thaliana]
  misc_feature (1)..(376): Homolog of NCBI NO: 2129645 NR Description: mitogen-activated protein kinase 4 (EC 2.7.1.-) -
  misc_feature (1)..(376): Homolog of NCBI NO: 15234152 NR Description: MAP kinase 4 (MPK4)
MSAESCFGSSGDQSSSKGVATHGGSYVQYNVYGNLFEVSRKYVPPLRPIGRGAYGIVCAATNSETGEEVAIKKIGNAFDNIIDAKRTLREIKLLKHMDHENVIAVKDIIKPPQRENFNDVYIVYELMDTDLHQIIRSNQPLTDDHCRFFLYQLLRGLKYVHSANVLHRDLKPSNLLLNANCDLKLGDFGLARTKSETDFMTEYVVTRWYRAPELLLNCSEYTAAIDIWSVGCILGETMTREPLFPGKDYVHQLRLITELIGSPDDSSLGFLRSDNARRYVRQLPQYPRQNFAARFPNMSAGAVDLLEKMLVFDPSRRITVDEALCHPYLAPLHDINEEPVCVRPFNFDFEQPTLTEENIKELIYRETVKFNPQDSV

SEQ ID NO: 27867 - protein, 280 aa, Arabidopsis thaliana
  peptide (1)..(280): Ceres Seq. ID no. 12333518
  misc_feature (1)..(233): Pfam Name: Protein kinase domain Pfam Description: Protein kinase domain
  misc_feature (1)..(277): Homolog of NCBI NO: 585454 NR Description: MITOGEN-ACTIVATED PROTEIN KINASE HOMOLOG D5
  misc_feature (1)..(276): Homolog of NCBI NO: 21165527 NR Description: mitogen-activated protein kinase [Solanum
  misc_feature (1)..(277): Homolog of NCBI NO: 27312014 NR Description: mitogen-activated protein kinase [Malus
  misc_feature (1)..(280): Homolog of NCBI NO: 2499613 NR Description: MITOGEN-ACTIVATED PROTEIN KINASE HOMOLOG MMK2
  misc_feature (1)..(280): Homolog of NCBI NO: 2129855 NR Description: mitogen-activated protein kinase MMK2 (EC
  misc_feature (1)..(276): Homolog of NCBI NO: 25052804 NR Description: mitogen-activated protein kinase 4 [Petroselinum
  misc_feature (1)..(276): Homolog of NCBI NO: 18378855 NR Description: MAP kinase, putative; protein id: At1g01560.1
  misc_feature (1)..(280): Homolog of NCBI NO: 2191146 NR Description: MAP Kinase [Arabidopsis thaliana]
  misc_feature (1)..(280): Homolog of NCBI NO: 2129645 NR Description: mitogen-activated protein kinase 4 (EC 2.7.1.-) -
  misc_feature (1)..(280): Homolog of NCBI NO: 15234152 NR Description: MAP kinase 4 (MPK4)
MDHENVIAVKDIIKPPQRENFNDVYIVYELMDTDLHQIIRSNQPLTDDHCRFFLYQLLRGLKYVHSANVLHRDLKPSNLLLNANCDLKLGDFGLARTKSETDFMTEYVVTRWYRAPELLLNCSEYTAAIDIWSVGCILGETMTREPLFPGKDYVHQLRLITELIGSPDDSSLGFLRSDNARRYVRQLPQYPRQNFAARFPNMSAGAVDLLEKMLVFDPSRRITVDEALCHPYLAPLHDINEEPVCVRPFNFDFEQPTLTEENIKELIYRETVKFNPQDSV

SEQ ID NO: 27868 - protein, 250 aa, Arabidopsis thaliana
  peptide (1)..(250): Ceres Seq. ID no. 12333519
  misc_feature (1)..(203): Pfam Name: Protein kinase domain Pfam Description: Protein kinase domain
  misc_feature (1)..(247): Homolog of NCBI NO: 585454 NR Description: MITOGEN-ACTIVATED PROTEIN KINASE HOMOLOG D5
  misc_feature (1)..(246): Homolog of NCBI NO: 21165527 NR Description: mitogen-activated protein kinase [Solanum
  misc_feature (1)..(247): Homolog of NCBI NO: 27312014 NR Description: mitogen-activated protein kinase [Malus
  misc_feature (1)..(250): Homolog of NCBI NO: 2499613 NR Description: MITOGEN-ACTIVATED PROTEIN KINASE HOMOLOG MMK2
  misc_feature (1)..(250): Homolog of NCBI NO: 2129855 NR Description: mitogen-activated protein kinase MMK2 (EC
  misc_feature (1)..(246): Homolog of NCBI NO: 25052804 NR Description: mitogen-activated protein kinase 4 [Petroselinum
  misc_feature (1)..(246): Homolog of NCBI NO: 18378855 NR Description: MAP kinase, putative; protein id: At1g01560.1
  misc_feature (1)..(250): Homolog of NCBI NO: 2191146 NR Description: MAP Kinase [Arabidopsis thaliana]
  misc_feature (1)..(250): Homolog of NCBI NO: 2129645 NR Description: mitogen-activated protein kinase 4 (EC 2.7.1.-) -
  misc_feature (1)..(250): Homolog of NCBI NO: 15234152 NR Description: MAP kinase 4 (MPK4)
MDTDLHQIIRSNQPLTDDHCRFFLYQLLRGLKYVHSANVLHRDLKPSNLLLNANCDLKLGDFGLARTKSETDFMTEYVVTRWYRAPELLLNCSEYTAAIDIWSVGCILGETMTREPLFPGKDYVHQLRLITELIGSPDDSSLGFLRSDNARRYVRQLPQYPRQNFAARFPNMSAGAVDLLEKMLVFDPSRRITVDEALCHPYLAPLHDINEEPVCVRPFNFDFEQPTLTEENIKELIYRETVKFNPQDSV

SEQ ID NO: 27869 - DNA, 1119 bp, Arabidopsis thaliana
  misc_feature (1)..(1119): Ceres Seq. ID no. 12678920
  misc_feature: MA Experiment ID: 108434 Result: Down-regulated in Transcription
  misc_feature: MA Experiment 108434 PARAMETER Experiment Name: At_Root_Tips_cDNA_P Parameter: Tissue Value: Root Tips
  misc_feature: MA Experiment ID: 108435 Result: Down-regulated in Transcription
  misc_feature: MA Experiment 108435 PARAMETER Experiment Name: At_stm_Mutants_cDNA_P Parameter: Plant Line Value: wt Landsburg vs stm
  misc_feature: MA Experiment 108435 PARAMETER Experiment Name: At_stm_Mutants_cDNA_P Parameter: Tissue Value: Shoot Apical Meristem Region
  misc_feature: MA Experiment ID: 108461 Result: Down-regulated in Transcription
  misc_feature: MA Experiment 108461 PARAMETER Experiment Name: At_Germinating_Seeds_cDNA_P Parameter: Age (day) Value: 1 vs. 0
  misc_feature: MA Experiment 108461 PARAMETER Experiment Name: At_Germinating_Seeds_cDNA_P Parameter: Tissue Value: Germinating Seeds
  misc_feature: MA Experiment ID: 108463 Result: Up-regulated in Transcription
  misc_feature: MA Experiment 108463 PARAMETER Experiment Name: At_Germinating_Seeds_cDNA_P Parameter: Age (day) Value: 3 vs. 0
  misc_feature: MA Experiment 108463 PARAMETER Experiment Name: At_Germinating_Seeds_cDNA_P Parameter: Tissue Value: Germinating Seeds
  misc_feature: MA Experiment ID: 108464 Result: Up-regulated in Transcription
  misc_feature: MA Experiment 108464 PARAMETER Experiment Name: At_Germinating_Seeds_cDNA_P Parameter: Age (day) Value: 4 vs. 0
  misc_feature: MA Experiment 108464 PARAMETER Experiment Name: At_Germinating_Seeds_cDNA_P Parameter: Tissue Value: Germinating Seeds
  misc_feature: MA Experiment ID: 108469 Result: Up-regulated in Transcription
  misc_feature: MA Experiment ID: 108561 Result: Up-regulated in Transcription
  misc_feature: MA Experiment 108561 PARAMETER Experiment Name: At_100uM_ABA_cDNA_P Parameter: Timepoint (hr) Value: 6
  misc_feature: MA Experiment 108561 PARAMETER Experiment Name: At_100uM_ABA_cDNA_P Parameter: Tissue Value: Aerial
  misc_feature: MA Experiment 108561 PARAMETER Experiment Name: At_100uM_ABA_cDNA_P Parameter: Treatment Value: 100uM ABA vs. No Treatment
  misc_feature: MA Experiment ID: 108572 Result: Up-regulated in Transcription
  misc_feature: MA Experiment 108572 PARAMETER Experiment Name: At_Drought_cDNA_P Parameter: Timepoint (hr) Value: 1
  misc_feature: MA Experiment 108572 PARAMETER Experiment Name: At_Drought_cDNA_P Parameter: Tissue Value: Aerial
  misc_feature: MA Experiment 108572 PARAMETER Experiment Name: At_Drought_cDNA_P Parameter: Treatment Value: Drought vs. No Drought
  misc_feature: MA Experiment ID: 108573 Result: Up-regulated in Transcription
  misc_feature: MA Experiment 108573 PARAMETER Experiment Name: At_Drought_cDNA_P Parameter: Timepoint (hr) Value: 6
  misc_feature: MA Experiment 108573 PARAMETER Experiment Name: At_Drought_cDNA_P Parameter: Tissue Value: Aerial
  misc_feature: MA Experiment 108573 PARAMETER Experiment Name: At_Drought_cDNA_P Parameter: Treatment Value: Drought vs. No Drought
  misc_feature: MA Experiment ID: 108605 Result: Up-regulated in Transcription
  misc_feature: MA Experiment 108605 PARAMETER Experiment Name: At_100uM_ABA_cDNA_P Parameter: Timepoint (hr) Value: 6
  misc_feature: MA Experiment 108605 PARAMETER Experiment Name: At_100uM_ABA_cDNA_P Parameter: Tissue Value: Aerial
  misc_feature: MA Experiment 108605 PARAMETER Experiment Name: At_100uM_ABA_cDNA_P Parameter: Treatment Value: 100uM ABA vs. No Treatment
  misc_feature: MA Experiment ID: 108607 Result: Up-regulated in Transcription
  misc_feature: MA Experiment 108607 PARAMETER Experiment Name: At_100uM_ABA_cDNA_P Parameter: Timepoint (hr) Value: 4
  misc_feature: MA Experiment 108607 PARAMETER Experiment Name: At_100uM_ABA_cDNA_P Parameter: Tissue Value: Aerial
  misc_feature: MA Experiment 108607 PARAMETER Experiment Name: At_100uM_ABA_cDNA_P Parameter: Treatment Value: 100uM ABA vs. No Treatment
  misc_feature: MA Experiment ID: 108609 Result: Up-regulated in Transcription
  misc_feature: MA Experiment 108609 PARAMETER Experiment Name: At_100uM_ABA_cDNA_P Parameter: Timepoint (hr) Value: 24
  misc_feature: MA Experiment 108609 PARAMETER Experiment Name: At_100uM_ABA_cDNA_P Parameter: Tissue Value: Aerial
  misc_feature: MA Experiment 108609 PARAMETER Experiment Name: At_100uM_ABA_cDNA_P Parameter: Treatment Value: 100uM ABA vs. No Treatment
  misc_feature: MA Experiment ID: 108668 Result: Up-regulated in Transcription
  misc_feature: MA Experiment 108668 PARAMETER Experiment Name: At_2mM_SA_cDNA_P Parameter: Plant Line Value: WS
  misc_feature: MA Experiment 108668 PARAMETER Experiment Name: At_2mM_SA_cDNA_P Parameter: Timepoint (hr) Value: 6
  misc_feature: MA Experiment 108668 PARAMETER Experiment Name: At_2mM_SA_cDNA_P Parameter: Treatment Value: 2mM SA vs. No Treatment
  misc_feature: MA Experiment ID: 20000069 Result: Up-regulated in Transcription
  misc_feature: MA Experiment 20000069 PARAMETER Experiment Name: At_100uM_ABA_Mutants_cDNA_P Parameter: Plant Line Value: CS23
  misc_feature: MA Experiment 20000069 PARAMETER Experiment Name: At_100uM_ABA_Mutants_cDNA_P Parameter: Timepoint (hr) Value: 6
  misc_feature: MA Experiment 20000069 PARAMETER Experiment Name: At_100uM_ABA_Mutants_cDNA_P Parameter: Tissue Value: Aerial
  misc_feature: MA Experiment 20000069 PARAMETER Experiment Name: At_100uM_ABA_Mutants_cDNA_P Parameter: Treatment Value: 100uM ABA vs. No Treatment
  misc_feature: MA Experiment ID: 20000070 Result: Up-regulated in Transcription
  misc_feature: MA Experiment 20000070 PARAMETER Experiment Name: At_100uM_ABA_Mutants_cDNA_P Parameter: Plant Line Value: CS24
  misc_feature: MA Experiment 20000070 PARAMETER Experiment Name: At_100uM_ABA_Mutants_cDNA_P Parameter: Timepoint (hr) Value: 6
  misc_feature: MA Experiment 20000070 PARAMETER Experiment Name: At_100uM_ABA_Mutants_cDNA_P Parameter: Tissue Value: Aerial
  misc_feature: MA Experiment 20000070 PARAMETER Experiment Name: At_100uM_ABA_Mutants_cDNA_P Parameter: Treatment Value: 100uM ABA vs. No Treatment
  misc_feature: MA Experiment ID: 20000071 Result: Up-regulated in Transcription
  misc_feature: MA Experiment 20000071 PARAMETER Experiment Name: At_100uM_ABA_Mutants_cDNA_P Parameter: Plant Line Value: CS8104
  misc_feature: MA Experiment 20000071 PARAMETER Experiment Name: At_100uM_ABA_Mutants_cDNA_P Parameter: Timepoint (hr) Value: 6
  misc_feature: MA Experiment 20000071 PARAMETER Experiment Name: At_100uM_ABA_Mutants_cDNA_P Parameter: Tissue Value: Aerial
  misc_feature: MA Experiment 20000071 PARAMETER Experiment Name: At_100uM_ABA_Mutants_cDNA_P Parameter: Treatment Value: 100uM ABA vs. No Treatment
  misc_feature: MA Experiment ID: 20000072 Result: Up-regulated in Transcription
  misc_feature: MA Experiment 20000072 PARAMETER Experiment Name: At_100uM_ABA_Mutants_cDNA_P Parameter: Plant Line Value: CS8105
  misc_feature: MA Experiment 20000072 PARAMETER Experiment Name: At_100uM_ABA_Mutants_cDNA_P Parameter: Timepoint (hr) Value: 6
  misc_feature: MA Experiment 20000072 PARAMETER Experiment Name: At_100uM_ABA_Mutants_cDNA_P Parameter: Tissue Value: Aerial
  misc_feature: MA Experiment 20000072 PARAMETER Experiment Name: At_100uM_ABA_Mutants_cDNA_P Parameter: Treatment Value: 100uM ABA vs. No Treatment
  misc_feature: MA Experiment ID: 20000086 Result: Up-regulated in Transcription
  misc_feature: MA Experiment 20000086 PARAMETER Experiment Name: At_100uM_ABA_Mutants_cDNA_P Parameter: Plant Line Value: CS22
  misc_feature: MA Experiment 20000086 PARAMETER Experiment Name: At_100uM_ABA_Mutants_cDNA_P Parameter: Timepoint (hr) Value: 6
  misc_feature: MA Experiment 20000086 PARAMETER Experiment Name: At_100uM_ABA_Mutants_cDNA_P Parameter: Tissue Value: Aerial
  misc_feature: MA Experiment 20000086 PARAMETER Experiment Name: At_100uM_ABA_Mutants_cDNA_P Parameter: Treatment Value: 100uM ABA vs. No Treatment
  misc_feature: MA Experiment ID: 20000087 Result: Up-regulated in Transcription
  misc_feature: MA Experiment 20000087 PARAMETER Experiment Name: At_100uM_ABA_Mutants_cDNA_P Parameter: Plant Line Value: WS
  misc_feature: MA Experiment 20000087 PARAMETER Experiment Name: At_100uM_ABA_Mutants_cDNA_P Parameter: Timepoint (hr) Value: 6
  misc_feature: MA Experiment 20000087 PARAMETER Experiment Name: At_100uM_ABA_Mutants_cDNA_P Parameter: Tissue Value: Aerial
  misc_feature: MA Experiment 20000087 PARAMETER Experiment Name: At_100uM_ABA_Mutants_cDNA_P Parameter: Treatment Value: 100uM ABA vs. No Treatment
  misc_feature: MA Experiment ID: 20000088 Result: Up-regulated in Transcription
  misc_feature: MA Experiment 20000088 PARAMETER Experiment Name: At_100uM_ABA_Mutants_cDNA_P Parameter: Plant Line Value: Landsberg
  misc_feature: MA Experiment 20000088 PARAMETER Experiment Name: At_100uM_ABA_Mutants_cDNA_P Parameter: Timepoint (hr) Value: 6
  misc_feature: MA Experiment 20000088 PARAMETER Experiment Name: At_100uM_ABA_Mutants_cDNA_P Parameter: Tissue Value: Aerial
  misc_feature: MA Experiment 20000088 PARAMETER Experiment Name: At_100uM_ABA_Mutants_cDNA_P Parameter: Treatment Value: 100uM ABA vs. No Treatment
  misc_feature: MA Experiment ID: 20000117 Result: Up-regulated in Transcription
  misc_feature: MA Experiment 20000117 PARAMETER Experiment Name: At_100uM_ABA_Mutants_cDNA_P Parameter: Plant Line Value: Columbia
  misc_feature: MA Experiment 20000117 PARAMETER Experiment Name: At_100uM_ABA_Mutants_cDNA_P Parameter: Timepoint (hr) Value: 6
  misc_feature: MA Experiment 20000117 PARAMETER Experiment Name: At_100uM_ABA_Mutants_cDNA_P Parameter: Tissue Value: Aerial
  misc_feature: MA Experiment 20000117 PARAMETER Experiment Name: At_100uM_ABA_Mutants_cDNA_P Parameter: Treatment Value: 100uM ABA vs. No Treatment
  misc_feature: MA Experiment ID: 20000169 Result: Up-regulated in Transcription
  misc_feature: MA Experiment 20000169 PARAMETER Experiment Name: At_100uM_ABA_P Parameter: Age (day) Value: 14
  misc_feature: MA Experiment 20000169 PARAMETER Experiment Name: At_100uM_ABA_P Parameter: Organism Value: A. thaliana
  misc_feature: MA Experiment 20000169 PARAMETER Experiment Name: At_100uM_ABA_P Parameter: Plant Line Value: WS
  misc_feature: MA Experiment 20000169 PARAMETER Experiment Name: At_100uM_ABA_P Parameter: Timepoint (hr) Value: 6
  misc_feature: MA Experiment 20000169 PARAMETER Experiment Name: At_100uM_ABA_P Parameter: Tissue Value: Aerial
  misc_feature: MA Experiment 20000169 PARAMETER Experiment Name: At_100uM_ABA_P Parameter: Treatment Value: 100uM ABA vs. No Treatment
  misc_feature: MA Experiment ID: 20000182 Result: Up-regulated in Transcription
  misc_feature: MA Experiment 20000182 PARAMETER Experiment Name: At_2mM_SA_P Parameter: Age (day) Value: 14
  misc_feature: MA Experiment 20000182 PARAMETER Experiment Name: At_2mM_SA_P Parameter: Organism Value: A. thaliana
  misc_feature: MA Experiment 20000182 PARAMETER Experiment Name: At_2mM_SA_P Parameter: Plant Line Value: WS
  misc_feature: MA Experiment 20000182 PARAMETER Experiment Name: At_2mM_SA_P Parameter: Timepoint (hr) Value: 6
  misc_feature: MA Experiment 20000182 PARAMETER Experiment Name: At_2mM_SA_P Parameter: Tissue Value: Aerial
  misc_feature: MA Experiment 20000182 PARAMETER Experiment Name: At_2mM_SA_P Parameter: Treatment Value: 2mM SA vs. No Treatment
  misc_feature: MA Experiment ID: 20000268 Result: Up-regulated in Transcription
  misc_feature: MA Experiment 20000268 PARAMETER Experiment Name: At_100mM_NaCl__P Parameter: Age (day) Value: 14
  misc_feature: MA Experiment 20000268 PARAMETER Experiment Name: At_100mM_NaCl__P Parameter: Organism Value: A. thaliana
  misc_feature: MA Experiment 20000268 PARAMETER Experiment Name: At_100mM_NaCl__P Parameter: Plant Line Value: WS
  misc_feature: MA Experiment 20000268 PARAMETER Experiment Name: At_100mM_NaCl__P Parameter: Timepoint (hr) Value: 6
  misc_feature: MA Experiment 20000268 PARAMETER Experiment Name: At_100mM_NaCl__P Parameter: Tissue Value: Whole Plant
  misc_feature: MA Experiment 20000268 PARAMETER Experiment Name: At_100mM_NaCl__P Parameter: Treatment Value: 100mM NaCl vs. No Treatment
  misc_feature: MA Experiment ID: 20000453 Result: Up-regulated in Transcription
  misc_feature: MA Experiment 20000453 PARAMETER Experiment Name: At_100uM_ABA_P Parameter: Age (day) Value: 15
  misc_feature: MA Experiment 20000453 PARAMETER Experiment Name: At_100uM_ABA_P Parameter: Organism Value: A. thaliana
  misc_feature: MA Experiment 20000453 PARAMETER Experiment Name: At_100uM_ABA_P Parameter: Plant Line Value: WS
  misc_feature: MA Experiment 20000453 PARAMETER Experiment Name: At_100uM_ABA_P Parameter: Timepoint (hr) Value: 24
  misc_feature: MA Experiment 20000453 PARAMETER Experiment Name: At_100uM_ABA_P Parameter: Tissue Value: Aerial
  misc_feature: MA Experiment 20000453 PARAMETER Experiment Name: At_100uM_ABA_P Parameter: Treatment Value: 100uM ABA vs. No Treatment
  misc_feature: MA Experiment ID: 20001248 Result: Down-regulated in Transcription
  misc_feature: MA Experiment 20001248 PARAMETER Experiment Name: At_Far-red-induction_P Parameter: Age (day) Value: 7
  misc_feature: MA Experiment 20001248 PARAMETER Experiment Name: At_Far-red-induction_P Parameter: Light Value: Far-red vs. White
  misc_feature: MA Experiment 20001248 PARAMETER Experiment Name: At_Far-red-induction_P Parameter: Organism Value: A. thaliana
  misc_feature: MA Experiment 20001248 PARAMETER Experiment Name: At_Far-red-induction_P Parameter: Plant Line Value: Columbia
  misc_feature: MA Experiment 20001248 PARAMETER Experiment Name: At_Far-red-induction_P Parameter: Timepoint (hr) Value: 4
  misc_feature: MA Experiment 20001248 PARAMETER Experiment Name: At_Far-red-induction_P Parameter: Tissue Value: Whole Plant
  misc_feature: MA Experiment ID: 20001560 Result: Up-regulated in Transcription
  misc_feature: MA Experiment 20001560 PARAMETER Experiment Name: At_Drought_Soil_Dry_P Parameter: Age (day) Value: 28
  misc_feature: MA Experiment 20001560 PARAMETER Experiment Name: At_Drought_Soil_Dry_P Parameter: Organism Value: A. thaliana
  misc_feature: MA Experiment 20001560 PARAMETER Experiment Name: At_Drought_Soil_Dry_P Parameter: Plant Line Value: WS
  misc_feature: MA Experiment 20001560 PARAMETER Experiment Name: At_Drought_Soil_Dry_P Parameter: Post Timepoint (hr) Value: None
  misc_feature: MA Experiment 20001560 PARAMETER Experiment Name: At_Drought_Soil_Dry_P Parameter: Post-Treatment Value: None
  misc_feature: MA Experiment 20001560 PARAMETER Experiment Name: At_Drought_Soil_Dry_P Parameter: Timepoint (day) Value: 14
  misc_feature: MA Experiment 20001560 PARAMETER Experiment Name: At_Drought_Soil_Dry_P Parameter: Treatment Value: Drought vs. No Drought
  misc_feature: MA Experiment ID: 20001904 Result: Up-regulated in Transcription
  misc_feature: MA Experiment 20001904 PARAMETER Experiment Name: At_Drought_Reproduction_P Parameter: Age (day) Value: 37
  misc_feature: MA Experiment 20001904 PARAMETER Experiment Name: At_Drought_Reproduction_P Parameter: Organism Value: A. thaliana
  misc_feature: MA Experiment 20001904 PARAMETER Experiment Name: At_Drought_Reproduction_P Parameter: Plant Line Value: WS
  misc_feature: MA Experiment 20001904 PARAMETER Experiment Name: At_Drought_Reproduction_P Parameter: Timepoint (day) Value: 7
  misc_feature: MA Experiment 20001904 PARAMETER Experiment Name: At_Drought_Reproduction_P Parameter: Tissue Value: Rosettes
  misc_feature: MA Experiment 20001904 PARAMETER Experiment Name: At_Drought_Reproduction_P Parameter: Treatment Value: Drought vs. No Drought
attttatgcggaagaaacaaagtgctatttctccgagttacaattatccagaaaacttttaagagatggcagctccgattcgattctttgaactgaacactggtgccaagttaccttgcgtcggtctaggaacctacgcaatggtcgcgacagcgatcgaacaggcgattaagattggttacaggcatatcgactgtgcttcgatttacggaaacgagaaagagattggtggtgtgttgaagaagctgataggtgatggttttgtgaagcgtgaggagttatttatcacttccaaactctggagcaatgatcatttacctgaagatgtgcctaaggcactggaaaaaacgttacaggacttacagattgactatgttgatttatatctgatacattggcctgcgagcttgaagaaggaatcactaatgccaacacctgagatgctcacaaaacctgatataactagcacatggaaagcaatggaagctctctatgactctggaaaagctcgagcaatcggtgtaagcaatttctcgtcgaagaagcttacagatcttcttaacgtggcacgtgtaaccccggctgttaaccaagttgaatgtcacccagtttggcagcaacaaggtcttcatgagttatgcaaatccaaaggagttcacttatctggttactctcctttgggttcccaaagtaagggagaagtcaggctaaaggttcttcaaaacccgattgttaccgaggttgctgagaaacttggaaagaccaccgcccaagtggctctccgttggggactccaaactggtcatagtgttctaccaaagagctcgagcggggctcggctcaaggagaatcttgatgtttttgactggtccataccggaagatctgtttaccaagttctctaacattccccaggagaagttttgccgagctactgagtttgcgcatgagacacacggcttctataagaccattgaggaattgtgggacggtgaaatttgagataatgtccctcctttctacttgtttaaccataaaccattaaggacattgaaataaatatgttatctttttatatttaatctttctatgagaaaacactaaacacatgcttgggatt

SEQ ID NO: 27870 - protein, 311 aa, Arabidopsis thaliana; identical to SEQ ID NO: 27524
  peptide (1)..(311): Ceres Seq. ID no. 12678921
  misc_feature (8)..(284): Homolog of NCBI NO: 40740252 NR Description: hypothetical protein AN3971.2 [Aspergillus
  misc_feature (1)..(311): Homolog of NCBI NO: 13160399 NR Description: aldose reductase [Digitalis purpurea]
  misc_feature (1)..(311): Homolog of NCBI NO: 13160397 NR Description: aldose reductase [Digitalis purpurea]
  misc_feature (1)..(311): Homolog of NCBI NO: 15232354 NR Description: aldo/keto reductase family
  misc_feature (12)..(311): Homolog of NCBI NO: 28393400 NR Description: putative aldo/keto reductase [Arabidopsis
  misc_feature (1)..(311): Homolog of NCBI NO: 30687247 NR Description: aldo/keto reductase family [Arabidopsis thaliana]
  misc_feature (1)..(311): Homolog of NCBI NO: 30687261 NR Description: aldo/keto reductase family [Arabidopsis thaliana]
  misc_feature (1)..(311): Homolog of NCBI NO: 7431112 NR Description: abscisic acid activated protein - alfalfa
  misc_feature (1)..(283): Homolog of NCBI NO: 7431106 NR Description: probable alcohol dehydrogenase [imported] -
  misc_feature (1)..(311): Homolog of NCBI NO: 18404526 NR Description: aldo/keto reductase family

SEQ ID NO: 27871 - protein, 286 aa, Arabidopsis thaliana; identical to SEQ ID NO: 27525
  peptide (1)..(286): Ceres Seq. ID no. 12678922
  misc_feature (1)..(259): Homolog of NCBI NO: 40740252 NR Description: hypothetical protein AN3971.2 [Aspergillus
  misc_feature (1)..(286): Homolog of NCBI NO: 13160399 NR Description: aldose reductase [Digitalis purpurea]
  misc_feature (1)..(286): Homolog of NCBI NO: 13160397 NR Description: aldose reductase [Digitalis purpurea]
  misc_feature (1)..(286): Homolog of NCBI NO: 15232354 NR Description: aldo/keto reductase family
  misc_feature (1)..(286): Homolog of NCBI NO: 28393400 NR Description: putative aldo/keto reductase [Arabidopsis
  misc_feature (1)..(286): Homolog of NCBI NO: 30687247 NR Description: aldo/keto reductase family [Arabidopsis thaliana]
  misc_feature (1)..(286): Homolog of NCBI NO: 30687261 NR Description: aldo/keto reductase family [Arabidopsis thaliana]
  misc_feature (1)..(286): Homolog of NCBI NO: 7431112 NR Description: abscisic acid activated protein - alfalfa
  misc_feature (1)..(258): Homolog of NCBI NO: 7431106 NR Description: probable alcohol dehydrogenase [imported] -
  misc_feature (1)..(286): Homolog of NCBI NO: 18404526 NR Description: aldo/keto reductase family

SEQ ID NO: 27872 - protein, 191 aa, Arabidopsis thaliana; identical to SEQ ID NO: 27526
  peptide (1)..(191): Ceres Seq. ID no. 12678923
  misc_feature (1)..(164): Homolog of NCBI NO: 40740252 NR Description: hypothetical protein AN3971.2 [Aspergillus
  misc_feature (1)..(191): Homolog of NCBI NO: 13160399 NR Description: aldose reductase [Digitalis purpurea]
  misc_feature (1)..(191): Homolog of NCBI NO: 13160397 NR Description: aldose reductase [Digitalis purpurea]
  misc_feature (1)..(191): Homolog of NCBI NO: 15232354 NR Description: aldo/keto reductase family
  misc_feature (1)..(191): Homolog of NCBI NO: 28393400 NR Description: putative aldo/keto reductase [Arabidopsis
  misc_feature (1)..(191): Homolog of NCBI NO: 30687247 NR Description: aldo/keto reductase family [Arabidopsis thaliana]
  misc_feature (1)..(191): Homolog of NCBI NO: 30687261 NR Description: aldo/keto reductase family [Arabidopsis thaliana]
  misc_feature (1)..(191): Homolog of NCBI NO: 7431112 NR Description: abscisic acid activated protein - alfalfa
  misc_feature (1)..(163): Homolog of NCBI NO: 7431106 NR Description: probable alcohol dehydrogenase [imported] -
  misc_feature (1)..(191): Homolog of NCBI NO: 18404526 NR Description: aldo/keto reductase family

SEQ ID NO: 27873 - DNA, 918 bp, Arabidopsis thaliana
  misc_feature (1)..(918): Ceres Seq. ID no. 13653925
  misc_feature: MA Experiment ID: 108462 Result: Up-regulated in Transcription
  misc_feature: MA Experiment 108462 PARAMETER Experiment Name: At_Germinating_Seeds_cDNA_P Parameter: Age (day) Value: 2 vs. 0
  misc_feature: MA Experiment 108462 PARAMETER Experiment Name: At_Germinating_Seeds_cDNA_P Parameter: Tissue Value: Germinating Seeds
  misc_feature: MA Experiment ID: 108463 Result: Up-regulated in Transcription
  misc_feature: MA Experiment 108463 PARAMETER Experiment Name: At_Germinating_Seeds_cDNA_P Parameter: Age (day) Value: 3 vs. 0
  misc_feature: MA Experiment 108463 PARAMETER Experiment Name: At_Germinating_Seeds_cDNA_P Parameter: Tissue Value: Germinating Seeds
  misc_feature: MA Experiment ID: 108609 Result: Down-regulated in Transcription
  misc_feature: MA Experiment 108609 PARAMETER Experiment Name: At_100uM_ABA_cDNA_P Parameter: Timepoint (hr) Value: 24
  misc_feature: MA Experiment 108609 PARAMETER Experiment Name: At_100uM_ABA_cDNA_P Parameter: Tissue Value: Aerial
  misc_feature: MA Experiment 108609 PARAMETER Experiment Name: At_100uM_ABA_cDNA_P Parameter: Treatment Value: 100uM ABA vs. No Treatment
  misc_feature: MA Experiment ID: 20000069 Result: Down-regulated in Transcription
  misc_feature: MA Experiment 20000069 PARAMETER Experiment Name: At_100uM_ABA_Mutants_cDNA_P Parameter: Plant Line Value: CS23
  misc_feature: MA Experiment 20000069 PARAMETER Experiment Name: At_100uM_ABA_Mutants_cDNA_P Parameter: Timepoint (hr) Value: 6
  misc_feature: MA Experiment 20000069 PARAMETER Experiment Name: At_100uM_ABA_Mutants_cDNA_P Parameter: Tissue Value: Aerial
  misc_feature: MA Experiment 20000069 PARAMETER Experiment Name: At_100uM_ABA_Mutants_cDNA_P Parameter: Treatment Value: 100uM ABA vs. No Treatment
  misc_feature: MA Experiment ID: 20000070 Result: Down-regulated in Transcription
  misc_feature: MA Experiment 20000070 PARAMETER Experiment Name: At_100uM_ABA_Mutants_cDNA_P Parameter: Plant Line Value: CS24
  misc_feature: MA Experiment 20000070 PARAMETER Experiment Name: At_100uM_ABA_Mutants_cDNA_P Parameter: Timepoint (hr) Value: 6
  misc_feature: MA Experiment 20000070 PARAMETER Experiment Name: At_100uM_ABA_Mutants_cDNA_P Parameter: Tissue Value: Aerial
  misc_feature: MA Experiment 20000070 PARAMETER Experiment Name: At_100uM_ABA_Mutants_cDNA_P Parameter: Treatment Value: 100uM ABA vs. No Treatment
  misc_feature: MA Experiment ID: 20000071 Result: Down-regulated in Transcription
  misc_feature: MA Experiment 20000071 PARAMETER Experiment Name: At_100uM_ABA_Mutants_cDNA_P Parameter: Plant Line Value: CS8104
  misc_feature: MA Experiment 20000071 PARAMETER Experiment Name: At_100uM_ABA_Mutants_cDNA_P Parameter: Timepoint (hr) Value: 6
  misc_feature: MA Experiment 20000071 PARAMETER Experiment Name: At_100uM_ABA_Mutants_cDNA_P Parameter: Tissue Value: Aerial
  misc_feature: MA Experiment 20000071 PARAMETER Experiment Name: At_100uM_ABA_Mutants_cDNA_P Parameter: Treatment Value: 100uM ABA vs. No Treatment
  misc_feature: MA Experiment ID: 20000086 Result: Down-regulated in Transcription
  misc_feature: MA Experiment 20000086 PARAMETER Experiment Name: At_100uM_ABA_Mutants_cDNA_P Parameter: Plant Line Value: CS22
  misc_feature: MA Experiment 20000086 PARAMETER Experiment Name: At_100uM_ABA_Mutants_cDNA_P Parameter: Timepoint (hr) Value: 6
  misc_feature: MA Experiment 20000086 PARAMETER Experiment Name: At_100uM_ABA_Mutants_cDNA_P Parameter: Tissue Value: Aerial
  misc_feature: MA Experiment 20000086 PARAMETER Experiment Name: At_100uM_ABA_Mutants_cDNA_P Parameter: Treatment Value: 100uM ABA vs. No Treatment
  misc_feature: MA Experiment ID: 20000087 Result: Down-regulated in Transcription
  misc_feature: MA Experiment 20000087 PARAMETER Experiment Name: At_100uM_ABA_Mutants_cDNA_P Parameter: Plant Line Value: WS
  misc_feature: MA Experiment 20000087 PARAMETER Experiment Name: At_100uM_ABA_Mutants_cDNA_P Parameter: Timepoint (hr) Value: 6
  misc_feature: MA Experiment 20000087 PARAMETER Experiment Name: At_100uM_ABA_Mutants_cDNA_P Parameter: Tissue Value: Aerial
  misc_feature: MA Experiment 20000087 PARAMETER Experiment Name: At_100uM_ABA_Mutants_cDNA_P Parameter: Treatment Value: 100uM ABA vs. No Treatment
  misc_feature: MA Experiment ID: 20000307 Result: Up-regulated in Transcription
  misc_feature: MA Experiment 20000307 PARAMETER Experiment Name: At_Germinating_Seeds_Sub_P Parameter: Age (hr) Value: 24 vs. 0
  misc_feature: MA Experiment 20000307 PARAMETER Experiment Name: At_Germinating_Seeds_Sub_P Parameter: Organism Value: A. thaliana
  misc_feature: MA Experiment 20000307 PARAMETER Experiment Name: At_Germinating_Seeds_Sub_P Parameter: Plant Line Value: WS
  misc_feature: MA Experiment 20000307 PARAMETER Experiment Name: At_Germinating_Seeds_Sub_P Parameter: Tissue Value: Germinating Seeds
  misc_feature: MA Experiment ID: 20000314 Result: Down-regulated in Transcription
  misc_feature: MA Experiment 20000314 PARAMETER Experiment Name: At_14day_Shoots-Roots_Sub_P Parameter: Age (day) Value: 14
  misc_feature: MA Experiment 20000314 PARAMETER Experiment Name: At_14day_Shoots-Roots_Sub_P Parameter: Organism Value: A. thaliana
  misc_feature: MA Experiment 20000314 PARAMETER Experiment Name: At_14day_Shoots-Roots_Sub_P Parameter: Plant Line Value: WS
  misc_feature: MA Experiment 20000314 PARAMETER Experiment Name: At_14day_Shoots-Roots_Sub_P Parameter: Tissue Value: Roots vs. Whole Plant
  misc_feature: MA Experiment ID: 20000315 Result: Up-regulated in Transcription
  misc_feature: MA Experiment 20000315 PARAMETER Experiment Name: At_14day_Shoots-Roots_Sub_P Parameter: Age (day) Value: 14
  misc_feature: MA Experiment 20000315 PARAMETER Experiment Name: At_14day_Shoots-Roots_Sub_P Parameter: Organism Value: A. thaliana
  misc_feature: MA Experiment 20000315 PARAMETER Experiment Name: At_14day_Shoots-Roots_Sub_P Parameter: Plant Line Value: WS
  misc_feature: MA Experiment 20000315 PARAMETER Experiment Name: At_14day_Shoots-Roots_Sub_P Parameter: Tissue Value: Shoots vs. Whole Plant
  misc_feature: MA Experiment ID: 20000329 Result: Up-regulated in Transcription
  misc_feature: MA Experiment 20000329 PARAMETER Experiment Name: At_4deg_Cold_Sub_P Parameter: Age (day) Value: 14
  misc_feature: MA Experiment 20000329 PARAMETER Experiment Name: At_4deg_Cold_Sub_P Parameter: Organism Value: A. thaliana
  misc_feature: MA Experiment 20000329 PARAMETER Experiment Name: At_4deg_Cold_Sub_P Parameter: Plant Line Value: WS
  misc_feature: MA Experiment 20000329 PARAMETER Experiment Name: At_4deg_Cold_Sub_P Parameter: Temperature (deg C) Value: 4 vs. 22
  misc_feature: MA Experiment 20000329 PARAMETER Experiment Name: At_4deg_Cold_Sub_P Parameter: Timepoint (hr) Value: 6
  misc_feature: MA Experiment 20000329 PARAMETER Experiment Name: At_4deg_Cold_Sub_P Parameter: Tissue Value: Aerial
  misc_feature: MA Experiment ID: 20000347 Result: Down-regulated in Transcription
  misc_feature: MA Experiment 20000347 PARAMETER Experiment Name: At_2mM_SA_Sub_P Parameter: Age (day) Value: 14
  misc_feature: MA Experiment 20000347 PARAMETER Experiment Name: At_2mM_SA_Sub_P Parameter: Organism Value: A. thaliana
  misc_feature: MA Experiment 20000347 PARAMETER Experiment Name: At_2mM_SA_Sub_P Parameter: Plant Line Value: WS
  misc_feature: MA Experiment 20000347 PARAMETER Experiment Name: At_2mM_SA_Sub_P Parameter: Timepoint (hr) Value: 6
  misc_feature: MA Experiment 20000347 PARAMETER Experiment Name: At_2mM_SA_Sub_P Parameter: Tissue Value: Aerial
  misc_feature: MA Experiment 20000347 PARAMETER Experiment Name: At_2mM_SA_Sub_P Parameter: Treatment Value: 2mM SA vs. No Treatment
  misc_feature: MA Experiment ID: 20000355 Result: Up-regulated in Transcription
  misc_feature: MA Experiment 20000355 PARAMETER Experiment Name: At_Siliques_Sub_P Parameter: Age (day) Value: 21
  misc_feature: MA Experiment 20000355 PARAMETER Experiment Name: At_Siliques_Sub_P Parameter: Organism Value: A. thaliana
  misc_feature: MA Experiment 20000355 PARAMETER Experiment Name: At_Siliques_Sub_P Parameter: Plant Line Value: WS
  misc_feature: MA Experiment 20000355 PARAMETER Experiment Name: At_Siliques_Sub_P Parameter: Tissue Value: Less Than 5mm Siliques vs. Whole Plant
  misc_feature: MA Experiment ID: 20000634 Result: Down-regulated in Transcription
  misc_feature: MA Experiment 20000634 PARAMETER Experiment Name: At_10percent_PEG_Sub_P Parameter: Age (day) Value: 12
  misc_feature: MA Experiment 20000634 PARAMETER Experiment Name: At_10percent_PEG_Sub_P Parameter: Organism Value: A. thaliana
  misc_feature: MA Experiment 20000634 PARAMETER Experiment Name: At_10percent_PEG_Sub_P Parameter: Plant Line Value: WS
  misc_feature: MA Experiment 20000634 PARAMETER Experiment Name: At_10percent_PEG_Sub_P Parameter: Timepoint (day) Value: 12
  misc_feature: MA Experiment 20000634 PARAMETER Experiment Name: At_10percent_PEG_Sub_P Parameter: Tissue Value: Whole Plant
  misc_feature: MA Experiment 20000634 PARAMETER Experiment Name: At_10percent_PEG_Sub_P Parameter: Treatment Value: 10% PEG vs. No Treatment
attctcacttacttcttttctttttttgtgttcttgtttagaagaagcaatggccacttcagcaatccaacactcttcttttgccggccaaacggctctaaagccatccaacgacctccttcgcaaggtcggagcctctaatggtggcggccgcgttatcatgcgccgtaccgtcaagtctacccctcagagcatctggtatggaccagaccgtcccaaatacctaggaccattctcggaaaacacaccatcatacctaactggagaataccctggagactacggctgggacacccgctggtctctcagccgatccagaaacattcgcaaagaatcgtgagctcgaagtgatccacagtagatgggcaatgttgggagctttaggctgcaccttccctgaaattctctcaaaaaacggagtcaaattcggtgaagccgtgtggttcaaggcaggatctcaaatcttctcagaaggaggacttgactacctcggaaaccctaacttgatccacgcgcaaagcatattagctatatgggcgtgtcaagttgtgctaatgggattcattgaagggtacagaatcggaggtggtcctcttggggaagggcttgacccgctttacccgggcggggccttcgacccgttgaacttagcgtaggatccagaagcgttttcggagttgaaagtgaaggagcttaaaaacggtcgtcttgctatgttctcaatgtttggattctttgtccaagccatagttaccggtaaaggtccgatcgaaaatctgttcgatcacattgcagaccctgtggctaacaatgcttgggcttacgccaccaacttcgtccccggaaaatagagtttgatcggataatttatgtaaattatatcttttaaacatttatcaatgcattaaagttatcccc

SEQ ID NO: 27874 - protein, 112 aa, Arabidopsis thaliana
  peptide (1)..(112): Ceres Seq. ID no. 13653926
  misc_feature (17)..(98): Homolog of NCBI NO: 1345698 NR Description: Chlorophyll A-B binding protein 151, chloroplast
  misc_feature (17)..(98): Homolog of NCBI NO: 3560529 NR Description: light harvesting chlorophyll A/B binding protein
  misc_feature (17)..(98): Homolog of NCBI NO: 15224465 NR Description: light-harvesting chlorophyll a/b binding protein
  misc_feature (17)..(98): Homolog of NCBI NO: 15224471 NR Description: light-harvesting chlorophyll a/b binding protein
  misc_feature (17)..(98): Homolog of NCBI NO: 25299022 NR Description: chlorophyll a/b-binding protein Lhcb2
  misc_feature (17)..(98): Homolog of NCBI NO: 25299029 NR Description: chlorophyll a/b-binding protein Lhcb2
  misc_feature (17)..(98): Homolog of NCBI NO: 15232249 NR Description: light harvesting chlorophyll A/B binding protein,
FSLTSFLFLCSCLEEAMATSAIQHSSFAGQTALKPSNDLLRKVGASNGGGRVIMRRTVKSTPQSIWYGPDRPKYLGPFSENTPSYLTGEYPGDYGWDTRWSLSRSRNIRKES

SEQ ID NO: 27875 - protein, 96 aa, Arabidopsis thaliana
  peptide (1)..(96): Ceres Seq. ID no. 13653927
  misc_feature (1)..(82): Homolog of NCBI NO: 1345698 NR Description: Chlorophyll A-B binding protein 151, chloroplast
  misc_feature (1)..(82): Homolog of NCBI NO: 3560529 NR Description: light harvesting chlorophyll A/B binding protein
  misc_feature (1)..(82): Homolog of NCBI NO: 15224465 NR Description: light-harvesting chlorophyll a/b binding protein
  misc_feature (1)..(82): Homolog of NCBI NO: 15224471 NR Description: light-harvesting chlorophyll a/b binding protein
  misc_feature (1)..(82): Homolog of NCBI NO: 25299022 NR Description: chlorophyll a/b-binding protein Lhcb2
  misc_feature (1)..(82): Homolog of NCBI NO: 25299029 NR Description: chlorophyll a/b-binding protein Lhcb2
  misc_feature (1)..(82): Homolog of NCBI NO: 15232249 NR Description: light harvesting chlorophyll A/B binding protein,
MATSAIQHSSFAGQTALKPSNDLLRKVGASNGGGRVIMRRTVKSTPQSIWYGPDRPKYLGPFSENTPSYLTGEYPGDYGWDTRWSLSRSRNIRKES

SEQ ID NO: 27876 - protein, 95 aa, Arabidopsis thaliana
  peptide (1)..(95): Ceres Seq. ID no. 13653928
  misc_feature (1)..(95): Pfam Name: Chlorophyll A-B binding protein Pfam Description: Chlorophyll A-B binding protein
  misc_feature (1)..(95): Homolog of NCBI NO: 1345698 NR Description: Chlorophyll A-B binding protein 151, chloroplast
  misc_feature (1)..(95): Homolog of NCBI NO: 3560529 NR Description: light harvesting chlorophyll A/B binding protein
  misc_feature (1)..(95): Homolog of NCBI NO: 15224465 NR Description: light-harvesting chlorophyll a/b binding protein
  misc_feature (1)..(95): Homolog of NCBI NO: 15224471 NR Description: light-harvesting chlorophyll a/b binding protein
  misc_feature (1)..(95): Homolog of NCBI NO: 25299022 NR Description: chlorophyll a/b-binding protein Lhcb2
  misc_feature (1)..(95): Homolog of NCBI NO: 25299029 NR Description: chlorophyll a/b-binding protein Lhcb2
  misc_feature (1)..(95): Homolog of NCBI NO: 15232249 NR Description: light harvesting chlorophyll A/B binding protein,
MLGALGCTFPEILSKNGVKFGEAVWFKAGSQIFSEGGLDYLGNPNLIHAQSILAIWACQVVLMGFIEGYRIGGGPLGEGLDPLYPGGAFDPLNLA

SEQ ID NO: 27877 - DNA, 887 bp, Arabidopsis thaliana
  misc_feature (1)..(887): Ceres Seq. ID no. 12421446
  misc_feature: MA Experiment ID: 20000173 Result: Down-regulated in Transcription
  misc_feature: MA Experiment 20000173 PARAMETER Experiment Name: At_42deg_Heat_P Parameter: Age (day) Value: 14
  misc_feature: MA Experiment 20000173 PARAMETER Experiment Name: At_42deg_Heat_P Parameter: Organism Value: A. thaliana
  misc_feature: MA Experiment 20000173 PARAMETER Experiment Name: At_42deg_Heat_P Parameter: Plant Line Value: WS
  misc_feature: MA Experiment 20000173 PARAMETER Experiment Name: At_42deg_Heat_P Parameter: Temperature (deg C) Value: 42 vs. 22
  misc_feature: MA Experiment 20000173 PARAMETER Experiment Name: At_42deg_Heat_P Parameter: Timepoint (hr) Value: 6
  misc_feature: MA Experiment 20000173 PARAMETER Experiment Name: At_42deg_Heat_P Parameter: Tissue Value: Aerial
acgagaccattacctagaacatcctaatcgaaaaaaatctctccaatggcgtctcttcgtagcctttcgatttggttcttcttcttcttcgtcttcgtcttcttaatcaatccctccatttctattcgaacttccttcatcaagcttcccggaagcgacggatctcgctactgcgacagctggagattagccgccgagaccaataacgtcggaacttgggatctgattccgtcaatctgcgtggattccgtcgccgagtatcttaacggagaccagtttttatccgattacagtgtcatcgtcgattatgctctcgcgtttgcgaaatcggttgaaatttccggcgacggcaaggacgtgtggatcttcgatatcgacgagacgcttctcacgaatattgactactacaaggctcatggttacgggtctgaaccgtatgacgataataaatttagtgagtgggtggaacaaggaacagctccagcttttgatgcgagcttgagactgtacaatgctctcaagaaacttggtttcactatcattttgctaaccggtcgggacgagcatcaaaggacttccaccgagacaaatctccgggatgccggttattccggttgggaacgtctcctcttgagaggtccaaatgatcaagggaagtcagctacaaattacaaatccgagcagcgatcgaaactgattgaggaaggtttcaaaatccgtggcaatagcggtgatcaatggagtgacttgcaaggttttgccgtggctgatcgttctttcaaagtcccaaatcccatgtactacattccttgatcactattcatttctgattttatgtattgagtaacaaccacttatgtgtagacgttaatattacctttgctcct

SEQ ID NO: 27878 - protein, 255 aa, Arabidopsis thaliana; identical to SEQ ID NO: 27765
  peptide (1)..(255): Ceres Seq. ID no. 12421447
  misc_feature (27)..(255): Pfam Name: HAD superfamily, subfamily IIIB (Acid phosphatase) Pfam Description: HAD superfamily, subfamily IIIB (Acid
  misc_feature (16)..(255): Homolog of NCBI NO: 15224907 NR Description: putative acid phosphatase; protein id:
  misc_feature (43)..(254): Homolog of NCBI NO: 445113 NR Description: acid phosphatase 1
  misc_feature (43)..(254): Homolog of NCBI NO: 130718 NR Description: Acid phosphatase precursor 1
  misc_feature (23)..(255): Homolog of NCBI NO: 15241412 NR Description: acid phosphatase; protein id: At5g51260.1
  misc_feature (42)..(255): Homolog of NCBI NO: 15234949 NR Description: acid phosphatase - like protein
  misc_feature (1)..(254): Homolog of NCBI NO: 15233526 NR Description: acid phosphatase-like protein
  misc_feature (1)..(255): Homolog of NCBI NO: 15233504 NR Description: acid phosphatase-like protein

SEQ ID NO: 27879 - DNA, 791 bp, Arabidopsis thaliana
  misc_feature (1)..(791): Ceres Seq. ID no. 13490901
  misc_feature: MA Experiment ID: 108462 Result: Up-regulated in Transcription
  misc_feature: MA Experiment 108462 PARAMETER Experiment Name: At_Germinating_Seeds_cDNA_P Parameter: Age (day) Value: 2 vs. 0
  misc_feature: MA Experiment 108462 PARAMETER Experiment Name: At_Germinating_Seeds_cDNA_P Parameter: Tissue Value: Germinating Seeds
  misc_feature: MA Experiment ID: 108463 Result: Up-regulated in Transcription
  misc_feature: MA Experiment 108463 PARAMETER Experiment Name: At_Germinating_Seeds_cDNA_P Parameter: Age (day) Value: 3 vs. 0
  misc_feature: MA Experiment 108463 PARAMETER Experiment Name: At_Germinating_Seeds_cDNA_P Parameter: Tissue Value: Germinating Seeds
  misc_feature: MA Experiment ID: 108464 Result: Up-regulated in Transcription
  misc_feature: MA Experiment 108464 PARAMETER Experiment Name: At_Germinating_Seeds_cDNA_P Parameter: Age (day) Value: 4 vs. 0
  misc_feature: MA Experiment 108464 PARAMETER Experiment Name: At_Germinating_Seeds_cDNA_P Parameter: Tissue Value: Germinating Seeds
  misc_feature: MA Experiment ID: 108501 Result: Up-regulated in Transcription
  misc_feature: MA Experiment 108501 PARAMETER Experiment Name: At_ap2_floral_buds_cDNA_P Parameter: Plant Line Value: ap2 (Ler.)
  misc_feature: MA Experiment 108501 PARAMETER Experiment Name: At_ap2_floral_buds_cDNA_P Parameter: Tissue Value: Closed Flower
  misc_feature: MA Experiment ID: 20000117 Result: Up-regulated in Transcription
  misc_feature: MA Experiment 20000117 PARAMETER Experiment Name: At_100uM_ABA_Mutants_cDNA_P Parameter: Plant Line Value: Columbia
  misc_feature: MA Experiment 20000117 PARAMETER Experiment Name: At_100uM_ABA_Mutants_cDNA_P Parameter: Timepoint (hr) Value: 6
  misc_feature: MA Experiment 20000117 PARAMETER Experiment Name: At_100uM_ABA_Mutants_cDNA_P Parameter: Tissue Value: Aerial
  misc_feature: MA Experiment 20000117 PARAMETER Experiment Name: At_100uM_ABA_Mutants_cDNA_P Parameter: Treatment Value: 100uM ABA vs. No Treatment
  misc_feature: MA Experiment ID: 20000171 Result: Up-regulated in Transcription
  misc_feature: MA Experiment 20000171 PARAMETER Experiment Name: At_42deg_Heat_P Parameter: Age (day) Value: 14
  misc_feature: MA Experiment 20000171 PARAMETER Experiment Name: At_42deg_Heat_P Parameter: Organism Value: A. thaliana
  misc_feature: MA Experiment 20000171 PARAMETER Experiment Name: At_42deg_Heat_P Parameter: Plant Line Value: WS
  misc_feature: MA Experiment 20000171 PARAMETER Experiment Name: At_42deg_Heat_P Parameter: Temperature (deg C) Value: 42 vs. 22
  misc_feature: MA Experiment 20000171 PARAMETER Experiment Name: At_42deg_Heat_P Parameter: Timepoint (hr) Value: 1
  misc_feature: MA Experiment 20000171 PARAMETER Experiment Name: At_42deg_Heat_P Parameter: Tissue Value: Aerial
  misc_feature: MA Experiment ID: 20000184 Result: Up-regulated in Transcription
  misc_feature: MA Experiment 20000184 PARAMETER Experiment Name: At_Shoots__P Parameter: Age (day) Value: 7
  misc_feature: MA Experiment 20000184 PARAMETER Experiment Name: At_Shoots__P Parameter: Tissue Value: Shoots vs. Whole Plant
  misc_feature: MA Experiment ID: 20000224 Result: Down-regulated in Transcription
  misc_feature: MA Experiment ID: 20000438 Result: Up-regulated in Transcription
  misc_feature: MA Experiment 20000438 PARAMETER Experiment Name: At_Shoots__P Parameter: Age (day) Value: 14
  misc_feature: MA Experiment 20000438 PARAMETER Experiment Name: At_Shoots__P Parameter: Tissue Value: Shoots vs. Whole Plant
  misc_feature: MA Experiment ID: 20000445 Result: Down-regulated in Transcription
  misc_feature: MA Experiment 20000445 PARAMETER Experiment Name: At_100uM_NAA__P Parameter: Age (day) Value: 14
  misc_feature: MA Experiment 20000445 PARAMETER Experiment Name: At_100uM_NAA__P Parameter: Organism Value: A. thaliana
  misc_feature: MA Experiment 20000445 PARAMETER Experiment Name: At_100uM_NAA__P Parameter: Plant Line Value: WS
  misc_feature: MA Experiment 20000445 PARAMETER Experiment Name: At_100uM_NAA__P Parameter: Timepoint (hr) Value: 6
  misc_feature: MA Experiment 20000445 PARAMETER Experiment Name: At_100uM_NAA__P Parameter: Tissue Value: Aerial
  misc_feature: MA Experiment 20000445 PARAMETER Experiment Name: At_100uM_NAA__P Parameter: Treatment Value: 100uM NAA vs. No Treatment
  misc_feature: MA Experiment ID: 20000495 Result: Down-regulated in Transcription
  misc_feature: MA Experiment 20000495 PARAMETER Experiment Name: At_Guard_Cells_P Parameter: Harvest Date Value: 8/2/2002
  misc_feature: MA Experiment 20000495 PARAMETER Experiment Name: At_Guard_Cells_P Parameter: Organism Value: A. thaliana
  misc_feature: MA Experiment 20000495 PARAMETER Experiment Name: At_Guard_Cells_P Parameter: Tissue Value: Guard Cells vs. Leaves
  misc_feature: MA Experiment ID: 20001451 Result: Up-regulated in Transcription
  misc_feature: MA Experiment 20001451 PARAMETER Experiment Name: At_Far-red-induction_P Parameter: Age (day) Value: 7
  misc_feature: MA Experiment 20001451 PARAMETER Experiment Name: At_Far-red-induction_P Parameter: Light Value: Far-red vs. White
  misc_feature: MA Experiment 20001451 PARAMETER Experiment Name: At_Far-red-induction_P Parameter: Organism Value: A. thaliana
  misc_feature: MA Experiment 20001451 PARAMETER Experiment Name: At_Far-red-induction_P Parameter: Plant Line Value: Columbia
  misc_feature: MA Experiment 20001451 PARAMETER Experiment Name: At_Far-red-induction_P Parameter: Timepoint (hr) Value: 24
  misc_feature: MA Experiment 20001451 PARAMETER Experiment Name: At_Far-red-induction_P Parameter: Tissue Value: Whole Plant
  misc_feature: MA Experiment ID: 20001768 Result: Down-regulated in Transcription
  misc_feature: MA Experiment 20001768 PARAMETER Experiment Name: At_Far-red-enriched-adult_P Parameter: Age (day) Value: 28
  misc_feature: MA Experiment 20001768 PARAMETER Experiment Name: At_Far-red-enriched-adult_P Parameter: Light Value: Far-red enriched vs. White
  misc_feature: MA Experiment 20001768 PARAMETER Experiment Name: At_Far-red-enriched-adult_P Parameter: Organism Value: A. thaliana
  misc_feature: MA Experiment 20001768 PARAMETER Experiment Name: At_Far-red-enriched-adult_P Parameter: Plant Line Value: Columbia
  misc_feature: MA Experiment 20001768 PARAMETER Experiment Name: At_Far-red-enriched-adult_P Parameter: Timepoint (hr) Value: 1
  misc_feature: MA Experiment 20001768 PARAMETER Experiment Name: At_Far-red-enriched-adult_P Parameter: Tissue Value: Aerial
  misc_feature: MA Experiment ID: 20001911 Result: Down-regulated in Transcription
  misc_feature: MA Experiment 20001911 PARAMETER Experiment Name: At_Drought_Reproduction_P Parameter: Age (day) Value: 40
  misc_feature: MA Experiment 20001911 PARAMETER Experiment Name: At_Drought_Reproduction_P Parameter: Organism Value: A. thaliana
  misc_feature: MA Experiment 20001911 PARAMETER Experiment Name: At_Drought_Reproduction_P Parameter: Plant Line Value: WS
  misc_feature: MA Experiment 20001911 PARAMETER Experiment Name: At_Drought_Reproduction_P Parameter: Timepoint (day) Value: 10
  misc_feature: MA Experiment 20001911 PARAMETER Experiment Name: At_Drought_Reproduction_P Parameter: Tissue Value: Flowers
  misc_feature: MA Experiment 20001911 PARAMETER Experiment Name: At_Drought_Reproduction_P Parameter: Treatment Value: Drought vs. No Drought
ataaatctgataatcaatatatatcaaatactcaaaacaaaagagaaagaaattaaagagagagatgggaaacagcctaaggtgttgtctggcttgtgttcttccatgtggagcactagatttgatcaggatcgttcatctaaacggctacgttgaggagatcacacggtcaataaccgccggagagatcctccaagcaaaccctaaccatgtcctaagcaaaccatgttctcaaggagttgtccgcaaaatcttgatcttgtctcctgaatccgagctcaaacgaggaagcatctattttctcatccccgattcttccttgccggagaagaaaaggcggagaaaggacactcctcgccggaagaagaatctccaaaaccctagtgccgacgccgccggccgagaaattaaaggtgatgaggaatgtgtgaagttgtgtgagaagtacttagaagaagtagtgtcgtcggcgtcgacaggtaaagagcaccgtcatcgccggcggcacagcagatcggcgtcagtatccacgtggcgacctctccttgacagtatctctgaggatcttaattaattcctctttcctttaaatctcttttttttttgttgcttctagctaatggtgttttttgtccggaagccggatttttatcattctctttttcattttttctctctttttttttggttttggggaaattttcacgaaaagagttatataatgtggataagatctgtgttaaaattcggttgtgatttcgagtcacctgagaatgatgatattcaatcag

SEQ ID NO: 27880 - protein, 169 aa, Arabidopsis thaliana
  peptide (1)..(169): Ceres Seq. ID no. 13490902
  misc_feature (25)..(92): Homolog of NCBI NO: 34896398 NR Description: hypothetical protein [Oryza sativa (japonica
  misc_feature (1)..(121): Homolog of NCBI NO: 18396990 NR Description: expressed protein [Arabidopsis thaliana]
  misc_feature (3)..(116): Homolog of NCBI NO: 34909702 NR Description: B1131G08.9 [Oryza sativa (japonica
  misc_feature (1)..(167): Homolog of NCBI NO: 34907910 NR Description: P0439E11.22 [Oryza sativa (japonica
  misc_feature (1)..(167): Homolog of NCBI NO: 34896112 NR Description: P0701D05.10 [Oryza sativa (japonica
  misc_feature (1)..(169): Homolog of NCBI NO: 15227725 NR Description: hypothetical protein [Arabidopsis thaliana]
  misc_feature (1)..(169): Homolog of NCBI NO: 18390706 NR Description: expressed protein [Arabidopsis thaliana]
MGNSLRCCLACVLPCGALDLIRIVHLNGYVEEITRSITAGEILQANPNHVLSKPCSQGVVRKILILSPESELKRGSIYFLIPDSSLPEKKRRRKDTPRRKKNLQNPSADAAGREIKGDEECVKLCEKYLEEVVSSASTGKEHRHRRRHSRSASVSTWRPLLDSISEDLN

SEQ ID NO: 27881 - DNA, 1109 bp, Arabidopsis thaliana
  misc_feature (1)..(1109): Ceres Seq. ID no. 12422858
  misc_feature: MA Experiment ID: 108434 Result: Up-regulated in Transcription
  misc_feature: MA Experiment 108434 PARAMETER Experiment Name: At_Root_Tips_cDNA_P Parameter: Tissue Value: Root Tips
  misc_feature: MA Experiment ID: 108461 Result: Up-regulated in Transcription
  misc_feature: MA Experiment 108461 PARAMETER Experiment Name: At_Germinating_Seeds_cDNA_P Parameter: Age (day) Value: 1 vs. 0
  misc_feature: MA Experiment 108461 PARAMETER Experiment Name: At_Germinating_Seeds_cDNA_P Parameter: Tissue Value: Germinating Seeds
  misc_feature: MA Experiment ID: 108462 Result: Up-regulated in Transcription
  misc_feature: MA Experiment 108462 PARAMETER Experiment Name: At_Germinating_Seeds_cDNA_P Parameter: Age (day) Value: 2 vs. 0
  misc_feature: MA Experiment 108462 PARAMETER Experiment Name: At_Germinating_Seeds_cDNA_P Parameter: Tissue Value: Germinating Seeds
  misc_feature: MA Experiment ID: 108463 Result: Up-regulated in Transcription
  misc_feature: MA Experiment 108463 PARAMETER Experiment Name: At_Germinating_Seeds_cDNA_P Parameter: Age (day) Value: 3 vs. 0
  misc_feature: MA Experiment 108463 PARAMETER Experiment Name: At_Germinating_Seeds_cDNA_P Parameter: Tissue Value: Germinating Seeds
  misc_feature: MA Experiment ID: 108464 Result: Up-regulated in Transcription
  misc_feature: MA Experiment 108464 PARAMETER Experiment Name: At_Germinating_Seeds_cDNA_P Parameter: Age (day) Value: 4 vs. 0
  misc_feature: MA Experiment 108464 PARAMETER Experiment Name: At_Germinating_Seeds_cDNA_P Parameter: Tissue Value: Germinating Seeds
  misc_feature: MA Experiment ID: 108473 Result: Down-regulated in Transcription
  misc_feature: MA Experiment 108473 PARAMETER Experiment Name: At_Drought_Flowers_cDNA_P Parameter: Timepoint (hr) Value: 7 d
  misc_feature: MA Experiment 108473 PARAMETER Experiment Name: At_Drought_Flowers_cDNA_P Parameter: Tissue Value: Flower
  misc_feature: MA Experiment 108473 PARAMETER Experiment Name: At_Drought_Flowers_cDNA_P Parameter: Treatment Value: Drought vs. No Drought
  misc_feature: MA Experiment ID: 108474 Result: Down-regulated in Transcription
  misc_feature: MA Experiment 108474 PARAMETER Experiment Name: At_Drought_Flowers_cDNA_P Parameter: Timepoint (hr) Value: null
  misc_feature: MA Experiment 108474 PARAMETER Experiment Name: At_Drought_Flowers_cDNA_P Parameter: Treatment Value: Drought vs. No Drought
  misc_feature: MA Experiment ID: 108561 Result: Down-regulated in Transcription
  misc_feature: MA Experiment 108561 PARAMETER Experiment Name: At_100uM_ABA_cDNA_P Parameter: Timepoint (hr) Value: 6
  misc_feature: MA Experiment 108561 PARAMETER Experiment Name: At_100uM_ABA_cDNA_P Parameter: Tissue Value: Aerial
  misc_feature: MA Experiment 108561 PARAMETER Experiment Name: At_100uM_ABA_cDNA_P Parameter: Treatment Value: 100uM ABA vs. No Treatment
  misc_feature: MA Experiment ID: 108572 Result: Down-regulated in Transcription
  misc_feature: MA Experiment 108572 PARAMETER Experiment Name: At_Drought_cDNA_P Parameter: Timepoint (hr) Value: 1
  misc_feature: MA Experiment 108572 PARAMETER Experiment Name: At_Drought_cDNA_P Parameter: Tissue Value: Aerial
  misc_feature: MA Experiment 108572 PARAMETER Experiment Name: At_Drought_cDNA_P Parameter: Treatment Value: Drought vs. No Drought
  misc_feature: MA Experiment ID: 108573 Result: Down-regulated in Transcription
  misc_feature: MA Experiment 108573 PARAMETER Experiment Name: At_Drought_cDNA_P Parameter: Timepoint (hr) Value: 6
  misc_feature: MA Experiment 108573 PARAMETER Experiment Name: At_Drought_cDNA_P Parameter: Tissue Value: Aerial
  misc_feature: MA Experiment 108573 PARAMETER Experiment Name: At_Drought_cDNA_P Parameter: Treatment Value: Drought vs. No Drought
  misc_feature: MA Experiment ID: 108576 Result: Down-regulated in Transcription
  misc_feature: MA Experiment 108576 PARAMETER Experiment Name: At_42deg_Heat_cDNA_P Parameter: Temperature (deg C) Value: 42 vs. 22
  misc_feature: MA Experiment 108576 PARAMETER Experiment Name: At_42deg_Heat_cDNA_P Parameter: Timepoint (hr) Value: 1
  misc_feature: MA Experiment 108576 PARAMETER Experiment Name: At_42deg_Heat_cDNA_P Parameter: Tissue Value: Aerial
  misc_feature: MA Experiment ID: 108585 Result: Down-regulated in Transcription
  misc_feature: MA Experiment 108585 PARAMETER Experiment Name: At_5mM_NaNP_cDNA_P Parameter: Timepoint (hr) Value: 6
  misc_feature: MA Experiment 108585 PARAMETER Experiment Name: At_5mM_NaNP_cDNA_P Parameter: Tissue Value: Aerial
  misc_feature: MA Experiment 108585 PARAMETER Experiment Name: At_5mM_NaNP_cDNA_P Parameter: Treatment Value: null
  misc_feature: MA Experiment ID: 108594 Result: Down-regulated in Transcription
  misc_feature: MA Experiment 108594 PARAMETER Experiment Name: At_Ler-rhl_Root_cDNA_P Parameter: Plant Line Value: null
  misc_feature: MA Experiment ID: 108595 Result: Down-regulated in Transcription
  misc_feature: MA Experiment 108595 PARAMETER Experiment Name: At_Ler-pi_Ovule_cDNA_P Parameter: Plant Line Value: null
  misc_feature: MA Experiment ID: 108605 Result: Down-regulated in Transcription
  misc_feature: MA Experiment 108605 PARAMETER Experiment Name: At_100uM_ABA_cDNA_P Parameter: Timepoint (hr) Value: 6
  misc_feature: MA Experiment 108605 PARAMETER Experiment Name: At_100uM_ABA_cDNA_P Parameter: Tissue Value: Aerial
  misc_feature: MA Experiment 108605 PARAMETER Experiment Name: At_100uM_ABA_cDNA_P Parameter: Treatment Value: 100uM ABA vs. No Treatment
  misc_feature: MA Experiment ID: 108609 Result: Down-regulated in Transcription
  misc_feature: MA Experiment 108609 PARAMETER Experiment Name: At_100uM_ABA_cDNA_P Parameter: Timepoint (hr) Value: 24
  misc_feature: MA Experiment 108609 PARAMETER Experiment Name: At_100uM_ABA_cDNA_P Parameter: Tissue Value: Aerial
  misc_feature: MA Experiment 108609 PARAMETER Experiment Name: At_100uM_ABA_cDNA_P Parameter: Treatment Value: 100uM ABA vs. No Treatment
  misc_feature: MA Experiment ID: 108668 Result: Down-regulated in Transcription
  misc_feature: MA Experiment 108668 PARAMETER Experiment Name: At_2mM_SA_cDNA_P Parameter: Plant Line Value: WS
  misc_feature: MA Experiment 108668 PARAMETER Experiment Name: At_2mM_SA_cDNA_P Parameter: Timepoint (hr) Value: 6
  misc_feature: MA Experiment 108668 PARAMETER Experiment Name: At_2mM_SA_cDNA_P Parameter: Treatment Value: 2mM SA vs. No Treatment
  misc_feature: MA Experiment ID: 20000070 Result: Down-regulated in Transcription
  misc_feature: MA Experiment 20000070 PARAMETER Experiment Name: At_100uM_ABA_Mutants_cDNA_P Parameter: Plant Line Value: CS24
  misc_feature: MA Experiment 20000070 PARAMETER Experiment Name: At_100uM_ABA_Mutants_cDNA_P Parameter: Timepoint (hr) Value: 6
  misc_feature: MA Experiment 20000070 PARAMETER Experiment Name: At_100uM_ABA_Mutants_cDNA_P Parameter: Tissue Value: Aerial
  misc_feature: MA Experiment 20000070 PARAMETER Experiment Name: At_100uM_ABA_Mutants_cDNA_P Parameter: Treatment Value: 100uM ABA vs. No Treatment
  misc_feature: MA Experiment ID: 20000113 Result: Down-regulated in Transcription
  misc_feature: MA Experiment 20000113 PARAMETER Experiment Name: At_42deg_Heat_cDNA_P Parameter: Temperature (deg C) Value: 42 vs. 22
  misc_feature: MA Experiment 20000113 PARAMETER Experiment Name: At_42deg_Heat_cDNA_P Parameter: Timepoint (hr) Value: 8
  misc_feature: MA Experiment 20000113 PARAMETER Experiment Name: At_42deg_Heat_cDNA_P Parameter: Tissue Value: Aerial
  misc_feature: MA Experiment ID: 20000117 Result: Down-regulated in Transcription
  misc_feature: MA Experiment 20000117 PARAMETER Experiment Name: At_100uM_ABA_Mutants_cDNA_P Parameter: Plant Line Value: Columbia
  misc_feature: MA Experiment 20000117 PARAMETER Experiment Name: At_100uM_ABA_Mutants_cDNA_P Parameter: Timepoint (hr) Value: 6
  misc_feature: MA Experiment 20000117 PARAMETER Experiment Name: At_100uM_ABA_Mutants_cDNA_P Parameter: Tissue Value: Aerial
  misc_feature: MA Experiment 20000117 PARAMETER Experiment Name: At_100uM_ABA_Mutants_cDNA_P Parameter: Treatment Value: 100uM ABA vs. No Treatment
  misc_feature: MA Experiment ID: 20000169 Result: Down-regulated in Transcription
  misc_feature: MA Experiment 20000169 PARAMETER Experiment Name: At_100uM_ABA_P Parameter: Age (day) Value: 14
  misc_feature: MA Experiment 20000169 PARAMETER Experiment Name: At_100uM_ABA_P Parameter: Organism Value: A. thaliana
  misc_feature: MA Experiment 20000169 PARAMETER Experiment Name: At_100uM_ABA_P Parameter: Plant Line Value: WS
  misc_feature: MA Experiment 20000169 PARAMETER Experiment Name: At_100uM_ABA_P Parameter: Timepoint (hr) Value: 6
  misc_feature: MA Experiment 20000169 PARAMETER Experiment Name: At_100uM_ABA_P Parameter: Tissue Value: Aerial
  misc_feature: MA Experiment 20000169 PARAMETER Experiment Name: At_100uM_ABA_P Parameter: Treatment Value: 100uM ABA vs. No Treatment
  misc_feature: MA Experiment ID: 20000171 Result: Down-regulated in Transcription
  misc_feature: MA Experiment 20000171 PARAMETER Experiment Name: At_42deg_Heat_P Parameter: Age (day) Value: 14
  misc_feature: MA Experiment 20000171 PARAMETER Experiment Name: At_42deg_Heat_P Parameter: Organism Value: A. thaliana
  misc_feature: MA Experiment 20000171 PARAMETER Experiment Name: At_42deg_Heat_P Parameter: Plant Line Value: WS
  misc_feature: MA Experiment 20000171 PARAMETER Experiment Name: At_42deg_Heat_P Parameter: Temperature (deg C) Value: 42 vs. 22
  misc_feature: MA Experiment 20000171 PARAMETER Experiment Name: At_42deg_Heat_P Parameter: Timepoint (hr) Value: 1
  misc_feature: MA Experiment 20000171 PARAMETER Experiment Name: At_42deg_Heat_P Parameter: Tissue Value: Aerial
  misc_feature: MA Experiment ID: 20000173 Result: Down-regulated in Transcription
  misc_feature: MA Experiment 20000173 PARAMETER Experiment Name: At_42deg_Heat_P Parameter: Age (day) Value: 14
  misc_feature: MA Experiment 20000173 PARAMETER Experiment Name: At_42deg_Heat_P Parameter: Organism Value: A. thaliana
  misc_feature: MA Experiment 20000173 PARAMETER Experiment Name: At_42deg_Heat_P Parameter: Plant Line Value: WS
  misc_feature: MA Experiment 20000173 PARAMETER Experiment Name: At_42deg_Heat_P Parameter: Temperature (deg C) Value: 42 vs. 22
  misc_feature: MA Experiment 20000173 PARAMETER Experiment Name: At_42deg_Heat_P Parameter: Timepoint (hr) Value: 6
  misc_feature: MA Experiment 20000173 PARAMETER Experiment Name: At_42deg_Heat_P Parameter: Tissue Value: Aerial
  misc_feature: MA Experiment ID: 20000180 Result: Up-regulated in Transcription
  misc_feature: MA Experiment 20000180 PARAMETER Experiment Name: At_Germinating_Seeds_P Parameter: Age (hr) Value: 24 vs. 0
  misc_feature: MA Experiment 20000180 PARAMETER Experiment Name: At_Germinating_Seeds_P Parameter: Tissue Value: Germinating Seeds
  misc_feature: MA Experiment ID: 20000182 Result: Down-regulated in Transcription
  misc_feature: MA Experiment 20000182 PARAMETER Experiment Name: At_2mM_SA_P Parameter: Age (day) Value: 14
  misc_feature: MA Experiment 20000182 PARAMETER Experiment Name: At_2mM_SA_P Parameter: Organism Value: A. thaliana
  misc_feature: MA Experiment 20000182 PARAMETER Experiment Name: At_2mM_SA_P Parameter: Plant Line Value: WS
  misc_feature: MA Experiment 20000182 PARAMETER Experiment Name: At_2mM_SA_P Parameter: Timepoint (hr) Value: 6
  misc_feature: MA Experiment 20000182 PARAMETER Experiment Name: At_2mM_SA_P Parameter: Tissue Value: Aerial
  misc_feature: MA Experiment 20000182 PARAMETER Experiment Name: At_2mM_SA_P Parameter: Treatment Value: 2mM SA vs. No Treatment
  misc_feature: MA Experiment ID: 20000184 Result: Up-regulated in Transcription
  misc_feature: MA Experiment 20000184 PARAMETER Experiment Name: At_Shoots__P Parameter: Age (day) Value: 7
  misc_feature: MA Experiment 20000184 PARAMETER Experiment Name: At_Shoots__P Parameter: Tissue Value: Shoots vs. Whole Plant
  misc_feature: MA Experiment ID: 20000185 Result: Up-regulated in Transcription
  misc_feature: MA Experiment 20000185 PARAMETER Experiment Name: At_Roots__P Parameter: Age (day) Value: 7 vs. 21
  misc_feature: MA Experiment 20000185 PARAMETER Experiment Name: At_Roots__P Parameter: Organism Value: A. thaliana
  misc_feature: MA Experiment 20000185 PARAMETER Experiment Name: At_Roots__P Parameter: Tissue Value: Roots vs. Whole Plant
  misc_feature: MA Experiment ID: 20000224 Result: Down-regulated in Transcription
  misc_feature: MA Experiment ID: 20000227 Result: Up-regulated in Transcription
  misc_feature: MA Experiment 20000227 PARAMETER Experiment Name: At_Root-Tips-vs-Tops_P Parameter: Tissue Value: Root Tips vs. Root Tops
  misc_feature: MA Experiment ID: 20000234 Result: Up-regulated in Transcription
  misc_feature: MA Experiment 20000234 PARAMETER Experiment Name: At_Siliques_P Parameter: Age (day) Value: 21
  misc_feature: MA Experiment 20000234 PARAMETER Experiment Name: At_Siliques_P Parameter: Organism Value: A. thaliana
  misc_feature: MA Experiment 20000234 PARAMETER Experiment Name: At_Siliques_P Parameter: Plant Line Value: WS
  misc_feature: MA Experiment 20000234 PARAMETER Experiment Name: At_Siliques_P Parameter: Tissue Value: Less Than 5mm Siliques vs. Whole Plant
  misc_feature: MA Experiment ID: 20000437 Result: Down-regulated in Transcription
  misc_feature: MA Experiment 20000437 PARAMETER Experiment Name: At_Drought_P Parameter: Age (day) Value: 8
  misc_feature: MA Experiment 20000437 PARAMETER Experiment Name: At_Drought_P Parameter: Organism Value: A. thaliana
  misc_feature: MA Experiment 20000437 PARAMETER Experiment Name: At_Drought_P Parameter: Plant Line Value: WS
  misc_feature: MA Experiment 20000437 PARAMETER Experiment Name: At_Drought_P Parameter: Timepoint (hr) Value: 24
  misc_feature: MA Experiment 20000437 PARAMETER Experiment Name: At_Drought_P Parameter: Tissue Value: Whole Plant
  misc_feature: MA Experiment 20000437 PARAMETER Experiment Name: At_Drought_P Parameter: Treatment Value: Drought vs. No Drought
  misc_feature: MA Experiment ID: 20000438 Result: Up-regulated in Transcription
  misc_feature: MA Experiment 20000438 PARAMETER Experiment Name: At_Shoots__P Parameter: Age (day) Value: 14
  misc_feature: MA Experiment 20000438 PARAMETER Experiment Name: At_Shoots__P Parameter: Tissue Value: Shoots vs. Whole Plant
  misc_feature: MA Experiment ID: 20000439 Result: Up-regulated in Transcription
  misc_feature: MA Experiment 20000439 PARAMETER Experiment Name: At_Roots__P Parameter: Age (day) Value: 14 vs. 21
  misc_feature: MA Experiment 20000439 PARAMETER Experiment Name: At_Roots__P Parameter: Organism Value: A. thaliana
  misc_feature: MA Experiment 20000439 PARAMETER Experiment Name: At_Roots__P Parameter: Tissue Value: Roots vs. Whole Plant
  misc_feature: MA Experiment ID: 20000441 Result: Down-regulated in Transcription
  misc_feature: MA Experiment 20000441 PARAMETER Experiment Name: At_1uM_BR-BRZ__P Parameter: Tissue Value: Shoot Apices
  misc_feature: MA Experiment 20000441 PARAMETER Experiment Name: At_1uM_BR-BRZ__P Parameter: Treatment Value: 1uM BR vs. No Treatment
  misc_feature: MA Experiment ID: 20000453 Result: Down-regulated in Transcription
  misc_feature: MA Experiment 20000453 PARAMETER Experiment Name: At_100uM_ABA_P Parameter: Age (day) Value: 15
  misc_feature: MA Experiment 20000453 PARAMETER Experiment Name: At_100uM_ABA_P Parameter: Organism Value: A. thaliana
  misc_feature: MA Experiment 20000453 PARAMETER Experiment Name: At_100uM_ABA_P Parameter: Plant Line Value: WS
  misc_feature: MA Experiment 20000453 PARAMETER Experiment Name: At_100uM_ABA_P Parameter: Timepoint (hr) Value: 24
  misc_feature: MA Experiment 20000453 PARAMETER Experiment Name: At_100uM_ABA_P Parameter: Tissue Value: Aerial
  misc_feature: MA Experiment 20000453 PARAMETER Experiment Name: At_100uM_ABA_P Parameter: Treatment Value: 100uM ABA vs. No Treatment
  misc_feature: MA Experiment ID: 20000794 Result: Down-regulated in Transcription
  misc_feature: MA Experiment 20000794 PARAMETER Experiment Name: At_Petals_P Parameter: Age (day) Value: 23-25 days
  misc_feature: MA Experiment 20000794 PARAMETER Experiment Name: At_Petals_P Parameter: Plant Line Value: WS
  misc_feature: MA Experiment 20000794 PARAMETER Experiment Name: At_Petals_P Parameter: Tissue Value: Petals vs. Whole plant
  misc_feature: MA Experiment ID: 20001248 Result: Up-regulated in Transcription
  misc_feature: MA Experiment 20001248 PARAMETER Experiment Name: At_Far-red-induction_P Parameter: Age (day) Value: 7
  misc_feature: MA Experiment 20001248 PARAMETER Experiment Name: At_Far-red-induction_P Parameter: Light Value: Far-red vs. White
  misc_feature: MA Experiment 20001248 PARAMETER Experiment Name: At_Far-red-induction_P Parameter: Organism Value: A. thaliana
  misc_feature: MA Experiment 20001248 PARAMETER Experiment Name: At_Far-red-induction_P Parameter: Plant Line Value: Columbia
  misc_feature: MA Experiment 20001248 PARAMETER Experiment Name: At_Far-red-induction_P Parameter: Timepoint (hr) Value: 4
  misc_feature: MA Experiment 20001248 PARAMETER Experiment Name: At_Far-red-induction_P Parameter: Tissue Value: Whole Plant
  misc_feature: MA Experiment ID: 20001450 Result: Up-regulated in Transcription
  misc_feature: MA Experiment 20001450 PARAMETER Experiment Name: At_Far-red-induction_P Parameter: Age (day) Value: 7
  misc_feature: MA Experiment 20001450 PARAMETER Experiment Name: At_Far-red-induction_P Parameter: Light Value: Far-red vs. White
  misc_feature: MA Experiment 20001450 PARAMETER Experiment Name: At_Far-red-induction_P Parameter: Organism Value: A. thaliana
  misc_feature: MA Experiment 20001450 PARAMETER Experiment Name: At_Far-red-induction_P Parameter: Plant Line Value: Columbia
  misc_feature: MA Experiment 20001450 PARAMETER Experiment Name: At_Far-red-induction_P Parameter: Timepoint (hr) Value: 8
  misc_feature: MA Experiment 20001450 PARAMETER Experiment Name: At_Far-red-induction_P Parameter: Tissue Value: Whole Plant
  misc_feature: MA Experiment ID: 20001554 Result: Down-regulated in Transcription
  misc_feature: MA Experiment 20001554 PARAMETER Experiment Name: At_Drought_Soil_Dry_P Parameter: Age (day) Value: 21
  misc_feature: MA Experiment 20001554 PARAMETER Experiment Name: At_Drought_Soil_Dry_P Parameter: Organism Value: A. thaliana
  misc_feature: MA Experiment 20001554 PARAMETER Experiment Name: At_Drought_Soil_Dry_P Parameter: Plant Line Value: WS
  misc_feature: MA Experiment 20001554 PARAMETER Experiment Name: At_Drought_Soil_Dry_P Parameter: Post Timepoint (hr) Value: None
  misc_feature: MA Experiment 20001554 PARAMETER Experiment Name: At_Drought_Soil_Dry_P Parameter: Post-Treatment Value: None
  misc_feature: MA Experiment 20001554 PARAMETER Experiment Name: At_Drought_Soil_Dry_P Parameter: Timepoint (day) Value: 7
  misc_feature: MA Experiment 20001554 PARAMETER Experiment Name: At_Drought_Soil_Dry_P Parameter: Treatment Value: Drought vs. No Drought
  misc_feature: MA Experiment ID: 20001555 Result: Down-regulated in Transcription
  misc_feature: MA Experiment 20001555 PARAMETER Experiment Name: At_Drought_Soil_Dry_P Parameter: Age (day) Value: 24
  misc_feature: MA Experiment 20001555 PARAMETER Experiment Name: At_Drought_Soil_Dry_P Parameter: Organism Value: A. thaliana
  misc_feature: MA Experiment 20001555 PARAMETER Experiment Name: At_Drought_Soil_Dry_P Parameter: Plant Line Value: WS
  misc_feature: MA Experiment 20001555 PARAMETER Experiment Name: At_Drought_Soil_Dry_P Parameter: Post Timepoint (hr) Value: None
  misc_feature: MA Experiment 20001555 PARAMETER Experiment Name: At_Drought_Soil_Dry_P Parameter: Post-Treatment Value: None
  misc_feature: MA Experiment 20001555 PARAMETER Experiment Name: At_Drought_Soil_Dry_P Parameter: Timepoint (day) Value: 10
  misc_feature: MA Experiment 20001555 PARAMETER Experiment Name: At_Drought_Soil_Dry_P Parameter: Treatment Value: Drought vs. No Drought
  misc_feature: MA Experiment ID: 20001556 Result: Down-regulated in Transcription
  misc_feature: MA Experiment 20001556 PARAMETER Experiment Name: At_Drought_Soil_Dry_P Parameter: Age (day) Value: 26
  misc_feature: MA Experiment 20001556 PARAMETER Experiment Name: At_Drought_Soil_Dry_P Parameter: Organism Value: A. thaliana
  misc_feature: MA Experiment 20001556 PARAMETER Experiment Name: At_Drought_Soil_Dry_P Parameter: Plant Line Value: WS
  misc_feature: MA Experiment 20001556 PARAMETER Experiment Name: At_Drought_Soil_Dry_P Parameter: Post Timepoint (hr) Value: None
  misc_feature: MA Experiment 20001556 PARAMETER Experiment Name: At_Drought_Soil_Dry_P Parameter: Post-Treatment Value: None
  misc_feature: MA Experiment 20001556 PARAMETER Experiment Name: At_Drought_Soil_Dry_P Parameter: Timepoint (day) Value: 12
  misc_feature: MA Experiment 20001556 PARAMETER Experiment Name: At_Drought_Soil_Dry_P Parameter: Treatment Value: Drought vs. No Drought
  misc_feature: MA Experiment ID: 20001558 Result: Up-regulated in Transcription
  misc_feature: MA Experiment 20001558 PARAMETER Experiment Name: At_Drought_Soil_Dry_P Parameter: Age (day) Value: 27
  misc_feature: MA Experiment 20001558 PARAMETER Experiment Name: At_Drought_Soil_Dry_P Parameter: Organism Value: A. thaliana
  misc_feature: MA Experiment 20001558 PARAMETER Experiment Name: At_Drought_Soil_Dry_P Parameter: Plant Line Value: WS
  misc_feature: MA Experiment 20001558 PARAMETER Experiment Name: At_Drought_Soil_Dry_P Parameter: Post Timepoint (hr) Value: 6
  misc_feature: MA Experiment 20001558 PARAMETER Experiment Name: At_Drought_Soil_Dry_P Parameter: Post-Treatment Value: Re-Water vs. No Drought
  misc_feature: MA Experiment 20001558 PARAMETER Experiment Name: At_Drought_Soil_Dry_P Parameter: Timepoint (day) Value: 13
  misc_feature: MA Experiment 20001558 PARAMETER Experiment Name: At_Drought_Soil_Dry_P Parameter: Treatment Value: Drought vs. No Drought
  misc_feature: MA Experiment ID: 20001560 Result: Up-regulated in Transcription
  misc_feature: MA Experiment 20001560 PARAMETER Experiment Name: At_Drought_Soil_Dry_P Parameter: Age (day) Value: 28
  misc_feature: MA Experiment 20001560 PARAMETER Experiment Name: At_Drought_Soil_Dry_P Parameter: Organism Value: A. thaliana
  misc_feature: MA Experiment 20001560 PARAMETER Experiment Name: At_Drought_Soil_Dry_P Parameter: Plant Line Value: WS
  misc_feature: MA Experiment 20001560 PARAMETER Experiment Name: At_Drought_Soil_Dry_P Parameter: Post Timepoint (hr) Value: None
  misc_feature: MA Experiment 20001560 PARAMETER Experiment Name: At_Drought_Soil_Dry_P Parameter: Post-Treatment Value: None
  misc_feature: MA Experiment 20001560 PARAMETER Experiment Name: At_Drought_Soil_Dry_P Parameter: Timepoint (day) Value: 14
  misc_feature: MA Experiment 20001560 PARAMETER Experiment Name: At_Drought_Soil_Dry_P Parameter: Treatment Value: Drought vs. No Drought
  misc_feature: MA Experiment ID: 20001770 Result: Up-regulated in Transcription
  misc_feature: MA Experiment 20001770 PARAMETER Experiment Name: At_Far-red-enriched-adult_P Parameter: Age (day) Value: 28
  misc_feature: MA Experiment 20001770 PARAMETER Experiment Name: At_Far-red-enriched-adult_P Parameter: Light Value: Far-red enriched vs. White
  misc_feature: MA Experiment 20001770 PARAMETER Experiment Name: At_Far-red-enriched-adult_P Parameter: Organism Value: A. thaliana
  misc_feature: MA Experiment 20001770 PARAMETER Experiment Name: At_Far-red-enriched-adult_P Parameter: Plant Line Value: Columbia
  misc_feature: MA Experiment 20001770 PARAMETER Experiment Name: At_Far-red-enriched-adult_P Parameter: Timepoint (hr) Value: 8
  misc_feature: MA Experiment 20001770 PARAMETER Experiment Name: At_Far-red-enriched-adult_P Parameter: Tissue Value: Aerial
  misc_feature: MA Experiment ID: 20001906 Result: Down-regulated in Transcription
  misc_feature: MA Experiment 20001906 PARAMETER Experiment Name: At_Drought_Reproduction_P Parameter: Age (day) Value: 35
  misc_feature: MA Experiment 20001906 PARAMETER Experiment Name: At_Drought_Reproduction_P Parameter: Organism Value: A. thaliana
  misc_feature: MA Experiment 20001906 PARAMETER Experiment Name: At_Drought_Reproduction_P Parameter: Plant Line Value: WS
  misc_feature: MA Experiment 20001906 PARAMETER Experiment Name: At_Drought_Reproduction_P Parameter: Timepoint (day) Value: 5
  misc_feature: MA Experiment 20001906 PARAMETER Experiment Name: At_Drought_Reproduction_P Parameter: Tissue Value: Siliques
  misc_feature: MA Experiment 20001906 PARAMETER Experiment Name: At_Drought_Reproduction_P Parameter: Treatment Value: Drought vs. No Drought
  misc_feature: MA Experiment ID: 20001907 Result: Down-regulated in Transcription
  misc_feature: MA Experiment 20001907 PARAMETER Experiment Name: At_Drought_Reproduction_P Parameter: Age (day) Value: 37
  misc_feature: MA Experiment 20001907 PARAMETER Experiment Name: At_Drought_Reproduction_P Parameter: Organism Value: A. thaliana
  misc_feature: MA Experiment 20001907 PARAMETER Experiment Name: At_Drought_Reproduction_P Parameter: Plant Line Value: WS
  misc_feature: MA Experiment 20001907 PARAMETER Experiment Name: At_Drought_Reproduction_P Parameter: Timepoint (day) Value: 7
  misc_feature: MA Experiment 20001907 PARAMETER Experiment Name: At_Drought_Reproduction_P Parameter: Tissue Value: Siliques
  misc_feature: MA Experiment 20001907 PARAMETER Experiment Name: At_Drought_Reproduction_P Parameter: Treatment Value: Drought vs. No Drought
  misc_feature: MA Experiment ID: 20001910 Result: Down-regulated in Transcription
  misc_feature: MA Experiment 20001910 PARAMETER Experiment Name: At_Drought_Reproduction_P Parameter: Age (day) Value: 37
  misc_feature: MA Experiment 20001910 PARAMETER Experiment Name: At_Drought_Reproduction_P Parameter: Organism Value: A. thaliana
  misc_feature: MA Experiment 20001910 PARAMETER Experiment Name: At_Drought_Reproduction_P Parameter: Plant Line Value: WS
  misc_feature: MA Experiment 20001910 PARAMETER Experiment Name: At_Drought_Reproduction_P Parameter: Timepoint (day) Value: 7
  misc_feature: MA Experiment 20001910 PARAMETER Experiment Name: At_Drought_Reproduction_P Parameter: Tissue Value: Flowers
  misc_feature: MA Experiment 20001910 PARAMETER Experiment Name: At_Drought_Reproduction_P Parameter: Treatment Value: Drought vs. No Drought
agcattacctctctctctctctctcttcgaaatattcgaagtagagtcaaccaatggagacggaaaggaggatcataacgagctgttctgccatgacggctctgttcttgttcatgacggctttaatggcgtcgtcctctatcgcagcaacaccgacacaatcgtttgaagataatttcaacattatgtggtctgaaaatcacttcacgacttccgatgatggagagatctggaatctttccttagataacgacaccggatgtggatttcagacaaagcacatgtatagattcggatggtttagtatgaagctaaagctcgtcggaggcgactccgccggcgtcgtcaccgcttactacatgtgttcggagaatggggcaggaccggagagagacgagatagatttcgaatttctagggaaccgaaccggacagccttacattattcagaccaatgtgtataagaacggaaccgggaatcgggagatgcgacattccctctggttcgacccgaccaaggattatcacacctactcaattctttggaataaccaccagcttgtgttcttcgtggatagggtaccaattcgagtatacaagaacagtgataaggtaccaaacaacgacttcttcccgaaccagaagccgatgtacttgttctccagcatttggaacgctgacgattgggctacacgtggtggtctggagaagactgactggaaaaaagctccattcgtctcttcttacaaggacttcgccgtcgaaggctgccgttggaaggatccattccctgcatgcgtctctaccacaacagagaattggtgggatcagtacgacgcgtggcatttgtccaagacacagaagatggattatgcgtgggtgcagcgtaatctcgtcgtatacgattattgcaaagacagtgagaggttccctactcttccttgggagtgttccattagcccttgggcttaaaatcaattttgttttgagtgtattaaagtggaaatggtttatgtaataattttactctcttttttttggcatttcttattttgttatggactatatcctctgtttatttatttaattaattatttatttagtcggctg

SEQ ID NO: 27882 - protein, 305 aa, Arabidopsis thaliana
  peptide (1)..(305): Ceres Seq. ID no. 12422859
  misc_feature (38)..(224): Pfam Name: Glycosyl hydrolases family 16 Pfam Description: Glycosyl hydrolases family 16
  misc_feature (13)..(299): Homolog of NCBI NO: 1885310 NR Description: Endoxyloglucan transferase (EXT) [Hordeum vulgare
  misc_feature (7)..(300): Homolog of NCBI NO: 21553421 NR Description: endo-xyloglucan transferase-like protein
  misc_feature (7)..(300): Homolog of NCBI NO: 15235714 NR Description: xyloglucan endotransglycosylase, putative
  misc_feature (21)..(299): Homolog of NCBI NO: 5070246 NR Description: xyloglucan endo-transglycosylase-like protein
  misc_feature (17)..(299): Homolog of NCBI NO: 30841326 NR Description: xyloglucan endotransglycosylase [Gossypium
  misc_feature (27)..(299): Homolog of NCBI NO: 7447418 NR Description: probable endo-xyloglucan transferase - upland
  misc_feature (14)..(299): Homolog of NCBI NO: 27261026 NR Description: putative xyloglucan endotransglycosylase
  misc_feature (1)..(305): Homolog of NCBI NO: 25313538 NR Description: protein T23J18.21 [imported] - Arabidopsis
  misc_feature (14)..(305): Homolog of NCBI NO: 38605338 NR Description: Probable xyloglucan
  misc_feature (1)..(305): Homolog of NCBI NO: 18391291 NR Description: xyloglucan endotransglycosylase, putative
METERRIITSCSAMTALFLFMTALMASSSIAATPTQSFEDNFNIMWSENHFTTSDDGEIWNLSLDNDTGCGFQTKHMYRFGWFSMKLKLVGGDSAGVVTAYYMCSENGAGPERDEIDFEFLGNRTGQPYIIQTNVYKNGTGNREMRHSLWFDPTKDYHTYSILWNNHQLVFFVDRVPIRVYKNSDKVPNNDFFPNQKPMYLFSSIWNADDWATRGGLEKTDWKKAPFVSSYKDFAVEGCRWKDPFPACVSTTTENWWDQYDAWHLSKTQKMDYAWVQRNLVVYDYCKDSERFPTLPWECSISPWA

SEQ ID NO: 27883 - protein, 292 aa, Arabidopsis thaliana
  peptide (1)..(292): Ceres Seq. ID no. 12422860
  misc_feature (25)..(211): Pfam Name: Glycosyl hydrolases family 16 Pfam Description: Glycosyl hydrolases family 16
  misc_feature (1)..(286): Homolog of NCBI NO: 1885310 NR Description: Endoxyloglucan transferase (EXT) [Hordeum vulgare
  misc_feature (1)..(287): Homolog of NCBI NO: 21553421 NR Description: endo-xyloglucan transferase-like protein
  misc_feature (1)..(287): Homolog of NCBI NO: 15235714 NR Description: xyloglucan endotransglycosylase, putative
  misc_feature (8)..(286): Homolog of NCBI NO: 5070246 NR Description: xyloglucan endo-transglycosylase-like protein
  misc_feature (4)..(286): Homolog of NCBI NO: 30841326 NR Description: xyloglucan endotransglycosylase [Gossypium
  misc_feature (14)..(286): Homolog of NCBI NO: 7447418 NR Description: probable endo-xyloglucan transferase - upland
  misc_feature (1)..(286): Homolog of NCBI NO: 27261026 NR Description: putative xyloglucan endotransglycosylase
  misc_feature (1)..(292): Homolog of NCBI NO: 25313538 NR Description: protein T23J18.21 [imported] - Arabidopsis
  misc_feature (1)..(292): Homolog of NCBI NO: 38605338 NR Description: Probable xyloglucan
  misc_feature (1)..(292): Homolog of NCBI NO: 18391291 NR Description: xyloglucan endotransglycosylase, putative
MTALFLFMTALMASSSIAATPTQSFEDNFNIMWSENHFTTSDDGEIWNLSLDNDTGCGFQTKHMYRFGWFSMKLKLVGGDSAGVVTAYYMCSENGAGPERDEIDFEFLGNRTGQPYIIQTNVYKNGTGNREMRHSLWFDPTKDYHTYSILWNNHQLVFFVDRVPIRVYKNSDKVPNNDFFPNQKPMYLFSSIWNADDWATRGGLEKTDWKKAPFVSSYKDFAVEGCRWKDPFPACVSTTTENWWDQYDAWHLSKTQKMDYAWVQRNLVVYDYCKDSERFPTLPWECSISPWA

SEQ ID NO: 27884 - protein, 285 aa, Arabidopsis thaliana
  peptide (1)..(285): Ceres Seq. ID no. 12422861
  misc_feature (18)..(204): Pfam Name: Glycosyl hydrolases family 16 Pfam Description: Glycosyl hydrolases family 16
  misc_feature (1)..(279): Homolog of NCBI NO: 1885310 NR Description: Endoxyloglucan transferase (EXT) [Hordeum vulgare
  misc_feature (1)..(280): Homolog of NCBI NO: 21553421 NR Description: endo-xyloglucan transferase-like protein
  misc_feature (1)..(280): Homolog of NCBI NO: 15235714 NR Description: xyloglucan endotransglycosylase, putative
  misc_feature (1)..(279): Homolog of NCBI NO: 5070246 NR Description: xyloglucan endo-transglycosylase-like protein
  misc_feature (1)..(279): Homolog of NCBI NO: 30841326 NR Description: xyloglucan endotransglycosylase [Gossypium
  misc_feature (7)..(279): Homolog of NCBI NO: 7447418 NR Description: probable endo-xyloglucan transferase - upland
  misc_feature (1)..(279): Homolog of NCBI NO: 27261026 NR Description: putative xyloglucan endotransglycosylase
  misc_feature (1)..(285): Homolog of NCBI NO: 25313538 NR Description: protein T23J18.21 [imported] - Arabidopsis
  misc_feature (1)..(285): Homolog of NCBI NO: 38605338 NR Description: Probable xyloglucan
  misc_feature (1)..(285): Homolog of NCBI NO: 18391291 NR Description: xyloglucan endotransglycosylase, putative
MTALMASSSIAATPTQSFEDNFNIMWSENHFTTSDDGEIWNLSLDNDTGCGFQTKHMYRFGWFSMKLKLVGGDSAGVVTAYYMCSENGAGPERDEIDFEFLGNRTGQPYIIQTNVYKNGTGNREMRHSLWFDPTKDYHTYSILWNNHQLVFFVDRVPIRVYKNSDKVPNNDFFPNQKPMYLFSSIWNADDWATRGGLEKTDWKKAPFVSSYKDFAVEGCRWKDPFPACVSTTTENWWDQYDAWHLSKTQKMDYAWVQRNLVVYDYCKDSERFPTLPWECSISPWA

SEQ ID NO: 27885 - DNA, 673 bp, Arabidopsis thaliana
  misc_feature (1)..(673): Ceres Seq. ID no. 12331700
  misc_feature: MA Experiment ID: 108434 Result: Down-regulated in Transcription
  misc_feature: MA Experiment 108434 PARAMETER Experiment Name: At_Root_Tips_cDNA_P Parameter: Tissue Value: Root Tips
  misc_feature: MA Experiment ID: 108561 Result: Up-regulated in Transcription
  misc_feature: MA Experiment 108561 PARAMETER Experiment Name: At_100uM_ABA_cDNA_P Parameter: Timepoint (hr) Value: 6
  misc_feature: MA Experiment 108561 PARAMETER Experiment Name: At_100uM_ABA_cDNA_P Parameter: Tissue Value: Aerial
  misc_feature: MA Experiment 108561 PARAMETER Experiment Name: At_100uM_ABA_cDNA_P Parameter: Treatment Value: 100uM ABA vs. No Treatment
  misc_feature: MA Experiment ID: 108576 Result: Up-regulated in Transcription
  misc_feature: MA Experiment 108576 PARAMETER Experiment Name: At_42deg_Heat_cDNA_P Parameter: Temperature (deg C) Value: 42 vs. 22
  misc_feature: MA Experiment 108576 PARAMETER Experiment Name: At_42deg_Heat_cDNA_P Parameter: Timepoint (hr) Value: 1
  misc_feature: MA Experiment 108576 PARAMETER Experiment Name: At_42deg_Heat_cDNA_P Parameter: Tissue Value: Aerial
  misc_feature: MA Experiment ID: 108577 Result: Up-regulated in Transcription
  misc_feature: MA Experiment 108577 PARAMETER Experiment Name: At_42deg_Heat_cDNA_P Parameter: Temperature (deg C) Value: 42 vs. 22
  misc_feature: MA Experiment 108577 PARAMETER Experiment Name: At_42deg_Heat_cDNA_P Parameter: Timepoint (hr) Value: 6
  misc_feature: MA Experiment 108577 PARAMETER Experiment Name: At_42deg_Heat_cDNA_P Parameter: Tissue Value: Aerial
  misc_feature: MA Experiment ID: 108579 Result: Down-regulated in Transcription
  misc_feature: MA Experiment 108579 PARAMETER Experiment Name: At_4deg_Cold_cDNA_P Parameter: Temperature (deg C) Value: 4 vs. 22
  misc_feature: MA Experiment 108579 PARAMETER Experiment Name: At_4deg_Cold_cDNA_P Parameter: Timepoint (hr) Value: 6
  misc_feature: MA Experiment 108579 PARAMETER Experiment Name: At_4deg_Cold_cDNA_P Parameter: Tissue Value: Aerial
  misc_feature: MA Experiment ID: 108595 Result: Up-regulated in Transcription
  misc_feature: MA Experiment 108595 PARAMETER Experiment Name: At_Ler-pi_Ovule_cDNA_P Parameter: Plant Line Value: null
  misc_feature: MA Experiment ID: 20000069 Result: Up-regulated in Transcription
  misc_feature: MA Experiment 20000069 PARAMETER Experiment Name: At_100uM_ABA_Mutants_cDNA_P Parameter: Plant Line Value: CS23
  misc_feature: MA Experiment 20000069 PARAMETER Experiment Name: At_100uM_ABA_Mutants_cDNA_P Parameter: Timepoint (hr) Value: 6
  misc_feature: MA Experiment 20000069 PARAMETER Experiment Name: At_100uM_ABA_Mutants_cDNA_P Parameter: Tissue Value: Aerial
  misc_feature: MA Experiment 20000069 PARAMETER Experiment Name: At_100uM_ABA_Mutants_cDNA_P Parameter: Treatment Value: 100uM ABA vs. No Treatment
  misc_feature: MA Experiment ID: 20000070 Result: Up-regulated in Transcription
  misc_feature: MA Experiment 20000070 PARAMETER Experiment Name: At_100uM_ABA_Mutants_cDNA_P Parameter: Plant Line Value: CS24
  misc_feature: MA Experiment 20000070 PARAMETER Experiment Name: At_100uM_ABA_Mutants_cDNA_P Parameter: Timepoint (hr) Value: 6
  misc_feature: MA Experiment 20000070 PARAMETER Experiment Name: At_100uM_ABA_Mutants_cDNA_P Parameter: Tissue Value: Aerial
  misc_feature: MA Experiment 20000070 PARAMETER Experiment Name: At_100uM_ABA_Mutants_cDNA_P Parameter: Treatment Value: 100uM ABA vs. No Treatment
  misc_feature: MA Experiment ID: 20000071 Result: Up-regulated in Transcription
  misc_feature: MA Experiment 20000071 PARAMETER Experiment Name: At_100uM_ABA_Mutants_cDNA_P Parameter: Plant Line Value: CS8104
  misc_feature: MA Experiment 20000071 PARAMETER Experiment Name: At_100uM_ABA_Mutants_cDNA_P Parameter: Timepoint (hr) Value: 6
  misc_feature: MA Experiment 20000071 PARAMETER Experiment Name: At_100uM_ABA_Mutants_cDNA_P Parameter: Tissue Value: Aerial
  misc_feature: MA Experiment 20000071 PARAMETER Experiment Name: At_100uM_ABA_Mutants_cDNA_P Parameter: Treatment Value: 100uM ABA vs. No Treatment
  misc_feature: MA Experiment ID: 20000072 Result: Up-regulated in Transcription
  misc_feature: MA Experiment 20000072 PARAMETER Experiment Name: At_100uM_ABA_Mutants_cDNA_P Parameter: Plant Line Value: CS8105
  misc_feature: MA Experiment 20000072 PARAMETER Experiment Name: At_100uM_ABA_Mutants_cDNA_P Parameter: Timepoint (hr) Value: 6
  misc_feature: MA Experiment 20000072 PARAMETER Experiment Name: At_100uM_ABA_Mutants_cDNA_P Parameter: Tissue Value: Aerial
  misc_feature: MA Experiment 20000072 PARAMETER Experiment Name: At_100uM_ABA_Mutants_cDNA_P Parameter: Treatment Value: 100uM ABA vs. No Treatment
  misc_feature: MA Experiment ID: 20000086 Result: Up-regulated in Transcription
  misc_feature: MA Experiment 20000086 PARAMETER Experiment Name: At_100uM_ABA_Mutants_cDNA_P Parameter: Plant Line Value: CS22
  misc_feature: MA Experiment 20000086 PARAMETER Experiment Name: At_100uM_ABA_Mutants_cDNA_P Parameter: Timepoint (hr) Value: 6
  misc_feature: MA Experiment 20000086 PARAMETER Experiment Name: At_100uM_ABA_Mutants_cDNA_P Parameter: Tissue Value: Aerial
  misc_feature: MA Experiment 20000086 PARAMETER Experiment Name: At_100uM_ABA_Mutants_cDNA_P Parameter: Treatment Value: 100uM ABA vs. No Treatment
  misc_feature: MA Experiment ID: 20000087 Result: Up-regulated in Transcription
  misc_feature: MA Experiment 20000087 PARAMETER Experiment Name: At_100uM_ABA_Mutants_cDNA_P Parameter: Plant Line Value: WS
  misc_feature: MA Experiment 20000087 PARAMETER Experiment Name: At_100uM_ABA_Mutants_cDNA_P Parameter: Timepoint (hr) Value: 6
  misc_feature: MA Experiment 20000087 PARAMETER Experiment Name: At_100uM_ABA_Mutants_cDNA_P Parameter: Tissue Value: Aerial
  misc_feature: MA Experiment 20000087 PARAMETER Experiment Name: At_100uM_ABA_Mutants_cDNA_P Parameter: Treatment Value: 100uM ABA vs. No Treatment
  misc_feature: MA Experiment ID: 20000088 Result: Up-regulated in Transcription
  misc_feature: MA Experiment 20000088 PARAMETER Experiment Name: At_100uM_ABA_Mutants_cDNA_P Parameter: Plant Line Value: Landsberg
  misc_feature: MA Experiment 20000088 PARAMETER Experiment Name: At_100uM_ABA_Mutants_cDNA_P Parameter: Timepoint (hr) Value: 6
  misc_feature: MA Experiment 20000088 PARAMETER Experiment Name: At_100uM_ABA_Mutants_cDNA_P Parameter: Tissue Value: Aerial
  misc_feature: MA Experiment 20000088 PARAMETER Experiment Name: At_100uM_ABA_Mutants_cDNA_P Parameter: Treatment Value: 100uM ABA vs. No Treatment
  misc_feature: MA Experiment ID: 20000093 Result: Up-regulated in Transcription
  misc_feature: MA Experiment 20000093 PARAMETER Experiment Name: At_42deg_Heat_cDNA_P Parameter: Temperature (deg C) Value: 42 vs. 22
  misc_feature: MA Experiment 20000093 PARAMETER Experiment Name: At_42deg_Heat_cDNA_P Parameter: Timepoint (hr) Value: 0.5
  misc_feature: MA Experiment 20000093 PARAMETER Experiment Name: At_42deg_Heat_cDNA_P Parameter: Tissue Value: Aerial
  misc_feature: MA Experiment ID: 20000111 Result: Up-regulated in Transcription
  misc_feature: MA Experiment 20000111 PARAMETER Experiment Name: At_42deg_Heat_cDNA_P Parameter: Temperature (deg C) Value: 42 vs. 22
  misc_feature: MA Experiment 20000111 PARAMETER Experiment Name: At_42deg_Heat_cDNA_P Parameter: Timepoint (hr) Value: 6
  misc_feature: MA Experiment 20000111 PARAMETER Experiment Name: At_42deg_Heat_cDNA_P Parameter: Tissue Value: Aerial
  misc_feature: MA Experiment ID: 20000112 Result: Up-regulated in Transcription
  misc_feature: MA Experiment 20000112 PARAMETER Experiment Name: At_42deg_Heat_cDNA_P Parameter: Temperature (deg C) Value: 42 vs. 22
  misc_feature: MA Experiment 20000112 PARAMETER Experiment Name: At_42deg_Heat_cDNA_P Parameter: Timepoint (hr) Value: 2
  misc_feature: MA Experiment 20000112 PARAMETER Experiment Name: At_42deg_Heat_cDNA_P Parameter: Tissue Value: Aerial
  misc_feature: MA Experiment ID: 20000113 Result: Up-regulated in Transcription
  misc_feature: MA Experiment 20000113 PARAMETER Experiment Name: At_42deg_Heat_cDNA_P Parameter: Temperature (deg C) Value: 42 vs. 22
  misc_feature: MA Experiment 20000113 PARAMETER Experiment Name: At_42deg_Heat_cDNA_P Parameter: Timepoint (hr) Value: 8
  misc_feature: MA Experiment 20000113 PARAMETER Experiment Name: At_42deg_Heat_cDNA_P Parameter: Tissue Value: Aerial
  misc_feature: MA Experiment ID: 20000117 Result: Up-regulated in Transcription
  misc_feature: MA Experiment 20000117 PARAMETER Experiment Name: At_100uM_ABA_Mutants_cDNA_P Parameter: Plant Line Value: Columbia
  misc_feature: MA Experiment 20000117 PARAMETER Experiment Name: At_100uM_ABA_Mutants_cDNA_P Parameter: Timepoint (hr) Value: 6
  misc_feature: MA Experiment 20000117 PARAMETER Experiment Name: At_100uM_ABA_Mutants_cDNA_P Parameter: Tissue Value: Aerial
  misc_feature: MA Experiment 20000117 PARAMETER Experiment Name: At_100uM_ABA_Mutants_cDNA_P Parameter: Treatment Value: 100uM ABA vs. No Treatment
  misc_feature: MA Experiment ID: 20000144 Result: Up-regulated in Transcription
  misc_feature: MA Experiment 20000144 PARAMETER Experiment Name: At_42deg_Heat_cDNA_P Parameter: Temperature (deg C) Value: 42 vs. 22
  misc_feature: MA Experiment 20000144 PARAMETER Experiment Name: At_42deg_Heat_cDNA_P Parameter: Timepoint (hr) Value: 1
  misc_feature: MA Experiment 20000144 PARAMETER Experiment Name: At_42deg_Heat_cDNA_P Parameter: Tissue Value: Aerial
aaatttccacttagagatcatcgagagggcaagagagaaaaatgggaaaggcacgtacggtgggagtgggaatggactattctccgacgagcaaattagctctccggtgggcggcggagaatctccttgaagacggcgacaccgtcatcttgattcacgtccaaccacaaaacgccgatcatacccgcaaaatcctcttcgaggaaaccggttcaccgctaattcctttggaggaatttagagaggttaatttgtctaaacagtatggacttgcttacgatcctgaggttcttgatgttcttgatactctctctagggctaaaaaggtgaaggttgtagcaaaggtgtattggggagatccaagggagaaactttgtgatgctgtcgaaaatctaaaactcgattccattgttcttggcagtcgaggtttgggttctctcaaaaggatcttgctgggtagtgtgagcaatcatgtggtgacaaatgcaacatgtcctgtcacagttgttaaggctaattaaagtgtctcttgttctttaattggacccagttaataacattagtagttacgtgtgtcactcatgcattgttttgacatttatacgtttgttgccttctacaaatttgtgtgaaactgattggtactgtttcattaataaatttcagttaaatg

SEQ ID NO: 27886 - protein, 159 aa, Arabidopsis thaliana
  peptide (1)..(159): Ceres Seq. ID no. 12331701
  misc_feature (3)..(157): Pfam Name: Universal stress protein family Pfam Description: Universal stress protein family
  misc_feature (2)..(157): Homolog of NCBI NO: 25402657 NR Description: protein T23J18.3 [imported] - Arabidopsis
  misc_feature (1)..(159): Homolog of NCBI NO: 15528707 NR Description: P0583G08.8 [Oryza sativa (japonica
  misc_feature (5)..(159): Homolog of NCBI NO: 18401345 NR Description: expressed protein
  misc_feature (1)..(157): Homolog of NCBI NO: 11602749 NR Description: early nodulin ENOD18 [Vicia faba]
  misc_feature (5)..(157): Homolog of NCBI NO: 11602751 NR Description: ENOD18 protein [Vicia faba]
  misc_feature (1)..(157): Homolog of NCBI NO: 11602747 NR Description: early nodulin ENOD18 [Vicia faba]
  misc_feature (1)..(159): Homolog of NCBI NO: 30693971 NR Description: expressed protein [Arabidopsis thaliana]
  misc_feature (2)..(158): Homolog of NCBI NO: 20160561 NR Description: P0414E03.3 [Oryza sativa (japonica
  misc_feature (1)..(135): Homolog of NCBI NO: 18396497 NR Description: expressed protein
  misc_feature (1)..(159): Homolog of NCBI NO: 30678807 NR Description: expressed protein [Arabidopsis thaliana]
MGKARTVGVGMDYSPTSKLALRWAAENLLEDGDTVILIHVQPQNADHTRKILFEETGSPLIPLEEFREVNLSKQYGLAYDPEVLDVLDTLSRAKKVKVVAKVYWGDPREKLCDAVENLKLDSIVLGSRGLGSLKRILLGSVSNHVVTNATCPVTVVKAN

SEQ ID NO: 27887 - protein, 149 aa, Arabidopsis thaliana
  peptide (1)..(149): Ceres Seq. ID no. 12331702
  misc_feature (1)..(147): Pfam Name: Universal stress protein family Pfam Description: Universal stress protein family
  misc_feature (1)..(147): Homolog of NCBI NO: 25402657 NR Description: protein T23J18.3 [imported] - Arabidopsis
  misc_feature (1)..(149): Homolog of NCBI NO: 15528707 NR Description: P0583G08.8 [Oryza sativa (japonica
  misc_feature (1)..(149): Homolog of NCBI NO: 18401345 NR Description: expressed protein
  misc_feature (1)..(147): Homolog of NCBI NO: 11602749 NR Description: early nodulin ENOD18 [Vicia faba]
  misc_feature (1)..(147): Homolog of NCBI NO: 11602751 NR Description: ENOD18 protein [Vicia faba]
  misc_feature (1)..(147): Homolog of NCBI NO: 11602747 NR Description: early nodulin ENOD18 [Vicia faba]
  misc_feature (1)..(149): Homolog of NCBI NO: 30693971 NR Description: expressed protein [Arabidopsis thaliana]
  misc_feature (1)..(148): Homolog of NCBI NO: 20160561 NR Description: P0414E03.3 [Oryza sativa (japonica
  misc_feature (1)..(125): Homolog of NCBI NO: 18396497 NR Description: expressed protein
  misc_feature (1)..(149): Homolog of NCBI NO: 30678807 NR Description: expressed protein [Arabidopsis thaliana]
MDYSPTSKLALRWAAENLLEDGDTVILIHVQPQNADHTRKILFEETGSPLIPLEEFREVNLSKQYGLAYDPEVLDVLDTLSRAKKVKVVAKVYWGDPREKLCDAVENLKLDSIVLGSRGLGSLKRILLGSVSNHVVTNATCPVTVVKAN

SEQ ID NO: 27888 - DNA, 847 bp, Arabidopsis thaliana
  misc_feature (1)..(847): Ceres Seq. ID no. 12331364
  misc_feature: MA Experiment ID: 108577 Result: Up-regulated in Transcription
  misc_feature: MA Experiment 108577 PARAMETER Experiment Name: At_42deg_Heat_cDNA_P Parameter: Temperature (deg C) Value: 42 vs. 22
  misc_feature: MA Experiment 108577 PARAMETER Experiment Name: At_42deg_Heat_cDNA_P Parameter: Timepoint (hr) Value: 6
  misc_feature: MA Experiment 108577 PARAMETER Experiment Name: At_42deg_Heat_cDNA_P Parameter: Tissue Value: Aerial
  misc_feature: MA Experiment ID: 108595 Result: Up-regulated in Transcription
  misc_feature: MA Experiment 108595 PARAMETER Experiment Name: At_Ler-pi_Ovule_cDNA_P Parameter: Plant Line Value: null
  misc_feature: MA Experiment ID: 20000437 Result: Up-regulated in Transcription
  misc_feature: MA Experiment 20000437 PARAMETER Experiment Name: At_Drought_P Parameter: Age (day) Value: 8
  misc_feature: MA Experiment 20000437 PARAMETER Experiment Name: At_Drought_P Parameter: Organism Value: A. thaliana
  misc_feature: MA Experiment 20000437 PARAMETER Experiment Name: At_Drought_P Parameter: Plant Line Value: WS
  misc_feature: MA Experiment 20000437 PARAMETER Experiment Name: At_Drought_P Parameter: Timepoint (hr) Value: 24
  misc_feature: MA Experiment 20000437 PARAMETER Experiment Name: At_Drought_P Parameter: Tissue Value: Whole Plant
  misc_feature: MA Experiment 20000437 PARAMETER Experiment Name: At_Drought_P Parameter: Treatment Value: Drought vs. No Drought
aataaacaccagtcgcagcgtttcgtagaaaaattcgatttctctaaagccctaaaactaaaacgactatccccaattccaagttctagggtttccatcttccccaatctagtataaatggcggatacgccttcgagcccagctggagatggcggagaaagcggcggttccgttagggagcaggatcgataccttcctatagctaatatcagcaggatcatgaagaaagcgttgcctcctaatggtaagattggaaaagatgctaaggatacagttcaggaatgcgtctctgagttcatcagcttcatcactagcgaggccagtgataagtgtcaaaaagagaaaaggaaaactgtgaatggtgatgatttgttgtgggcaatggcaacattaggatttgaggattacctggaacctctaaagatatacctagcgaggtacagggagttggagggtgataataagggatcaggaaagagtggagatggatcaaatagagatgctggtggcggtgtttctggtgaagaaatgccgagctggtaaaagaagttgcaagtagtgattaagaacaatcgccaaatgatcaagggaaattagagatcagtgagttgtttatagttgagctgatcgacaactatttcgggtttactctcaatttcggttatgttagtttgaacgtttggtttattgtttccggtttagttggttgtatttaaagatttctctgttagatgttgagaacacttgaatgaaggaaaaatttgtccacatcctgttgttattttcgattcactttcggaatttcatagctaatttattctcatttaataccaaatccttaaattaa

SEQ ID NO: 27889 - protein, 141 aa, Arabidopsis thaliana
  peptide (1)..(141): Ceres Seq. ID no. 12331365
  misc_feature (1)..(140): Homolog of NCBI NO: 34908028 NR Description: putative CAAT-box DNA binding protein
  misc_feature (1)..(140): Homolog of NCBI NO: 30409459 NR Description: NF-YB [Oryza sativa (japonica cultivar-group)]
  misc_feature (1)..(136): Homolog of NCBI NO: 17979253 NR Description: At2g37060/T2N18.18 [Arabidopsis thaliana]
  misc_feature (1)..(128): Homolog of NCBI NO: 15231796 NR Description: transcription factor NF-Y, CCAAT-binding - like
  misc_feature (10)..(135): Homolog of NCBI NO: 30409461 NR Description: NF-YB [Oryza sativa (japonica cultivar-group)]
  misc_feature (1)..(133): Homolog of NCBI NO: 115840 NR Description: CCAAT-BINDING TRANSCRIPTION FACTOR SUBUNIT A (NF-Y PROTEIN CHAIN B) (NF-YB) (CAAT-BOX DNA BINDING PROTEIN
  misc_feature (1)..(133): Homolog of NCBI NO: 22380 NR Description: CAAT-box DNA binding protein subunit B (NF-YB)
  misc_feature (1)..(111): Homolog of NCBI NO: 30687688 NR Description: CCAAT-binding transcription factor subunit
  misc_feature (1)..(139): Homolog of NCBI NO: 25299604 NR Description: hypothetical protein At2g38880 [imported] -
  misc_feature (1)..(141): Homolog of NCBI NO: 18404885 NR Description: putative CCAAT-binding transcription factor
MADTPSSPAGDGGESGGSVREQDRYLPIANISRIMKKALPPNGKIGKDAKDTVQECVSEFISFITSEASDKCQKEKRKTVNGDDLLWAMATLGFEDYLEPLKIYLARYRELEGDNKGSGKSGDGSNRDAGGGVSGEEMPSW

SEQ ID NO: 27890 - protein, 107 aa, Arabidopsis thaliana
  peptide (1)..(107): Ceres Seq. ID no. 12331366
  misc_feature (1)..(106): Homolog of NCBI NO: 34908028 NR Description: putative CAAT-box DNA binding protein
  misc_feature (1)..(106): Homolog of NCBI NO: 30409459 NR Description: NF-YB [Oryza sativa (japonica cultivar-group)]
  misc_feature (1)..(102): Homolog of NCBI NO: 17979253 NR Description: At2g37060/T2N18.18 [Arabidopsis thaliana]
  misc_feature (1)..(94): Homolog of NCBI NO: 15231796 NR Description: transcription factor NF-Y, CCAAT-binding - like
  misc_feature (1)..(101): Homolog of NCBI NO: 30409461 NR Description: NF-YB [Oryza sativa (japonica cultivar-group)]
  misc_feature (1)..(99): Homolog of NCBI NO: 115840 NR Description: CCAAT-BINDING TRANSCRIPTION FACTOR SUBUNIT A (NF-Y PROTEIN CHAIN B) (NF-YB) (CAAT-BOX DNA BINDING PROTEIN
  misc_feature (1)..(99): Homolog of NCBI NO: 22380 NR Description: CAAT-box DNA binding protein subunit B (NF-YB)
  misc_feature (1)..(77): Homolog of NCBI NO: 30687688 NR Description: CCAAT-binding transcription factor subunit
  misc_feature (1)..(105): Homolog of NCBI NO: 25299604 NR Description: hypothetical protein At2g38880 [imported] -
  misc_feature (1)..(107): Homolog of NCBI NO: 18404885 NR Description: putative CCAAT-binding transcription factor
MKKALPPNGKIGKDAKDTVQECVSEFISFITSEASDKCQKEKRKTVNGDDLLWAMATLGFEDYLEPLKIYLARYRELEGDNKGSGKSGDGSNRDAGGGVSGEEMPSW

SEQ ID NO: 27891 - DNA, 1149 bp, Arabidopsis thaliana
  misc_feature (1)..(1149): Ceres Seq. ID no. 13487530
  misc_feature: MA Experiment ID: 20000180 Result: Up-regulated in Transcription
  misc_feature: MA Experiment 20000180 PARAMETER Experiment Name: At_Germinating_Seeds_P Parameter: Age (hr) Value: 24 vs. 0
  misc_feature: MA Experiment 20000180 PARAMETER Experiment Name: At_Germinating_Seeds_P Parameter: Tissue Value: Germinating Seeds
  misc_feature: MA Experiment ID: 20000184 Result: Up-regulated in Transcription
  misc_feature: MA Experiment 20000184 PARAMETER Experiment Name: At_Shoots__P Parameter: Age (day) Value: 7
  misc_feature: MA Experiment 20000184 PARAMETER Experiment Name: At_Shoots__P Parameter: Tissue Value: Shoots vs. Whole Plant
  misc_feature: MA Experiment ID: 20000185 Result: Down-regulated in Transcription
  misc_feature: MA Experiment 20000185 PARAMETER Experiment Name: At_Roots__P Parameter: Age (day) Value: 7 vs. 21
  misc_feature: MA Experiment 20000185 PARAMETER Experiment Name: At_Roots__P Parameter: Organism Value: A. thaliana
  misc_feature: MA Experiment 20000185 PARAMETER Experiment Name: At_Roots__P Parameter: Tissue Value: Roots vs. Whole Plant
  misc_feature: MA Experiment ID: 20000438 Result: Up-regulated in Transcription
  misc_feature: MA Experiment 20000438 PARAMETER Experiment Name: At_Shoots__P Parameter: Age (day) Value: 14
  misc_feature: MA Experiment 20000438 PARAMETER Experiment Name: At_Shoots__P Parameter: Tissue Value: Shoots vs. Whole Plant
  misc_feature: MA Experiment ID: 20000439 Result: Down-regulated in Transcription
  misc_feature: MA Experiment 20000439 PARAMETER Experiment Name: At_Roots__P Parameter: Age (day) Value: 14 vs. 21
  misc_feature: MA Experiment 20000439 PARAMETER Experiment Name: At_Roots__P Parameter: Organism Value: A. thaliana
  misc_feature: MA Experiment 20000439 PARAMETER Experiment Name: At_Roots__P Parameter: Tissue Value: Roots vs. Whole Plant
  misc_feature: MA Experiment ID: 20000573 Result: Down-regulated in Transcription
  misc_feature: MA Experiment 20000573 PARAMETER Experiment Name: At_100uM_ABA_Mutants__P Parameter: Organism Value: A. thaliana
  misc_feature: MA Experiment 20000573 PARAMETER Experiment Name: At_100uM_ABA_Mutants__P Parameter: Plant Line Value: CS22 vs. Ler wt
  misc_feature: MA Experiment 20000573 PARAMETER Experiment Name: At_100uM_ABA_Mutants__P Parameter: Timepoint (hr) Value: N/A
  misc_feature: MA Experiment 20000573 PARAMETER Experiment Name: At_100uM_ABA_Mutants__P Parameter: Tissue Value: Whole Plant
  misc_feature: MA Experiment 20000573 PARAMETER Experiment Name: At_100uM_ABA_Mutants__P Parameter: Treatment Value: None
  misc_feature: MA Experiment ID: 20001248 Result: Down-regulated in Transcription
  misc_feature: MA Experiment 20001248 PARAMETER Experiment Name: At_Far-red-induction_P Parameter: Age (day) Value: 7
  misc_feature: MA Experiment 20001248 PARAMETER Experiment Name: At_Far-red-induction_P Parameter: Light Value: Far-red vs. White
  misc_feature: MA Experiment 20001248 PARAMETER Experiment Name: At_Far-red-induction_P Parameter: Organism Value: A. thaliana
  misc_feature: MA Experiment 20001248 PARAMETER Experiment Name: At_Far-red-induction_P Parameter: Plant Line Value: Columbia
  misc_feature: MA Experiment 20001248 PARAMETER Experiment Name: At_Far-red-induction_P Parameter: Timepoint (hr) Value: 4
  misc_feature: MA Experiment 20001248 PARAMETER Experiment Name: At_Far-red-induction_P Parameter: Tissue Value: Whole Plant
  misc_feature: MA Experiment ID: 20001558 Result: Up-regulated in Transcription
  misc_feature: MA Experiment 20001558 PARAMETER Experiment Name: At_Drought_Soil_Dry_P Parameter: Age (day) Value: 27
  misc_feature: MA Experiment 20001558 PARAMETER Experiment Name: At_Drought_Soil_Dry_P Parameter: Organism Value: A. thaliana
  misc_feature: MA Experiment 20001558 PARAMETER Experiment Name: At_Drought_Soil_Dry_P Parameter: Plant Line Value: WS
  misc_feature: MA Experiment 20001558 PARAMETER Experiment Name: At_Drought_Soil_Dry_P Parameter: Post Timepoint (hr) Value: 6
  misc_feature: MA Experiment 20001558 PARAMETER Experiment Name: At_Drought_Soil_Dry_P Parameter: Post-Treatment Value: Re-Water vs. No Drought
  misc_feature: MA Experiment 20001558 PARAMETER Experiment Name: At_Drought_Soil_Dry_P Parameter: Timepoint (day) Value: 13
  misc_feature: MA Experiment 20001558 PARAMETER Experiment Name: At_Drought_Soil_Dry_P Parameter: Treatment Value: Drought vs. No Drought
  misc_feature: MA Experiment ID: 20001910 Result: Down-regulated in Transcription
  misc_feature: MA Experiment 20001910 PARAMETER Experiment Name: At_Drought_Reproduction_P Parameter: Age (day) Value: 37
  misc_feature: MA Experiment 20001910 PARAMETER Experiment Name: At_Drought_Reproduction_P Parameter: Organism Value: A. thaliana
  misc_feature: MA Experiment 20001910 PARAMETER Experiment Name: At_Drought_Reproduction_P Parameter: Plant Line Value: WS
  misc_feature: MA Experiment 20001910 PARAMETER Experiment Name: At_Drought_Reproduction_P Parameter: Timepoint (day) Value: 7
  misc_feature: MA Experiment 20001910 PARAMETER Experiment Name: At_Drought_Reproduction_P Parameter: Tissue Value: Flowers
  misc_feature: MA Experiment 20001910 PARAMETER Experiment Name: At_Drought_Reproduction_P Parameter: Treatment Value: Drought vs. No Drought
cacacaaaagaagaaaaagagagaaatgggtaactctttgatctctcttctctcaatcttccacttgctggtgttatggggatcctcagtgaatgcctattggccaccatcacctggttattggccaagctccaaggttggttccctcaacttctacaaaggttttaggaatctttggggtcctcagcatcagagaatggaccaaaatgccctcaccatctggcttgatagaacctcaggaagtggattcaagtcagtgaagccattcagatcaggctactttggagcaaacatcaaactccaacctggctacactgctggagtcatcacatctctctatctatcaaataatgaggcacatccagggttccatgatgaggtagacatagaatttttggggacaacatttgggaagccttacacacttcagacaaatgtgtatattagaggaagtggtgatgggaaaatcattggccgtgagatgaagtttcgcttgtggtttgatccaactaaagattttcaccattatgctattctttggagccctagagaaatcatatttttggtggatgatattcccataagaagatacccaaagaagagtgcgtctacatttcctttaagaccaatgtggctttatggttccatatgggatgcttcttcttgggcaacggaagacggtaaatacaaagccgactataaatatcaacctttcactgctaaatacaccaattttaaagcgctcggctgcaccgcctactcgtcagctcggtgctatccgttgtcggcttcgccataccgttctggcggattaacccgacaacaacaccaagccatgagatgggttcaaacacatagtatggtatacaattattgcaaagattataagcgagaccattctttaacgccggaatgttggcgttaggaaatattcgatgaaagtcccaaagtttgagagttttaatcacatcaaagttaataccagaaagagcttggtacaattttgggatttttttcattactattattatgtggttggttgtttcacgaaaataaattttcttttttttttgacttatcatcttgtcttatgtaaatgtatccagtacggtaccatattgttttgtcaatcgtctgtgactgtgtctc

SEQ ID NO: 27892 - protein, 307 aa, Arabidopsis thaliana
  peptide (1)..(307): Ceres Seq. ID no. 13487531
  misc_feature (51)..(235): Pfam Name: Glycosyl hydrolases family 16 Pfam Description: Glycosyl hydrolases family 16
  misc_feature (50)..(305): Homolog of NCBI NO: 38605153 NR Description: Probable xyloglucan
  misc_feature (114)..(305): Homolog of NCBI NO: 1084391 NR Description: xyloglucan endo-1,4-beta-D-glucanase (EC 3.2.1.-)
  misc_feature (10)..(305): Homolog of NCBI NO: 37536586 NR Description: putative cellulase [Oryza sativa (japonica
  misc_feature (36)..(305): Homolog of NCBI NO: 34901732 NR Description: putative xyloglucan endo-transglycosylase
  misc_feature (14)..(305): Homolog of NCBI NO: 15230574 NR Description: xyloglucan endotransglycosylase, putative
  misc_feature (14)..(305): Homolog of NCBI NO: 1769907 NR Description: xyloglucan endo-transglycosylase [Arabidopsis
  misc_feature (13)..(305): Homolog of NCBI NO: 14029149 NR Description: xyloglucan endo-transglycosylase [Carica papaya]
  misc_feature (22)..(305): Homolog of NCBI NO: 17402583 NR Description: Xyloglucan endo-transglycosylase [Vitis labrusca
  misc_feature (15)..(305): Homolog of NCBI NO: 1362078 NR Description: xyloglucan endo-1,4-beta-D-glucanase (EC 3.2.1.-)
  misc_feature (9)..(307): Homolog of NCBI NO: 15228047 NR Description: xyloglucan endotransglycosylase, putative
TQKKKKREMGNSLISLLSIFHLLVLWGSSVNAYWPPSPGYWPSSKVGSLNFYKGFRNLWGPQHQRMDQNALTIWLDRTSGSGFKSVKPFRSGYFGANIKLQPGYTAGVITSLYLSNNEAHPGFHDEVDIEFLGTTFGKPYTLQTNVYIRGSGDGKIIGREMKFRLWFDPTKDFHHYAILWSPREIIFLVDDIPIRRYPKKSASTFPLRPMWLYGSIWDASSWATEDGKYKADYKYQPFTAKYTNFKALGCTAYSSARCYPLSASPYRSGGLTRQQHQAMRWVQTHSMVYNYCKDYKRDHSLTPECWR

SEQ ID NO: 27893 - protein, 299 aa, Arabidopsis thaliana
  peptide (1)..(299): Ceres Seq. ID no. 13487532
  misc_feature (43)..(227): Pfam Name: Glycosyl hydrolases family 16 Pfam Description: Glycosyl hydrolases family 16
  misc_feature (42)..(297): Homolog of NCBI NO: 38605153 NR Description: Probable xyloglucan
  misc_feature (106)..(297): Homolog of NCBI NO: 1084391 NR Description: xyloglucan endo-1,4-beta-D-glucanase (EC 3.2.1.-)
  misc_feature (2)..(297): Homolog of NCBI NO: 37536586 NR Description: putative cellulase [Oryza sativa (japonica
  misc_feature (28)..(297): Homolog of NCBI NO: 34901732 NR Description: putative xyloglucan endo-transglycosylase
  misc_feature (6)..(297): Homolog of NCBI NO: 15230574 NR Description: xyloglucan endotransglycosylase, putative
  misc_feature (6)..(297): Homolog of NCBI NO: 1769907 NR Description: xyloglucan endo-transglycosylase [Arabidopsis
  misc_feature (5)..(297): Homolog of NCBI NO: 14029149 NR Description: xyloglucan endo-transglycosylase [Carica papaya]
  misc_feature (14)..(297): Homolog of NCBI NO: 17402583 NR Description: Xyloglucan endo-transglycosylase [Vitis labrusca
  misc_feature (7)..(297): Homolog of NCBI NO: 1362078 NR Description: xyloglucan endo-1,4-beta-D-glucanase (EC 3.2.1.-)
  misc_feature (1)..(299): Homolog of NCBI NO: 15228047 NR Description: xyloglucan endotransglycosylase, putative
MGNSLISLLSIFHLLVLWGSSVNAYWPPSPGYWPSSKVGSLNFYKGFRNLWGPQHQRMDQNALTIWLDRTSGSGFKSVKPFRSGYFGANIKLQPGYTAGVITSLYLSNNEAHPGFHDEVDIEFLGTTFGKPYTLQTNVYIRGSGDGKIIGREMKFRLWFDPTKDFHHYAILWSPREIIFLVDDIPIRRYPKKSASTFPLRPMWLYGSIWDASSWATEDGKYKADYKYQPFTAKYTNFKALGCTAYSSARCYPLSASPYRSGGLTRQQHQAMRWVQTHSMVYNYCKDYKRDHSLTPECWR

SEQ ID NO: 27894 - protein, 242 aa, Arabidopsis thaliana
  peptide (1)..(242): Ceres Seq. ID no. 13487533
  misc_feature (1)..(170): Pfam Name: Glycosyl hydrolases family 16 Pfam Description: Glycosyl hydrolases family 16
  misc_feature (1)..(240): Homolog of NCBI NO: 38605153 NR Description: Probable xyloglucan
  misc_feature (49)..(240): Homolog of NCBI NO: 1084391 NR Description: xyloglucan endo-1,4-beta-D-glucanase (EC 3.2.1.-)
  misc_feature (1)..(240): Homolog of NCBI NO: 37536586 NR Description: putative cellulase [Oryza sativa (japonica
  misc_feature (1)..(240): Homolog of NCBI NO: 34901732 NR Description: putative xyloglucan endo-transglycosylase
  misc_feature (1)..(240): Homolog of NCBI NO: 15230574 NR Description: xyloglucan endotransglycosylase, putative
  misc_feature (1)..(240): Homolog of NCBI NO: 1769907 NR Description: xyloglucan endo-transglycosylase [Arabidopsis
  misc_feature (1)..(240): Homolog of NCBI NO: 14029149 NR Description: xyloglucan endo-transglycosylase [Carica papaya]
  misc_feature (1)..(240): Homolog of NCBI NO: 17402583 NR Description: Xyloglucan endo-transglycosylase [Vitis labrusca
  misc_feature (1)..(240): Homolog of NCBI NO: 1362078 NR Description: xyloglucan endo-1,4-beta-D-glucanase (EC 3.2.1.-)
  misc_feature (1)..(242): Homolog of NCBI NO: 15228047 NR Description: xyloglucan endotransglycosylase, putative
MDQNALTIWLDRTSGSGFKSVKPFRSGYFGANIKLQPGYTAGVITSLYLSNNEAHPGFHDEVDIEFLGTTFGKPYTLQTNVYIRGSGDGKIIGREMKFRLWFDPTKDFHHYAILWSPREIIFLVDDIPIRRYPKKSASTFPLRPMWLYGSIWDASSWATEDGKYKADYKYQPFTAKYTNFKALGCTAYSSARCYPLSASPYRSGGLTRQQHQAMRWVQTHSMVYNYCKDYKRDHSLTPECWR

SEQ ID NO: 27895 - DNA, 2320 bp, Arabidopsis thaliana
  misc_feature (1)..(2320): Ceres Seq. ID no. 13509885
  misc_feature: MA Experiment ID: 20000180 Result: Up-regulated in Transcription
  misc_feature: MA Experiment 20000180 PARAMETER Experiment Name: At_Germinating_Seeds_P Parameter: Age (hr) Value: 24 vs. 0
  misc_feature: MA Experiment 20000180 PARAMETER Experiment Name: At_Germinating_Seeds_P Parameter: Tissue Value: Germinating Seeds
  misc_feature: MA Experiment ID: 20000185 Result: Down-regulated in Transcription
  misc_feature: MA Experiment 20000185 PARAMETER Experiment Name: At_Roots__P Parameter: Age (day) Value: 7 vs. 21
  misc_feature: MA Experiment 20000185 PARAMETER Experiment Name: At_Roots__P Parameter: Organism Value: A. thaliana
  misc_feature: MA Experiment 20000185 PARAMETER Experiment Name: At_Roots__P Parameter: Tissue Value: Roots vs. Whole Plant
  misc_feature: MA Experiment ID: 20000234 Result: Down-regulated in Transcription
  misc_feature: MA Experiment 20000234 PARAMETER Experiment Name: At_Siliques_P Parameter: Age (day) Value: 21
  misc_feature: MA Experiment 20000234 PARAMETER Experiment Name: At_Siliques_P Parameter: Organism Value: A. thaliana
  misc_feature: MA Experiment 20000234 PARAMETER Experiment Name: At_Siliques_P Parameter: Plant Line Value: WS
  misc_feature: MA Experiment 20000234 PARAMETER Experiment Name: At_Siliques_P Parameter: Tissue Value: Less Than 5mm Siliques vs. Whole Plant
  misc_feature: MA Experiment ID: 20000235 Result: Down-regulated in Transcription
  misc_feature: MA Experiment 20000235 PARAMETER Experiment Name: At_Siliques_P Parameter: Age (day) Value: 21
  misc_feature: MA Experiment 20000235 PARAMETER Experiment Name: At_Siliques_P Parameter: Organism Value: A. thaliana
  misc_feature: MA Experiment 20000235 PARAMETER Experiment Name: At_Siliques_P Parameter: Plant Line Value: WS
  misc_feature: MA Experiment 20000235 PARAMETER Experiment Name: At_Siliques_P Parameter: Tissue Value: 5-10mm Siliques vs. Whole Plant
  misc_feature: MA Experiment ID: 20000265 Result: Down-regulated in Transcription
  misc_feature: MA Experiment 20000265 PARAMETER Experiment Name: At_Open_Flower_P Parameter: Age (day) Value: 21
  misc_feature: MA Experiment 20000265 PARAMETER Experiment Name: At_Open_Flower_P Parameter: Plant Line Value: WS
  misc_feature: MA Experiment 20000265 PARAMETER Experiment Name: At_Open_Flower_P Parameter: Tissue Value: Closed Flower vs. Whole Plant
  misc_feature: MA Experiment ID: 20000286 Result: Down-regulated in Transcription
  misc_feature: MA Experiment 20000286 PARAMETER Experiment Name: At_Open_Flower_P Parameter: Age (day) Value: 21
  misc_feature: MA Experiment 20000286 PARAMETER Experiment Name: At_Open_Flower_P Parameter: Plant Line Value: WS
  misc_feature: MA Experiment 20000286 PARAMETER Experiment Name: At_Open_Flower_P Parameter: Tissue Value: Half Open vs. Whole Plant
  misc_feature: MA Experiment ID: 20000439 Result: Down-regulated in Transcription
  misc_feature: MA Experiment 20000439 PARAMETER Experiment Name: At_Roots__P Parameter: Age (day) Value: 14 vs. 21
  misc_feature: MA Experiment 20000439 PARAMETER Experiment Name: At_Roots__P Parameter: Organism Value: A. thaliana
  misc_feature: MA Experiment 20000439 PARAMETER Experiment Name: At_Roots__P Parameter: Tissue Value: Roots vs. Whole Plant
  misc_feature: MA Experiment ID: 20001555 Result: Down-regulated in Transcription
  misc_feature: MA Experiment 20001555 PARAMETER Experiment Name: At_Drought_Soil_Dry_P Parameter: Age (day) Value: 24
  misc_feature: MA Experiment 20001555 PARAMETER Experiment Name: At_Drought_Soil_Dry_P Parameter: Organism Value: A. thaliana
  misc_feature: MA Experiment 20001555 PARAMETER Experiment Name: At_Drought_Soil_Dry_P Parameter: Plant Line Value: WS
  misc_feature: MA Experiment 20001555 PARAMETER Experiment Name: At_Drought_Soil_Dry_P Parameter: Post Timepoint (hr) Value: None
  misc_feature: MA Experiment 20001555 PARAMETER Experiment Name: At_Drought_Soil_Dry_P Parameter: Post-Treatment Value: None
  misc_feature: MA Experiment 20001555 PARAMETER Experiment Name: At_Drought_Soil_Dry_P Parameter: Timepoint (day) Value: 10
  misc_feature: MA Experiment 20001555 PARAMETER Experiment Name: At_Drought_Soil_Dry_P Parameter: Treatment Value: Drought vs. No Drought
  misc_feature: MA Experiment ID: 20001556 Result: Down-regulated in Transcription
  misc_feature: MA Experiment 20001556 PARAMETER Experiment Name: At_Drought_Soil_Dry_P Parameter: Age (day) Value: 26
  misc_feature: MA Experiment 20001556 PARAMETER Experiment Name: At_Drought_Soil_Dry_P Parameter: Organism Value: A. thaliana
  misc_feature: MA Experiment 20001556 PARAMETER Experiment Name: At_Drought_Soil_Dry_P Parameter: Plant Line Value: WS
  misc_feature: MA Experiment 20001556 PARAMETER Experiment Name: At_Drought_Soil_Dry_P Parameter: Post Timepoint (hr) Value: None
  misc_feature: MA Experiment 20001556 PARAMETER Experiment Name: At_Drought_Soil_Dry_P Parameter: Post-Treatment Value: None
  misc_feature: MA Experiment 20001556 PARAMETER Experiment Name: At_Drought_Soil_Dry_P Parameter: Timepoint (day) Value: 12
  misc_feature: MA Experiment 20001556 PARAMETER Experiment Name: At_Drought_Soil_Dry_P Parameter: Treatment Value: Drought vs. No Drought
  misc_feature: MA Experiment ID: 20001557 Result: Down-regulated in Transcription
  misc_feature: MA Experiment 20001557 PARAMETER Experiment Name: At_Drought_Soil_Dry_P Parameter: Age (day) Value: 27
  misc_feature: MA Experiment 20001557 PARAMETER Experiment Name: At_Drought_Soil_Dry_P Parameter: Organism Value: A. thaliana
  misc_feature: MA Experiment 20001557 PARAMETER Experiment Name: At_Drought_Soil_Dry_P Parameter: Plant Line Value: WS
  misc_feature: MA Experiment 20001557 PARAMETER Experiment Name: At_Drought_Soil_Dry_P Parameter: Post Timepoint (hr) Value: 3
  misc_feature: MA Experiment 20001557 PARAMETER Experiment Name: At_Drought_Soil_Dry_P Parameter: Post-Treatment Value: Re-Water vs. No Drought
  misc_feature: MA Experiment 20001557 PARAMETER Experiment Name: At_Drought_Soil_Dry_P Parameter: Timepoint (day) Value: 13
  misc_feature: MA Experiment 20001557 PARAMETER Experiment Name: At_Drought_Soil_Dry_P Parameter: Treatment Value: Drought vs. No Drought
  misc_feature: MA Experiment ID: 20001558 Result: Down-regulated in Transcription
  misc_feature: MA Experiment 20001558 PARAMETER Experiment Name: At_Drought_Soil_Dry_P Parameter: Age (day) Value: 27
  misc_feature: MA Experiment 20001558 PARAMETER Experiment Name: At_Drought_Soil_Dry_P Parameter: Organism Value: A. thaliana
  misc_feature: MA Experiment 20001558 PARAMETER Experiment Name: At_Drought_Soil_Dry_P Parameter: Plant Line Value: WS
  misc_feature: MA Experiment 20001558 PARAMETER Experiment Name: At_Drought_Soil_Dry_P Parameter: Post Timepoint (hr) Value: 6
  misc_feature: MA Experiment 20001558 PARAMETER Experiment Name: At_Drought_Soil_Dry_P Parameter: Post-Treatment Value: Re-Water vs. No Drought
  misc_feature: MA Experiment 20001558 PARAMETER Experiment Name: At_Drought_Soil_Dry_P Parameter: Timepoint (day) Value: 13
  misc_feature: MA Experiment 20001558 PARAMETER Experiment Name: At_Drought_Soil_Dry_P Parameter: Treatment Value: Drought vs. No Drought
  misc_feature: MA Experiment ID: 20001560 Result: Down-regulated in Transcription
  misc_feature: MA Experiment 20001560 PARAMETER Experiment Name: At_Drought_Soil_Dry_P Parameter: Age (day) Value: 28
  misc_feature: MA Experiment 20001560 PARAMETER Experiment Name: At_Drought_Soil_Dry_P Parameter: Organism Value: A. thaliana
  misc_feature: MA Experiment 20001560 PARAMETER Experiment Name: At_Drought_Soil_Dry_P Parameter: Plant Line Value: WS
  misc_feature: MA Experiment 20001560 PARAMETER Experiment Name: At_Drought_Soil_Dry_P Parameter: Post Timepoint (hr) Value: None
  misc_feature: MA Experiment 20001560 PARAMETER Experiment Name: At_Drought_Soil_Dry_P Parameter: Post-Treatment Value: None
  misc_feature: MA Experiment 20001560 PARAMETER Experiment Name: At_Drought_Soil_Dry_P Parameter: Timepoint (day) Value: 14
  misc_feature: MA Experiment 20001560 PARAMETER Experiment Name: At_Drought_Soil_Dry_P Parameter: Treatment Value: Drought vs. No Drought
  misc_feature: MA Experiment ID: 20001905 Result: Down-regulated in Transcription
  misc_feature: MA Experiment 20001905 PARAMETER Experiment Name: At_Drought_Reproduction_P Parameter: Age (day) Value: 40
  misc_feature: MA Experiment 20001905 PARAMETER Experiment Name: At_Drought_Reproduction_P Parameter: Organism Value: A. thaliana
  misc_feature: MA Experiment 20001905 PARAMETER Experiment Name: At_Drought_Reproduction_P Parameter: Plant Line Value: WS
  misc_feature: MA Experiment 20001905 PARAMETER Experiment Name: At_Drought_Reproduction_P Parameter: Timepoint (day) Value: 10
  misc_feature: MA Experiment 20001905 PARAMETER Experiment Name: At_Drought_Reproduction_P Parameter: Tissue Value: Rosettes
  misc_feature: MA Experiment 20001905 PARAMETER Experiment Name: At_Drought_Reproduction_P Parameter: Treatment Value: Drought vs. No Drought
  misc_feature: MA Experiment ID: 20001906 Result: Down-regulated in Transcription
  misc_feature: MA Experiment 20001906 PARAMETER Experiment Name: At_Drought_Reproduction_P Parameter: Age (day) Value: 35
  misc_feature: MA Experiment 20001906 PARAMETER Experiment Name: At_Drought_Reproduction_P Parameter: Organism Value: A. thaliana
  misc_feature: MA Experiment 20001906 PARAMETER Experiment Name: At_Drought_Reproduction_P Parameter: Plant Line Value: WS
  misc_feature: MA Experiment 20001906 PARAMETER Experiment Name: At_Drought_Reproduction_P Parameter: Timepoint (day) Value: 5
  misc_feature: MA Experiment 20001906 PARAMETER Experiment Name: At_Drought_Reproduction_P Parameter: Tissue Value: Siliques
  misc_feature: MA Experiment 20001906 PARAMETER Experiment Name: At_Drought_Reproduction_P Parameter: Treatment Value: Drought vs. No Drought
  misc_feature: MA Experiment ID: 20001908 Result: Down-regulated in Transcription
  misc_feature: MA Experiment 20001908 PARAMETER Experiment Name: At_Drought_Reproduction_P Parameter: Age (day) Value: 40
  misc_feature: MA Experiment 20001908 PARAMETER Experiment Name: At_Drought_Reproduction_P Parameter: Organism Value: A. thaliana
  misc_feature: MA Experiment 20001908 PARAMETER Experiment Name: At_Drought_Reproduction_P Parameter: Plant Line Value: WS
  misc_feature: MA Experiment 20001908 PARAMETER Experiment Name: At_Drought_Reproduction_P Parameter: Timepoint (day) Value: 10
  misc_feature: MA Experiment 20001908 PARAMETER Experiment Name: At_Drought_Reproduction_P Parameter: Tissue Value: Siliques
  misc_feature: MA Experiment 20001908 PARAMETER Experiment Name: At_Drought_Reproduction_P Parameter: Treatment Value: Drought vs. No Drought
atctgtcgtgttctgtttgttctcacttctcacttctcagatttttataaacatgaatgaaacctgaattgttccactaactctcagcaaaaatgcgatcactttacttaatcgtcttcatcgttattagtcttgttaaagcttcgaaaagcgatgatgggttttgttcagcgccttcgattgttgaatcggatgagaagacgaaccccatttattggaaagccacgaatccaacactctctccttcacacctccaagacttgcctggtttcacacgaagtgtatacaaacgagatcatgcgttaataacaccggaaagtcatgtatacagccctttacctgactggacaaacacattaggggcgtatttgatcacaccggcaacgggttcccattttgtcatgtacttggcgaaaatgaaagaaatgtcaagttcaggtttgcctccacaagacatagagcgtcttatattcgtggtcgagggtgctgtgacactcactaacacatccagttcttcaaaaaaattgacggttgattcatatgcgtacctacctccaaactttcaccattccttggactgtgttgagtctgcaacacttgttgtcttcgagcggaggtatgaatatctaggaagtcacaccacagagcttattgttggctccacagacaagcaaccactactcgagactcctggtgaggtttttgaactgcggaaacttcttccgatgtccgttgcttatgacttcaacatccatactatggattttcagcctggagagtttctgaatgttaaggaagttcattataaccagcatggtttgttgcttctggaggggcaaggcatttatcgcttgggtgataactggtatccagttcaggctggtgatgtcatatggatggctccttttgtccctcaatggtatgctgcactcggaaagactaggtctcggtatttgttgtacaaagatgtgaatcgaaatccattgtgatcaaagattgatatgactttgcagtaaaagtcagaatcttgttgttcagcttcttgtcttataaacgccatgtccactctaagcactagctacgtgagacttagttgtatgaatcttataacaattgtgaaaagaaacacattgataaatgatgaaaaaaaaaaaaaaaaaaaaaaaaaaaaaaagaaaaaaaaaaaaaaaaaacggcacgagaagctttttttttttttttttttagtcatcgtcccaattgggcagttgattgtatagctaagcgaacgtttgatgttaacctaaaatggttatgtttctgtttttagtcatgttatcctttgtcaaattgtgaaatccctaaaagccactactacacaaacatcggattgcttgagaaacaaggaactggaactatacagactgcatcgcgctcttttctggatcaataatgatgtgatcaacatttaacaacaatcaaaaacctgaaaactagagtcgagcagagatctcatgtgccattagtagcattatcagtgtgacctccattgctgtctttgccattcacttgagccctcggtctccgatctgcaggatcaacaccgttcccattcaagagtttgtgactctcttctttggttctgtcttttgagatcacagggagcaatgccgttgttcgatcaggcaattctggtaatttcttgtcgaggaagaagacaaccaagttcacagtataccacgcaacaaccacatcaacagtgtaatgtttacgggacgcaataatcaagaggctttgcaagatggcaatgacccaacctaacagctttatgaaccttttagaaccgtatttctggtaagtgcggacaaagactagtgtgaatatcatgtgcgatgagaaaatcaggtctccacatccgtatatcacaccacgaggcaagtctcttgcgtctttccctcaaggctgttattactcgacggcattaggtgggcttaggagcttcgagaaccctaagaacaagatcactgcagttcctgctaatgagggagaaatttggggagctaccttcaaggtggaaggagcaacagttcttgcagattgaaaatgaaagagaaacacaaaagaagtttcatgtctcttaaagctctcgaactgtaacagcacaaacaaaaaaaaatatgtaggaaaaacaaaaagctgttctatgagtacttgaagctatcaatggttggtgataatgtgtgtagtgttgtatctctcttatgtcttatgcttctttgtacagcacgtgtgtgtcttctggtgttattagtgtcttcttcctaataagttaatgtctccg

SEQ ID NO: 27896 - protein, 298 aa, Arabidopsis thaliana
  peptide (1)..(298): Ceres Seq. ID no. 13509886
  misc_feature (61)..(298): Pfam Name: Protein of unknown function (DUF923) Pfam Description: Protein of unknown function (DUF923)
  misc_feature (62)..(296): Homolog of NCBI NO: 16759501 NR Description: conserved hypothetical protein
  misc_feature (61)..(296): Homolog of NCBI NO: 23113628 NR Description: hypothetical protein [Desulfitobacterium
  misc_feature (61)..(297): Homolog of NCBI NO: 29377458 NR Description: conserved hypothetical protein [Enterococcus
  misc_feature (59)..(296): Homolog of NCBI NO: 27375364 NR Description: blr0253 [Bradyrhizobium japonicum]
  misc_feature (59)..(298): Homolog of NCBI NO: 15806172 NR Description: conserved hypothetical protein [Deinococcus
  misc_feature (180)..(292): Homolog of NCBI NO: 7485211 NR Description: hypothetical protein - Arabidopsis thaliana
  misc_feature (129)..(234): Homolog of NCBI NO: 34901774 NR Description: OJ1058_B11.16 [Oryza sativa (japonica
  misc_feature (2)..(109): Homolog of NCBI NO: 34901774 NR Description: OJ1058_B11.16 [Oryza sativa (japonica
  misc_feature (2)..(298): Homolog of NCBI NO: 34393580 NR Description: putative glyoxylate induced protein
  misc_feature (1)..(298): Homolog of NCBI NO: 22328740 NR Description: expressed protein [Arabidopsis thaliana]
MRSLYLIVFIVISLVKASKSDDGFCSAPSIVESDEKTNPIYWKATNPTLSPSHLQDLPGFTRSVYKRDHALITPESHVYSPLPDWTNTLGAYLITPATGSHFVMYLAKMKEMSSSGLPPQDIERLIFVVEGAVTLTNTSSSSKKLTVDSYAYLPPNFHHSLDCVESATLVVFERRYEYLGSHTTELIVGSTDKQPLLETPGEVFELRKLLPMSVAYDFNIHTMDFQPGEFLNVKEVHYNQHGLLLLEGQGIYRLGDNWYPVQAGDVIWMAPFVPQWYAALGKTRSRYLLYKDVNRNPL

SEQ ID NO: 27897 - protein, 195 aa, Arabidopsis thaliana
  peptide (1)..(195): Ceres Seq. ID no. 13509887
  misc_feature (1)..(195): Pfam Name: Protein of unknown function (DUF923) Pfam Description: Protein of unknown function (DUF923)
  misc_feature (1)..(193): Homolog of NCBI NO: 23501251 NR Description: conserved hypothetical protein [Brucella suis
  misc_feature (1)..(193): Homolog of NCBI NO: 16759501 NR Description: conserved hypothetical protein
  misc_feature (1)..(193): Homolog of NCBI NO: 23113628 NR Description: hypothetical protein [Desulfitobacterium
  misc_feature (1)..(194): Homolog of NCBI NO: 29377458 NR Description: conserved hypothetical protein [Enterococcus
  misc_feature (1)..(193): Homolog of NCBI NO: 27375364 NR Description: blr0253 [Bradyrhizobium japonicum]
  misc_feature (1)..(195): Homolog of NCBI NO: 15806172 NR Description: conserved hypothetical protein [Deinococcus
  misc_feature (77)..(189): Homolog of NCBI NO: 7485211 NR Description: hypothetical protein - Arabidopsis thaliana
  misc_feature (26)..(131): Homolog of NCBI NO: 34901774 NR Description: OJ1058_B11.16 [Oryza sativa (japonica
  misc_feature (1)..(195): Homolog of NCBI NO: 34393580 NR Description: putative glyoxylate induced protein
  misc_feature (1)..(195): Homolog of NCBI NO: 22328740 NR Description: expressed protein [Arabidopsis thaliana]
MYLAKMKEMSSSGLPPQDIERLIFVVEGAVTLTNTSSSSKKLTVDSYAYLPPNFHHSLDCVESATLVVFERRYEYLGSHTTELIVGSTDKQPLLETPGEVFELRKLLPMSVAYDFNIHTMDFQPGEFLNVKEVHYNQHGLLLLEGQGIYRLGDNWYPVQAGDVIWMAPFVPQWYAALGKTRSRYLLYKDVNRNPL

SEQ ID NO: 27898 - protein, 190 aa, Arabidopsis thaliana
  peptide (1)..(190): Ceres Seq. ID no. 13509888
  misc_feature (1)..(190): Pfam Name: Protein of unknown function (DUF923) Pfam Description: Protein of unknown function (DUF923)
  misc_feature (1)..(188): Homolog of NCBI NO: 23501251 NR Description: conserved hypothetical protein [Brucella suis
  misc_feature (1)..(188): Homolog of NCBI NO: 16759501 NR Description: conserved hypothetical protein
  misc_feature (1)..(188): Homolog of NCBI NO: 23113628 NR Description: hypothetical protein [Desulfitobacterium
  misc_feature (1)..(189): Homolog of NCBI NO: 29377458 NR Description: conserved hypothetical protein [Enterococcus
  misc_feature (1)..(188): Homolog of NCBI NO: 27375364 NR Description: blr0253 [Bradyrhizobium japonicum]
  misc_feature (1)..(190): Homolog of NCBI NO: 15806172 NR Description: conserved hypothetical protein [Deinococcus
  misc_feature (72)..(184): Homolog of NCBI NO: 7485211 NR Description: hypothetical protein - Arabidopsis thaliana
  misc_feature (21)..(126): Homolog of NCBI NO: 34901774 NR Description: OJ1058_B11.16 [Oryza sativa (japonica
  misc_feature (1)..(190): Homolog of NCBI NO: 34393580 NR Description: putative glyoxylate induced protein
  misc_feature (1)..(190): Homolog of NCBI NO: 22328740 NR Description: expressed protein [Arabidopsis thaliana]
MKEMSSSGLPPQDIERLIFVVEGAVTLTNTSSSSKKLTVDSYAYLPPNFHHSLDCVESATLVVFERRYEYLGSHTTELIVGSTDKQPLLETPGEVFELRKLLPMSVAYDFNIHTMDFQPGEFLNVKEVHYNQHGLLLLEGQGIYRLGDNWYPVQAGDVIWMAPFVPQWYAALGKTRSRYLLYKDVNRNPL

SEQ ID NO: 27899 - DNA, 1178 bp, Arabidopsis thaliana
  misc_feature (1)..(1178): Ceres Seq. ID no. 13490414
  misc_feature: MA Experiment ID: 20000185 Result: Down-regulated in Transcription
  misc_feature: MA Experiment 20000185 PARAMETER Experiment Name: At_Roots__P Parameter: Age (day) Value: 7 vs. 21
  misc_feature: MA Experiment 20000185 PARAMETER Experiment Name: At_Roots__P Parameter: Organism Value: A. thaliana
  misc_feature: MA Experiment 20000185 PARAMETER Experiment Name: At_Roots__P Parameter: Tissue Value: Roots vs. Whole Plant
  misc_feature: MA Experiment ID: 20000439 Result: Down-regulated in Transcription
  misc_feature: MA Experiment 20000439 PARAMETER Experiment Name: At_Roots__P Parameter: Age (day) Value: 14 vs. 21
  misc_feature: MA Experiment 20000439 PARAMETER Experiment Name: At_Roots__P Parameter: Organism Value: A. thaliana
  misc_feature: MA Experiment 20000439 PARAMETER Experiment Name: At_Roots__P Parameter: Tissue Value: Roots vs. Whole Plant
acttcaattgatttgccaaaggcttgcctcatggcttattcttcagtaccaagctgtttccatggctatcttctccatcgttgttcgttctccaccacacaatttttctcgggttctctctcttgtggcttctctgcttctaccaattcaagactaagaacatgtgtcaaattcgagaagtttcagggtgactctcctcttgaacagaacacttcagtttcttcttcctcttctgtttcacaggaactaccattagaagaagctcaagaccaactagaagaagaagaagatgatgatgactgtttgcctaatgatttggaaggagctgttaggcaatcaggtgaagcaggtgctgcgtttgtgaactcaggaggaaatagagctattgtggagcttttgattcctcagctgcagtttttagacgatgaaggtgcacaagctgaactttgggacctttcgcgtgttttcttggagactctcattaaagaaacaggttgtgagagagttaaagctgtatttccagacgctggagctgctgcattgctaaaataccggtggaaagatgcaacgttcggatttgctagcttaagtgaccggaaacctgtggagaaagaagatgagatcattgtcatggttgttcctgattaccaaatgctggaatatgttgagaaaattgctaatgggcttgctgatgacccgccaaggcctctcattatgtggaaccctcgtcttataagcgaggaagtcggggttgggtttaacgtgagaaaactaaggcgttacttcctaagttcattcactacggtttactctatgagacctctggctgctggtgctgttttcaggtgttatcctggtaagtggaaagtcttctatgataacaaagacagaccaggccgatacctactcgctaaagaactcattggtcgacctgatgcagaggatcttgagataatatatgggggagtagaagagaaatcagaagaagggccatctttaatgagtcaagctgctggaattttctcatccattaacaggttcatgaaatcaatgtgaagatgatttcttctctgcagtgtaatactattcacatgtcctggtattagaaatgtaaccaaagggtattactgtatatctttctatgctattacatcatgaagagtataatacgtactggt

SEQ ID NO: 27900 - protein, 351 aa, Arabidopsis thaliana
  peptide (1)..(351): Ceres Seq. ID no. 13490415
  misc_feature (154)..(351): Homolog of NCBI NO: 33865786 NR Description: conserved hypothetical protein [Synechococcus sp.
  misc_feature (102)..(317): Homolog of NCBI NO: 37522361 NR Description: hypothetical protein glr2792 [Gloeobacter
  misc_feature (102)..(351): Homolog of NCBI NO: 16329818 NR Description: unknown protein [Synechocystis sp. PCC 6803]
  misc_feature (102)..(351): Homolog of NCBI NO: 23130464 NR Description: hypothetical protein [Nostoc punctiforme]
  misc_feature (102)..(351): Homolog of NCBI NO: 17230608 NR Description: hypothetical protein [Nostoc sp. PCC 7120]
  misc_feature (102)..(319): Homolog of NCBI NO: 23040759 NR Description: hypothetical protein [Trichodesmium erythraeum
  misc_feature (11)..(351): Homolog of NCBI NO: 18421131 NR Description: expressed protein [Arabidopsis thaliana]
TSIDLPKACLMAYSSVPSCFHGYLLHRCSFSTTQFFSGSLSCGFSASTNSRLRTCVKFEKFQGDSPLEQNTSVSSSSSVSQELPLEEAQDQLEEEEDDDDCLPNDLEGAVRQSGEAGAAFVNSGGNRAIVELLIPQLQFLDDEGAQAELWDLSRVFLETLIKETGCERVKAVFPDAGAAALLKYRWKDATFGFASLSDRKPVEKEDEIIVMVVPDYQMLEYVEKIANGLADDPPRPLIMWNPRLISEEVGVGFNVRKLRRYFLSSFTTVYSMRPLAAGAVFRCYPGKWKVFYDNKDRPGRYLLAKELIGRPDAEDLEIIYGGVEEKSEEGPSLMSQAAGIFSSINRFMKSM

SEQ ID NO: 27901 - protein, 341 aa, Arabidopsis thaliana
  peptide (1)..(341): Ceres Seq. ID no. 13490416
  misc_feature (144)..(341): Homolog of NCBI NO: 33865786 NR Description: conserved hypothetical protein [Synechococcus sp.
  misc_feature (92)..(307): Homolog of NCBI NO: 37522361 NR Description: hypothetical protein glr2792 [Gloeobacter
  misc_feature (92)..(341): Homolog of NCBI NO: 16329818 NR Description: unknown protein [Synechocystis sp. PCC 6803]
  misc_feature (92)..(341): Homolog of NCBI NO: 23130464 NR Description: hypothetical protein [Nostoc punctiforme]
  misc_feature (92)..(341): Homolog of NCBI NO: 17230608 NR Description: hypothetical protein [Nostoc sp. PCC 7120]
  misc_feature (92)..(309): Homolog of NCBI NO: 23040759 NR Description: hypothetical protein [Trichodesmium erythraeum
  misc_feature (1)..(341): Homolog of NCBI NO: 18421131 NR Description: expressed protein [Arabidopsis thaliana]
MAYSSVPSCFHGYLLHRCSFSTTQFFSGSLSCGFSASTNSRLRTCVKFEKFQGDSPLEQNTSVSSSSSVSQELPLEEAQDQLEEEEDDDDCLPNDLEGAVRQSGEAGAAFVNSGGNRAIVELLIPQLQFLDDEGAQAELWDLSRVFLETLIKETGCERVKAVFPDAGAAALLKYRWKDATFGFASLSDRKPVEKEDEIIVMVVPDYQMLEYVEKIANGLADDPPRPLIMWNPRLISEEVGVGFNVRKLRRYFLSSFTTVYSMRPLAAGAVFRCYPGKWKVFYDNKDRPGRYLLAKELIGRPDAEDLEIIYGGVEEKSEEGPSLMSQAAGIFSSINRFMKSM

SEQ ID NO: 27902 - DNA, 1343 bp, Arabidopsis thaliana
  misc_feature (1)..(1343): Ceres Seq. ID no. 13487498
  misc_feature: MA Experiment ID: 20001905 Result: Up-regulated in Transcription
  misc_feature: MA Experiment 20001905 PARAMETER Experiment Name: At_Drought_Reproduction_P Parameter: Age (day) Value: 40
  misc_feature: MA Experiment 20001905 PARAMETER Experiment Name: At_Drought_Reproduction_P Parameter: Organism Value: A. thaliana
  misc_feature: MA Experiment 20001905 PARAMETER Experiment Name: At_Drought_Reproduction_P Parameter: Plant Line Value: WS
  misc_feature: MA Experiment 20001905 PARAMETER Experiment Name: At_Drought_Reproduction_P Parameter: Timepoint (day) Value: 10
  misc_feature: MA Experiment 20001905 PARAMETER Experiment Name: At_Drought_Reproduction_P Parameter: Tissue Value: Rosettes
  misc_feature: MA Experiment 20001905 PARAMETER Experiment Name: At_Drought_Reproduction_P Parameter: Treatment Value: Drought vs. No Drought
agcaaaattccaaacaaatattttcccatccttggatttttcatccccttcctctcggcgacaagaacaacaacaacacaaaaaaactcaaaaccatcgcgaacatcgaagaatcatctctcaacaattctccgataattctttggactgatgaattaaagggaaacgctgagtgtaaatcatacaacagttctaagtcgtgaaaacaaaaaaaagatggcttgtagaggttgtttggagtgtttgttgaagttactcaactttctcctggctgttgctggacttggcatgattggttatggtatctatttattcgttgagtacaagagagttaccgataattctgttacattcgatttgactaatggagatcaaagttacgtttcgtttgggaggcctattcttatggctgtgtcactgtcttctaatatctttgacaatcttcccaaagcgtggttcatatacttgttcattggtattggtgtggctctctttgttatttcttgctgtggctgtgttggtacttgttcgaggagtgtctgctgcttatcttgctactctcttcttctgatcttgttgatcttggtggagcttggattcgcagcatttattttcttcgataacagctggagagatgaacttccttctgacaggactggaaacttcgatacgatatataatttccttagagagaactggaagattgtaagatgggtagctctaggagcagttgttttcgaggctttactcttcttgcttgcccttatggtcagggcagctaatacaccagcagagtatgacagtgatgatgaatatcttgctccaaggcaacaaatcaggcagccattcatcaaccgccaagccgcccctgtcactggtgtcccagttgctcctactttggaccaacgcccaagccgcagtgacccttggagtgcacgtatgagggaaaagtatgggcttgacacatctgagttcacatacaatccctcagagtcacaccggttccagcaaatgccagcgcaaccaaacgaagaaaagggccgatgcaccatcatgtgagtccattttaaaagtcttgaagagttcagttaattctcttttcctgtgtctttattatttctgcgtgtaacaatcaagagtgtcagtaaaagtaggattcttgtttctgggttgatgatgactctagcatttgagatctctaatcaacctagtcacggtctcaaaactcatttgttgtgtctgtgtagtcttttgtaaggattcaccattatgaatattcatcttggttcccagtctgatccagtcctatgtttcttattatatataaaaaattcactttcttc

SEQ ID NO: 27903 - protein, 280 aa, Arabidopsis thaliana
  peptide (1)..(280): Ceres Seq. ID no. 13487499
  misc_feature (6)..(175): Pfam Name: Tetraspanin family Pfam Description: Tetraspanin family
  misc_feature (1)..(280): Homolog of NCBI NO: 18398417 NR Description: senescence-associated protein family [Arabidopsis
MACRGCLECLLKLLNFLLAVAGLGMIGYGIYLFVEYKRVTDNSVTFDLTNGDQSYVSFGRPILMAVSLSSNIFDNLPKAWFIYLFIGIGVALFVISCCGCVGTCSRSVCCLSCYSLLLILLILVELGFAAFIFFDNSWRDELPSDRTGNFDTIYNFLRENWKIVRWVALGAVVFEALLFLLALMVRAANTPAEYDSDDEYLAPRQQIRQPFINRQAAPVTGVPVAPTLDQRPSRSDPWSARMREKYGLDTSEFTYNPSESHRFQQMPAQPNEEKGRCTIM

SEQ ID NO: 27904 - protein, 256 aa, Arabidopsis thaliana
  peptide (1)..(256): Ceres Seq. ID no. 13487500
  misc_feature (1)..(151): Pfam Name: Tetraspanin family Pfam Description: Tetraspanin family
  misc_feature (1)..(256): Homolog of NCBI NO: 18398417 NR Description: senescence-associated protein family [Arabidopsis
MIGYGIYLFVEYKRVTDNSVTFDLTNGDQSYVSFGRPILMAVSLSSNIFDNLPKAWFIYLFIGIGVALFVISCCGCVGTCSRSVCCLSCYSLLLILLILVELGFAAFIFFDNSWRDELPSDRTGNFDTIYNFLRENWKIVRWVALGAVVFEALLFLLALMVRAANTPAEYDSDDEYLAPRQQIRQPFINRQAAPVTGVPVAPTLDQRPSRSDPWSARMREKYGLDTSEFTYNPSESHRFQQMPAQPNEEKGRCTIM

SEQ ID NO: 27905 - protein, 217 aa, Arabidopsis thaliana
  peptide (1)..(217): Ceres Seq. ID no. 13487501
  misc_feature (1)..(112): Pfam Name: Tetraspanin family Pfam Description: Tetraspanin family
  misc_feature (1)..(217): Homolog of NCBI NO: 18398417 NR Description: senescence-associated protein family [Arabidopsis
MAVSLSSNIFDNLPKAWFIYLFIGIGVALFVISCCGCVGTCSRSVCCLSCYSLLLILLILVELGFAAFIFFDNSWRDELPSDRTGNFDTIYNFLRENWKIVRWVALGAVVFEALLFLLALMVRAANTPAEYDSDDEYLAPRQQIRQPFINRQAAPVTGVPVAPTLDQRPSRSDPWSARMREKYGLDTSEFTYNPSESHRFQQMPAQPNEEKGRCTIM

SEQ ID NO: 27906 - DNA, 1672 bp, Arabidopsis thaliana
  misc_feature (1)..(1672): Ceres Seq. ID no. 12395760
  misc_feature: MA Experiment ID: 20000171 Result: Down-regulated in Transcription
  misc_feature: MA Experiment 20000171 PARAMETER Experiment Name: At_42deg_Heat_P Parameter: Age (day) Value: 14
  misc_feature: MA Experiment 20000171 PARAMETER Experiment Name: At_42deg_Heat_P Parameter: Organism Value: A. thaliana
  misc_feature: MA Experiment 20000171 PARAMETER Experiment Name: At_42deg_Heat_P Parameter: Plant Line Value: WS
  misc_feature: MA Experiment 20000171 PARAMETER Experiment Name: At_42deg_Heat_P Parameter: Temperature (deg C) Value: 42 vs. 22
  misc_feature: MA Experiment 20000171 PARAMETER Experiment Name: At_42deg_Heat_P Parameter: Timepoint (hr) Value: 1
  misc_feature: MA Experiment 20000171 PARAMETER Experiment Name: At_42deg_Heat_P Parameter: Tissue Value: Aerial
  misc_feature: MA Experiment ID: 20000173 Result: Down-regulated in Transcription
  misc_feature: MA Experiment 20000173 PARAMETER Experiment Name: At_42deg_Heat_P Parameter: Age (day) Value: 14
  misc_feature: MA Experiment 20000173 PARAMETER Experiment Name: At_42deg_Heat_P Parameter: Organism Value: A. thaliana
  misc_feature: MA Experiment 20000173 PARAMETER Experiment Name: At_42deg_Heat_P Parameter: Plant Line Value: WS
  misc_feature: MA Experiment 20000173 PARAMETER Experiment Name: At_42deg_Heat_P Parameter: Temperature (deg C) Value: 42 vs. 22
  misc_feature: MA Experiment 20000173 PARAMETER Experiment Name: At_42deg_Heat_P Parameter: Timepoint (hr) Value: 6
  misc_feature: MA Experiment 20000173 PARAMETER Experiment Name: At_42deg_Heat_P Parameter: Tissue Value: Aerial
  misc_feature: MA Experiment ID: 20000180 Result: Down-regulated in Transcription
  misc_feature: MA Experiment 20000180 PARAMETER Experiment Name: At_Germinating_Seeds_P Parameter: Age (hr) Value: 24 vs. 0
  misc_feature: MA Experiment 20000180 PARAMETER Experiment Name: At_Germinating_Seeds_P Parameter: Tissue Value: Germinating Seeds
  misc_feature: MA Experiment ID: 20000185 Result: Down-regulated in Transcription
  misc_feature: MA Experiment 20000185 PARAMETER Experiment Name: At_Roots__P Parameter: Age (day) Value: 7 vs. 21
  misc_feature: MA Experiment 20000185 PARAMETER Experiment Name: At_Roots__P Parameter: Organism Value: A. thaliana
  misc_feature: MA Experiment 20000185 PARAMETER Experiment Name: At_Roots__P Parameter: Tissue Value: Roots vs. Whole Plant
  misc_feature: MA Experiment ID: 20000234 Result: Up-regulated in Transcription
  misc_feature: MA Experiment 20000234 PARAMETER Experiment Name: At_Siliques_P Parameter: Age (day) Value: 21
  misc_feature: MA Experiment 20000234 PARAMETER Experiment Name: At_Siliques_P Parameter: Organism Value: A. thaliana
  misc_feature: MA Experiment 20000234 PARAMETER Experiment Name: At_Siliques_P Parameter: Plant Line Value: WS
  misc_feature: MA Experiment 20000234 PARAMETER Experiment Name: At_Siliques_P Parameter: Tissue Value: Less Than 5mm Siliques vs. Whole Plant
  misc_feature: MA Experiment ID: 20000235 Result: Up-regulated in Transcription
  misc_feature: MA Experiment 20000235 PARAMETER Experiment Name: At_Siliques_P Parameter: Age (day) Value: 21
  misc_feature: MA Experiment 20000235 PARAMETER Experiment Name: At_Siliques_P Parameter: Organism Value: A. thaliana
  misc_feature: MA Experiment 20000235 PARAMETER Experiment Name: At_Siliques_P Parameter: Plant Line Value: WS
  misc_feature: MA Experiment 20000235 PARAMETER Experiment Name: At_Siliques_P Parameter: Tissue Value: 5-10mm Siliques vs. Whole Plant
  misc_feature: MA Experiment ID: 20000264 Result: Up-regulated in Transcription
  misc_feature: MA Experiment 20000264 PARAMETER Experiment Name: At_Open_Flower_P Parameter: Age (day) Value: 21
  misc_feature: MA Experiment 20000264 PARAMETER Experiment Name: At_Open_Flower_P Parameter: Plant Line Value: WS
  misc_feature: MA Experiment 20000264 PARAMETER Experiment Name: At_Open_Flower_P Parameter: Tissue Value: Open Flower vs. Whole Plant
  misc_feature: MA Experiment ID: 20000265 Result: Up-regulated in Transcription
  misc_feature: MA Experiment 20000265 PARAMETER Experiment Name: At_Open_Flower_P Parameter: Age (day) Value: 21
  misc_feature: MA Experiment 20000265 PARAMETER Experiment Name: At_Open_Flower_P Parameter: Plant Line Value: WS
  misc_feature: MA Experiment 20000265 PARAMETER Experiment Name: At_Open_Flower_P Parameter: Tissue Value: Closed Flower vs. Whole Plant
  misc_feature: MA Experiment ID: 20000286 Result: Up-regulated in Transcription
  misc_feature: MA Experiment 20000286 PARAMETER Experiment Name: At_Open_Flower_P Parameter: Age (day) Value: 21
  misc_feature: MA Experiment 20000286 PARAMETER Experiment Name: At_Open_Flower_P Parameter: Plant Line Value: WS
  misc_feature: MA Experiment 20000286 PARAMETER Experiment Name: At_Open_Flower_P Parameter: Tissue Value: Half Open vs. Whole Plant
  misc_feature: MA Experiment ID: 20000436 Result: Up-regulated in Transcription
  misc_feature: MA Experiment 20000436 PARAMETER Experiment Name: At_Drought_P Parameter: Age (day) Value: 7
  misc_feature: MA Experiment 20000436 PARAMETER Experiment Name: At_Drought_P Parameter: Organism Value: A. thaliana
  misc_feature: MA Experiment 20000436 PARAMETER Experiment Name: At_Drought_P Parameter: Plant Line Value: WS
  misc_feature: MA Experiment 20000436 PARAMETER Experiment Name: At_Drought_P Parameter: Timepoint (hr) Value: 12
  misc_feature: MA Experiment 20000436 PARAMETER Experiment Name: At_Drought_P Parameter: Tissue Value: Whole Plant
  misc_feature: MA Experiment 20000436 PARAMETER Experiment Name: At_Drought_P Parameter: Treatment Value: Drought vs. No Drought
  misc_feature: MA Experiment ID: 20000439 Result: Down-regulated in Transcription
  misc_feature: MA Experiment 20000439 PARAMETER Experiment Name: At_Roots__P Parameter: Age (day) Value: 14 vs. 21
  misc_feature: MA Experiment 20000439 PARAMETER Experiment Name: At_Roots__P Parameter: Organism Value: A. thaliana
  misc_feature: MA Experiment 20000439 PARAMETER Experiment Name: At_Roots__P Parameter: Tissue Value: Roots vs. Whole Plant
  misc_feature: MA Experiment ID: 20000573 Result: Down-regulated in Transcription
  misc_feature: MA Experiment 20000573 PARAMETER Experiment Name: At_100uM_ABA_Mutants__P Parameter: Organism Value: A. thaliana
  misc_feature: MA Experiment 20000573 PARAMETER Experiment Name: At_100uM_ABA_Mutants__P Parameter: Plant Line Value: CS22 vs. Ler wt
  misc_feature: MA Experiment 20000573 PARAMETER Experiment Name: At_100uM_ABA_Mutants__P Parameter: Timepoint (hr) Value: N/A
  misc_feature: MA Experiment 20000573 PARAMETER Experiment Name: At_100uM_ABA_Mutants__P Parameter: Tissue Value: Whole Plant
  misc_feature: MA Experiment 20000573 PARAMETER Experiment Name: At_100uM_ABA_Mutants__P Parameter: Treatment Value: None
  misc_feature: MA Experiment ID: 20001248 Result: Down-regulated in Transcription
  misc_feature: MA Experiment 20001248 PARAMETER Experiment Name: At_Far-red-induction_P Parameter: Age (day) Value: 7
  misc_feature: MA Experiment 20001248 PARAMETER Experiment Name: At_Far-red-induction_P Parameter: Light Value: Far-red vs. White
  misc_feature: MA Experiment 20001248 PARAMETER Experiment Name: At_Far-red-induction_P Parameter: Organism Value: A. thaliana
  misc_feature: MA Experiment 20001248 PARAMETER Experiment Name: At_Far-red-induction_P Parameter: Plant Line Value: Columbia
  misc_feature: MA Experiment 20001248 PARAMETER Experiment Name: At_Far-red-induction_P Parameter: Timepoint (hr) Value: 4
  misc_feature: MA Experiment 20001248 PARAMETER Experiment Name: At_Far-red-induction_P Parameter: Tissue Value: Whole Plant
aatcttcgtcttcttcttctctgcttgagtcaacaagaaataaacagagctaagatgtctcctctaatctcctttactccaacttctcttgatttcaccttcttcgccattatcatctcaggtttcgttttcatcatcactcgatggaattccaattcaaagaaacgtttaaaccttcctccaggtccgccaggttggccggtggtcggaaacttattccagttcgcgcgctcaggtaaaccgtttttcgaatacgcagaggatctcaagaaaacgtatggcccgatttttacactgagaatggggactcgaacaatgatcatcctctccgacgcaactctagtccacgaagctttgatccaacgcggagctctcttcgcttcacgacccgccgagaatccgacccgaacaatcttcagctgcaacaaattcactgtcaacgccgctaaatacggtccagtgtggcgatctctgagaagaaacatggtgcagaacatgcttagctcgacacgtctcaaggaattcgggaaactgagacaatccgccatggataaactcatcgagaggatcaaatcggaagctagagacaacgacgggctaatctgggttcttaaaaacgcaagattcgctgcgttttgtattctcttggaaatgtgtttcggaatcgagatggatgaagagacaatcgagaagatggatgacattttgaagacggtgttaatgactgttgatccacgaatcgacgattatcttccgattcttgctccgttcttctctaaagagaggaaacgagctctcgaagttcgccgtgaacaagtcgattacgtcgtcggagttatcgagagacgacggagagcgattcagaatccaggatctgataaaacggcgtcgtctttttcatacttagatacactctttgatttaaaaatcgaaggtcgtaaaacgacgccgtctaacgaagagctcgtgacgctctgctctgagtttcttaacggtggtacggatacgacggggacggcgatcgagtgggggatagcgcagctgattgcgaatcctgagattcaatctcggctctacgatgagattaaatcaacggtgggagatgatcgtagggtcgatgagaaagatgtggacaaaatggtctttttacaagcttttgttaaggagcttctccggaaacatccgccgacttatttttctctgacgcatgccgttatggagacgacgacgcttgctggttacgatattcccgccggcgttaacgtcgaggtttatcttccgggtattagtgaggatccgagaatttggaataacccgaaaaagtttgatccggaccggtttatgttgggtaaggaagatgctgacataaccgggattagtggagtaaaaatgattccgtttggtgtgggccgtaggatctgtccaggacttgcaatggcaaccgtacacgtccatttgatgcttgcgcggatggttcaggagttcgagtggtgtgctcatccaccaggaagtgagattgatttcgccggaaaattggagtttacggtggtgatgaagaatccgttgagagctatggtcaaaccaaggatttagtcttttattgtttttttgttaagaatattgagattattgtaaggtgtgtttacttataaacattaaagtacccaaatcc

SEQ ID NO: 27907 - protein, 530 aa, Arabidopsis thaliana
  peptide (1)..(530): Ceres Seq. ID no. 12395761
  misc_feature (60)..(528): Pfam Name: Cytochrome P450 Pfam Description: Cytochrome P450
  misc_feature (32)..(530): Homolog of NCBI NO: 15238242 NR Description: cytochrome p450 monooxygenase, putative; protein
  misc_feature (23)..(530): Homolog of NCBI NO: 15228330 NR Description: cytochrome P450 monooxygenase, putative; protein
  misc_feature (22)..(530): Homolog of NCBI NO: 28393336 NR Description: putative cytochrome p450 [Arabidopsis thaliana]
  misc_feature (22)..(530): Homolog of NCBI NO: 15228331 NR Description: cytochrome p450, putative; protein id:
  misc_feature (19)..(530): Homolog of NCBI NO: 15238249 NR Description: cytochrome p450, putative
  misc_feature (19)..(530): Homolog of NCBI NO: 21595357 NR Description: cytochrom P450-like protein [Arabidopsis thaliana]
NLRLLLLCLSQQEINRAKMSPLISFTPTSLDFTFFAIIISGFVFIITRWNSNSKKRLNLPPGPPGWPVVGNLFQFARSGKPFFEYAEDLKKTYGPIFTLRMGTRTMIILSDATLVHEALIQRGALFASRPAENPTRTIFSCNKFTVNAAKYGPVWRSLRRNMVQNMLSSTRLKEFGKLRQSAMDKLIERIKSEARDNDGLIWVLKNARFAAFCILLEMCFGIEMDEETIEKMDDILKTVLMTVDPRIDDYLPILAPFFSKERKRALEVRREQVDYVVGVIERRRRAIQNPGSDKTASSFSYLDTLFDLKIEGRKTTPSNEELVTLCSEFLNGGTDTTGTAIEWGIAQLIANPEIQSRLYDEIKSTVGDDRRVDEKDVDKMVFLQAFVKELLRKHPPTYFSLTHAVMETTTLAGYDIPAGVNVEVYLPGISEDPRIWNNPKKFDPDRFMLGKEDADITGISGVKMIPFGVGRRICPGLAMATVHVHLMLARMVQEFEWCAHPPGSEIDFAGKLEFTVVMKNPLRAMVKPRI

SEQ ID NO: 27908 - protein, 512 aa, Arabidopsis thaliana
  peptide (1)..(512): Ceres Seq. ID no. 12395762
  misc_feature (42)..(510): Pfam Name: Cytochrome P450 Pfam Description: Cytochrome P450
  misc_feature (14)..(512): Homolog of NCBI NO: 15238242 NR Description: cytochrome p450 monooxygenase, putative; protein
  misc_feature (5)..(512): Homolog of NCBI NO: 15228330 NR Description: cytochrome P450 monooxygenase, putative; protein
  misc_feature (4)..(512): Homolog of NCBI NO: 28393336 NR Description: putative cytochrome p450 [Arabidopsis thaliana]
  misc_feature (4)..(512): Homolog of NCBI NO: 15228331 NR Description: cytochrome p450, putative; protein id:
  misc_feature (1)..(512): Homolog of NCBI NO: 15238249 NR Description: cytochrome p450, putative
  misc_feature (1)..(512): Homolog of NCBI NO: 21595357 NR Description: cytochrom P450-like protein [Arabidopsis thaliana]
MSPLISFTPTSLDFTFFAIIISGFVFIITRWNSNSKKRLNLPPGPPGWPVVGNLFQFARSGKPFFEYAEDLKKTYGPIFTLRMGTRTMIILSDATLVHEALIQRGALFASRPAENPTRTIFSCNKFTVNAAKYGPVWRSLRRNMVQNMLSSTRLKEFGKLRQSAMDKLIERIKSEARDNDGLIWVLKNARFAAFCILLEMCFGIEMDEETIEKMDDILKTVLMTVDPRIDDYLPILAPFFSKERKRALEVRREQVDYVVGVIERRRRAIQNPGSDKTASSFSYLDTLFDLKIEGRKTTPSNEELVTLCSEFLNGGTDTTGTAIEWGIAQLIANPEIQSRLYDEIKSTVGDDRRVDEKDVDKMVFLQAFVKELLRKHPPTYFSLTHAVMETTTLAGYDIPAGVNVEVYLPGISEDPRIWNNPKKFDPDRFMLGKEDADITGISGVKMIPFGVGRRICPGLAMATVHVHLMLARMVQEFEWCAHPPGSEIDFAGKLEFTVVMKNPLRAMVKPRI

SEQ ID NO: 27909 - protein, 430 aa, Arabidopsis thaliana
  peptide (1)..(430): Ceres Seq. ID no. 12395763
  misc_feature (1)..(428): Pfam Name: Cytochrome P450 Pfam Description: Cytochrome P450
  misc_feature (1)..(430): Homolog of NCBI NO: 15238242 NR Description: cytochrome p450 monooxygenase, putative; protein
  misc_feature (1)..(430): Homolog of NCBI NO: 15228330 NR Description: cytochrome P450 monooxygenase, putative; protein
  misc_feature (1)..(430): Homolog of NCBI NO: 28393336 NR Description: putative cytochrome p450 [Arabidopsis thaliana]
  misc_feature (1)..(430): Homolog of NCBI NO: 15228331 NR Description: cytochrome p450, putative; protein id:
  misc_feature (1)..(430): Homolog of NCBI NO: 15238249 NR Description: cytochrome p450, putative
  misc_feature (1)..(430): Homolog of NCBI NO: 21595357 NR Description: cytochrom P450-like protein [Arabidopsis thaliana]
MGTRTMIILSDATLVHEALIQRGALFASRPAENPTRTIFSCNKFTVNAAKYGPVWRSLRRNMVQNMLSSTRLKEFGKLRQSAMDKLIERIKSEARDNDGLIWVLKNARFAAFCILLEMCFGIEMDEETIEKMDDILKTVLMTVDPRIDDYLPILAPFFSKERKRALEVRREQVDYVVGVIERRRRAIQNPGSDKTASSFSYLDTLFDLKIEGRKTTPSNEELVTLCSEFLNGGTDTTGTAIEWGIAQLIANPEIQSRLYDEIKSTVGDDRRVDEKDVDKMVFLQAFVKELLRKHPPTYFSLTHAVMETTTLAGYDIPAGVNVEVYLPGISEDPRIWNNPKKFDPDRFMLGKEDADITGISGVKMIPFGVGRRICPGLAMATVHVHLMLARMVQEFEWCAHPPGSEIDFAGKLEFTVVMKNPLRAMVKPRI

SEQ ID NO: 27910 - DNA, 1324 bp, Arabidopsis thaliana
  misc_feature (1)..(1324): Ceres Seq. ID no. 12422635
  misc_feature: MA Experiment ID: 108434 Result: Up-regulated in Transcription
  misc_feature: MA Experiment 108434 PARAMETER Experiment Name: At_Root_Tips_cDNA_P Parameter: Tissue Value: Root Tips
  misc_feature: MA Experiment ID: 108461 Result: Down-regulated in Transcription
  misc_feature: MA Experiment 108461 PARAMETER Experiment Name: At_Germinating_Seeds_cDNA_P Parameter: Age (day) Value: 1 vs. 0
  misc_feature: MA Experiment 108461 PARAMETER Experiment Name: At_Germinating_Seeds_cDNA_P Parameter: Tissue Value: Germinating Seeds
  misc_feature: MA Experiment ID: 108462 Result: Down-regulated in Transcription
  misc_feature: MA Experiment 108462 PARAMETER Experiment Name: At_Germinating_Seeds_cDNA_P Parameter: Age (day) Value: 2 vs. 0
  misc_feature: MA Experiment 108462 PARAMETER Experiment Name: At_Germinating_Seeds_cDNA_P Parameter: Tissue Value: Germinating Seeds
  misc_feature: MA Experiment ID: 108463 Result: Down-regulated in Transcription
  misc_feature: MA Experiment 108463 PARAMETER Experiment Name: At_Germinating_Seeds_cDNA_P Parameter: Age (day) Value: 3 vs. 0
  misc_feature: MA Experiment 108463 PARAMETER Experiment Name: At_Germinating_Seeds_cDNA_P Parameter: Tissue Value: Germinating Seeds
  misc_feature: MA Experiment ID: 108464 Result: Down-regulated in Transcription
  misc_feature: MA Experiment 108464 PARAMETER Experiment Name: At_Germinating_Seeds_cDNA_P Parameter: Age (day) Value: 4 vs. 0
  misc_feature: MA Experiment 108464 PARAMETER Experiment Name: At_Germinating_Seeds_cDNA_P Parameter: Tissue Value: Germinating Seeds
  misc_feature: MA Experiment ID: 108572 Result: Down-regulated in Transcription
  misc_feature: MA Experiment 108572 PARAMETER Experiment Name: At_Drought_cDNA_P Parameter: Timepoint (hr) Value: 1
  misc_feature: MA Experiment 108572 PARAMETER Experiment Name: At_Drought_cDNA_P Parameter: Tissue Value: Aerial
  misc_feature: MA Experiment 108572 PARAMETER Experiment Name: At_Drought_cDNA_P Parameter: Treatment Value: Drought vs. No Drought
  misc_feature: MA Experiment ID: 20000180 Result: Down-regulated in Transcription
  misc_feature: MA Experiment 20000180 PARAMETER Experiment Name: At_Germinating_Seeds_P Parameter: Age (hr) Value: 24 vs. 0
  misc_feature: MA Experiment 20000180 PARAMETER Experiment Name: At_Germinating_Seeds_P Parameter: Tissue Value: Germinating Seeds
  misc_feature: MA Experiment ID: 20001557 Result: Up-regulated in Transcription
  misc_feature: MA Experiment 20001557 PARAMETER Experiment Name: At_Drought_Soil_Dry_P Parameter: Age (day) Value: 27
  misc_feature: MA Experiment 20001557 PARAMETER Experiment Name: At_Drought_Soil_Dry_P Parameter: Organism Value: A. thaliana
  misc_feature: MA Experiment 20001557 PARAMETER Experiment Name: At_Drought_Soil_Dry_P Parameter: Plant Line Value: WS
  misc_feature: MA Experiment 20001557 PARAMETER Experiment Name: At_Drought_Soil_Dry_P Parameter: Post Timepoint (hr) Value: 3
  misc_feature: MA Experiment 20001557 PARAMETER Experiment Name: At_Drought_Soil_Dry_P Parameter: Post-Treatment Value: Re-Water vs. No Drought
  misc_feature: MA Experiment 20001557 PARAMETER Experiment Name: At_Drought_Soil_Dry_P Parameter: Timepoint (day) Value: 13
  misc_feature: MA Experiment 20001557 PARAMETER Experiment Name: At_Drought_Soil_Dry_P Parameter: Treatment Value: Drought vs. No Drought
  misc_feature: MA Experiment ID: 20001558 Result: Up-regulated in Transcription
  misc_feature: MA Experiment 20001558 PARAMETER Experiment Name: At_Drought_Soil_Dry_P Parameter: Age (day) Value: 27
  misc_feature: MA Experiment 20001558 PARAMETER Experiment Name: At_Drought_Soil_Dry_P Parameter: Organism Value: A. thaliana
  misc_feature: MA Experiment 20001558 PARAMETER Experiment Name: At_Drought_Soil_Dry_P Parameter: Plant Line Value: WS
  misc_feature: MA Experiment 20001558 PARAMETER Experiment Name: At_Drought_Soil_Dry_P Parameter: Post Timepoint (hr) Value: 6
  misc_feature: MA Experiment 20001558 PARAMETER Experiment Name: At_Drought_Soil_Dry_P Parameter: Post-Treatment Value: Re-Water vs. No Drought
  misc_feature: MA Experiment 20001558 PARAMETER Experiment Name: At_Drought_Soil_Dry_P Parameter: Timepoint (day) Value: 13
  misc_feature: MA Experiment 20001558 PARAMETER Experiment Name: At_Drought_Soil_Dry_P Parameter: Treatment Value: Drought vs. No Drought
accgtttgttcttcatctcctcgccgccgcctcctactctctctttctctctaaattgctcaattctctcggccacagacctagacaaggatggtgactaaagcagaaaaacaattcgccaaaaatttcaacatagacgatctccctgacgtccctgccggacttcctccacatctcaaagcccagcaaactcgtgtcgtctctaaaaacaacgctcctgctcatactgcgagtgccatttactcgggtacctatgtttcttctacggaagaggacgacaatgtgaagctaggaaacttctatgataacttcaaagttgatgtggttagtctcacaaagacagatatggaatttgatatgattggtattgatgcagcgtttgccaatgcattccgaaggatccttatagctgaggttccttcaatggctattgaaaaagtgttgatagcgtacaacacatcggttattatagacgaagttcttgctcacaggatgggtcttattccaattgccacagatccaagactttttgaatatttatccgaacatgatcaggcgaatgaaaagaacaccattgtattcaaactccatgtgaaatgtccgaaaaatagaccacgtcttaaagttttaacgagtgatttaaaatggttaccaaatggaagtgagcttctgagagaatcggaaaataaaacctcaaagccaaaacttacacttcattcagttgcagccaagattcattacctgaatttgctaataatcctatcactccatgcgacctcgatatcttgatagcaaaactcgcccctggtcaggaaatcgagctcgaagctcatgcggttaagggcattggtaaaacacatgcaaagtggtctccagtagggactgcttggtatagaatgcatcctgaggtggttctacgtggggaagttgaggatgaacttgctgaacgacttgtaaacgtctgcccacagaatgttttcgacattgaagacatgggaaaaggtaagaaaagggcaacagtagcgcagccacgtaagtgcacattgtgtaaggaatgcgtaagagacgatgatttggtagaccatgtggatcttggcagtgttaagaaccattttatatttaacattgagtccaccggatcactgcctccagaggttctcttcactgaagctgtgaagatattggaagctaaatgtgaagctataaccgacttttgagttctggtttagttcaattttgaattgtctgtctatcaatgtttctcctcctattgataaattaccaacaaacaacattgacatatttatttatacggttgttgttc

SEQ ID NO: 27911 - protein, 232 aa, Arabidopsis thaliana
  peptide (1)..(232): Ceres Seq. ID no. 12422636
  misc_feature (117)..(205): Pfam Name: RNA polymerase Rpb3/RpoA insert domain Pfam Description: RNA polymerase Rpb3/RpoA insert domain
  misc_feature (29)..(183): Homolog of NCBI NO: 18266895 NR Description: DNA-directed RNA polymerase I 40 kDa polypeptide
  misc_feature (29)..(183): Homolog of NCBI NO: 6677787 NR Description: RNA polymerase 1-1
  misc_feature (29)..(173): Homolog of NCBI NO: 34874462 NR Description: similar to DNA-directed RNA polymerase I 40 kDa
  misc_feature (45)..(183): Homolog of NCBI NO: 14198113 NR Description: Unknown (protein for IMAGE:3448039) [Homo sapiens]
  misc_feature (29)..(183): Homolog of NCBI NO: 3914807 NR Description: DNA-directed RNA polymerase I 40 kDa polypeptide
  misc_feature (45)..(192): Homolog of NCBI NO: 34193909 NR Description: RNA polymerase 1-1 [Danio rerio]
  misc_feature (1)..(205): Homolog of NCBI NO: 15219773 NR Description: RNA polymerase subunit
  misc_feature (1)..(205): Homolog of NCBI NO: 21592304 NR Description: RNA polymerase subunit [Arabidopsis thaliana]
  misc_feature (1)..(205): Homolog of NCBI NO: 514322 NR Description: RNA polymerase subunit
  misc_feature (1)..(205): Homolog of NCBI NO: 15219820 NR Description: RNA polymerase subunit
MVTKAEKQFAKNFNIDDLPDVPAGLPPHLKAQQTRVVSKNNAPAHTASAIYSGTYVSSTEEDDNVKLGNFYDNFKVDVVSLTKTDMEFDMIGIDAAFANAFRRILIAEVPSMAIEKVLIAYNTSVIIDEVLAHRMGLIPIATDPRLFEYLSEHDQANEKNTIVFKLHVKCPKNRPRLKVLTSDLKWLPNGSELLRESENKTSKPKLTLHSVAAKIHYLNLLIILSLHATSIS

SEQ ID NO: 27912 - protein, 147 aa, Arabidopsis thaliana
  peptide (1)..(147): Ceres Seq. ID no. 12422637
  misc_feature (32)..(120): Pfam Name: RNA polymerase Rpb3/RpoA insert domain Pfam Description: RNA polymerase Rpb3/RpoA insert domain
  misc_feature (1)..(98): Homolog of NCBI NO: 18266895 NR Description: DNA-directed RNA polymerase I 40 kDa polypeptide
  misc_feature (1)..(98): Homolog of NCBI NO: 6677787 NR Description: RNA polymerase 1-1
  misc_feature (1)..(88): Homolog of NCBI NO: 34874462 NR Description: similar to DNA-directed RNA polymerase I 40 kDa
  misc_feature (1)..(98): Homolog of NCBI NO: 14198113 NR Description: Unknown (protein for IMAGE:3448039) [Homo sapiens]
  misc_feature (1)..(98): Homolog of NCBI NO: 3914807 NR Description: DNA-directed RNA polymerase I 40 kDa polypeptide
  misc_feature (1)..(107): Homolog of NCBI NO: 34193909 NR Description: RNA polymerase 1-1 [Danio rerio]
  misc_feature (1)..(120): Homolog of NCBI NO: 15219773 NR Description: RNA polymerase subunit
  misc_feature (1)..(120): Homolog of NCBI NO: 21592304 NR Description: RNA polymerase subunit [Arabidopsis thaliana]
  misc_feature (1)..(120): Homolog of NCBI NO: 514322 NR Description: RNA polymerase subunit
  misc_feature (1)..(120): Homolog of NCBI NO: 15219820 NR Description: RNA polymerase subunit
MEFDMIGIDAAFANAFRRILIAEVPSMAIEKVLIAYNTSVIIDEVLAHRMGLIPIATDPRLFEYLSEHDQANEKNTIVFKLHVKCPKNRPRLKVLTSDLKWLPNGSELLRESENKTSKPKLTLHSVAAKIHYLNLLIILSLHATSIS

SEQ ID NO: 27913 - protein, 143 aa, Arabidopsis thaliana
  peptide (1)..(143): Ceres Seq. ID no. 12422638
  misc_feature (28)..(116): Pfam Name: RNA polymerase Rpb3/RpoA insert domain Pfam Description: RNA polymerase Rpb3/RpoA insert domain
  misc_feature (1)..(94): Homolog of NCBI NO: 18266895 NR Description: DNA-directed RNA polymerase I 40 kDa polypeptide
  misc_feature (1)..(94): Homolog of NCBI NO: 6677787 NR Description: RNA polymerase 1-1
  misc_feature (1)..(84): Homolog of NCBI NO: 34874462 NR Description: similar to DNA-directed RNA polymerase I 40 kDa
  misc_feature (1)..(94): Homolog of NCBI NO: 14198113 NR Description: Unknown (protein for IMAGE:3448039) [Homo sapiens]
  misc_feature (1)..(94): Homolog of NCBI NO: 3914807 NR Description: DNA-directed RNA polymerase I 40 kDa polypeptide
  misc_feature (1)..(103): Homolog of NCBI NO: 34193909 NR Description: RNA polymerase 1-1 [Danio rerio]
  misc_feature (1)..(116): Homolog of NCBI NO: 15219773 NR Description: RNA polymerase subunit
  misc_feature (1)..(116): Homolog of NCBI NO: 21592304 NR Description: RNA polymerase subunit [Arabidopsis thaliana]
  misc_feature (1)..(116): Homolog of NCBI NO: 514322 NR Description: RNA polymerase subunit
  misc_feature (1)..(116): Homolog of NCBI NO: 15219820 NR Description: RNA polymerase subunit
MIGIDAAFANAFRRILIAEVPSMAIEKVLIAYNTSVIIDEVLAHRMGLIPIATDPRLFEYLSEHDQANEKNTIVFKLHVKCPKNRPRLKVLTSDLKWLPNGSELLRESENKTSKPKLTLHSVAAKIHYLNLLIILSLHATSIS

SEQ ID NO: 27914 - DNA, 429 bp, Arabidopsis thaliana
  misc_feature (1)..(429): Ceres Seq. ID no. 12334228
  misc_feature: MA Experiment ID: 20001905 Result: Up-regulated in Transcription
  misc_feature: MA Experiment 20001905 PARAMETER Experiment Name: At_Drought_Reproduction_P Parameter: Age (day) Value: 40
  misc_feature: MA Experiment 20001905 PARAMETER Experiment Name: At_Drought_Reproduction_P Parameter: Organism Value: A. thaliana
  misc_feature: MA Experiment 20001905 PARAMETER Experiment Name: At_Drought_Reproduction_P Parameter: Plant Line Value: WS
  misc_feature: MA Experiment 20001905 PARAMETER Experiment Name: At_Drought_Reproduction_P Parameter: Timepoint (day) Value: 10
  misc_feature: MA Experiment 20001905 PARAMETER Experiment Name: At_Drought_Reproduction_P Parameter: Tissue Value: Rosettes
  misc_feature: MA Experiment 20001905 PARAMETER Experiment Name: At_Drought_Reproduction_P Parameter: Treatment Value: Drought vs. No Drought
aagcaaaacgcaaaaaccaaagatgggtgagatgatcaaagccagacgcatactcctcttctccatcgtattcctcttcttcttctctcaggcctttcttttgtgttcagctgagggtgagcatggctcaagaaatctcgcagtggtgatgaagaaaagggtgaaatacagaggacctcgcaacacaacaacatcctctgcagcctcaactattatgttcccaggctccttccatattggtgctgcttcctctttactccttgctcttcttttataagctcccttgtagtgatcattattgtactgtttgacaatgattcatgtaatttgcttttctcgattgattttgtagaaatttctcaaatggtctaaaactctgtttgtaaattatttgctctgtttcaaaagtatatggtcacttgtcccact

SEQ ID NO: 27915 - protein, 91 aa, Arabidopsis thaliana
  peptide (1)..(91): Ceres Seq. ID no. 12334229
  misc_feature (8)..(91): Homolog of NCBI NO: 18417123 NR Description: Expressed protein
SKTQKPKMGEMIKARRILLFSIVFLFFFSQAFLLCSAEGEHGSRNLAVVMKKRVKYRGPRNTTTSSAASTIMFPGSFHIGAASSLLLALLL

SEQ ID NO: 27916 - protein, 84 aa, Arabidopsis thaliana
  peptide (1)..(84): Ceres Seq. ID no. 12334230
  misc_feature (1)..(84): Homolog of NCBI NO: 18417123 NR Description: Expressed protein
MGEMIKARRILLFSIVFLFFFSQAFLLCSAEGEHGSRNLAVVMKKRVKYRGPRNTTTSSAASTIMFPGSFHIGAASSLLLALLL

SEQ ID NO: 27917 - protein, 81 aa, Arabidopsis thaliana
  peptide (1)..(81): Ceres Seq. ID no. 12334231
  misc_feature (1)..(81): Homolog of NCBI NO: 18417123 NR Description: Expressed protein
MIKARRILLFSIVFLFFFSQAFLLCSAEGEHGSRNLAVVMKKRVKYRGPRNTTTSSAASTIMFPGSFHIGAASSLLLALLL

SEQ ID NO: 27918 - DNA, 1403 bp, Arabidopsis thaliana
  misc_feature (1)..(1403): Ceres Seq. ID no. 12335483
  misc_feature: MA Experiment ID: 108573 Result: Up-regulated in Transcription
  misc_feature: MA Experiment 108573 PARAMETER Experiment Name: At_Drought_cDNA_P Parameter: Timepoint (hr) Value: 6
  misc_feature: MA Experiment 108573 PARAMETER Experiment Name: At_Drought_cDNA_P Parameter: Tissue Value: Aerial
  misc_feature: MA Experiment 108573 PARAMETER Experiment Name: At_Drought_cDNA_P Parameter: Treatment Value: Drought vs. No Drought
  misc_feature: MA Experiment ID: 108595 Result: Down-regulated in Transcription
  misc_feature: MA Experiment 108595 PARAMETER Experiment Name: At_Ler-pi_Ovule_cDNA_P Parameter: Plant Line Value: null
  misc_feature: MA Experiment ID: 20000171 Result: Down-regulated in Transcription
  misc_feature: MA Experiment 20000171 PARAMETER Experiment Name: At_42deg_Heat_P Parameter: Age (day) Value: 14
  misc_feature: MA Experiment 20000171 PARAMETER Experiment Name: At_42deg_Heat_P Parameter: Organism Value: A. thaliana
  misc_feature: MA Experiment 20000171 PARAMETER Experiment Name: At_42deg_Heat_P Parameter: Plant Line Value: WS
  misc_feature: MA Experiment 20000171 PARAMETER Experiment Name: At_42deg_Heat_P Parameter: Temperature (deg C) Value: 42 vs. 22
  misc_feature: MA Experiment 20000171 PARAMETER Experiment Name: At_42deg_Heat_P Parameter: Timepoint (hr) Value: 1
  misc_feature: MA Experiment 20000171 PARAMETER Experiment Name: At_42deg_Heat_P Parameter: Tissue Value: Aerial
  misc_feature: MA Experiment ID: 20000184 Result: Down-regulated in Transcription
  misc_feature: MA Experiment 20000184 PARAMETER Experiment Name: At_Shoots__P Parameter: Age (day) Value: 7
  misc_feature: MA Experiment 20000184 PARAMETER Experiment Name: At_Shoots__P Parameter: Tissue Value: Shoots vs. Whole Plant
  misc_feature: MA Experiment ID: 20001248 Result: Up-regulated in Transcription
  misc_feature: MA Experiment 20001248 PARAMETER Experiment Name: At_Far-red-induction_P Parameter: Age (day) Value: 7
  misc_feature: MA Experiment 20001248 PARAMETER Experiment Name: At_Far-red-induction_P Parameter: Light Value: Far-red vs. White
  misc_feature: MA Experiment 20001248 PARAMETER Experiment Name: At_Far-red-induction_P Parameter: Organism Value: A. thaliana
  misc_feature: MA Experiment 20001248 PARAMETER Experiment Name: At_Far-red-induction_P Parameter: Plant Line Value: Columbia
  misc_feature: MA Experiment 20001248 PARAMETER Experiment Name: At_Far-red-induction_P Parameter: Timepoint (hr) Value: 4
  misc_feature: MA Experiment 20001248 PARAMETER Experiment Name: At_Far-red-induction_P Parameter: Tissue Value: Whole Plant
  misc_feature: MA Experiment ID: 20001450 Result: Up-regulated in Transcription
  misc_feature: MA Experiment 20001450 PARAMETER Experiment Name: At_Far-red-induction_P Parameter: Age (day) Value: 7
  misc_feature: MA Experiment 20001450 PARAMETER Experiment Name: At_Far-red-induction_P Parameter: Light Value: Far-red vs. White
  misc_feature: MA Experiment 20001450 PARAMETER Experiment Name: At_Far-red-induction_P Parameter: Organism Value: A. thaliana
  misc_feature: MA Experiment 20001450 PARAMETER Experiment Name: At_Far-red-induction_P Parameter: Plant Line Value: Columbia
  misc_feature: MA Experiment 20001450 PARAMETER Experiment Name: At_Far-red-induction_P Parameter: Timepoint (hr) Value: 8
  misc_feature: MA Experiment 20001450 PARAMETER Experiment Name: At_Far-red-induction_P Parameter: Tissue Value: Whole Plant
aacaaagatatttttctttattctctcgcagttcaattagggtttcaatctctctgctctgcttgtcatcaccaccaccaccaccaccgtcgtcgtctctctgtatctctccggcgggttctctctctacttcccccggaggattaaaagatggaccagtcttttattttgatattccgttagcttgttcagttattgtagaagctgtgtcgtcaagacttttaatatctcaaatggatgatggtgggcatcgtgagaatggtcggcataaagcagcagttcagggccagtggttgatgcagcatcagccgtcgatgaaacaagtgatgtcgataatagcagagcgcgatgcagcgattcaggagagaaatctggcgatatcagagaaaaaagcagcagtagctgaaagggacatggcgtttcttcagagggacaccgccattgctgagcgcaacaatgcgataatggagagagacagtgctcttacagctctccaataccgtgagaactctatggttactgctcctgctgccaatatgtcagcatgtccaccgggttgtcaaatatcacgtggtgtaaaacacttgcaccatccgcacatgcatcatcatcatcaacaacatcacatacctcagttgactgaaaatgcatatgaaaccagagaaatggagccaaacgatggtctcccgacatcaccacctgctggatccaccttggaatctgccaaaccaaagcgcggtaaaagagtgaacccaaaggcgacaacacaaaccgctgctaataagagagggccaaaaaatcagaggaaggttaagaaagagagcgaggacgacttaaacaagataatgtttgtaaagacgacccatgactacacagacgaagattcaagtaagcatatcttaataggatcaaaatctgactggaaaagtcaagaaatggtggggctgaaccaagtggtttacgacgagacaacgatgccaccacctgtatgttcatgtacaggagttctcagacagtgctacaaatggggaaatggaggttggcaatcatcgtgttgcacaactacactatcaatgtatcctttacctgcactgcccaacaaaaggcatgctcgagttggtggacggaaaatgagcggaagcgcgttcaacaagcttctaagccggcttgctgcagaagggcatcatgatctttcaaacccggtcgatctgaaggaccattgggcaaagcacggtacaaaccgctacattacgattaaatgatatgtgcatttaggtgtgagttgttcttacgacattatctgattttaaatcatgtgtactaaattcaaataaactcgagaggaaaagaattgtatgtggagccaatgttatgttgtattatataattcgaaaaattttagt

SEQ ID NO: 27919 - protein, 419 aa, Arabidopsis thaliana
  peptide (1)..(419): Ceres Seq. ID no. 12335484
  misc_feature (194)..(419): Homolog of NCBI NO: 26190436 NR Description: barley B recombinant [Hordeum vulgare]
  misc_feature (114)..(165): Homolog of NCBI NO: 6006362 NR Description: Similar to Arabidopsis thaliana chromosome II BAC
  misc_feature (356)..(419): Homolog of NCBI NO: 6006362 NR Description: Similar to Arabidopsis thaliana chromosome II BAC
  misc_feature (78)..(183): Homolog of NCBI NO: 9759488 NR Description: gb|AAF18661.1~gene_id:MDH9.22~similar to unknown
  misc_feature (249)..(419): Homolog of NCBI NO: 18399638 NR Description: expressed protein
  misc_feature (303)..(390): Homolog of NCBI NO: 15234867 NR Description: putative protein; protein id: At4g38910.1
  misc_feature (77)..(171): Homolog of NCBI NO: 15234867 NR Description: putative protein; protein id: At4g38910.1
  misc_feature (142)..(419): Homolog of NCBI NO: 9759488 NR Description: gb|AAF18661.1~gene_id:MDH9.22~similar to unknown
  misc_feature (78)..(419): Homolog of NCBI NO: 18422219 NR Description: putative protein
QRYFSLFSRSSIRVSISLLCLSSPPPPPPSSSLCISPAGSLSTSPGGLKDGPVFYFDIPLACSVIVEAVSSRLLISQMDDGGHRENGRHKAAVQGQWLMQHQPSMKQVMSIIAERDAAIQERNLAISEKKAAVAERDMAFLQRDTAIAERNNAIMERDSALTALQYRENSMVTAPAANMSACPPGCQISRGVKHLHHPHMHHHHQQHHIPQLTENAYETREMEPNDGLPTSPPAGSTLESAKPKRGKRVNPKATTQTAANKRGPKNQRKVKKESEDDLNKIMFVKTTHDYTDEDSSKHILIGSKSDWKSQEMVGLNQVVYDETTMPPPVCSCTGVLRQCYKWGNGGWQSSCCTTTLSMYPLPALPNKRHARVGGRKMSGSAFNKLLSRLAAEGHHDLSNPVDLKDHWAKHGTNRYITIK

SEQ ID NO: 27920 - protein, 342 aa, Arabidopsis thaliana
  peptide (1)..(342): Ceres Seq. ID no. 12335485
  misc_feature (117)..(342): Homolog of NCBI NO: 26190436 NR Description: barley B recombinant [Hordeum vulgare]
  misc_feature (37)..(88): Homolog of NCBI NO: 6006362 NR Description: Similar to Arabidopsis thaliana chromosome II BAC
  misc_feature (279)..(342): Homolog of NCBI NO: 6006362 NR Description: Similar to Arabidopsis thaliana chromosome II BAC
  misc_feature (1)..(106): Homolog of NCBI NO: 9759488 NR Description: gb|AAF18661.1~gene_id:MDH9.22~similar to unknown
  misc_feature (172)..(342): Homolog of NCBI NO: 18399638 NR Description: expressed protein
  misc_feature (226)..(313): Homolog of NCBI NO: 15234867 NR Description: putative protein; protein id: At4g38910.1
  misc_feature (1)..(94): Homolog of NCBI NO: 15234867 NR Description: putative protein; protein id: At4g38910.1
  misc_feature (65)..(342): Homolog of NCBI NO: 9759488 NR Description: gb|AAF18661.1~gene_id:MDH9.22~similar to unknown
  misc_feature (1)..(342): Homolog of NCBI NO: 18422219 NR Description: putative protein
MDDGGHRENGRHKAAVQGQWLMQHQPSMKQVMSIIAERDAAIQERNLAISEKKAAVAERDMAFLQRDTAIAERNNAIMERDSALTALQYRENSMVTAPAANMSACPPGCQISRGVKHLHHPHMHHHHQQHHIPQLTENAYETREMEPNDGLPTSPPAGSTLESAKPKRGKRVNPKATTQTAANKRGPKNQRKVKKESEDDLNKIMFVKTTHDYTDEDSSKHILIGSKSDWKSQEMVGLNQVVYDETTMPPPVCSCTGVLRQCYKWGNGGWQSSCCTTTLSMYPLPALPNKRHARVGGRKMSGSAFNKLLSRLAAEGHHDLSNPVDLKDHWAKHGTNRYITIK

SEQ ID NO: 27921 - protein, 321 aa, Arabidopsis thaliana
  peptide (1)..(321): Ceres Seq. ID no. 12335486
  misc_feature (96)..(321): Homolog of NCBI NO: 26190436 NR Description: barley B recombinant [Hordeum vulgare]
  misc_feature (16)..(67): Homolog of NCBI NO: 6006362 NR Description: Similar to Arabidopsis thaliana chromosome II BAC
  misc_feature (258)..(321): Homolog of NCBI NO: 6006362 NR Description: Similar to Arabidopsis thaliana chromosome II BAC
  misc_feature (1)..(85): Homolog of NCBI NO: 9759488 NR Description: gb|AAF18661.1~gene_id:MDH9.22~similar to unknown
  misc_feature (151)..(321): Homolog of NCBI NO: 18399638 NR Description: expressed protein
  misc_feature (205)..(292): Homolog of NCBI NO: 15234867 NR Description: putative protein; protein id: At4g38910.1
  misc_feature (1)..(73): Homolog of NCBI NO: 15234867 NR Description: putative protein; protein id: At4g38910.1
  misc_feature (44)..(321): Homolog of NCBI NO: 9759488 NR Description: gb|AAF18661.1~gene_id:MDH9.22~similar to unknown
  misc_feature (1)..(321): Homolog of NCBI NO: 18422219 NR Description: putative protein
MQHQPSMKQVMSIIAERDAAIQERNLAISEKKAAVAERDMAFLQRDTAIAERNNAIMERDSALTALQYRENSMVTAPAANMSACPPGCQISRGVKHLHHPHMHHHHQQHHIPQLTENAYETREMEPNDGLPTSPPAGSTLESAKPKRGKRVNPKATTQTAANKRGPKNQRKVKKESEDDLNKIMFVKTTHDYTDEDSSKHILIGSKSDWKSQEMVGLNQVVYDETTMPPPVCSCTGVLRQCYKWGNGGWQSSCCTTTLSMYPLPALPNKRHARVGGRKMSGSAFNKLLSRLAAEGHHDLSNPVDLKDHWAKHGTNRYITIK

SEQ ID NO: 27922 - DNA, 1757 bp, Arabidopsis thaliana
  misc_feature (1)..(1757): Ceres Seq. ID no. 12327245
  misc_feature: MA Experiment ID: 108434 Result: Up-regulated in Transcription
  misc_feature: MA Experiment 108434 PARAMETER Experiment Name: At_Root_Tips_cDNA_P Parameter: Tissue Value: Root Tips
  misc_feature: MA Experiment ID: 108461 Result: Up-regulated in Transcription
  misc_feature: MA Experiment 108461 PARAMETER Experiment Name: At_Germinating_Seeds_cDNA_P Parameter: Age (day) Value: 1 vs. 0
  misc_feature: MA Experiment 108461 PARAMETER Experiment Name: At_Germinating_Seeds_cDNA_P Parameter: Tissue Value: Germinating Seeds
  misc_feature: MA Experiment ID: 20000111 Result: Down-regulated in Transcription
  misc_feature: MA Experiment 20000111 PARAMETER Experiment Name: At_42deg_Heat_cDNA_P Parameter: Temperature (deg C) Value: 42 vs. 22
  misc_feature: MA Experiment 20000111 PARAMETER Experiment Name: At_42deg_Heat_cDNA_P Parameter: Timepoint (hr) Value: 6
  misc_feature: MA Experiment 20000111 PARAMETER Experiment Name: At_42deg_Heat_cDNA_P Parameter: Tissue Value: Aerial
  misc_feature: MA Experiment ID: 20000112 Result: Down-regulated in Transcription
  misc_feature: MA Experiment 20000112 PARAMETER Experiment Name: At_42deg_Heat_cDNA_P Parameter: Temperature (deg C) Value: 42 vs. 22
  misc_feature: MA Experiment 20000112 PARAMETER Experiment Name: At_42deg_Heat_cDNA_P Parameter: Timepoint (hr) Value: 2
  misc_feature: MA Experiment 20000112 PARAMETER Experiment Name: At_42deg_Heat_cDNA_P Parameter: Tissue Value: Aerial
  misc_feature: MA Experiment ID: 20000180 Result: Up-regulated in Transcription
  misc_feature: MA Experiment 20000180 PARAMETER Experiment Name: At_Germinating_Seeds_P Parameter: Age (hr) Value: 24 vs. 0
  misc_feature: MA Experiment 20000180 PARAMETER Experiment Name: At_Germinating_Seeds_P Parameter: Tissue Value: Germinating Seeds
  misc_feature: MA Experiment ID: 20000184 Result: Down-regulated in Transcription
  misc_feature: MA Experiment 20000184 PARAMETER Experiment Name: At_Shoots__P Parameter: Age (day) Value: 7
  misc_feature: MA Experiment 20000184 PARAMETER Experiment Name: At_Shoots__P Parameter: Tissue Value: Shoots vs. Whole Plant
  misc_feature: MA Experiment ID: 20000224 Result: Up-regulated in Transcription
gagaatttcgaaatcggaacccaccaccaccaccctccatcgtcgccaacagatccaacggttctctgattatttttatttgaactaaatgggtcgcatcgagatttagaagaaaagggaaatgttggcaatggagaaagaatttgattcaaagcttgttcttcaagggaactcatccaacggtgctaatgtttctagaagcaaaagcttctcctttaaagctcctcaagaaaatttcaccagccatgatttcgaatttggcaagatctatggtgttggttcttactctaaggttgttagggcaaagaagaaggaaactggaactgtgtatgctttaaagattatggacaaaaagtttatcaccaaggagaataaaactgcttatgtgaaattggaaaggattgttcttgatcaacttgaacatcctgggatcattaaactttacttcacgtttcaagacacatcctcactatatatggcacttgaatcttgtgagggtggcgagcttttcgaccaaataaccagaaaaggtcggctatcggaggatgaagctcggttctacactgcagaagttgtggatgctcttgagtatatacatagtatgggactgattcatcgagatattaagccggagaatctgttgctgacttcagatggacacattaagattgcggattttggaagtgtaaagccgatgcaggatagccagatcacagttctacctaatgcagcttctgacgataaggcgtgcacttttgtcgggactgctgcatatgttcctccagaagttctcaactcctctcccgcaactttcgggaatgatctttgggctctcggctgcactctctatcagatgctttcggggacttccccatttaaagatgcaagtgaatggctgattttccaaagaattatagccagagatataaagttcccaaatcatttttcagaagcagcaagagacctcatcgaccggttgctggataccgagccaagcagaaggccaggtgctggctcagaaggttatgttgctcttaagagacatcctttctttaatggagttgactggaagaatctaaggtcccagactcctccaaaactagctccagatcctgcgtctcagacagcatctcccgagagggatgacacacatggttctccatggaacctgacacatattggagattctttagccacacagaacgaggggcacagtgctcctcctacatcttctgaatcatcgggttccataactcgacttgcttcaatagactcttttgattcaagatggcaacagtttttagagccaggagaatcggttctgatgatatcagcggtgaagaagcttcagaaaataacgagcaagaaggtgcagctaatactcaccaacaaacccaagctgatctatgtcgacccgtcaaaactagttgtgaaaggaaacattatatggtctgataactcgaatgacctcaacgttgtagtcactagcccttcacatttcaagatttgcacgccaaagaaggttttatcatttgaagacgcaaaacagagagcttcagtgtggaaaaaggcaatcgagactcttcagaaccgctgagacaaactccactgaagaatggttctgttaatttcctcgttggtgttttgtctttccttcaagattttaaactgaccaaactccattcttcatatgttttttctatttcacgcatccttgaaaagaccagttggacacaaaactgaaaaactgctttttg

SEQ ID NO: 27923 - protein, 491 aa, Arabidopsis thaliana
  peptide (1)..(491): Ceres Seq. ID no. 12327246
  misc_feature (44)..(311): Pfam Name: Protein kinase domain Pfam Description: Protein kinase domain
  misc_feature (43)..(365): Homolog of NCBI NO: 13592023 NR Description: 3-phosphoinositide dependent protein kinase-1
  misc_feature (390)..(486): Homolog of NCBI NO: 4505695 NR Description: 3-phosphoinositide dependent protein kinase-1;
  misc_feature (43)..(376): Homolog of NCBI NO: 4505695 NR Description: 3-phosphoinositide dependent protein kinase-1;
  misc_feature (34)..(486): Homolog of NCBI NO: 38524443 NR Description: phosphoinositide dependent kinase-1 [Asterina
  misc_feature (144)..(489): Homolog of NCBI NO: 5001830 NR Description: 3-phosphoinositide-dependent protein kinase-1
  misc_feature (4)..(489): Homolog of NCBI NO: 34908708 NR Description: putative 3-phosphoinositide-dependent protein
  misc_feature (4)..(491): Homolog of NCBI NO: 8567784 NR Description: 3-phosphoinositide-dependent protein kinase-1,
  misc_feature (1)..(491): Homolog of NCBI NO: 30681369 NR Description: 3-phosphoinositide-dependent protein kinase,
  misc_feature (4)..(491): Homolog of NCBI NO: 11357147 NR Description: 3-phosphoinositide-dependent protein kinase-1
  misc_feature (1)..(491): Homolog of NCBI NO: 18414583 NR Description: 3-phosphoinositide-dependent protein kinase-1 PDK1
MLAMEKEFDSKLVLQGNSSNGANVSRSKSFSFKAPQENFTSHDFEFGKIYGVGSYSKVVRAKKKETGTVYALKIMDKKFITKENKTAYVKLERIVLDQLEHPGIIKLYFTFQDTSSLYMALESCEGGELFDQITRKGRLSEDEARFYTAEVVDALEYIHSMGLIHRDIKPENLLLTSDGHIKIADFGSVKPMQDSQITVLPNAASDDKACTFVGTAAYVPPEVLNSSPATFGNDLWALGCTLYQMLSGTSPFKDASEWLIFQRIIARDIKFPNHFSEAARDLIDRLLDTEPSRRPGAGSEGYVALKRHPFFNGVDWKNLRSQTPPKLAPDPASQTASPERDDTHGSPWNLTHIGDSLATQNEGHSAPPTSSESSGSITRLASIDSFDSRWQQFLEPGESVLMISAVKKLQKITSKKVQLILTNKPKLIYVDPSKLVVKGNIIWSDNSNDLNVVVTSPSHFKICTPKKVLSFEDAKQRASVWKKAIETLQNR

SEQ ID NO: 27924 - protein, 488 aa, Arabidopsis thaliana
  peptide (1)..(488): Ceres Seq. ID no. 12327247
  misc_feature (41)..(308): Pfam Name: Protein kinase domain Pfam Description: Protein kinase domain
  misc_feature (40)..(362): Homolog of NCBI NO: 13592023 NR Description: 3-phosphoinositide dependent protein kinase-1
  misc_feature (387)..(483): Homolog of NCBI NO: 4505695 NR Description: 3-phosphoinositide dependent protein kinase-1;
  misc_feature (40)..(373): Homolog of NCBI NO: 4505695 NR Description: 3-phosphoinositide dependent protein kinase-1;
  misc_feature (31)..(483): Homolog of NCBI NO: 38524443 NR Description: phosphoinositide dependent kinase-1 [Asterina
  misc_feature (141)..(486): Homolog of NCBI NO: 5001830 NR Description: 3-phosphoinositide-dependent protein kinase-1
  misc_feature (1)..(486): Homolog of NCBI NO: 34908708 NR Description: putative 3-phosphoinositide-dependent protein
  misc_feature (1)..(488): Homolog of NCBI NO: 8567784 NR Description: 3-phosphoinositide-dependent protein kinase-1,
  misc_feature (1)..(488): Homolog of NCBI NO: 30681369 NR Description: 3-phosphoinositide-dependent protein kinase,
  misc_feature (1)..(488): Homolog of NCBI NO: 11357147 NR Description: 3-phosphoinositide-dependent protein kinase-1
  misc_feature (1)..(488): Homolog of NCBI NO: 18414583 NR Description: 3-phosphoinositide-dependent protein kinase-1 PDK1
MEKEFDSKLVLQGNSSNGANVSRSKSFSFKAPQENFTSHDFEFGKIYGVGSYSKVVRAKKKETGTVYALKIMDKKFITKENKTAYVKLERIVLDQLEHPGIIKLYFTFQDTSSLYMALESCEGGELFDQITRKGRLSEDEARFYTAEVVDALEYIHSMGLIHRDIKPENLLLTSDGHIKIADFGSVKPMQDSQITVLPNAASDDKACTFVGTAAYVPPEVLNSSPATFGNDLWALGCTLYQMLSGTSPFKDASEWLIFQRIIARDIKFPNHFSEAARDLIDRLLDTEPSRRPGAGSEGYVALKRHPFFNGVDWKNLRSQTPPKLAPDPASQTASPERDDTHGSPWNLTHIGDSLATQNEGHSAPPTSSESSGSITRLASIDSFDSRWQQFLEPGESVLMISAVKKLQKITSKKVQLILTNKPKLIYVDPSKLVVKGNIIWSDNSNDLNVVVTSPSHFKICTPKKVLSFEDAKQRASVWKKAIETLQNR

SEQ ID NO: 27925 - protein, 417 aa, Arabidopsis thaliana
  peptide (1)..(417): Ceres Seq. ID no. 12327248
  misc_feature (1)..(237): Pfam Name: Protein kinase domain Pfam Description: Protein kinase domain
  misc_feature (1)..(291): Homolog of NCBI NO: 13592023 NR Description: 3-phosphoinositide dependent protein kinase-1
  misc_feature (316)..(412): Homolog of NCBI NO: 4505695 NR Description: 3-phosphoinositide dependent protein kinase-1;
  misc_feature (1)..(302): Homolog of NCBI NO: 4505695 NR Description: 3-phosphoinositide dependent protein kinase-1;
  misc_feature (1)..(412): Homolog of NCBI NO: 38524443 NR Description: phosphoinositide dependent kinase-1 [Asterina
  misc_feature (70)..(415): Homolog of NCBI NO: 5001830 NR Description: 3-phosphoinositide-dependent protein kinase-1
  misc_feature (1)..(415): Homolog of NCBI NO: 34908708 NR Description: putative 3-phosphoinositide-dependent protein
  misc_feature (1)..(417): Homolog of NCBI NO: 8567784 NR Description: 3-phosphoinositide-dependent protein kinase-1,
  misc_feature (1)..(417): Homolog of NCBI NO: 30681369 NR Description: 3-phosphoinositide-dependent protein kinase,
  misc_feature (1)..(417): Homolog of NCBI NO: 11357147 NR Description: 3-phosphoinositide-dependent protein kinase-1
  misc_feature (1)..(417): Homolog of NCBI NO: 18414583 NR Description: 3-phosphoinositide-dependent protein kinase-1 PDK1
MDKKFITKENKTAYVKLERIVLDQLEHPGIIKLYFTFQDTSSLYMALESCEGGELFDQITRKGRLSEDEARFYTAEVVDALEYIHSMGLIHRDIKPENLLLTSDGHIKIADFGSVKPMQDSQITVLPNAASDDKACTFVGTAAYVPPEVLNSSPATFGNDLWALGCTLYQMLSGTSPFKDASEWLIFQRIIARDIKFPNHFSEAARDLIDRLLDTEPSRRPGAGSEGYVALKRHPFFNGVDWKNLRSQTPPKLAPDPASQTASPERDDTHGSPWNLTHIGDSLATQNEGHSAPPTSSESSGSITRLASIDSFDSRWQQFLEPGESVLMISAVKKLQKITSKKVQLILTNKPKLIYVDPSKLVVKGNIIWSDNSNDLNVVVTSPSHFKICTPKKVLSFEDAKQRASVWKKAIETLQNR

SEQ ID NO: 27926 - DNA, 1495 bp, Arabidopsis thaliana
  misc_feature (1)..(1495): Ceres Seq. ID no. 12335145
  misc_feature: MA Experiment ID: 20000496 Result: Down-regulated in Transcription
  misc_feature: MA Experiment 20000496 PARAMETER Experiment Name: At_Guard_Cells_P Parameter: Harvest Date Value: 7/19/2002
  misc_feature: MA Experiment 20000496 PARAMETER Experiment Name: At_Guard_Cells_P Parameter: Organism Value: Canola
  misc_feature: MA Experiment 20000496 PARAMETER Experiment Name: At_Guard_Cells_P Parameter: Tissue Value: Guard Cells vs. Leaves
taaaaaatccctaaaagttttgggggaaagaagaaagaaggaagacgatgatgatgctcagaatccgaagcagagatggactggagagagtcacagcggagggagctcatatcactgtttcccagctcaaaaccttgatcgcggatcagcttcagatccctctccataagcagaccttatccaccaatcgtgatctcctcctcgccaaaactcccgctgatctactcgccttcaccgacctcacggacccaaacctccccctctcctctctcaacctcggccatggctctatgctctacctcgcctacgatggcgagcgctccattcctggagctcctcccgttactcctgccggatccttcgggaggaagatgaccgtcgatgacttgatcgcccgccagatgcgcgtcactcgtcaggagacgtctcactgcgactccgtctccttcgatcgcgatgccgccaacgctttccagcactacgtcaatgagtctctagcttttgccgtcaagcgcggcggctttatgtacggcaccgtcaccgaggaaggacagtggaagttgatttcatttacgagccgccccagcaaggcacggaggctaatcttattctgatgagagatgctgatgaagagaagcgcgtggacgcaatcgccatgggcttggggatgaggagggtcggtttcatttttaaccagaccgtggtgcaggacaagactgaatacactctgtccaacgccgaggtgctacaggcggcggagcttcacgccgagagcgagctgaaggagtgggtcacggcggtggtgaagcttgaggtgaatgaggatggtggcgccgatgtccatttcgaggcgtttcaaatgagtgatatgtgcatcaggctgttcaaggaagagtggttcgagacggagattatgccggacgatgatccaaagctctctaagatgaagaaggaggtggttgttggtgtgaaggatcttaaggaggtagataacgatttcttcctcgttctcgtcaggatcttggatcaccaggggcctctgtcatcaacattcccaatagagaaccggagcagtcgagcaacgatgcgggctctaaaaacacatctggaccgggcaaagagcttgccgttggtgaagaagatgtcagattttcatctgcttctctttgtggctcagtttctggacgtgtcatcggacgtccctgctttagccgagtgtgtgcgtctgcagtcgcctgtcccagagggctatgcgttgctcatcgaatcaatggccaacacttgttaatttttgtgtcattgttttttggttcttgatacagtatatcatgttcgttttatggtccagaaaatcttttttactagttgacaaatgaaaaatctctagtgtactcgtgatgtatttgattcaagtttgggggttaatttaagttatcaacaacttgtagaaacaaagttaattcacagagtaataaatcattctaataggtatgct

SEQ ID NO: 27927 - protein, 224 aa, Arabidopsis thaliana
  peptide (1)..(224): Ceres Seq. ID no. 12335146
  misc_feature (1)..(221): Pfam Name: NPL4 family Pfam Description: NPL4 family
  misc_feature (86)..(140): Homolog of NCBI NO: 34905848 NR Description: P0483G10.28 [Oryza sativa (japonica
  misc_feature (1)..(221): Homolog of NCBI NO: 34914854 NR Description: P0416G11.10 [Oryza sativa (japonica
  misc_feature (1)..(223): Homolog of NCBI NO: 15229360 NR Description: putative protein
  misc_feature (1)..(224): Homolog of NCBI NO: 18407495 NR Description: expressed protein
MRDADEEKRVDAIAMGLGMRRVGFIFNQTVVQDKTEYTLSNAEVLQAAELHAESELKEWVTAVVKLEVNEDGGADVHFEAFQMSDMCIRLFKEEWFETEIMPDDDPKLSKMKKEVVVGVKDLKEVDNDFFLVLVRILDHQGPLSSTFPIENRSSRATMRALKTHLDRAKSLPLVKKMSDFHLLLFVAQFLDVSSDVPALAECVRLQSPVPEGYALLIESMANTC

SEQ ID NO: 27928 - protein, 210 aa, Arabidopsis thaliana
  peptide (1)..(210): Ceres Seq. ID no. 12335147
  misc_feature (1)..(207): Pfam Name: NPL4 family Pfam Description: NPL4 family
  misc_feature (72)..(126): Homolog of NCBI NO: 34905848 NR Description: P0483G10.28 [Oryza sativa (japonica
  misc_feature (1)..(207): Homolog of NCBI NO: 34914854 NR Description: P0416G11.10 [Oryza sativa (japonica
  misc_feature (1)..(209): Homolog of NCBI NO: 15229360 NR Description: putative protein
  misc_feature (1)..(210): Homolog of NCBI NO: 18407495 NR Description: expressed protein
MGLGMRRVGFIFNQTVVQDKTEYTLSNAEVLQAAELHAESELKEWVTAVVKLEVNEDGGADVHFEAFQMSDMCIRLFKEEWFETEIMPDDDPKLSKMKKEVVVGVKDLKEVDNDFFLVLVRILDHQGPLSSTFPIENRSSRATMRALKTHLDRAKSLPLVKKMSDFHLLLFVAQFLDVSSDVPALAECVRLQSPVPEGYALLIESMANTC

SEQ ID NO: 27929 - protein, 206 aa, Arabidopsis thaliana
  peptide (1)..(206): Ceres Seq. ID no. 12335148
  misc_feature (1)..(203): Pfam Name: NPL4 family Pfam Description: NPL4 family
  misc_feature (68)..(122): Homolog of NCBI NO: 34905848 NR Description: P0483G10.28 [Oryza sativa (japonica
  misc_feature (1)..(203): Homolog of NCBI NO: 34914854 NR Description: P0416G11.10 [Oryza sativa (japonica
  misc_feature (1)..(205): Homolog of NCBI NO: 15229360 NR Description: putative protein
  misc_feature (1)..(206): Homolog of NCBI NO: 18407495 NR Description: expressed protein
MRRVGFIFNQTVVQDKTEYTLSNAEVLQAAELHAESELKEWVTAVVKLEVNEDGGADVHFEAFQMSDMCIRLFKEEWFETEIMPDDDPKLSKMKKEVVVGVKDLKEVDNDFFLVLVRILDHQGPLSSTFPIENRSSRATMRALKTHLDRAKSLPLVKKMSDFHLLLFVAQFLDVSSDVPALAECVRLQSPVPEGYALLIESMANTC

SEQ ID NO: 27930 - DNA, 1150 bp, Arabidopsis thaliana
  misc_feature (1)..(1150): Ceres Seq. ID no. 13491427
  misc_feature: MA Experiment ID: 20000180 Result: Up-regulated in Transcription
  misc_feature: MA Experiment 20000180 PARAMETER Experiment Name: At_Germinating_Seeds_P Parameter: Age (hr) Value: 24 vs. 0
  misc_feature: MA Experiment 20000180 PARAMETER Experiment Name: At_Germinating_Seeds_P Parameter: Tissue Value: Germinating Seeds
  misc_feature: MA Experiment ID: 20000185 Result: Down-regulated in Transcription
  misc_feature: MA Experiment 20000185 PARAMETER Experiment Name: At_Roots__P Parameter: Age (day) Value: 7 vs. 21
  misc_feature: MA Experiment 20000185 PARAMETER Experiment Name: At_Roots__P Parameter: Organism Value: A. thaliana
  misc_feature: MA Experiment 20000185 PARAMETER Experiment Name: At_Roots__P Parameter: Tissue Value: Roots vs. Whole Plant
  misc_feature: MA Experiment ID: 20000234 Result: Up-regulated in Transcription
  misc_feature: MA Experiment 20000234 PARAMETER Experiment Name: At_Siliques_P Parameter: Age (day) Value: 21
  misc_feature: MA Experiment 20000234 PARAMETER Experiment Name: At_Siliques_P Parameter: Organism Value: A. thaliana
  misc_feature: MA Experiment 20000234 PARAMETER Experiment Name: At_Siliques_P Parameter: Plant Line Value: WS
  misc_feature: MA Experiment 20000234 PARAMETER Experiment Name: At_Siliques_P Parameter: Tissue Value: Less Than 5mm Siliques vs. Whole Plant
  misc_feature: MA Experiment ID: 20000265 Result: Up-regulated in Transcription
  misc_feature: MA Experiment 20000265 PARAMETER Experiment Name: At_Open_Flower_P Parameter: Age (day) Value: 21
  misc_feature: MA Experiment 20000265 PARAMETER Experiment Name: At_Open_Flower_P Parameter: Plant Line Value: WS
  misc_feature: MA Experiment 20000265 PARAMETER Experiment Name: At_Open_Flower_P Parameter: Tissue Value: Closed Flower vs. Whole Plant
  misc_feature: MA Experiment ID: 20000286 Result: Up-regulated in Transcription
  misc_feature: MA Experiment 20000286 PARAMETER Experiment Name: At_Open_Flower_P Parameter: Age (day) Value: 21
  misc_feature: MA Experiment 20000286 PARAMETER Experiment Name: At_Open_Flower_P Parameter: Plant Line Value: WS
  misc_feature: MA Experiment 20000286 PARAMETER Experiment Name: At_Open_Flower_P Parameter: Tissue Value: Half Open vs. Whole Plant
  misc_feature: MA Experiment ID: 20000437 Result: Down-regulated in Transcription
  misc_feature: MA Experiment 20000437 PARAMETER Experiment Name: At_Drought_P Parameter: Age (day) Value: 8
  misc_feature: MA Experiment 20000437 PARAMETER Experiment Name: At_Drought_P Parameter: Organism Value: A. thaliana
  misc_feature: MA Experiment 20000437 PARAMETER Experiment Name: At_Drought_P Parameter: Plant Line Value: WS
  misc_feature: MA Experiment 20000437 PARAMETER Experiment Name: At_Drought_P Parameter: Timepoint (hr) Value: 24
  misc_feature: MA Experiment 20000437 PARAMETER Experiment Name: At_Drought_P Parameter: Tissue Value: Whole Plant
  misc_feature: MA Experiment 20000437 PARAMETER Experiment Name: At_Drought_P Parameter: Treatment Value: Drought vs. No Drought
  misc_feature: MA Experiment ID: 20000439 Result: Down-regulated in Transcription
  misc_feature: MA Experiment 20000439 PARAMETER Experiment Name: At_Roots__P Parameter: Age (day) Value: 14 vs. 21
  misc_feature: MA Experiment 20000439 PARAMETER Experiment Name: At_Roots__P Parameter: Organism Value: A. thaliana
  misc_feature: MA Experiment 20000439 PARAMETER Experiment Name: At_Roots__P Parameter: Tissue Value: Roots vs. Whole Plant
  misc_feature: MA Experiment ID: 20000495 Result: Up-regulated in Transcription
  misc_feature: MA Experiment 20000495 PARAMETER Experiment Name: At_Guard_Cells_P Parameter: Harvest Date Value: 8/2/2002
  misc_feature: MA Experiment 20000495 PARAMETER Experiment Name: At_Guard_Cells_P Parameter: Organism Value: A. thaliana
  misc_feature: MA Experiment 20000495 PARAMETER Experiment Name: At_Guard_Cells_P Parameter: Tissue Value: Guard Cells vs. Leaves
  misc_feature: MA Experiment ID: 20001248 Result: Down-regulated in Transcription
  misc_feature: MA Experiment 20001248 PARAMETER Experiment Name: At_Far-red-induction_P Parameter: Age (day) Value: 7
  misc_feature: MA Experiment 20001248 PARAMETER Experiment Name: At_Far-red-induction_P Parameter: Light Value: Far-red vs. White
  misc_feature: MA Experiment 20001248 PARAMETER Experiment Name: At_Far-red-induction_P Parameter: Organism Value: A. thaliana
  misc_feature: MA Experiment 20001248 PARAMETER Experiment Name: At_Far-red-induction_P Parameter: Plant Line Value: Columbia
  misc_feature: MA Experiment 20001248 PARAMETER Experiment Name: At_Far-red-induction_P Parameter: Timepoint (hr) Value: 4
  misc_feature: MA Experiment 20001248 PARAMETER Experiment Name: At_Far-red-induction_P Parameter: Tissue Value: Whole Plant
  misc_feature: MA Experiment ID: 20001555 Result: Down-regulated in Transcription
  misc_feature: MA Experiment 20001555 PARAMETER Experiment Name: At_Drought_Soil_Dry_P Parameter: Age (day) Value: 24
  misc_feature: MA Experiment 20001555 PARAMETER Experiment Name: At_Drought_Soil_Dry_P Parameter: Organism Value: A. thaliana
  misc_feature: MA Experiment 20001555 PARAMETER Experiment Name: At_Drought_Soil_Dry_P Parameter: Plant Line Value: WS
  misc_feature: MA Experiment 20001555 PARAMETER Experiment Name: At_Drought_Soil_Dry_P Parameter: Post Timepoint (hr) Value: None
  misc_feature: MA Experiment 20001555 PARAMETER Experiment Name: At_Drought_Soil_Dry_P Parameter: Post-Treatment Value: None
  misc_feature: MA Experiment 20001555 PARAMETER Experiment Name: At_Drought_Soil_Dry_P Parameter: Timepoint (day) Value: 10
  misc_feature: MA Experiment 20001555 PARAMETER Experiment Name: At_Drought_Soil_Dry_P Parameter: Treatment Value: Drought vs. No Drought
aacatcttaaaaagtaaaaacacattcatctatccaacaaaaaaaaaaaaaaaaaggagaaatggaaggaatcgatcatagaatggtgagtgtcaatggcataactatgcacattgccgagaaaggtcccaaagaaggacctgtggtgcttctcctccatggattccctgatctctggtacacgtggcgtcaccagattagtgggttatcatctctaggttaccgcgctgtagctccagacctccgaggctacggagactctgattcgccagagtctttctccgagtacacgtgtcttaacgtcgttggggacctcgtagctcttctggacagtgttgctggaaatcaagagaaggtgtttctggtcggtcatgattggggagccattatcggatggtttctctgtttgtttcgacctgaaaagattaacggctttgtgtgtttgagtgtgccgtatagatcaagaaaccctaaagtcaagcccgttcaagggttcaaggctgtatttggagatgattactacatttgtagatttcaggaaccggggaagattgaaggagagattgcaagtgcagatccaagaatatttctgaggaacctcttcacagggaggacactcggtccgccgattttacctaaggataatccctttggggaaaaacctaaccctaatagcgaaaacattgaattgcctgaatggttttctaagaagatctcgatttctatgtctccaaattcgagaaggcaggatttaccggtggattgaactactacagagccatggatctgaattgggagctcactgcaccatggaccggagctaagattcaagttccagtgaagttcatgacaggtgacttcgacatggtttacaccacaccagggatgaaagagtacattcacggtggtggatttgctgcagatgttccaactcttcaagagatagtggtgattgaagatgctggtcacttcgttaaccaagagaaacctcaagaggtcactgctcacatcaatgacttcttcaccaagcttcgggacaacaacaaaagcttttagagttctcgtttggttctattatgttggctctcaaaacaagttggttcttgcatgtgttgtttcgacaagattttgaataagacttggcattatg

SEQ ID NO: 27931 - protein, 234 aa, Arabidopsis thaliana
  peptide (1)..(234): Ceres Seq. ID no. 13491428
  misc_feature (54)..(217): Pfam Name: alpha/beta hydrolase fold Pfam Description: alpha/beta hydrolase fold
  misc_feature (1)..(217): Homolog of NCBI NO: 15230018 NR Description: epoxide hydrolase, putative [Arabidopsis
MEGIDHRMVSVNGITMHIAEKGPKEGPVVLLLHGFPDLWYTWRHQISGLSSLGYRAVAPDLRGYGDSDSPESFSEYTCLNVVGDLVALLDSVAGNQEKVFLVGHDWGAIIGWFLCLFRPEKINGFVCLSVPYRSRNPKVKPVQGFKAVFGDDYYICRFQEPGKIEGEIASADPRIFLRNLFTGRTLGPPILPKDNPFGEKPNPNSENIELPEWFSKKISISMSPNSRRQDLPVD

SEQ ID NO: 27932 - protein, 227 aa, Arabidopsis thaliana
  peptide (1)..(227): Ceres Seq. ID no. 13491429
  misc_feature (47)..(210): Pfam Name: alpha/beta hydrolase fold Pfam Description: alpha/beta hydrolase fold
  misc_feature (1)..(210): Homolog of NCBI NO: 15230018 NR Description: epoxide hydrolase, putative [Arabidopsis
MVSVNGITMHIAEKGPKEGPVVLLLHGFPDLWYTWRHQISGLSSLGYRAVAPDLRGYGDSDSPESFSEYTCLNVVGDLVALLDSVAGNQEKVFLVGHDWGAIIGWFLCLFRPEKINGFVCLSVPYRSRNPKVKPVQGFKAVFGDDYYICRFQEPGKIEGEIASADPRIFLRNLFTGRTLGPPILPKDNPFGEKPNPNSENIELPEWFSKKISISMSPNSRRQDLPVD

SEQ ID NO: 27933 - protein, 219 aa, Arabidopsis thaliana
  peptide (1)..(219): Ceres Seq. ID no. 13491430
  misc_feature (39)..(202): Pfam Name: alpha/beta hydrolase fold Pfam Description: alpha/beta hydrolase fold
  misc_feature (1)..(202): Homolog of NCBI NO: 15230018 NR Description: epoxide hydrolase, putative [Arabidopsis
MHIAEKGPKEGPVVLLLHGFPDLWYTWRHQISGLSSLGYRAVAPDLRGYGDSDSPESFSEYTCLNVVGDLVALLDSVAGNQEKVFLVGHDWGAIIGWFLCLFRPEKINGFVCLSVPYRSRNPKVKPVQGFKAVFGDDYYICRFQEPGKIEGEIASADPRIFLRNLFTGRTLGPPILPKDNPFGEKPNPNSENIELPEWFSKKISISMSPNSRRQDLPVD

SEQ ID NO: 27934 - DNA, 1266 bp, Arabidopsis thaliana
  misc_feature (1)..(1266): Ceres Seq. ID no. 13490700
  misc_feature: MA Experiment ID: 108434 Result: Down-regulated in Transcription
  misc_feature: MA Experiment 108434 PARAMETER Experiment Name: At_Root_Tips_cDNA_P Parameter: Tissue Value: Root Tips
  misc_feature: MA Experiment ID: 108488 Result: Up-regulated in Transcription
  misc_feature: MA Experiment ID: 108577 Result: Down-regulated in Transcription
  misc_feature: MA Experiment 108577 PARAMETER Experiment Name: At_42deg_Heat_cDNA_P Parameter: Temperature (deg C) Value: 42 vs. 22
  misc_feature: MA Experiment 108577 PARAMETER Experiment Name: At_42deg_Heat_cDNA_P Parameter: Timepoint (hr) Value: 6
  misc_feature: MA Experiment 108577 PARAMETER Experiment Name: At_42deg_Heat_cDNA_P Parameter: Tissue Value: Aerial
  misc_feature: MA Experiment ID: 108595 Result: Down-regulated in Transcription
  misc_feature: MA Experiment 108595 PARAMETER Experiment Name: At_Ler-pi_Ovule_cDNA_P Parameter: Plant Line Value: null
  misc_feature: MA Experiment ID: 20000185 Result: Down-regulated in Transcription
  misc_feature: MA Experiment 20000185 PARAMETER Experiment Name: At_Roots__P Parameter: Age (day) Value: 7 vs. 21
  misc_feature: MA Experiment 20000185 PARAMETER Experiment Name: At_Roots__P Parameter: Organism Value: A. thaliana
  misc_feature: MA Experiment 20000185 PARAMETER Experiment Name: At_Roots__P Parameter: Tissue Value: Roots vs. Whole Plant
  misc_feature: MA Experiment ID: 20000439 Result: Down-regulated in Transcription
  misc_feature: MA Experiment 20000439 PARAMETER Experiment Name: At_Roots__P Parameter: Age (day) Value: 14 vs. 21
  misc_feature: MA Experiment 20000439 PARAMETER Experiment Name: At_Roots__P Parameter: Organism Value: A. thaliana
  misc_feature: MA Experiment 20000439 PARAMETER Experiment Name: At_Roots__P Parameter: Tissue Value: Roots vs. Whole Plant
taatctcttcacaatcccaaaaaatctcacaatcgttttttgcttatctctttcaatggacacctctctctcccaccacggatctctcccgtttcccccatcgcgccgcaatttcgttaaacaaaaccgcggcggcgattgcgtttttctcccctcgcgtcgtaagttccgatacgattcgttggtggtggtttccgctgcgtcttcgggacagagcatcgacgcgcctctagttccacggtcgcctcagggaaggtttctaagttccgtcttggtgaaaaaacggcagctctttcatttcgccgtcgctgatttgcttaaacagctcgctgatgataaggaagcttccttatctcgtatgttccttagttatggttccgatgaagcttccctccacagaaggatagctcaacttaaggagagtgattgccaaattgcaattgaagacataatgtacatgttgatcttgtacaaattctcagagataagagtgcctcttgttccaaagcttcccagttgcatttacaacggaagactcgagatctcgccttcgaaagactgggaacttgagtcaatccatagctttgacgttcttgaactcatcaaagaacatagtaacgcagtcatcagtttaagagtgaattcgagtttgactgacgattgtgcgacaacggagatagataagaatcgtctcagtaaagtatacacagcttcggtcttatatggatactttttaaaatctgcttctcttagacaccaactcgaatgctcattatcacaacaccatggaagtttcactaagcaactgaggcattacatttctgagttcgatcccaagatattgcggagatgcgcaaaaccaaggtcacatgaagcaaaaagcctgatagaaaagcagagtttagctctttttggtcctgaggaaagcagcaaagagagcattgtgacatcgttttctagcctgaagaggttgcttcttgaggctgtggcgtttggtacgtttctatgggacacagaggagtatgtagatggcgcgtttaagctcaaggagaatgagaatgcagaggaagaaacaaatagcagtgtttgaagtatgtatgaaccagtttgctagaagaaaacttgaatatcttttttggtggacattgcatataatatatagattaaatcagggtcaatggctatatgaaattatttttgtctatagtttgagtaatcatatgtatagtgtataatggatgatttaatagagagattggttttgtc

SEQ ID NO: 27935 - protein, 362 aa, Arabidopsis thaliana
  peptide (1)..(362): Ceres Seq. ID no. 13490701
  misc_feature (29)..(351): Pfam Name: Protein of unknown function (DUF760) Pfam Description: Protein of unknown function (DUF760)
  misc_feature (57)..(255): Homolog of NCBI NO: 32489097 NR Description: OSJNBa0093F12.3 [Oryza sativa (japonica
  misc_feature (268)..(346): Homolog of NCBI NO: 15221185 NR Description: expressed protein [Arabidopsis thaliana]
  misc_feature (44)..(255): Homolog of NCBI NO: 15221185 NR Description: expressed protein [Arabidopsis thaliana]
  misc_feature (268)..(346): Homolog of NCBI NO: 18401645 NR Description: expressed protein [Arabidopsis thaliana]
  misc_feature (268)..(346): Homolog of NCBI NO: 17064820 NR Description: Unknown protein [Arabidopsis thaliana]
  misc_feature (52)..(255): Homolog of NCBI NO: 18401645 NR Description: expressed protein [Arabidopsis thaliana]
  misc_feature (52)..(255): Homolog of NCBI NO: 17064820 NR Description: Unknown protein [Arabidopsis thaliana]
  misc_feature (267)..(357): Homolog of NCBI NO: 18397912 NR Description: expressed protein [Arabidopsis thaliana]
  misc_feature (19)..(264): Homolog of NCBI NO: 18397912 NR Description: expressed protein [Arabidopsis thaliana]
  misc_feature (19)..(362): Homolog of NCBI NO: 15239021 NR Description: expressed protein [Arabidopsis thaliana]
NLFTIPKNLTIVFCLSLSMDTSLSHHGSLPFPPSRRNFVKQNRGGDCVFLPSRRKFRYDSLVVVSAASSGQSIDAPLVPRSPQGRFLSSVLVKKRQLFHFAVADLLKQLADDKEASLSRMFLSYGSDEASLHRRIAQLKESDCQIAIEDIMYMLILYKFSEIRVPLVPKLPSCIYNGRLEISPSKDWELESIHSFDVLELIKEHSNAVISLRVNSSLTDDCATTEIDKNRLSKVYTASVLYGYFLKSASLRHQLECSLSQHHGSFTKQLRHYISEFDPKILRRCAKPRSHEAKSLIEKQSLALFGPEESSKESIVTSFSSLKRLLLEAVAFGTFLWDTEEYVDGAFKLKENENAEEETNSSV

SEQ ID NO: 27936 - protein, 344 aa, Arabidopsis thaliana
  peptide (1)..(344): Ceres Seq. ID no. 13490702
  misc_feature (11)..(333): Pfam Name: Protein of unknown function (DUF760) Pfam Description: Protein of unknown function (DUF760)
  misc_feature (39)..(237): Homolog of NCBI NO: 32489097 NR Description: OSJNBa0093F12.3 [Oryza sativa (japonica
  misc_feature (250)..(328): Homolog of NCBI NO: 15221185 NR Description: expressed protein [Arabidopsis thaliana]
  misc_feature (26)..(237): Homolog of NCBI NO: 15221185 NR Description: expressed protein [Arabidopsis thaliana]
  misc_feature (250)..(328): Homolog of NCBI NO: 18401645 NR Description: expressed protein [Arabidopsis thaliana]
  misc_feature (250)..(328): Homolog of NCBI NO: 17064820 NR Description: Unknown protein [Arabidopsis thaliana]
  misc_feature (34)..(237): Homolog of NCBI NO: 18401645 NR Description: expressed protein [Arabidopsis thaliana]
  misc_feature (34)..(237): Homolog of NCBI NO: 17064820 NR Description: Unknown protein [Arabidopsis thaliana]
  misc_feature (249)..(339): Homolog of NCBI NO: 18397912 NR Description: expressed protein [Arabidopsis thaliana]
  misc_feature (1)..(246): Homolog of NCBI NO: 18397912 NR Description: expressed protein [Arabidopsis thaliana]
  misc_feature (1)..(344): Homolog of NCBI NO: 15239021 NR Description: expressed protein [Arabidopsis thaliana]
MDTSLSHHGSLPFPPSRRNFVKQNRGGDCVFLPSRRKFRYDSLVVVSAASSGQSIDAPLVPRSPQGRFLSSVLVKKRQLFHFAVADLLKQLADDKEASLSRMFLSYGSDEASLHRRIAQLKESDCQIAIEDIMYMLILYKFSEIRVPLVPKLPSCIYNGRLEISPSKDWELESIHSFDVLELIKEHSNAVISLRVNSSLTDDCATTEIDKNRLSKVYTASVLYGYFLKSASLRHQLECSLSQHHGSFTKQLRHYISEFDPKILRRCAKPRSHEAKSLIEKQSLALFGPEESSKESIVTSFSSLKRLLLEAVAFGTFLWDTEEYVDGAFKLKENENAEEETNSSV

SEQ ID NO: 27937 - protein, 243 aa, Arabidopsis thaliana
  peptide (1)..(243): Ceres Seq. ID no. 13490703
  misc_feature (1)..(232): Pfam Name: Protein of unknown function (DUF760) Pfam Description: Protein of unknown function (DUF760)
  misc_feature (1)..(136): Homolog of NCBI NO: 32489097 NR Description: OSJNBa0093F12.3 [Oryza sativa (japonica
  misc_feature (149)..(227): Homolog of NCBI NO: 15221185 NR Description: expressed protein [Arabidopsis thaliana]
  misc_feature (1)..(136): Homolog of NCBI NO: 15221185 NR Description: expressed protein [Arabidopsis thaliana]
  misc_feature (149)..(227): Homolog of NCBI NO: 18401645 NR Description: expressed protein [Arabidopsis thaliana]
  misc_feature (149)..(227): Homolog of NCBI NO: 17064820 NR Description: Unknown protein [Arabidopsis thaliana]
  misc_feature (1)..(136): Homolog of NCBI NO: 18401645 NR Description: expressed protein [Arabidopsis thaliana]
  misc_feature (1)..(136): Homolog of NCBI NO: 17064820 NR Description: Unknown protein [Arabidopsis thaliana]
  misc_feature (148)..(238): Homolog of NCBI NO: 18397912 NR Description: expressed protein [Arabidopsis thaliana]
  misc_feature (1)..(145): Homolog of NCBI NO: 18397912 NR Description: expressed protein [Arabidopsis thaliana]
  misc_feature (1)..(243): Homolog of NCBI NO: 15239021 NR Description: expressed protein [Arabidopsis thaliana]
MFLSYGSDEASLHRRIAQLKESDCQIAIEDIMYMLILYKFSEIRVPLVPKLPSCIYNGRLEISPSKDWELESIHSFDVLELIKEHSNAVISLRVNSSLTDDCATTEIDKNRLSKVYTASVLYGYFLKSASLRHQLECSLSQHHGSFTKQLRHYISEFDPKILRRCAKPRSHEAKSLIEKQSLALFGPEESSKESIVTSFSSLKRLLLEAVAFGTFLWDTEEYVDGAFKLKENENAEEETNSSV

SEQ ID NO: 27938 - DNA, 1803 bp, Arabidopsis thaliana
  misc_feature (1)..(1803): Ceres Seq. ID no. 12335487
  misc_feature: MA Experiment ID: 108572 Result: Up-regulated in Transcription
  misc_feature: MA Experiment 108572 PARAMETER Experiment Name: At_Drought_cDNA_P Parameter: Timepoint (hr) Value: 1
  misc_feature: MA Experiment 108572 PARAMETER Experiment Name: At_Drought_cDNA_P Parameter: Tissue Value: Aerial
  misc_feature: MA Experiment 108572 PARAMETER Experiment Name: At_Drought_cDNA_P Parameter: Treatment Value: Drought vs. No Drought
  misc_feature: MA Experiment ID: 108573 Result: Up-regulated in Transcription
  misc_feature: MA Experiment 108573 PARAMETER Experiment Name: At_Drought_cDNA_P Parameter: Timepoint (hr) Value: 6
  misc_feature: MA Experiment 108573 PARAMETER Experiment Name: At_Drought_cDNA_P Parameter: Tissue Value: Aerial
  misc_feature: MA Experiment 108573 PARAMETER Experiment Name: At_Drought_cDNA_P Parameter: Treatment Value: Drought vs. No Drought
  misc_feature: MA Experiment ID: 108577 Result: Down-regulated in Transcription
  misc_feature: MA Experiment 108577 PARAMETER Experiment Name: At_42deg_Heat_cDNA_P Parameter: Temperature (deg C) Value: 42 vs. 22
  misc_feature: MA Experiment 108577 PARAMETER Experiment Name: At_42deg_Heat_cDNA_P Parameter: Timepoint (hr) Value: 6
  misc_feature: MA Experiment 108577 PARAMETER Experiment Name: At_42deg_Heat_cDNA_P Parameter: Tissue Value: Aerial
  misc_feature: MA Experiment ID: 20000179 Result: Up-regulated in Transcription
  misc_feature: MA Experiment 20000179 PARAMETER Experiment Name: At_Germinating_Seeds_P Parameter: Age (hr) Value: 6 vs. 0
  misc_feature: MA Experiment 20000179 PARAMETER Experiment Name: At_Germinating_Seeds_P Parameter: Tissue Value: Germinating Seeds
  misc_feature: MA Experiment ID: 20000180 Result: Up-regulated in Transcription
  misc_feature: MA Experiment 20000180 PARAMETER Experiment Name: At_Germinating_Seeds_P Parameter: Age (hr) Value: 24 vs. 0
  misc_feature: MA Experiment 20000180 PARAMETER Experiment Name: At_Germinating_Seeds_P Parameter: Tissue Value: Germinating Seeds
  misc_feature: MA Experiment ID: 20000185 Result: Down-regulated in Transcription
  misc_feature: MA Experiment 20000185 PARAMETER Experiment Name: At_Roots__P Parameter: Age (day) Value: 7 vs. 21
  misc_feature: MA Experiment 20000185 PARAMETER Experiment Name: At_Roots__P Parameter: Organism Value: A. thaliana
  misc_feature: MA Experiment 20000185 PARAMETER Experiment Name: At_Roots__P Parameter: Tissue Value: Roots vs. Whole Plant
  misc_feature: MA Experiment ID: 20000227 Result: Down-regulated in Transcription
  misc_feature: MA Experiment 20000227 PARAMETER Experiment Name: At_Root-Tips-vs-Tops_P Parameter: Tissue Value: Root Tips vs. Root Tops
  misc_feature: MA Experiment ID: 20000437 Result: Up-regulated in Transcription
  misc_feature: MA Experiment 20000437 PARAMETER Experiment Name: At_Drought_P Parameter: Age (day) Value: 8
  misc_feature: MA Experiment 20000437 PARAMETER Experiment Name: At_Drought_P Parameter: Organism Value: A. thaliana
  misc_feature: MA Experiment 20000437 PARAMETER Experiment Name: At_Drought_P Parameter: Plant Line Value: WS
  misc_feature: MA Experiment 20000437 PARAMETER Experiment Name: At_Drought_P Parameter: Timepoint (hr) Value: 24
  misc_feature: MA Experiment 20000437 PARAMETER Experiment Name: At_Drought_P Parameter: Tissue Value: Whole Plant
  misc_feature: MA Experiment 20000437 PARAMETER Experiment Name: At_Drought_P Parameter: Treatment Value: Drought vs. No Drought
  misc_feature: MA Experiment ID: 20000439 Result: Down-regulated in Transcription
  misc_feature: MA Experiment 20000439 PARAMETER Experiment Name: At_Roots__P Parameter: Age (day) Value: 14 vs. 21
  misc_feature: MA Experiment 20000439 PARAMETER Experiment Name: At_Roots__P Parameter: Organism Value: A. thaliana
  misc_feature: MA Experiment 20000439 PARAMETER Experiment Name: At_Roots__P Parameter: Tissue Value: Roots vs. Whole Plant
  misc_feature: MA Experiment ID: 20000451 Result: Down-regulated in Transcription
  misc_feature: MA Experiment 20000451 PARAMETER Experiment Name: At_CS6879_Shoots-Roots_P Parameter: Age (day) Value: 14
  misc_feature: MA Experiment 20000451 PARAMETER Experiment Name: At_CS6879_Shoots-Roots_P Parameter: Organism Value: A. thaliana
  misc_feature: MA Experiment 20000451 PARAMETER Experiment Name: At_CS6879_Shoots-Roots_P Parameter: Plant Line Value: CS6879 vs. WS
  misc_feature: MA Experiment 20000451 PARAMETER Experiment Name: At_CS6879_Shoots-Roots_P Parameter: Tissue Value: Roots
  misc_feature: MA Experiment ID: 20000496 Result: Up-regulated in Transcription
  misc_feature: MA Experiment 20000496 PARAMETER Experiment Name: At_Guard_Cells_P Parameter: Harvest Date Value: 7/19/2002
  misc_feature: MA Experiment 20000496 PARAMETER Experiment Name: At_Guard_Cells_P Parameter: Organism Value: Canola
  misc_feature: MA Experiment 20000496 PARAMETER Experiment Name: At_Guard_Cells_P Parameter: Tissue Value: Guard Cells vs. Leaves
  misc_feature: MA Experiment ID: 20001558 Result: Down-regulated in Transcription
  misc_feature: MA Experiment 20001558 PARAMETER Experiment Name: At_Drought_Soil_Dry_P Parameter: Age (day) Value: 27
  misc_feature: MA Experiment 20001558 PARAMETER Experiment Name: At_Drought_Soil_Dry_P Parameter: Organism Value: A. thaliana
  misc_feature: MA Experiment 20001558 PARAMETER Experiment Name: At_Drought_Soil_Dry_P Parameter: Plant Line Value: WS
  misc_feature: MA Experiment 20001558 PARAMETER Experiment Name: At_Drought_Soil_Dry_P Parameter: Post Timepoint (hr) Value: 6
  misc_feature: MA Experiment 20001558 PARAMETER Experiment Name: At_Drought_Soil_Dry_P Parameter: Post-Treatment Value: Re-Water vs. No Drought
  misc_feature: MA Experiment 20001558 PARAMETER Experiment Name: At_Drought_Soil_Dry_P Parameter: Timepoint (day) Value: 13
  misc_feature: MA Experiment 20001558 PARAMETER Experiment Name: At_Drought_Soil_Dry_P Parameter: Treatment Value: Drought vs. No Drought
  misc_feature: MA Experiment ID: 20001560 Result: Down-regulated in Transcription
  misc_feature: MA Experiment 20001560 PARAMETER Experiment Name: At_Drought_Soil_Dry_P Parameter: Age (day) Value: 28
  misc_feature: MA Experiment 20001560 PARAMETER Experiment Name: At_Drought_Soil_Dry_P Parameter: Organism Value: A. thaliana
  misc_feature: MA Experiment 20001560 PARAMETER Experiment Name: At_Drought_Soil_Dry_P Parameter: Plant Line Value: WS
  misc_feature: MA Experiment 20001560 PARAMETER Experiment Name: At_Drought_Soil_Dry_P Parameter: Post Timepoint (hr) Value: None
  misc_feature: MA Experiment 20001560 PARAMETER Experiment Name: At_Drought_Soil_Dry_P Parameter: Post-Treatment Value: None
  misc_feature: MA Experiment 20001560 PARAMETER Experiment Name: At_Drought_Soil_Dry_P Parameter: Timepoint (day) Value: 14
  misc_feature: MA Experiment 20001560 PARAMETER Experiment Name: At_Drought_Soil_Dry_P Parameter: Treatment Value: Drought vs. No Drought
accactacaaccaccgcaacaaccaccaaaaaccctctcaaagaaatttcttttttttcttactttcttggtttgtcaaatatggtcagccatccaatggagaaagctgcaaatggtgcgtctgcgttggaaacgcagacgggtgagttagatcagccggaacggcttcgtaagatcatatcggtgtcttccattgccgccggtgtacagttcggttgggctttacagttatctctgttgactccttacgtgcagctactcggaatcccacataaatgggcttctctgatttggctctgtggtccaatctccggtatgcttgttcagcctatcgtcggttaccacagtgaccgttgcacctcaagattcggccgtcgtcgtcccttcatcgtcgctggagctggtttagtcaccgttgctgttttccttatcggttacgctgccgatataggtcacagcatgggcgatcagcttgacaaaccgccgaaaacgcgagccatagcgatattcgctctcgggttttggattcttgacgtggctaacaacaccttacaaggaccctgcagagctttcttggctgatttatcagcagggaacgctaagaaaacgcgaaccgcaaacgcgtttttctcgtttttcatggcggttggaaacgttttgggttacgctgcgggatcttacagaaatctctacaaagttgtgcctttcacgatgactgagtcatgcgatctctactgcgcaaacctcaaaacgtgttttttcctatccataacgcttctcctcatagtcactttcgtatctctctgttacgtgaaggagaagccatggacgccagagccaacagccgatggaaaagcctccaacgttccgtttttcggagaaatcttcggagctttcaaggaactaaaaagacccatgtggatgcttcttatagtcactgcactaaactggatcgcttggttccctttccttctcttcgacactgattggatgggccgtgaggtgtacggaggaaactcagacgcaaccgcaaccgcagcctctaagaagctttacaacgacggagtcagagctggtgctttggggcttatgcttaacgctattgttcttggtttcatgtctcttggtgttgaatggattggtcggaaattgggaggagctaaaaggctttggggtattgttaacttcatcctcgccatttgcttggccatgacggttgtggttacgaaacaagctgagaatcaccgacgagatcacggcggcgctaaaacaggtccacctggtaacgtcacagctggtgctttaactctcttcgccatcctcggtatcccccaagccattacgtttagcattccttttgcactagcttccatattttcaaccaattccggtgccggccaaggactttccctaggtgttctgaatctagccattgtcgtccctcagatggtaatatctgtgggaggtggaccattcgacgaactattcggtggtggaaacattccagcatttgtgttaggagcgattgcggcagcggtaagtggtgtattggcgttgacggtgttgccttcaccgcctccggatgctcctgccttcaaagctactatgggatttcattgaattttagcagtggttgtttggctctctttctctcataaaacagtagtgttgtgcaaatcctacataaagaaaaaagaaaaggaaattaaactcattgggttggtttgtattttacctaaacccacgaagttcctttttctttttgtaactcaatttaaatttggagtatattttactttttgc

SEQ ID NO: 27939 - protein, 539 aa, Arabidopsis thaliana
  peptide (1)..(539): Ceres Seq. ID no. 12335488
  misc_feature (59)..(499): Pfam Name: Sugar (and other) transporter Pfam Description: Sugar (and other) transporter
  misc_feature (56)..(539): Homolog of NCBI NO: 542020 NR Description: sucrose transport protein - castor bean
  misc_feature (35)..(523): Homolog of NCBI NO: 15225986 NR Description: putative sucrose-proton symporter; protein id:
  misc_feature (34)..(536): Homolog of NCBI NO: 12057172 NR Description: sucrose trasporter [Arabidopsis thaliana]
  misc_feature (34)..(539): Homolog of NCBI NO: 15217602 NR Description: putative sucrose transport protein; protein id:
  misc_feature (28)..(539): Homolog of NCBI NO: 15217601 NR Description: sucrose transport protein SUC1
  misc_feature (34)..(539): Homolog of NCBI NO: 18091779 NR Description: sucrose transporter SUC1 [Brassica oleracea]
  misc_feature (33)..(539): Homolog of NCBI NO: 18091781 NR Description: sucrose transporter SUC2 [Brassica oleracea]
  misc_feature (28)..(539): Homolog of NCBI NO: 20147213 NR Description: At1g22710/T22J18_12 [Arabidopsis thaliana]
  misc_feature (28)..(539): Homolog of NCBI NO: 481131 NR Description: sucrose transport protein SUC2 - Arabidopsis
  misc_feature (28)..(539): Homolog of NCBI NO: 15219938 NR Description: putative sucrose transport protein, SUC2
TTTTTATTTKNPLKEISFFSYFLGLSNMVSHPMEKAANGASALETQTGELDQPERLRKIISVSSIAAGVQFGWALQLSLLTPYVQLLGIPHKWASLIWLCGPISGMLVQPIVGYHSDRCTSRFGRRRPFIVAGAGLVTVAVFLIGYAADIGHSMGDQLDKPPKTRAIAIFALGFWILDVANNTLQGPCRAFLADLSAGNAKKTRTANAFFSFFMAVGNVLGYAAGSYRNLYKVVPFTMTESCDLYCANLKTCFFLSITLLLIVTFVSLCYVKEKPWTPEPTADGKASNVPFFGEIFGAFKELKRPMWMLLIVTALNWIAWFPFLLFDTDWMGREVYGGNSDATATAASKKLYNDGVRAGALGLMLNAIVLGFMSLGVEWIGRKLGGAKRLWGIVNFILAICLAMTVVVTKQAENHRRDHGGAKTGPPGNVTAGALTLFAILGIPQAITFSIPFALASIFSTNSGAGQGLSLGVLNLAIVVPQMVISVGGGPFDELFGGGNIPAFVLGAIAAAVSGVLALTVLPSPPPDAPAFKATMGFH

SEQ ID NO: 27940 - protein, 512 aa, Arabidopsis thaliana; identical to SEQ ID NO: 24986
  peptide (1)..(512): Ceres Seq. ID no. 12335489
  misc_feature (32)..(472): Pfam Name: Sugar (and other) transporter Pfam Description: Sugar (and other) transporter
  misc_feature (29)..(512): Homolog of NCBI NO: 542020 NR Description: sucrose transport protein - castor bean
  misc_feature (8)..(496): Homolog of NCBI NO: 15225986 NR Description: putative sucrose-proton symporter; protein id:
  misc_feature (7)..(509): Homolog of NCBI NO: 12057172 NR Description: sucrose trasporter [Arabidopsis thaliana]
  misc_feature (7)..(512): Homolog of NCBI NO: 15217602 NR Description: putative sucrose transport protein; protein id:
  misc_feature (1)..(512): Homolog of NCBI NO: 15217601 NR Description: sucrose transport protein SUC1
  misc_feature (7)..(512): Homolog of NCBI NO: 18091779 NR Description: sucrose transporter SUC1 [Brassica oleracea]
  misc_feature (6)..(512): Homolog of NCBI NO: 18091781 NR Description: sucrose transporter SUC2 [Brassica oleracea]
  misc_feature (1)..(512): Homolog of NCBI NO: 20147213 NR Description: At1g22710/T22J18_12 [Arabidopsis thaliana]
  misc_feature (1)..(512): Homolog of NCBI NO: 481131 NR Description: sucrose transport protein SUC2 - Arabidopsis
  misc_feature (1)..(512): Homolog of NCBI NO: 15219938 NR Description: putative sucrose transport protein, SUC2

SEQ ID NO: 27941 - protein, 507 aa, Arabidopsis thaliana; identical to SEQ ID NO: 24987
  peptide (1)..(507): Ceres Seq. ID no. 12335490
  misc_feature (27)..(467): Pfam Name: Sugar (and other) transporter Pfam Description: Sugar (and other) transporter
  misc_feature (24)..(507): Homolog of NCBI NO: 542020 NR Description: sucrose transport protein - castor bean
  misc_feature (3)..(491): Homolog of NCBI NO: 15225986 NR Description: putative sucrose-proton symporter; protein id:
  misc_feature (2)..(504): Homolog of NCBI NO: 12057172 NR Description: sucrose trasporter [Arabidopsis thaliana]
  misc_feature (2)..(507): Homolog of NCBI NO: 15217602 NR Description: putative sucrose transport protein; protein id:
  misc_feature (1)..(507): Homolog of NCBI NO: 15217601 NR Description: sucrose transport protein SUC1
  misc_feature (2)..(507): Homolog of NCBI NO: 18091779 NR Description: sucrose transporter SUC1 [Brassica oleracea]
  misc_feature (1)..(507): Homolog of NCBI NO: 18091781 NR Description: sucrose transporter SUC2 [Brassica oleracea]
  misc_feature (1)..(507): Homolog of NCBI NO: 20147213 NR Description: At1g22710/T22J18_12 [Arabidopsis thaliana]
  misc_feature (1)..(507): Homolog of NCBI NO: 481131 NR Description: sucrose transport protein SUC2 - Arabidopsis
  misc_feature (1)..(507): Homolog of NCBI NO: 15219938 NR Description: putative sucrose transport protein, SUC2

SEQ ID NO: 27942 - DNA, 1323 bp, Arabidopsis thaliana
  misc_feature (1)..(1323): Ceres Seq. ID no. 12335491
  misc_feature: MA Experiment ID: 108461 Result: Down-regulated in Transcription
  misc_feature: MA Experiment 108461 PARAMETER Experiment Name: At_Germinating_Seeds_cDNA_P Parameter: Age (day) Value: 1 vs. 0
  misc_feature: MA Experiment 108461 PARAMETER Experiment Name: At_Germinating_Seeds_cDNA_P Parameter: Tissue Value: Germinating Seeds
  misc_feature: MA Experiment ID: 108473 Result: Down-regulated in Transcription
  misc_feature: MA Experiment 108473 PARAMETER Experiment Name: At_Drought_Flowers_cDNA_P Parameter: Timepoint (hr) Value: 7 d
  misc_feature: MA Experiment 108473 PARAMETER Experiment Name: At_Drought_Flowers_cDNA_P Parameter: Tissue Value: Flower
  misc_feature: MA Experiment 108473 PARAMETER Experiment Name: At_Drought_Flowers_cDNA_P Parameter: Treatment Value: Drought vs. No Drought
  misc_feature: MA Experiment ID: 108501 Result: Down-regulated in Transcription
  misc_feature: MA Experiment 108501 PARAMETER Experiment Name: At_ap2_floral_buds_cDNA_P Parameter: Plant Line Value: ap2 (Ler.)
  misc_feature: MA Experiment 108501 PARAMETER Experiment Name: At_ap2_floral_buds_cDNA_P Parameter: Tissue Value: Closed Flower
  misc_feature: MA Experiment ID: 108574 Result: Up-regulated in Transcription
  misc_feature: MA Experiment 108574 PARAMETER Experiment Name: At_Wounding__cDNA_P Parameter: Timepoint (hr) Value: 1
  misc_feature: MA Experiment 108574 PARAMETER Experiment Name: At_Wounding__cDNA_P Parameter: Tissue Value: Aerial
  misc_feature: MA Experiment 108574 PARAMETER Experiment Name: At_Wounding__cDNA_P Parameter: Treatment Value: Wounding vs. No Wounding
  misc_feature: MA Experiment ID: 108667 Result: Up-regulated in Transcription
  misc_feature: MA Experiment 108667 PARAMETER Experiment Name: At_2mM_SA_cDNA_P Parameter: Plant Line Value: WS
  misc_feature: MA Experiment 108667 PARAMETER Experiment Name: At_2mM_SA_cDNA_P Parameter: Timepoint (hr) Value: 1
  misc_feature: MA Experiment 108667 PARAMETER Experiment Name: At_2mM_SA_cDNA_P Parameter: Treatment Value: 2mM SA vs. No Treatment
  misc_feature: MA Experiment ID: 108668 Result: Up-regulated in Transcription
  misc_feature: MA Experiment 108668 PARAMETER Experiment Name: At_2mM_SA_cDNA_P Parameter: Plant Line Value: WS
  misc_feature: MA Experiment 108668 PARAMETER Experiment Name: At_2mM_SA_cDNA_P Parameter: Timepoint (hr) Value: 6
  misc_feature: MA Experiment 108668 PARAMETER Experiment Name: At_2mM_SA_cDNA_P Parameter: Treatment Value: 2mM SA vs. No Treatment
  misc_feature: MA Experiment ID: 20000179 Result: Down-regulated in Transcription
  misc_feature: MA Experiment 20000179 PARAMETER Experiment Name: At_Germinating_Seeds_P Parameter: Age (hr) Value: 6 vs. 0
  misc_feature: MA Experiment 20000179 PARAMETER Experiment Name: At_Germinating_Seeds_P Parameter: Tissue Value: Germinating Seeds
  misc_feature: MA Experiment ID: 20000180 Result: Down-regulated in Transcription
  misc_feature: MA Experiment 20000180 PARAMETER Experiment Name: At_Germinating_Seeds_P Parameter: Age (hr) Value: 24 vs. 0
  misc_feature: MA Experiment 20000180 PARAMETER Experiment Name: At_Germinating_Seeds_P Parameter: Tissue Value: Germinating Seeds
  misc_feature: MA Experiment ID: 20000182 Result: Up-regulated in Transcription
  misc_feature: MA Experiment 20000182 PARAMETER Experiment Name: At_2mM_SA_P Parameter: Age (day) Value: 14
  misc_feature: MA Experiment 20000182 PARAMETER Experiment Name: At_2mM_SA_P Parameter: Organism Value: A. thaliana
  misc_feature: MA Experiment 20000182 PARAMETER Experiment Name: At_2mM_SA_P Parameter: Plant Line Value: WS
  misc_feature: MA Experiment 20000182 PARAMETER Experiment Name: At_2mM_SA_P Parameter: Timepoint (hr) Value: 6
  misc_feature: MA Experiment 20000182 PARAMETER Experiment Name: At_2mM_SA_P Parameter: Tissue Value: Aerial
  misc_feature: MA Experiment 20000182 PARAMETER Experiment Name: At_2mM_SA_P Parameter: Treatment Value: 2mM SA vs. No Treatment
  misc_feature: MA Experiment ID: 20000265 Result: Up-regulated in Transcription
  misc_feature: MA Experiment 20000265 PARAMETER Experiment Name: At_Open_Flower_P Parameter: Age (day) Value: 21
  misc_feature: MA Experiment 20000265 PARAMETER Experiment Name: At_Open_Flower_P Parameter: Plant Line Value: WS
  misc_feature: MA Experiment 20000265 PARAMETER Experiment Name: At_Open_Flower_P Parameter: Tissue Value: Closed Flower vs. Whole Plant
  misc_feature: MA Experiment ID: 20000286 Result: Up-regulated in Transcription
  misc_feature: MA Experiment 20000286 PARAMETER Experiment Name: At_Open_Flower_P Parameter: Age (day) Value: 21
  misc_feature: MA Experiment 20000286 PARAMETER Experiment Name: At_Open_Flower_P Parameter: Plant Line Value: WS
  misc_feature: MA Experiment 20000286 PARAMETER Experiment Name: At_Open_Flower_P Parameter: Tissue Value: Half Open vs. Whole Plant
  misc_feature: MA Experiment ID: 20000437 Result: Up-regulated in Transcription
  misc_feature: MA Experiment 20000437 PARAMETER Experiment Name: At_Drought_P Parameter: Age (day) Value: 8
  misc_feature: MA Experiment 20000437 PARAMETER Experiment Name: At_Drought_P Parameter: Organism Value: A. thaliana
  misc_feature: MA Experiment 20000437 PARAMETER Experiment Name: At_Drought_P Parameter: Plant Line Value: WS
  misc_feature: MA Experiment 20000437 PARAMETER Experiment Name: At_Drought_P Parameter: Timepoint (hr) Value: 24
  misc_feature: MA Experiment 20000437 PARAMETER Experiment Name: At_Drought_P Parameter: Tissue Value: Whole Plant
  misc_feature: MA Experiment 20000437 PARAMETER Experiment Name: At_Drought_P Parameter: Treatment Value: Drought vs. No Drought
  misc_feature: MA Experiment ID: 20000438 Result: Down-regulated in Transcription
  misc_feature: MA Experiment 20000438 PARAMETER Experiment Name: At_Shoots__P Parameter: Age (day) Value: 14
  misc_feature: MA Experiment 20000438 PARAMETER Experiment Name: At_Shoots__P Parameter: Tissue Value: Shoots vs. Whole Plant
  misc_feature: MA Experiment ID: 20000439 Result: Down-regulated in Transcription
  misc_feature: MA Experiment 20000439 PARAMETER Experiment Name: At_Roots__P Parameter: Age (day) Value: 14 vs. 21
  misc_feature: MA Experiment 20000439 PARAMETER Experiment Name: At_Roots__P Parameter: Organism Value: A. thaliana
  misc_feature: MA Experiment 20000439 PARAMETER Experiment Name: At_Roots__P Parameter: Tissue Value: Roots vs. Whole Plant
  misc_feature: MA Experiment ID: 20000453 Result: Up-regulated in Transcription
  misc_feature: MA Experiment 20000453 PARAMETER Experiment Name: At_100uM_ABA_P Parameter: Age (day) Value: 15
  misc_feature: MA Experiment 20000453 PARAMETER Experiment Name: At_100uM_ABA_P Parameter: Organism Value: A. thaliana
  misc_feature: MA Experiment 20000453 PARAMETER Experiment Name: At_100uM_ABA_P Parameter: Plant Line Value: WS
  misc_feature: MA Experiment 20000453 PARAMETER Experiment Name: At_100uM_ABA_P Parameter: Timepoint (hr) Value: 24
  misc_feature: MA Experiment 20000453 PARAMETER Experiment Name: At_100uM_ABA_P Parameter: Tissue Value: Aerial
  misc_feature: MA Experiment 20000453 PARAMETER Experiment Name: At_100uM_ABA_P Parameter: Treatment Value: 100uM ABA vs. No Treatment
  misc_feature: MA Experiment ID: 20000527 Result: Down-regulated in Transcription
  misc_feature: MA Experiment 20000527 PARAMETER Experiment Name: At_10percent_PEG_P Parameter: Age (day) Value: 20
  misc_feature: MA Experiment 20000527 PARAMETER Experiment Name: At_10percent_PEG_P Parameter: Organism Value: A. thaliana
  misc_feature: MA Experiment 20000527 PARAMETER Experiment Name: At_10percent_PEG_P Parameter: Plant Line Value: WS
  misc_feature: MA Experiment 20000527 PARAMETER Experiment Name: At_10percent_PEG_P Parameter: Timepoint (day) Value: 20
  misc_feature: MA Experiment 20000527 PARAMETER Experiment Name: At_10percent_PEG_P Parameter: Tissue Value: Whole Plant
  misc_feature: MA Experiment 20000527 PARAMETER Experiment Name: At_10percent_PEG_P Parameter: Treatment Value: 10percent PEG vs. No Treatment
  misc_feature: MA Experiment ID: 20000709 Result: Up-regulated in Transcription
  misc_feature: MA Experiment 20000709 PARAMETER Experiment Name: At_15mM_NH4NO3_L-to-H_P Parameter: Age (hr) Value: 14
  misc_feature: MA Experiment 20000709 PARAMETER Experiment Name: At_15mM_NH4NO3_L-to-H_P Parameter: Organism Value: A. thaliana
  misc_feature: MA Experiment 20000709 PARAMETER Experiment Name: At_15mM_NH4NO3_L-to-H_P Parameter: Plant Line Value: WS
  misc_feature: MA Experiment 20000709 PARAMETER Experiment Name: At_15mM_NH4NO3_L-to-H_P Parameter: Timepoint (hr) Value: 4
  misc_feature: MA Experiment 20000709 PARAMETER Experiment Name: At_15mM_NH4NO3_L-to-H_P Parameter: Tissue Value: Aerial
  misc_feature: MA Experiment 20000709 PARAMETER Experiment Name: At_15mM_NH4NO3_L-to-H_P Parameter: Treatment Value: 15mM NH4NO3 vs. 30mM Mannitol
  misc_feature: MA Experiment ID: 20001556 Result: Up-regulated in Transcription
  misc_feature: MA Experiment 20001556 PARAMETER Experiment Name: At_Drought_Soil_Dry_P Parameter: Age (day) Value: 26
  misc_feature: MA Experiment 20001556 PARAMETER Experiment Name: At_Drought_Soil_Dry_P Parameter: Organism Value: A. thaliana
  misc_feature: MA Experiment 20001556 PARAMETER Experiment Name: At_Drought_Soil_Dry_P Parameter: Plant Line Value: WS
  misc_feature: MA Experiment 20001556 PARAMETER Experiment Name: At_Drought_Soil_Dry_P Parameter: Post Timepoint (hr) Value: None
  misc_feature: MA Experiment 20001556 PARAMETER Experiment Name: At_Drought_Soil_Dry_P Parameter: Post-Treatment Value: None
  misc_feature: MA Experiment 20001556 PARAMETER Experiment Name: At_Drought_Soil_Dry_P Parameter: Timepoint (day) Value: 12
  misc_feature: MA Experiment 20001556 PARAMETER Experiment Name: At_Drought_Soil_Dry_P Parameter: Treatment Value: Drought vs. No Drought
  misc_feature: MA Experiment ID: 20001557 Result: Up-regulated in Transcription
  misc_feature: MA Experiment 20001557 PARAMETER Experiment Name: At_Drought_Soil_Dry_P Parameter: Age (day) Value: 27
  misc_feature: MA Experiment 20001557 PARAMETER Experiment Name: At_Drought_Soil_Dry_P Parameter: Organism Value: A. thaliana
  misc_feature: MA Experiment 20001557 PARAMETER Experiment Name: At_Drought_Soil_Dry_P Parameter: Plant Line Value: WS
  misc_feature: MA Experiment 20001557 PARAMETER Experiment Name: At_Drought_Soil_Dry_P Parameter: Post Timepoint (hr) Value: 3
  misc_feature: MA Experiment 20001557 PARAMETER Experiment Name: At_Drought_Soil_Dry_P Parameter: Post-Treatment Value: Re-Water vs. No Drought
  misc_feature: MA Experiment 20001557 PARAMETER Experiment Name: At_Drought_Soil_Dry_P Parameter: Timepoint (day) Value: 13
  misc_feature: MA Experiment 20001557 PARAMETER Experiment Name: At_Drought_Soil_Dry_P Parameter: Treatment Value: Drought vs. No Drought
  misc_feature: MA Experiment ID: 20001560 Result: Up-regulated in Transcription
  misc_feature: MA Experiment 20001560 PARAMETER Experiment Name: At_Drought_Soil_Dry_P Parameter: Age (day) Value: 28
  misc_feature: MA Experiment 20001560 PARAMETER Experiment Name: At_Drought_Soil_Dry_P Parameter: Organism Value: A. thaliana
  misc_feature: MA Experiment 20001560 PARAMETER Experiment Name: At_Drought_Soil_Dry_P Parameter: Plant Line Value: WS
  misc_feature: MA Experiment 20001560 PARAMETER Experiment Name: At_Drought_Soil_Dry_P Parameter: Post Timepoint (hr) Value: None
  misc_feature: MA Experiment 20001560 PARAMETER Experiment Name: At_Drought_Soil_Dry_P Parameter: Post-Treatment Value: None
  misc_feature: MA Experiment 20001560 PARAMETER Experiment Name: At_Drought_Soil_Dry_P Parameter: Timepoint (day) Value: 14
  misc_feature: MA Experiment 20001560 PARAMETER Experiment Name: At_Drought_Soil_Dry_P Parameter: Treatment Value: Drought vs. No Drought
  misc_feature: MA Experiment ID: 20001757 Result: Down-regulated in Transcription
  misc_feature: MA Experiment 20001757 PARAMETER Experiment Name: At_50mM_NH4NO3_L-to-H_P Parameter: Timepoint (hr) Value: 6
  misc_feature: MA Experiment 20001757 PARAMETER Experiment Name: At_50mM_NH4NO3_L-to-H_P Parameter: Tissue Value: Leaf
  misc_feature: MA Experiment 20001757 PARAMETER Experiment Name: At_50mM_NH4NO3_L-to-H_P Parameter: Treatment Value: 50mM NH4NO3 vs 100mM Mannitol
  misc_feature: MA Experiment ID: 20001904 Result: Up-regulated in Transcription
  misc_feature: MA Experiment 20001904 PARAMETER Experiment Name: At_Drought_Reproduction_P Parameter: Age (day) Value: 37
  misc_feature: MA Experiment 20001904 PARAMETER Experiment Name: At_Drought_Reproduction_P Parameter: Organism Value: A. thaliana
  misc_feature: MA Experiment 20001904 PARAMETER Experiment Name: At_Drought_Reproduction_P Parameter: Plant Line Value: WS
  misc_feature: MA Experiment 20001904 PARAMETER Experiment Name: At_Drought_Reproduction_P Parameter: Timepoint (day) Value: 7
  misc_feature: MA Experiment 20001904 PARAMETER Experiment Name: At_Drought_Reproduction_P Parameter: Tissue Value: Rosettes
  misc_feature: MA Experiment 20001904 PARAMETER Experiment Name: At_Drought_Reproduction_P Parameter: Treatment Value: Drought vs. No Drought
  misc_feature: MA Experiment ID: 20001905 Result: Up-regulated in Transcription
  misc_feature: MA Experiment 20001905 PARAMETER Experiment Name: At_Drought_Reproduction_P Parameter: Age (day) Value: 40
  misc_feature: MA Experiment 20001905 PARAMETER Experiment Name: At_Drought_Reproduction_P Parameter: Organism Value: A. thaliana
  misc_feature: MA Experiment 20001905 PARAMETER Experiment Name: At_Drought_Reproduction_P Parameter: Plant Line Value: WS
  misc_feature: MA Experiment 20001905 PARAMETER Experiment Name: At_Drought_Reproduction_P Parameter: Timepoint (day) Value: 10
  misc_feature: MA Experiment 20001905 PARAMETER Experiment Name: At_Drought_Reproduction_P Parameter: Tissue Value: Rosettes
  misc_feature: MA Experiment 20001905 PARAMETER Experiment Name: At_Drought_Reproduction_P Parameter: Treatment Value: Drought vs. No Drought
  misc_feature: MA Experiment ID: 20001911 Result: Down-regulated in Transcription
  misc_feature: MA Experiment 20001911 PARAMETER Experiment Name: At_Drought_Reproduction_P Parameter: Age (day) Value: 40
  misc_feature: MA Experiment 20001911 PARAMETER Experiment Name: At_Drought_Reproduction_P Parameter: Organism Value: A. thaliana
  misc_feature: MA Experiment 20001911 PARAMETER Experiment Name: At_Drought_Reproduction_P Parameter: Plant Line Value: WS
  misc_feature: MA Experiment 20001911 PARAMETER Experiment Name: At_Drought_Reproduction_P Parameter: Timepoint (day) Value: 10
  misc_feature: MA Experiment 20001911 PARAMETER Experiment Name: At_Drought_Reproduction_P Parameter: Tissue Value: Flowers
  misc_feature: MA Experiment 20001911 PARAMETER Experiment Name: At_Drought_Reproduction_P Parameter: Treatment Value: Drought vs. No Drought
aaccaaaaacaaacattttctaaaaaatggcgactaagatcaacaagcaagtcgtgttacttgattacgtaaccggtttcgccaaggaatccgaccttgtaatcacctccaccaccatcgatcttagggtgccaaagggatctatgacggcgttggtgaagaatctctacttgtcttgtgatccttacatgcgaaatcgtatgaggaaacctgatcctctgagccctgctactgctcagtccttcactcccggcaagcctatctcagggtttggagtgtctaaagtgatagattctggacactcagattacgaagaaggtgacttaatttggggagcagtaggatgggaagagtacagtgttattacaccaattcctaatcttcacttcaagatccatcataccaattttcctttatcttactacacaggacttcttggtatgcctggtatgaccgcgtatgttgggttttacgagatatgtactccaaagaaaggagatactgtgtttgtgtcggctgcatctggcgcggttggtcagcttgtaggacaatttgctaagttgatgggttgttatgttgttggaagcgctgggagtaaagaaaaggttgatctcctcaagaacaagtttggattcgatgatgccttcaactacaaggaagaacacaatcttattggtgccctaaaaaggtgtttccctgaaggcattgacatatactttgagaacgtaggaggcaagatgctggatgcagtgatcttaaacatgagaccacacggccgtatcgcggcatgtgggatgatctcacagtacaatctgaagaatccggaaggtatatacggcctctcgctcattacatacaaacgaatccgtattgaagggttcaactgtttcgattacttccacaaatactcggagttcttggagtttgtggttccgtatataaaagaagggaagataaagtatgtggaagatgttgctgatggactcgagagtgctcctgctgctctcgttggactctttcacggtaaaaacgtcgggaaacaacttgtcttggtttcgccatcataagtgataaaatgagatcagtacgtacttgttcggtaagtgatgtttcggaagttggatatgtctccgtacaagatatgaaattgttgaaaagtatatgtatttggtgaagtttgcagaggacgttagtgttgagtcctttaatttggttcataatgttttagtttcttcagcaacaatacaagagatcagggttcggttttgtcaataatgtaataatttgtctaaattatgaaataaataaatttattattagcct

SEQ ID NO: 27943 - protein, 346 aa, Arabidopsis thaliana
  peptide (1)..(346): Ceres Seq. ID no. 12335492
  misc_feature (106)..(343): Pfam Name: Zinc-binding dehydrogenase Pfam Description: Zinc-binding dehydrogenase
  misc_feature (6)..(344): Homolog of NCBI NO: 1362014 NR Description: probable NADPH2:quinone reductase (EC 1.6.5.5) P2
  misc_feature (3)..(344): Homolog of NCBI NO: 15237888 NR Description: quinone oxidoreductase -like protein; protein id:
  misc_feature (6)..(344): Homolog of NCBI NO: 21554121 NR Description: quinone oxidoreductase-like protein [Arabidopsis
  misc_feature (3)..(344): Homolog of NCBI NO: 17529140 NR Description: putative quinone oxidoreductase [Arabidopsis
  misc_feature (1)..(344): Homolog of NCBI NO: 21536967 NR Description: quinone oxidoreductase-like protein [Arabidopsis
  misc_feature (3)..(344): Homolog of NCBI NO: 22326861 NR Description: quinone oxidoreductase - like protein
  misc_feature (6)..(344): Homolog of NCBI NO: 15237890 NR Description: quinone oxidoreductase - like protein
  misc_feature (1)..(344): Homolog of NCBI NO: 15240810 NR Description: quinone oxidoreductase -like protein
  misc_feature (1)..(346): Homolog of NCBI NO: 15237883 NR Description: quinone oxidoreductase -like protein
  misc_feature (1)..(346): Homolog of NCBI NO: 21595408 NR Description: quinone oxidoreductase-like protein [Arabidopsis
MATKINKQVVLLDYVTGFAKESDLVITSTTIDLRVPKGSMTALVKNLYLSCDPYMRNRMRKPDPLSPATAQSFTPGKPISGFGVSKVIDSGHSDYEEGDLIWGAVGWEEYSVITPIPNLHFKIHHTNFPLSYYTGLLGMPGMTAYVGFYEICTPKKGDTVFVSAASGAVGQLVGQFAKLMGCYVVGSAGSKEKVDLLKNKFGFDDAFNYKEEHNLIGALKRCFPEGIDIYFENVGGKMLDAVILNMRPHGRIAACGMISQYNLKNPEGIYGLSLITYKRIRIEGFNCFDYFHKYSEFLEFVVPYIKEGKIKYVEDVADGLESAPAALVGLFHGKNVGKQLVLVSPS

SEQ ID NO: 27944 - protein, 307 aa, Arabidopsis thaliana
  peptide (1)..(307): Ceres Seq. ID no. 12335493
  misc_feature (67)..(304): Pfam Name: Zinc-binding dehydrogenase Pfam Description: Zinc-binding dehydrogenase
  misc_feature (1)..(305): Homolog of NCBI NO: 1362014 NR Description: probable NADPH2:quinone reductase (EC 1.6.5.5) P2
  misc_feature (1)..(305): Homolog of NCBI NO: 15237888 NR Description: quinone oxidoreductase -like protein; protein id:
  misc_feature (1)..(305): Homolog of NCBI NO: 21554121 NR Description: quinone oxidoreductase-like protein [Arabidopsis
  misc_feature (1)..(305): Homolog of NCBI NO: 17529140 NR Description: putative quinone oxidoreductase [Arabidopsis
  misc_feature (1)..(305): Homolog of NCBI NO: 21536967 NR Description: quinone oxidoreductase-like protein [Arabidopsis
  misc_feature (1)..(305): Homolog of NCBI NO: 22326861 NR Description: quinone oxidoreductase - like protein
  misc_feature (1)..(305): Homolog of NCBI NO: 15237890 NR Description: quinone oxidoreductase - like protein
  misc_feature (1)..(305): Homolog of NCBI NO: 15240810 NR Description: quinone oxidoreductase -like protein
  misc_feature (1)..(307): Homolog of NCBI NO: 15237883 NR Description: quinone oxidoreductase -like protein
  misc_feature (1)..(307): Homolog of NCBI NO: 21595408 NR Description: quinone oxidoreductase-like protein [Arabidopsis
MTALVKNLYLSCDPYMRNRMRKPDPLSPATAQSFTPGKPISGFGVSKVIDSGHSDYEEGDLIWGAVGWEEYSVITPIPNLHFKIHHTNFPLSYYTGLLGMPGMTAYVGFYEICTPKKGDTVFVSAASGAVGQLVGQFAKLMGCYVVGSAGSKEKVDLLKNKFGFDDAFNYKEEHNLIGALKRCFPEGIDIYFENVGGKMLDAVILNMRPHGRIAACGMISQYNLKNPEGIYGLSLITYKRIRIEGFNCFDYFHKYSEFLEFVVPYIKEGKIKYVEDVADGLESAPAALVGLFHGKNVGKQLVLVSPS

SEQ ID NO: 27945 - protein, 292 aa, Arabidopsis thaliana
  peptide (1)..(292): Ceres Seq. ID no. 12335494
  misc_feature (52)..(289): Pfam Name: Zinc-binding dehydrogenase Pfam Description: Zinc-binding dehydrogenase
  misc_feature (1)..(290): Homolog of NCBI NO: 1362014 NR Description: probable NADPH2:quinone reductase (EC 1.6.5.5) P2
  misc_feature (1)..(290): Homolog of NCBI NO: 15237888 NR Description: quinone oxidoreductase -like protein; protein id:
  misc_feature (1)..(290): Homolog of NCBI NO: 21554121 NR Description: quinone oxidoreductase-like protein [Arabidopsis
  misc_feature (1)..(290): Homolog of NCBI NO: 17529140 NR Description: putative quinone oxidoreductase [Arabidopsis
  misc_feature (1)..(290): Homolog of NCBI NO: 21536967 NR Description: quinone oxidoreductase-like protein [Arabidopsis
  misc_feature (1)..(290): Homolog of NCBI NO: 22326861 NR Description: quinone oxidoreductase - like protein
  misc_feature (1)..(290): Homolog of NCBI NO: 15237890 NR Description: quinone oxidoreductase - like protein
  misc_feature (1)..(290): Homolog of NCBI NO: 15240810 NR Description: quinone oxidoreductase -like protein
  misc_feature (1)..(292): Homolog of NCBI NO: 15237883 NR Description: quinone oxidoreductase -like protein
  misc_feature (1)..(292): Homolog of NCBI NO: 21595408 NR Description: quinone oxidoreductase-like protein [Arabidopsis
MRNRMRKPDPLSPATAQSFTPGKPISGFGVSKVIDSGHSDYEEGDLIWGAVGWEEYSVITPIPNLHFKIHHTNFPLSYYTGLLGMPGMTAYVGFYEICTPKKGDTVFVSAASGAVGQLVGQFAKLMGCYVVGSAGSKEKVDLLKNKFGFDDAFNYKEEHNLIGALKRCFPEGIDIYFENVGGKMLDAVILNMRPHGRIAACGMISQYNLKNPEGIYGLSLITYKRIRIEGFNCFDYFHKYSEFLEFVVPYIKEGKIKYVEDVADGLESAPAALVGLFHGKNVGKQLVLVSPS

SEQ ID NO: 27946 - DNA, 1342 bp, Arabidopsis thaliana
  misc_feature (1)..(1342): Ceres Seq. ID no. 12562020
  misc_feature: MA Experiment ID: 108461 Result: Up-regulated in Transcription
  misc_feature: MA Experiment 108461 PARAMETER Experiment Name: At_Germinating_Seeds_cDNA_P Parameter: Age (day) Value: 1 vs. 0
  misc_feature: MA Experiment 108461 PARAMETER Experiment Name: At_Germinating_Seeds_cDNA_P Parameter: Tissue Value: Germinating Seeds
  misc_feature: MA Experiment ID: 108462 Result: Up-regulated in Transcription
  misc_feature: MA Experiment 108462 PARAMETER Experiment Name: At_Germinating_Seeds_cDNA_P Parameter: Age (day) Value: 2 vs. 0
  misc_feature: MA Experiment 108462 PARAMETER Experiment Name: At_Germinating_Seeds_cDNA_P Parameter: Tissue Value: Germinating Seeds
  misc_feature: MA Experiment ID: 108463 Result: Up-regulated in Transcription
  misc_feature: MA Experiment 108463 PARAMETER Experiment Name: At_Germinating_Seeds_cDNA_P Parameter: Age (day) Value: 3 vs. 0
  misc_feature: MA Experiment 108463 PARAMETER Experiment Name: At_Germinating_Seeds_cDNA_P Parameter: Tissue Value: Germinating Seeds
  misc_feature: MA Experiment ID: 108464 Result: Up-regulated in Transcription
  misc_feature: MA Experiment 108464 PARAMETER Experiment Name: At_Germinating_Seeds_cDNA_P Parameter: Age (day) Value: 4 vs. 0
  misc_feature: MA Experiment 108464 PARAMETER Experiment Name: At_Germinating_Seeds_cDNA_P Parameter: Tissue Value: Germinating Seeds
  misc_feature: MA Experiment ID: 20000179 Result: Up-regulated in Transcription
  misc_feature: MA Experiment 20000179 PARAMETER Experiment Name: At_Germinating_Seeds_P Parameter: Age (hr) Value: 6 vs. 0
  misc_feature: MA Experiment 20000179 PARAMETER Experiment Name: At_Germinating_Seeds_P Parameter: Tissue Value: Germinating Seeds
  misc_feature: MA Experiment ID: 20000180 Result: Up-regulated in Transcription
  misc_feature: MA Experiment 20000180 PARAMETER Experiment Name: At_Germinating_Seeds_P Parameter: Age (hr) Value: 24 vs. 0
  misc_feature: MA Experiment 20000180 PARAMETER Experiment Name: At_Germinating_Seeds_P Parameter: Tissue Value: Germinating Seeds
  misc_feature: MA Experiment ID: 20000227 Result: Up-regulated in Transcription
  misc_feature: MA Experiment 20000227 PARAMETER Experiment Name: At_Root-Tips-vs-Tops_P Parameter: Tissue Value: Root Tips vs. Root Tops
  misc_feature: MA Experiment ID: 20000264 Result: Down-regulated in Transcription
  misc_feature: MA Experiment 20000264 PARAMETER Experiment Name: At_Open_Flower_P Parameter: Age (day) Value: 21
  misc_feature: MA Experiment 20000264 PARAMETER Experiment Name: At_Open_Flower_P Parameter: Plant Line Value: WS
  misc_feature: MA Experiment 20000264 PARAMETER Experiment Name: At_Open_Flower_P Parameter: Tissue Value: Open Flower vs. Whole Plant
  misc_feature: MA Experiment ID: 20000265 Result: Down-regulated in Transcription
  misc_feature: MA Experiment 20000265 PARAMETER Experiment Name: At_Open_Flower_P Parameter: Age (day) Value: 21
  misc_feature: MA Experiment 20000265 PARAMETER Experiment Name: At_Open_Flower_P Parameter: Plant Line Value: WS
  misc_feature: MA Experiment 20000265 PARAMETER Experiment Name: At_Open_Flower_P Parameter: Tissue Value: Closed Flower vs. Whole Plant
  misc_feature: MA Experiment ID: 20000286 Result: Down-regulated in Transcription
  misc_feature: MA Experiment 20000286 PARAMETER Experiment Name: At_Open_Flower_P Parameter: Age (day) Value: 21
  misc_feature: MA Experiment 20000286 PARAMETER Experiment Name: At_Open_Flower_P Parameter: Plant Line Value: WS
  misc_feature: MA Experiment 20000286 PARAMETER Experiment Name: At_Open_Flower_P Parameter: Tissue Value: Half Open vs. Whole Plant
  misc_feature: MA Experiment ID: 20000438 Result: Down-regulated in Transcription
  misc_feature: MA Experiment 20000438 PARAMETER Experiment Name: At_Shoots__P Parameter: Age (day) Value: 14
  misc_feature: MA Experiment 20000438 PARAMETER Experiment Name: At_Shoots__P Parameter: Tissue Value: Shoots vs. Whole Plant
  misc_feature: MA Experiment ID: 20000794 Result: Down-regulated in Transcription
  misc_feature: MA Experiment 20000794 PARAMETER Experiment Name: At_Petals_P Parameter: Age (day) Value: 23-25 days
  misc_feature: MA Experiment 20000794 PARAMETER Experiment Name: At_Petals_P Parameter: Plant Line Value: WS
  misc_feature: MA Experiment 20000794 PARAMETER Experiment Name: At_Petals_P Parameter: Tissue Value: Petals vs. Whole plant
  misc_feature: MA Experiment ID: 20001556 Result: Down-regulated in Transcription
  misc_feature: MA Experiment 20001556 PARAMETER Experiment Name: At_Drought_Soil_Dry_P Parameter: Age (day) Value: 26
  misc_feature: MA Experiment 20001556 PARAMETER Experiment Name: At_Drought_Soil_Dry_P Parameter: Organism Value: A. thaliana
  misc_feature: MA Experiment 20001556 PARAMETER Experiment Name: At_Drought_Soil_Dry_P Parameter: Plant Line Value: WS
  misc_feature: MA Experiment 20001556 PARAMETER Experiment Name: At_Drought_Soil_Dry_P Parameter: Post Timepoint (hr) Value: None
  misc_feature: MA Experiment 20001556 PARAMETER Experiment Name: At_Drought_Soil_Dry_P Parameter: Post-Treatment Value: None
  misc_feature: MA Experiment 20001556 PARAMETER Experiment Name: At_Drought_Soil_Dry_P Parameter: Timepoint (day) Value: 12
  misc_feature: MA Experiment 20001556 PARAMETER Experiment Name: At_Drought_Soil_Dry_P Parameter: Treatment Value: Drought vs. No Drought
  misc_feature: MA Experiment ID: 20001757 Result: Down-regulated in Transcription
  misc_feature: MA Experiment 20001757 PARAMETER Experiment Name: At_50mM_NH4NO3_L-to-H_P Parameter: Timepoint (hr) Value: 6
  misc_feature: MA Experiment 20001757 PARAMETER Experiment Name: At_50mM_NH4NO3_L-to-H_P Parameter: Tissue Value: Leaf
  misc_feature: MA Experiment 20001757 PARAMETER Experiment Name: At_50mM_NH4NO3_L-to-H_P Parameter: Treatment Value: 50mM NH4NO3 vs 100mM Mannitol
  misc_feature: MA Experiment ID: 20001773 Result: Up-regulated in Transcription
  misc_feature: MA Experiment 20001773 PARAMETER Experiment Name: At_Far-red-enriched-adult_P Parameter: Age (day) Value: 30
  misc_feature: MA Experiment 20001773 PARAMETER Experiment Name: At_Far-red-enriched-adult_P Parameter: Light Value: Far-red enriched vs. White
  misc_feature: MA Experiment 20001773 PARAMETER Experiment Name: At_Far-red-enriched-adult_P Parameter: Organism Value: A. thaliana
  misc_feature: MA Experiment 20001773 PARAMETER Experiment Name: At_Far-red-enriched-adult_P Parameter: Plant Line Value: Columbia
  misc_feature: MA Experiment 20001773 PARAMETER Experiment Name: At_Far-red-enriched-adult_P Parameter: Timepoint (hr) Value: 48
  misc_feature: MA Experiment 20001773 PARAMETER Experiment Name: At_Far-red-enriched-adult_P Parameter: Tissue Value: Aerial
  misc_feature: MA Experiment ID: 20001904 Result: Up-regulated in Transcription
  misc_feature: MA Experiment 20001904 PARAMETER Experiment Name: At_Drought_Reproduction_P Parameter: Age (day) Value: 37
  misc_feature: MA Experiment 20001904 PARAMETER Experiment Name: At_Drought_Reproduction_P Parameter: Organism Value: A. thaliana
  misc_feature: MA Experiment 20001904 PARAMETER Experiment Name: At_Drought_Reproduction_P Parameter: Plant Line Value: WS
  misc_feature: MA Experiment 20001904 PARAMETER Experiment Name: At_Drought_Reproduction_P Parameter: Timepoint (day) Value: 7
  misc_feature: MA Experiment 20001904 PARAMETER Experiment Name: At_Drought_Reproduction_P Parameter: Tissue Value: Rosettes
  misc_feature: MA Experiment 20001904 PARAMETER Experiment Name: At_Drought_Reproduction_P Parameter: Treatment Value: Drought vs. No Drought
  misc_feature: MA Experiment ID: 20001905 Result: Up-regulated in Transcription
  misc_feature: MA Experiment 20001905 PARAMETER Experiment Name: At_Drought_Reproduction_P Parameter: Age (day) Value: 40
  misc_feature: MA Experiment 20001905 PARAMETER Experiment Name: At_Drought_Reproduction_P Parameter: Organism Value: A. thaliana
  misc_feature: MA Experiment 20001905 PARAMETER Experiment Name: At_Drought_Reproduction_P Parameter: Plant Line Value: WS
  misc_feature: MA Experiment 20001905 PARAMETER Experiment Name: At_Drought_Reproduction_P Parameter: Timepoint (day) Value: 10
  misc_feature: MA Experiment 20001905 PARAMETER Experiment Name: At_Drought_Reproduction_P Parameter: Tissue Value: Rosettes
  misc_feature: MA Experiment 20001905 PARAMETER Experiment Name: At_Drought_Reproduction_P Parameter: Treatment Value: Drought vs. No Drought
atgacatttaatgcgtactcaggattgagatctctctctcaagcaatggcagctacaagtgagaaacagaacaccacaaagcctcctccttctccttctcctctccgcaattccaagttttgtcagcccaatatgaggatcttgatctctggaggagctggcttcattggttctcacttggttgataagcttatggaaaatgagaagaatgaggtggttgttgctgataactatttcactggctcaaaagaaaacctcaagaagtggatcggtcaccccaggtttgaacttattcgtcacgatgttaccgagcctttgttgatcgaggttgatcggatttaccatcttgcttgtcctgcctctcctatcttctacaaatacaaccctgttaagacaatcaagaccaatgtgattggtacactcaacatgctcggtcttgccaagcgtgttggagcaagaattttactaacctcaacctctgaagtgtatggagatcctctcatccaccctcaaccagagagctactggggaaatgtcaaccctattggggttcggagttgctatgacgaaggcaagcgggtagccgaaaccttgatgtttgactaccacagacaacatggcattgaaatccgcattgctagaatcttcaacacatatggtcctcgaatgaacatcgatgatgggcgtgttgtgagcaacttcattgctcaagcactccggggtgaggcattgacagttcagaaaccggggacacagacccgcagtttctgttatgtctccgacatggtggatggacttatccgtcttatggaaggcaatgatactggccctatcaacatcggtaacccaggtgagttcacaatggtggaactggctgagacggttaaggagcttattaacccaagcatagagataaagatggtggagaacacaccagatgatccaagacagaggaaaccagacattagtaaagccaaagaagtgttgggttgggagccaaaggtgaagctcagagaaggacttcctctcatggaagaagatttccgactaaggcttaacgtcccaagaaactaaaaccacaagaaaacacagacggttttgagttcacgagagttgtcagctgttgagttatatgatgatgctattatactacaaagtggtgggtttttgtttggtctcatgtgttattcatattgcttttgttcgtagaaaaataagttgggaatgggtctccttgtgaggaatggctcttctttgtttttcagtatattgtggtatggttattatttgtgtggttttaatgaaatttgttcacttaatttgctcatggaattacagtttt

SEQ ID NO: 27947 - protein, 357 aa, Arabidopsis thaliana
  peptide (1)..(357): Ceres Seq. ID no. 12562021
  misc_feature (47)..(353): Pfam Name: NAD dependent epimerase/dehydratase family Pfam Description: NAD dependent epimerase/dehydratase family
  misc_feature (45)..(352): Homolog of NCBI NO: 15227109 NR Description: putative dTDP-glucose 4-6-dehydratase; protein
  misc_feature (94)..(357): Homolog of NCBI NO: 2351580 NR Description: thymidine diphospho-glucose 4-6-dehydratase
  misc_feature (12)..(356): Homolog of NCBI NO: 11121508 NR Description: d-TDP-glucose dehydratase [Phragmites australis]
  misc_feature (19)..(356): Homolog of NCBI NO: 18447934 NR Description: UDP-glucuronic acid decarboxylase
  misc_feature (16)..(356): Homolog of NCBI NO: 11270075 NR Description: dTDPglucose 4,6-dehydratase (EC 4.2.1.46)
  misc_feature (16)..(357): Homolog of NCBI NO: 13591616 NR Description: UDP-D-glucuronate carboxy-lyase [Pisum sativum]
  misc_feature (16)..(356): Homolog of NCBI NO: 15226950 NR Description: putative nucleotide-sugar dehydratase
  misc_feature (18)..(357): Homolog of NCBI NO: 15231432 NR Description: dTDP-glucose 4-6-dehydratases-like protein
  misc_feature (16)..(357): Homolog of NCBI NO: 14030703 NR Description: AT5g59290/mnc17_180 [Arabidopsis thaliana]
  misc_feature (16)..(357): Homolog of NCBI NO: 15237853 NR Description: dTDP-glucose 4-6-dehydratase - like protein
MTFNAYSGLRSLSQAMAATSEKQNTTKPPPSPSPLRNSKFCQPNMRILISGGAGFIGSHLVDKLMENEKNEVVVADNYFTGSKENLKKWIGHPRFELIRHDVTEPLLIEVDRIYHLACPASPIFYKYNPVKTIKTNVIGTLNMLGLAKRVGARILLTSTSEVYGDPLIHPQPESYWGNVNPIGVRSCYDEGKRVAETLMFDYHRQHGIEIRIARIFNTYGPRMNIDDGRVVSNFIAQALRGEALTVQKPGTQTRSFCYVSDMVDGLIRLMEGNDTGPINIGNPGEFTMVELAETVKELINPSIEIKMVENTPDDPRQRKPDISKAKEVLGWEPKVKLREGLPLMEEDFRLRLNVPRN

SEQ ID NO: 27948 - protein, 342 aa, Arabidopsis thaliana
  peptide (1)..(342): Ceres Seq. ID no. 12562022
  misc_feature (32)..(338): Pfam Name: NAD dependent epimerase/dehydratase family Pfam Description: NAD dependent epimerase/dehydratase family
  misc_feature (30)..(337): Homolog of NCBI NO: 15227109 NR Description: putative dTDP-glucose 4-6-dehydratase; protein
  misc_feature (79)..(342): Homolog of NCBI NO: 2351580 NR Description: thymidine diphospho-glucose 4-6-dehydratase
  misc_feature (1)..(341): Homolog of NCBI NO: 11121508 NR Description: d-TDP-glucose dehydratase [Phragmites australis]
  misc_feature (4)..(341): Homolog of NCBI NO: 18447934 NR Description: UDP-glucuronic acid decarboxylase
  misc_feature (1)..(341): Homolog of NCBI NO: 11270075 NR Description: dTDPglucose 4,6-dehydratase (EC 4.2.1.46)
  misc_feature (1)..(342): Homolog of NCBI NO: 13591616 NR Description: UDP-D-glucuronate carboxy-lyase [Pisum sativum]
  misc_feature (1)..(341): Homolog of NCBI NO: 15226950 NR Description: putative nucleotide-sugar dehydratase
  misc_feature (3)..(342): Homolog of NCBI NO: 15231432 NR Description: dTDP-glucose 4-6-dehydratases-like protein
  misc_feature (1)..(342): Homolog of NCBI NO: 14030703 NR Description: AT5g59290/mnc17_180 [Arabidopsis thaliana]
  misc_feature (1)..(342): Homolog of NCBI NO: 15237853 NR Description: dTDP-glucose 4-6-dehydratase - like protein
MAATSEKQNTTKPPPSPSPLRNSKFCQPNMRILISGGAGFIGSHLVDKLMENEKNEVVVADNYFTGSKENLKKWIGHPRFELIRHDVTEPLLIEVDRIYHLACPASPIFYKYNPVKTIKTNVIGTLNMLGLAKRVGARILLTSTSEVYGDPLIHPQPESYWGNVNPIGVRSCYDEGKRVAETLMFDYHRQHGIEIRIARIFNTYGPRMNIDDGRVVSNFIAQALRGEALTVQKPGTQTRSFCYVSDMVDGLIRLMEGNDTGPINIGNPGEFTMVELAETVKELINPSIEIKMVENTPDDPRQRKPDISKAKEVLGWEPKVKLREGLPLMEEDFRLRLNVPRN

SEQ ID NO: 27949 - protein, 313 aa, Arabidopsis thaliana
  peptide (1)..(313): Ceres Seq. ID no. 12562023
  misc_feature (3)..(309): Pfam Name: NAD dependent epimerase/dehydratase family Pfam Description: NAD dependent epimerase/dehydratase family
  misc_feature (1)..(308): Homolog of NCBI NO: 15227109 NR Description: putative dTDP-glucose 4-6-dehydratase; protein
  misc_feature (50)..(313): Homolog of NCBI NO: 2351580 NR Description: thymidine diphospho-glucose 4-6-dehydratase
  misc_feature (1)..(312): Homolog of NCBI NO: 11121508 NR Description: d-TDP-glucose dehydratase [Phragmites australis]
  misc_feature (1)..(312): Homolog of NCBI NO: 18447934 NR Description: UDP-glucuronic acid decarboxylase
  misc_feature (1)..(312): Homolog of NCBI NO: 11270075 NR Description: dTDPglucose 4,6-dehydratase (EC 4.2.1.46)
  misc_feature (1)..(313): Homolog of NCBI NO: 13591616 NR Description: UDP-D-glucuronate carboxy-lyase [Pisum sativum]
  misc_feature (1)..(312): Homolog of NCBI NO: 15226950 NR Description: putative nucleotide-sugar dehydratase
  misc_feature (1)..(313): Homolog of NCBI NO: 15231432 NR Description: dTDP-glucose 4-6-dehydratases-like protein
  misc_feature (1)..(313): Homolog of NCBI NO: 14030703 NR Description: AT5g59290/mnc17_180 [Arabidopsis thaliana]
  misc_feature (1)..(313): Homolog of NCBI NO: 15237853 NR Description: dTDP-glucose 4-6-dehydratase - like protein
MRILISGGAGFIGSHLVDKLMENEKNEVVVADNYFTGSKENLKKWIGHPRFELIRHDVTEPLLIEVDRIYHLACPASPIFYKYNPVKTIKTNVIGTLNMLGLAKRVGARILLTSTSEVYGDPLIHPQPESYWGNVNPIGVRSCYDEGKRVAETLMFDYHRQHGIEIRIARIFNTYGPRMNIDDGRVVSNFIAQALRGEALTVQKPGTQTRSFCYVSDMVDGLIRLMEGNDTGPINIGNPGEFTMVELAETVKELINPSIEIKMVENTPDDPRQRKPDISKAKEVLGWEPKVKLREGLPLMEEDFRLRLNVPRN

SEQ ID NO: 27950 - DNA, 1148 bp, Arabidopsis thaliana
  misc_feature (1)..(1148): Ceres Seq. ID no. 12334358
  misc_feature: MA Experiment ID: 20000171 Result: Up-regulated in Transcription
  misc_feature: MA Experiment 20000171 PARAMETER Experiment Name: At_42deg_Heat_P Parameter: Age (day) Value: 14
  misc_feature: MA Experiment 20000171 PARAMETER Experiment Name: At_42deg_Heat_P Parameter: Organism Value: A. thaliana
  misc_feature: MA Experiment 20000171 PARAMETER Experiment Name: At_42deg_Heat_P Parameter: Plant Line Value: WS
  misc_feature: MA Experiment 20000171 PARAMETER Experiment Name: At_42deg_Heat_P Parameter: Temperature (deg C) Value: 42 vs. 22
  misc_feature: MA Experiment 20000171 PARAMETER Experiment Name: At_42deg_Heat_P Parameter: Timepoint (hr) Value: 1
  misc_feature: MA Experiment 20000171 PARAMETER Experiment Name: At_42deg_Heat_P Parameter: Tissue Value: Aerial
  misc_feature: MA Experiment ID: 20000173 Result: Up-regulated in Transcription
  misc_feature: MA Experiment 20000173 PARAMETER Experiment Name: At_42deg_Heat_P Parameter: Age (day) Value: 14
  misc_feature: MA Experiment 20000173 PARAMETER Experiment Name: At_42deg_Heat_P Parameter: Organism Value: A. thaliana
  misc_feature: MA Experiment 20000173 PARAMETER Experiment Name: At_42deg_Heat_P Parameter: Plant Line Value: WS
  misc_feature: MA Experiment 20000173 PARAMETER Experiment Name: At_42deg_Heat_P Parameter: Temperature (deg C) Value: 42 vs. 22
  misc_feature: MA Experiment 20000173 PARAMETER Experiment Name: At_42deg_Heat_P Parameter: Timepoint (hr) Value: 6
  misc_feature: MA Experiment 20000173 PARAMETER Experiment Name: At_42deg_Heat_P Parameter: Tissue Value: Aerial
aagcttttcgaggtatctcctccgcgcgacgatgtcagagactcgccggaatctgtctagcgatgaacaaatcgaaaaatcagagattcaacaccaaagagttgtaattgagaacagtcatggtgagaaactcgtaggagttttgcatgatactggttctacagagactgttgtcatatgccatggatttcgttcatcaaagaatcggattccaatgctgaccattgcaagtttctttgaaagagcaatgatcagttctttccggtttgactttgctggcaacggggaaagccaaggatcatttcagtatggtaactatcgccgtgaacttgaagatttgcgctctgttttgcaacacttgcgtggtgttaaccgtgtgatttctgcgattatcggacatagtaaaggtggaaatgtggtgcttttgtatgcagcaaagtacaatgatgtgcagactgttgtgaatatctcagggcggttttttcttgacagaggaatcgaatttcggcttggtaaggactacttcaagagaatcaaagataatggattcattgatgttggcaacagaaagggaaagtttgaatatcgggtaacagaagagagtctaatggaccgtctcacaaccaatgctcatgaagcatgtctctcaattcgtgaaaactgcagagtcttgacagtccatgggtcaaatgataggattgtgcatgtaacagaagcgtccgaatttgctaaacagataaagaatcataagctgtatgttattgaaggagctgatcatgagttcacttctcaccagcatcagcttgcttcaatcgttctctcattctttaaattggatcctaagaaagatgatgattcaggtgatatcagtacaagtaaccaagactccatgagatcagttgttcctattacatcgcgaatttaaatcgctttgctgagttacttaatgtctcacggtctcgggggtgataataaacggtttgataaacacagttagaaaccaaaatgttcttatggataaaatcttgttggtagtatacagtctatttaaatatctcaacacaaaatcgatcataaaagtttcacttggtttcttaggctttgtttaggatcagttttcgaatctggctgtcctaaactattggctg

SEQ ID NO: 27951 - protein, 307 aa, Arabidopsis thaliana
  peptide (1)..(307): Ceres Seq. ID no. 12334359
  misc_feature (9)..(286): Homolog of NCBI NO: 34913064 NR Description: P0013G02.24 [Oryza sativa (japonica
  misc_feature (32)..(277): Homolog of NCBI NO: 21554728 NR Description: putative esterase [Arabidopsis thaliana]
  misc_feature (32)..(285): Homolog of NCBI NO: 22135864 NR Description: putative protein [Arabidopsis thaliana]
  misc_feature (27)..(277): Homolog of NCBI NO: 15220578 NR Description: hypothetical protein; protein id: At1g29840.1
  misc_feature (32)..(285): Homolog of NCBI NO: 15232826 NR Description: putative protein
  misc_feature (17)..(277): Homolog of NCBI NO: 15228202 NR Description: putative protein; protein id: At3g47590.1
  misc_feature (11)..(27): Homolog of NCBI NO: 11358640 NR Description: probable esterase-like protein - Arabidopsis
  misc_feature (27)..(292): Homolog of NCBI NO: 11358640 NR Description: probable esterase-like protein - Arabidopsis
  misc_feature (11)..(307): Homolog of NCBI NO: 18416707 NR Description: putative esterase - like protein
  misc_feature (11)..(307): Homolog of NCBI NO: 21595418 NR Description: putative esterase-like protein [Arabidopsis
SFSRYLLRATMSETRRNLSSDEQIEKSEIQHQRVVIENSHGEKLVGVLHDTGSTETVVICHGFRSSKNRIPMLTIASFFERAMISSFRFDFAGNGESQGSFQYGNYRRELEDLRSVLQHLRGVNRVISAIIGHSKGGNVVLLYAAKYNDVQTVVNISGRFFLDRGIEFRLGKDYFKRIKDNGFIDVGNRKGKFEYRVTEESLMDRLTTNAHEACLSIRENCRVLTVHGSNDRIVHVTEASEFAKQIKNHKLYVIEGADHEFTSHQHQLASIVLSFFKLDPKKDDDSGDISTSNQDSMRSVVPITSRI

SEQ ID NO: 27952 - protein, 297 aa, Arabidopsis thaliana
  peptide (1)..(297): Ceres Seq. ID no. 12334360
  misc_feature (1)..(276): Homolog of NCBI NO: 34913064 NR Description: P0013G02.24 [Oryza sativa (japonica
  misc_feature (22)..(267): Homolog of NCBI NO: 21554728 NR Description: putative esterase [Arabidopsis thaliana]
  misc_feature (22)..(275): Homolog of NCBI NO: 22135864 NR Description: putative protein [Arabidopsis thaliana]
  misc_feature (17)..(267): Homolog of NCBI NO: 15220578 NR Description: hypothetical protein; protein id: At1g29840.1
  misc_feature (22)..(275): Homolog of NCBI NO: 15232826 NR Description: putative protein
  misc_feature (7)..(267): Homolog of NCBI NO: 15228202 NR Description: putative protein; protein id: At3g47590.1
  misc_feature (1)..(17): Homolog of NCBI NO: 11358640 NR Description: probable esterase-like protein - Arabidopsis
  misc_feature (17)..(282): Homolog of NCBI NO: 11358640 NR Description: probable esterase-like protein - Arabidopsis
  misc_feature (1)..(297): Homolog of NCBI NO: 18416707 NR Description: putative esterase - like protein
  misc_feature (1)..(297): Homolog of NCBI NO: 21595418 NR Description: putative esterase-like protein [Arabidopsis
MSETRRNLSSDEQIEKSEIQHQRVVIENSHGEKLVGVLHDTGSTETVVICHGFRSSKNRIPMLTIASFFERAMISSFRFDFAGNGESQGSFQYGNYRRELEDLRSVLQHLRGVNRVISAIIGHSKGGNVVLLYAAKYNDVQTVVNISGRFFLDRGIEFRLGKDYFKRIKDNGFIDVGNRKGKFEYRVTEESLMDRLTTNAHEACLSIRENCRVLTVHGSNDRIVHVTEASEFAKQIKNHKLYVIEGADHEFTSHQHQLASIVLSFFKLDPKKDDDSGDISTSNQDSMRSVVPITSRI

SEQ ID NO: 27953 - protein, 236 aa, Arabidopsis thaliana
  peptide (1)..(236): Ceres Seq. ID no. 12334361
  misc_feature (1)..(206): Homolog of NCBI NO: 15224799 NR Description: putative esterase; protein id: At2g19550.1
  misc_feature (1)..(215): Homolog of NCBI NO: 34913064 NR Description: P0013G02.24 [Oryza sativa (japonica
  misc_feature (1)..(206): Homolog of NCBI NO: 21554728 NR Description: putative esterase [Arabidopsis thaliana]
  misc_feature (1)..(214): Homolog of NCBI NO: 22135864 NR Description: putative protein [Arabidopsis thaliana]
  misc_feature (1)..(206): Homolog of NCBI NO: 15220578 NR Description: hypothetical protein; protein id: At1g29840.1
  misc_feature (1)..(214): Homolog of NCBI NO: 15232826 NR Description: putative protein
  misc_feature (1)..(206): Homolog of NCBI NO: 15228202 NR Description: putative protein; protein id: At3g47590.1
  misc_feature (1)..(221): Homolog of NCBI NO: 11358640 NR Description: probable esterase-like protein - Arabidopsis
  misc_feature (1)..(236): Homolog of NCBI NO: 18416707 NR Description: putative esterase - like protein
  misc_feature (1)..(236): Homolog of NCBI NO: 21595418 NR Description: putative esterase-like protein [Arabidopsis
MLTIASFFERAMISSFRFDFAGNGESQGSFQYGNYRRELEDLRSVLQHLRGVNRVISAIIGHSKGGNVVLLYAAKYNDVQTVVNISGRFFLDRGIEFRLGKDYFKRIKDNGFIDVGNRKGKFEYRVTEESLMDRLTTNAHEACLSIRENCRVLTVHGSNDRIVHVTEASEFAKQIKNHKLYVIEGADHEFTSHQHQLASIVLSFFKLDPKKDDDSGDISTSNQDSMRSVVPITSRI

SEQ ID NO: 27954 - DNA, 1458 bp, Arabidopsis thaliana
  misc_feature (1)..(1458): Ceres Seq. ID no. 12325068
  misc_feature: MA Experiment ID: 108434 Result: Down-regulated in Transcription
  misc_feature: MA Experiment 108434 PARAMETER Experiment Name: At_Root_Tips_cDNA_P Parameter: Tissue Value: Root Tips
  misc_feature: MA Experiment ID: 108577 Result: Down-regulated in Transcription
  misc_feature: MA Experiment 108577 PARAMETER Experiment Name: At_42deg_Heat_cDNA_P Parameter: Temperature (deg C) Value: 42 vs. 22
  misc_feature: MA Experiment 108577 PARAMETER Experiment Name: At_42deg_Heat_cDNA_P Parameter: Timepoint (hr) Value: 6
  misc_feature: MA Experiment 108577 PARAMETER Experiment Name: At_42deg_Heat_cDNA_P Parameter: Tissue Value: Aerial
  misc_feature: MA Experiment ID: 20000069 Result: Up-regulated in Transcription
  misc_feature: MA Experiment 20000069 PARAMETER Experiment Name: At_100uM_ABA_Mutants_cDNA_P Parameter: Plant Line Value: CS23
  misc_feature: MA Experiment 20000069 PARAMETER Experiment Name: At_100uM_ABA_Mutants_cDNA_P Parameter: Timepoint (hr) Value: 6
  misc_feature: MA Experiment 20000069 PARAMETER Experiment Name: At_100uM_ABA_Mutants_cDNA_P Parameter: Tissue Value: Aerial
  misc_feature: MA Experiment 20000069 PARAMETER Experiment Name: At_100uM_ABA_Mutants_cDNA_P Parameter: Treatment Value: 100uM ABA vs. No Treatment
  misc_feature: MA Experiment ID: 20000070 Result: Up-regulated in Transcription
  misc_feature: MA Experiment 20000070 PARAMETER Experiment Name: At_100uM_ABA_Mutants_cDNA_P Parameter: Plant Line Value: CS24
  misc_feature: MA Experiment 20000070 PARAMETER Experiment Name: At_100uM_ABA_Mutants_cDNA_P Parameter: Timepoint (hr) Value: 6
  misc_feature: MA Experiment 20000070 PARAMETER Experiment Name: At_100uM_ABA_Mutants_cDNA_P Parameter: Tissue Value: Aerial
  misc_feature: MA Experiment 20000070 PARAMETER Experiment Name: At_100uM_ABA_Mutants_cDNA_P Parameter: Treatment Value: 100uM ABA vs. No Treatment
  misc_feature: MA Experiment ID: 20000071 Result: Up-regulated in Transcription
  misc_feature: MA Experiment 20000071 PARAMETER Experiment Name: At_100uM_ABA_Mutants_cDNA_P Parameter: Plant Line Value: CS8104
  misc_feature: MA Experiment 20000071 PARAMETER Experiment Name: At_100uM_ABA_Mutants_cDNA_P Parameter: Timepoint (hr) Value: 6
  misc_feature: MA Experiment 20000071 PARAMETER Experiment Name: At_100uM_ABA_Mutants_cDNA_P Parameter: Tissue Value: Aerial
  misc_feature: MA Experiment 20000071 PARAMETER Experiment Name: At_100uM_ABA_Mutants_cDNA_P Parameter: Treatment Value: 100uM ABA vs. No Treatment
  misc_feature: MA Experiment ID: 20000072 Result: Up-regulated in Transcription
  misc_feature: MA Experiment 20000072 PARAMETER Experiment Name: At_100uM_ABA_Mutants_cDNA_P Parameter: Plant Line Value: CS8105
  misc_feature: MA Experiment 20000072 PARAMETER Experiment Name: At_100uM_ABA_Mutants_cDNA_P Parameter: Timepoint (hr) Value: 6
  misc_feature: MA Experiment 20000072 PARAMETER Experiment Name: At_100uM_ABA_Mutants_cDNA_P Parameter: Tissue Value: Aerial
  misc_feature: MA Experiment 20000072 PARAMETER Experiment Name: At_100uM_ABA_Mutants_cDNA_P Parameter: Treatment Value: 100uM ABA vs. No Treatment
  misc_feature: MA Experiment ID: 20000086 Result: Up-regulated in Transcription
  misc_feature: MA Experiment 20000086 PARAMETER Experiment Name: At_100uM_ABA_Mutants_cDNA_P Parameter: Plant Line Value: CS22
  misc_feature: MA Experiment 20000086 PARAMETER Experiment Name: At_100uM_ABA_Mutants_cDNA_P Parameter: Timepoint (hr) Value: 6
  misc_feature: MA Experiment 20000086 PARAMETER Experiment Name: At_100uM_ABA_Mutants_cDNA_P Parameter: Tissue Value: Aerial
  misc_feature: MA Experiment 20000086 PARAMETER Experiment Name: At_100uM_ABA_Mutants_cDNA_P Parameter: Treatment Value: 100uM ABA vs. No Treatment
  misc_feature: MA Experiment ID: 20000087 Result: Up-regulated in Transcription
  misc_feature: MA Experiment 20000087 PARAMETER Experiment Name: At_100uM_ABA_Mutants_cDNA_P Parameter: Plant Line Value: WS
  misc_feature: MA Experiment 20000087 PARAMETER Experiment Name: At_100uM_ABA_Mutants_cDNA_P Parameter: Timepoint (hr) Value: 6
  misc_feature: MA Experiment 20000087 PARAMETER Experiment Name: At_100uM_ABA_Mutants_cDNA_P Parameter: Tissue Value: Aerial
  misc_feature: MA Experiment 20000087 PARAMETER Experiment Name: At_100uM_ABA_Mutants_cDNA_P Parameter: Treatment Value: 100uM ABA vs. No Treatment
  misc_feature: MA Experiment ID: 20000088 Result: Up-regulated in Transcription
  misc_feature: MA Experiment 20000088 PARAMETER Experiment Name: At_100uM_ABA_Mutants_cDNA_P Parameter: Plant Line Value: Landsberg
  misc_feature: MA Experiment 20000088 PARAMETER Experiment Name: At_100uM_ABA_Mutants_cDNA_P Parameter: Timepoint (hr) Value: 6
  misc_feature: MA Experiment 20000088 PARAMETER Experiment Name: At_100uM_ABA_Mutants_cDNA_P Parameter: Tissue Value: Aerial
  misc_feature: MA Experiment 20000088 PARAMETER Experiment Name: At_100uM_ABA_Mutants_cDNA_P Parameter: Treatment Value: 100uM ABA vs. No Treatment
  misc_feature: MA Experiment ID: 20000090 Result: Up-regulated in Transcription
  misc_feature: MA Experiment ID: 20000111 Result: Down-regulated in Transcription
  misc_feature: MA Experiment 20000111 PARAMETER Experiment Name: At_42deg_Heat_cDNA_P Parameter: Temperature (deg C) Value: 42 vs. 22
  misc_feature: MA Experiment 20000111 PARAMETER Experiment Name: At_42deg_Heat_cDNA_P Parameter: Timepoint (hr) Value: 6
  misc_feature: MA Experiment 20000111 PARAMETER Experiment Name: At_42deg_Heat_cDNA_P Parameter: Tissue Value: Aerial
  misc_feature: MA Experiment ID: 20000113 Result: Down-regulated in Transcription
  misc_feature: MA Experiment 20000113 PARAMETER Experiment Name: At_42deg_Heat_cDNA_P Parameter: Temperature (deg C) Value: 42 vs. 22
  misc_feature: MA Experiment 20000113 PARAMETER Experiment Name: At_42deg_Heat_cDNA_P Parameter: Timepoint (hr) Value: 8
  misc_feature: MA Experiment 20000113 PARAMETER Experiment Name: At_42deg_Heat_cDNA_P Parameter: Tissue Value: Aerial
  misc_feature: MA Experiment ID: 20000117 Result: Up-regulated in Transcription
  misc_feature: MA Experiment 20000117 PARAMETER Experiment Name: At_100uM_ABA_Mutants_cDNA_P Parameter: Plant Line Value: Columbia
  misc_feature: MA Experiment 20000117 PARAMETER Experiment Name: At_100uM_ABA_Mutants_cDNA_P Parameter: Timepoint (hr) Value: 6
  misc_feature: MA Experiment 20000117 PARAMETER Experiment Name: At_100uM_ABA_Mutants_cDNA_P Parameter: Tissue Value: Aerial
  misc_feature: MA Experiment 20000117 PARAMETER Experiment Name: At_100uM_ABA_Mutants_cDNA_P Parameter: Treatment Value: 100uM ABA vs. No Treatment
ctctttcttctttgaacctctccaccacgatgaagcacaaagtctccaaacgagtaatatctctgaaatgggttccatttctctgcatctctttcttcgctctcggagcaatcttcacctccaggtcatgggagccgtcgtcagattccggaagtcagctaatttcacagcatcatcgtgatcatgaacttcagattgtatctgacgattgtgctcataataaaaaagctacacaagaaaaagatgtaactggcgaagttttgagaactcatgaagctatacagtcgttggataagtcagtttctacactttcttctacaaggagctctcaagagatggttgatggctcggaaacaaacccgaggaagaaagtgtttatggtaatgggaatcaataccgcatttagcagtagaaaacggcgtgattcagttagagaaacatggatgcctcaaggtgagaagcttgaaagactggaacaggagaaggggattgtgatcaagttcatgattggacacagtgcgacgtcaaatagtatattggatagagctattgattcagaagatgctcaacacaaagacttccttaggctggagcatgttgaaggatatcacgaactctcagcaaaaaccaagatattcttttccactgcagtagccaaatgggatgcagagttctatatcaaggtagatgatgatgttcacgtcaatctcggtatgcttgcttccacacttgcccgtcaccgctcaaagccgagggtttatattggttgtatgaaatcagggcctgttcttgctcagaagacagtaaagtaccatgaacctgagtattggaaatttggagaggattgtaacaaatactttcgacatgctacaggacagatctatgccatctccaaggatcttgctaattacatatccatcaaccagccaattttgcataagtatgccaatgaagatgtgtctttagggtcatggtttatcggtcttgaggttgaacatattgatgaccgcaacttctgttgtgggactcctccagattgtagatggaaggcagaggcgggcgatgtttgtgtggcctcattcgaatggagctgtagtgggatttgcaagtccgtagagagaatgaagatagtgcatgaagtttgtagtgaaggagaaggagctgtttggaatacgcttctgtaaaagatcatttcagttcccaatcagccaagtggttccaatactaaacataactttgatagactgctacaagaaagggaaagagagagcaagagaggagaaggcaaattttgtaaagaagaaccaaaggtatacaaatcacatacttgagaatatatttgcttagttgttgttgtgtgattggctttgttgtttcttctacttgagttagatcatgttagtataatcttggacaaaagggcaaatgagctaaaaaatgcataactaaagaattttc

SEQ ID NO: 27955 - protein, 393 aa, Arabidopsis thaliana
  peptide (1)..(393): Ceres Seq. ID no. 12325069
  misc_feature (138)..(336): Pfam Name: Galactosyltransferase Pfam Description: Galactosyltransferase
  misc_feature (17)..(390): Homolog of NCBI NO: 15217544 NR Description: elicitor response protein, putative; protein id:
  misc_feature (6)..(390): Homolog of NCBI NO: 15220440 NR Description: putative AVR9 elicitor response protein
  misc_feature (112)..(151): Homolog of NCBI NO: 25370617 NR Description: protein F28K19.2 [imported] - Arabidopsis
  misc_feature (167)..(237): Homolog of NCBI NO: 25370617 NR Description: protein F28K19.2 [imported] - Arabidopsis
  misc_feature (237)..(393): Homolog of NCBI NO: 25370617 NR Description: protein F28K19.2 [imported] - Arabidopsis
  misc_feature (10)..(393): Homolog of NCBI NO: 18395060 NR Description: Expressed protein
  misc_feature (10)..(392): Homolog of NCBI NO: 4138265 NR Description: Avr9 elicitor response protein [Nicotiana tabacum]
  misc_feature (10)..(393): Homolog of NCBI NO: 34365705 NR Description: At1g77810 [Arabidopsis thaliana]
  misc_feature (10)..(393): Homolog of NCBI NO: 12323294 NR Description: putative (Avr9) elicitor response protein;
  misc_feature (10)..(393): Homolog of NCBI NO: 30699558 NR Description: Avr9 elicitor response protein -related
LSSLNLSTTMKHKVSKRVISLKWVPFLCISFFALGAIFTSRSWEPSSDSGSQLISQHHRDHELQIVSDDCAHNKKATQEKDVTGEVLRTHEAIQSLDKSVSTLSSTRSSQEMVDGSETNPRKKVFMVMGINTAFSSRKRRDSVRETWMPQGEKLERLEQEKGIVIKFMIGHSATSNSILDRAIDSEDAQHKDFLRLEHVEGYHELSAKTKIFFSTAVAKWDAEFYIKVDDDVHVNLGMLASTLARHRSKPRVYIGCMKSGPVLAQKTVKYHEPEYWKFGEDCNKYFRHATGQIYAISKDLANYISINQPILHKYANEDVSLGSWFIGLEVEHIDDRNFCCGTPPDCRWKAEAGDVCVASFEWSCSGICKSVERMKIVHEVCSEGEGAVWNTLL

SEQ ID NO: 27956 - protein, 384 aa, Arabidopsis thaliana
  peptide (1)..(384): Ceres Seq. ID no. 12325070
  misc_feature (129)..(327): Pfam Name: Galactosyltransferase Pfam Description: Galactosyltransferase
  misc_feature (8)..(381): Homolog of NCBI NO: 15217544 NR Description: elicitor response protein, putative; protein id:
  misc_feature (1)..(381): Homolog of NCBI NO: 15220440 NR Description: putative AVR9 elicitor response protein
  misc_feature (103)..(142): Homolog of NCBI NO: 25370617 NR Description: protein F28K19.2 [imported] - Arabidopsis
  misc_feature (158)..(228): Homolog of NCBI NO: 25370617 NR Description: protein F28K19.2 [imported] - Arabidopsis
  misc_feature (228)..(384): Homolog of NCBI NO: 25370617 NR Description: protein F28K19.2 [imported] - Arabidopsis
  misc_feature (1)..(384): Homolog of NCBI NO: 18395060 NR Description: Expressed protein
  misc_feature (1)..(383): Homolog of NCBI NO: 4138265 NR Description: Avr9 elicitor response protein [Nicotiana tabacum]
  misc_feature (1)..(384): Homolog of NCBI NO: 34365705 NR Description: At1g77810 [Arabidopsis thaliana]
  misc_feature (1)..(384): Homolog of NCBI NO: 12323294 NR Description: putative (Avr9) elicitor response protein;
  misc_feature (1)..(384): Homolog of NCBI NO: 30699558 NR Description: Avr9 elicitor response protein -related
MKHKVSKRVISLKWVPFLCISFFALGAIFTSRSWEPSSDSGSQLISQHHRDHELQIVSDDCAHNKKATQEKDVTGEVLRTHEAIQSLDKSVSTLSSTRSSQEMVDGSETNPRKKVFMVMGINTAFSSRKRRDSVRETWMPQGEKLERLEQEKGIVIKFMIGHSATSNSILDRAIDSEDAQHKDFLRLEHVEGYHELSAKTKIFFSTAVAKWDAEFYIKVDDDVHVNLGMLASTLARHRSKPRVYIGCMKSGPVLAQKTVKYHEPEYWKFGEDCNKYFRHATGQIYAISKDLANYISINQPILHKYANEDVSLGSWFIGLEVEHIDDRNFCCGTPPDCRWKAEAGDVCVASFEWSCSGICKSVERMKIVHEVCSEGEGAVWNTLL

SEQ ID NO: 27957 - protein, 282 aa, Arabidopsis thaliana
  peptide (1)..(282): Ceres Seq. ID no. 12325071
  misc_feature (27)..(225): Pfam Name: Galactosyltransferase Pfam Description: Galactosyltransferase
  misc_feature (1)..(279): Homolog of NCBI NO: 15217544 NR Description: elicitor response protein, putative; protein id:
  misc_feature (1)..(279): Homolog of NCBI NO: 15220440 NR Description: putative AVR9 elicitor response protein
  misc_feature (1)..(40): Homolog of NCBI NO: 25370617 NR Description: protein F28K19.2 [imported] - Arabidopsis
  misc_feature (56)..(126): Homolog of NCBI NO: 25370617 NR Description: protein F28K19.2 [imported] - Arabidopsis
  misc_feature (126)..(282): Homolog of NCBI NO: 25370617 NR Description: protein F28K19.2 [imported] - Arabidopsis
  misc_feature (1)..(282): Homolog of NCBI NO: 18395060 NR Description: Expressed protein
  misc_feature (1)..(281): Homolog of NCBI NO: 4138265 NR Description: Avr9 elicitor response protein [Nicotiana tabacum]
  misc_feature (1)..(282): Homolog of NCBI NO: 34365705 NR Description: At1g77810 [Arabidopsis thaliana]
  misc_feature (1)..(282): Homolog of NCBI NO: 12323294 NR Description: putative (Avr9) elicitor response protein;
  misc_feature (1)..(282): Homolog of NCBI NO: 30699558 NR Description: Avr9 elicitor response protein -related
MVDGSETNPRKKVFMVMGINTAFSSRKRRDSVRETWMPQGEKLERLEQEKGIVIKFMIGHSATSNSILDRAIDSEDAQHKDFLRLEHVEGYHELSAKTKIFFSTAVAKWDAEFYIKVDDDVHVNLGMLASTLARHRSKPRVYIGCMKSGPVLAQKTVKYHEPEYWKFGEDCNKYFRHATGQIYAISKDLANYISINQPILHKYANEDVSLGSWFIGLEVEHIDDRNFCCGTPPDCRWKAEAGDVCVASFEWSCSGICKSVERMKIVHEVCSEGEGAVWNTLL

SEQ ID NO: 27958 - DNA, 1306 bp, Arabidopsis thaliana
  misc_feature (1)..(1306): Ceres Seq. ID no. 12421637
  misc_feature: MA Experiment ID: 108595 Result: Down-regulated in Transcription
  misc_feature: MA Experiment 108595 PARAMETER Experiment Name: At_Ler-pi_Ovule_cDNA_P Parameter: Plant Line Value: null
atcttcttcgttttcctttttcctcaatcgacgacgatcaatctccaacctccaccgcattgattcctctgcttccggttcaatgtcgctgctaaaccaactcttcaaccgtgggatctttggcgccaaatgcaagacaagcttgaacttggcgatagctcgaatgaaattgctgcaaaacaagagagatatgcagcttaaacatatgaagaaggagatagctcacttcttgcaagctggacaagaacccattgctcgaattcgggtggagcatgtgatcagagaaatgaatttatgggcagcttatgagatattggagctattctgcgagtttatacttgctcgtgttccaattcttgaaagtgaaaaggaatgcccgagagagttgagagaggctattgctagcattatctttgctgctccaaggtgctctgaagtacctgatcttcttcaaataaagaatctgtttggtacaaaatatggaaaagaatttatcatggttgcttctgagcttcgtccggattctggtgtcaatcgtactatcattgagaagctttctcctaccagtccatctggagcggcaaggctcaagatgttaaaggaaattgcgcaggagtacagtttgaattgggattcttctgccacggaagcagagttcatgaagagccatgaagacctactgggtggagctaagcaaatacatcgtcaagatggtatctctgaatctcgaccgtcccaacaaggctacggtcagtcttcggtttctagggaagttgaaagtctgcctgcagaggccacacagagattccaaaagcttcaagctcaaaacccagtgagcaaaagcatgccatcatctaagctgacttcagcctttcaagctcctcctgatactagacggaatcagactgatgtaatggagatagctcgagctgccctagctagcgctgatcgtgcaacagcagctgctcgtgctgctgcgcaactagtgaatgtctcttatggggctactacacccacagtagcagcagaagggaagcccttaaacttaatgtagttgccacgtcgtcatttgtgaataaaagcaactgtatttgcttcatacacagaaagaaggataacgatgttttctttggtacttcataggtttggaaaaatgagtatgctaaagagtattggtagattatgctcgagtgttgtgaccttaggttgattcaaaagacagtgatgtttaaatgtgacatacagatataactctgaagtttgttggttttacaaaatctatgcagaaaaaacaacattatcatgc

SEQ ID NO: 27959 - protein, 350 aa, Arabidopsis thaliana
  peptide (1)..(350): Ceres Seq. ID no. 12421638
  misc_feature (50)..(171): Pfam Name: Eukaryotic protein of unknown function, DUF292 Pfam Description: Eukaryotic protein of unknown function, DUF292
  misc_feature (31)..(289): Homolog of NCBI NO: 30688332 NR Description: expressed protein [Arabidopsis thaliana]
  misc_feature (21)..(227): Homolog of NCBI NO: 34910388 NR Description: P0692C11.15 [Oryza sativa (japonica
  misc_feature (50)..(232): Homolog of NCBI NO: 15237108 NR Description: putative protein; protein id: At4g35730.1
  misc_feature (181)..(232): Homolog of NCBI NO: 33589706 NR Description: At1g34220 [Arabidopsis thaliana]
  misc_feature (28)..(179): Homolog of NCBI NO: 33589706 NR Description: At1g34220 [Arabidopsis thaliana]
  misc_feature (38)..(229): Homolog of NCBI NO: 40253290 NR Description: unknown protein [Oryza sativa (japonica
  misc_feature (28)..(331): Homolog of NCBI NO: 34911298 NR Description: P0519D04.18 [Oryza sativa (japonica
  misc_feature (28)..(232): Homolog of NCBI NO: 15218545 NR Description: hypothetical protein; protein id: At1g34220.1
  misc_feature (28)..(350): Homolog of NCBI NO: 21595428 NR Description: unknown [Arabidopsis thaliana]
  misc_feature (28)..(350): Homolog of NCBI NO: 18395668 NR Description: expressed protein
SSSFSFFLNRRRSISNLHRIDSSASGSMSLLNQLFNRGIFGAKCKTSLNLAIARMKLLQNKRDMQLKHMKKEIAHFLQAGQEPIARIRVEHVIREMNLWAAYEILELFCEFILARVPILESEKECPRELREAIASIIFAAPRCSEVPDLLQIKNLFGTKYGKEFIMVASELRPDSGVNRTIIEKLSPTSPSGAARLKMLKEIAQEYSLNWDSSATEAEFMKSHEDLLGGAKQIHRQDGISESRPSQQGYGQSSVSREVESLPAEATQRFQKLQAQNPVSKSMPSSKLTSAFQAPPDTRRNQTDVMEIARAALASADRATAAARAAAQLVNVSYGATTPTVAAEGKPLNLM

SEQ ID NO: 27960 - protein, 323 aa, Arabidopsis thaliana
  peptide (1)..(323): Ceres Seq. ID no. 12421639
  misc_feature (23)..(144): Pfam Name: Eukaryotic protein of unknown function, DUF292 Pfam Description: Eukaryotic protein of unknown function, DUF292
  misc_feature (4)..(262): Homolog of NCBI NO: 30688332 NR Description: expressed protein [Arabidopsis thaliana]
  misc_feature (1)..(200): Homolog of NCBI NO: 34910388 NR Description: P0692C11.15 [Oryza sativa (japonica
  misc_feature (23)..(205): Homolog of NCBI NO: 15237108 NR Description: putative protein; protein id: At4g35730.1
  misc_feature (154)..(205): Homolog of NCBI NO: 33589706 NR Description: At1g34220 [Arabidopsis thaliana]
  misc_feature (1)..(152): Homolog of NCBI NO: 33589706 NR Description: At1g34220 [Arabidopsis thaliana]
  misc_feature (11)..(202): Homolog of NCBI NO: 40253290 NR Description: unknown protein [Oryza sativa (japonica
  misc_feature (1)..(304): Homolog of NCBI NO: 34911298 NR Description: P0519D04.18 [Oryza sativa (japonica
  misc_feature (1)..(205): Homolog of NCBI NO: 15218545 NR Description: hypothetical protein; protein id: At1g34220.1
  misc_feature (1)..(323): Homolog of NCBI NO: 21595428 NR Description: unknown [Arabidopsis thaliana]
  misc_feature (1)..(323): Homolog of NCBI NO: 18395668 NR Description: expressed protein
MSLLNQLFNRGIFGAKCKTSLNLAIARMKLLQNKRDMQLKHMKKEIAHFLQAGQEPIARIRVEHVIREMNLWAAYEILELFCEFILARVPILESEKECPRELREAIASIIFAAPRCSEVPDLLQIKNLFGTKYGKEFIMVASELRPDSGVNRTIIEKLSPTSPSGAARLKMLKEIAQEYSLNWDSSATEAEFMKSHEDLLGGAKQIHRQDGISESRPSQQGYGQSSVSREVESLPAEATQRFQKLQAQNPVSKSMPSSKLTSAFQAPPDTRRNQTDVMEIARAALASADRATAAARAAAQLVNVSYGATTPTVAAEGKPLNLM

SEQ ID NO: 27961 - protein, 296 aa, Arabidopsis thaliana
  peptide (1)..(296): Ceres Seq. ID no. 12421640
  misc_feature (1)..(117): Pfam Name: Eukaryotic protein of unknown function, DUF292 Pfam Description: Eukaryotic protein of unknown function, DUF292
  misc_feature (1)..(235): Homolog of NCBI NO: 30688332 NR Description: expressed protein [Arabidopsis thaliana]
  misc_feature (1)..(173): Homolog of NCBI NO: 34910388 NR Description: P0692C11.15 [Oryza sativa (japonica
  misc_feature (1)..(178): Homolog of NCBI NO: 15237108 NR Description: putative protein; protein id: At4g35730.1
  misc_feature (127)..(178): Homolog of NCBI NO: 33589706 NR Description: At1g34220 [Arabidopsis thaliana]
  misc_feature (1)..(125): Homolog of NCBI NO: 33589706 NR Description: At1g34220 [Arabidopsis thaliana]
  misc_feature (1)..(175): Homolog of NCBI NO: 40253290 NR Description: unknown protein [Oryza sativa (japonica
  misc_feature (1)..(277): Homolog of NCBI NO: 34911298 NR Description: P0519D04.18 [Oryza sativa (japonica
  misc_feature (1)..(178): Homolog of NCBI NO: 15218545 NR Description: hypothetical protein; protein id: At1g34220.1
  misc_feature (1)..(296): Homolog of NCBI NO: 21595428 NR Description: unknown [Arabidopsis thaliana]
  misc_feature (1)..(296): Homolog of NCBI NO: 18395668 NR Description: expressed protein
MKLLQNKRDMQLKHMKKEIAHFLQAGQEPIARIRVEHVIREMNLWAAYEILELFCEFILARVPILESEKECPRELREAIASIIFAAPRCSEVPDLLQIKNLFGTKYGKEFIMVASELRPDSGVNRTIIEKLSPTSPSGAARLKMLKEIAQEYSLNWDSSATEAEFMKSHEDLLGGAKQIHRQDGISESRPSQQGYGQSSVSREVESLPAEATQRFQKLQAQNPVSKSMPSSKLTSAFQAPPDTRRNQTDVMEIARAALASADRATAAARAAAQLVNVSYGATTPTVAAEGKPLNLM

SEQ ID NO: 27962 - DNA, 1935 bp, Arabidopsis thaliana
  misc_feature (1)..(1935): Ceres Seq. ID no. 12371338
  misc_feature: MA Experiment ID: 108434 Result: Up-regulated in Transcription
  misc_feature: MA Experiment 108434 PARAMETER Experiment Name: At_Root_Tips_cDNA_P Parameter: Tissue Value: Root Tips
  misc_feature: MA Experiment ID: 108461 Result: Down-regulated in Transcription
  misc_feature: MA Experiment 108461 PARAMETER Experiment Name: At_Germinating_Seeds_cDNA_P Parameter: Age (day) Value: 1 vs. 0
  misc_feature: MA Experiment 108461 PARAMETER Experiment Name: At_Germinating_Seeds_cDNA_P Parameter: Tissue Value: Germinating Seeds
  misc_feature: MA Experiment ID: 108462 Result: Down-regulated in Transcription
  misc_feature: MA Experiment 108462 PARAMETER Experiment Name: At_Germinating_Seeds_cDNA_P Parameter: Age (day) Value: 2 vs. 0
  misc_feature: MA Experiment 108462 PARAMETER Experiment Name: At_Germinating_Seeds_cDNA_P Parameter: Tissue Value: Germinating Seeds
  misc_feature: MA Experiment ID: 108463 Result: Down-regulated in Transcription
  misc_feature: MA Experiment 108463 PARAMETER Experiment Name: At_Germinating_Seeds_cDNA_P Parameter: Age (day) Value: 3 vs. 0
  misc_feature: MA Experiment 108463 PARAMETER Experiment Name: At_Germinating_Seeds_cDNA_P Parameter: Tissue Value: Germinating Seeds
  misc_feature: MA Experiment ID: 108464 Result: Down-regulated in Transcription
  misc_feature: MA Experiment 108464 PARAMETER Experiment Name: At_Germinating_Seeds_cDNA_P Parameter: Age (day) Value: 4 vs. 0
  misc_feature: MA Experiment 108464 PARAMETER Experiment Name: At_Germinating_Seeds_cDNA_P Parameter: Tissue Value: Germinating Seeds
  misc_feature: MA Experiment ID: 108569 Result: Up-regulated in Transcription
  misc_feature: MA Experiment 108569 PARAMETER Experiment Name: At_0.001%_MeJA__cDNA_P Parameter: Timepoint (hr) Value: 6
  misc_feature: MA Experiment 108569 PARAMETER Experiment Name: At_0.001%_MeJA__cDNA_P Parameter: Tissue Value: Aerial
  misc_feature: MA Experiment 108569 PARAMETER Experiment Name: At_0.001%_MeJA__cDNA_P Parameter: Treatment Value: 0.001% MeJA vs. No Treatment
  misc_feature: MA Experiment ID: 108595 Result: Down-regulated in Transcription
  misc_feature: MA Experiment 108595 PARAMETER Experiment Name: At_Ler-pi_Ovule_cDNA_P Parameter: Plant Line Value: null
  misc_feature: MA Experiment ID: 20000224 Result: Down-regulated in Transcription
  misc_feature: MA Experiment ID: 20000227 Result: Up-regulated in Transcription
  misc_feature: MA Experiment 20000227 PARAMETER Experiment Name: At_Root-Tips-vs-Tops_P Parameter: Tissue Value: Root Tips vs. Root Tops
  misc_feature: MA Experiment ID: 20000437 Result: Down-regulated in Transcription
  misc_feature: MA Experiment 20000437 PARAMETER Experiment Name: At_Drought_P Parameter: Age (day) Value: 8
  misc_feature: MA Experiment 20000437 PARAMETER Experiment Name: At_Drought_P Parameter: Organism Value: A. thaliana
  misc_feature: MA Experiment 20000437 PARAMETER Experiment Name: At_Drought_P Parameter: Plant Line Value: WS
  misc_feature: MA Experiment 20000437 PARAMETER Experiment Name: At_Drought_P Parameter: Timepoint (hr) Value: 24
  misc_feature: MA Experiment 20000437 PARAMETER Experiment Name: At_Drought_P Parameter: Tissue Value: Whole Plant
  misc_feature: MA Experiment 20000437 PARAMETER Experiment Name: At_Drought_P Parameter: Treatment Value: Drought vs. No Drought
  misc_feature: MA Experiment ID: 20000452 Result: Down-regulated in Transcription
  misc_feature: MA Experiment 20000452 PARAMETER Experiment Name: At_CS6879_Shoots-Roots_P Parameter: Age (day) Value: 14
  misc_feature: MA Experiment 20000452 PARAMETER Experiment Name: At_CS6879_Shoots-Roots_P Parameter: Organism Value: A. thaliana
  misc_feature: MA Experiment 20000452 PARAMETER Experiment Name: At_CS6879_Shoots-Roots_P Parameter: Plant Line Value: CS6879 vs. WS
  misc_feature: MA Experiment 20000452 PARAMETER Experiment Name: At_CS6879_Shoots-Roots_P Parameter: Tissue Value: Shoots
  misc_feature: MA Experiment ID: 20001557 Result: Up-regulated in Transcription
  misc_feature: MA Experiment 20001557 PARAMETER Experiment Name: At_Drought_Soil_Dry_P Parameter: Age (day) Value: 27
  misc_feature: MA Experiment 20001557 PARAMETER Experiment Name: At_Drought_Soil_Dry_P Parameter: Organism Value: A. thaliana
  misc_feature: MA Experiment 20001557 PARAMETER Experiment Name: At_Drought_Soil_Dry_P Parameter: Plant Line Value: WS
  misc_feature: MA Experiment 20001557 PARAMETER Experiment Name: At_Drought_Soil_Dry_P Parameter: Post Timepoint (hr) Value: 3
  misc_feature: MA Experiment 20001557 PARAMETER Experiment Name: At_Drought_Soil_Dry_P Parameter: Post-Treatment Value: Re-Water vs. No Drought
  misc_feature: MA Experiment 20001557 PARAMETER Experiment Name: At_Drought_Soil_Dry_P Parameter: Timepoint (day) Value: 13
  misc_feature: MA Experiment 20001557 PARAMETER Experiment Name: At_Drought_Soil_Dry_P Parameter: Treatment Value: Drought vs. No Drought
  misc_feature: Phenotype: WHOLE PLANT Other
  misc_feature: Phenotype: WHOLE PLANT Other
  misc_feature: Phenotype: WHOLE PLANT Other
  misc_feature: Phenotype: WHOLE PLANT Other
agaacactcttgtcacacttccatttagggttttctgcaaatttctccgttcgagatcaattccgtcgagatctcaagctctctcactcgtagtaaaaaaatggcggcggtagcggcaccaatggcttcgaagccccgtggatctaaagctgaatcgttcgtagacaacaagcggagagaagatatccgattcgcgaacatcaactctgctcgagcagtctctgacgccgtccgtactagtttgggaccgaaaggaatggacaagatgatttccacggcgaacggagaggtaatcattactaacgatggagctacgatccttaacaagatggaggttttgcagccagcggcgaagatgttagtcgagctttccaaatctcaagattcagccgccggagatggtaccacaactgtcgtagtaatcgccggtgcgcttctcaaggagtgtcaatcgcttctcacaaacgggatccaccctactgtcatttcagattcgcttcacaaggcgtgtggtaaggcgatcgatattttgactgccatggctgttccagtggagctcactgatagagattcacttgtgaaatctgcgagcacatcgcttaacagtaaggttgttagtcagtactctacattgcttgctcctttagctgtagatgcggttctctctgttatagatccggaaaagcctgagattgtggatttgcgtgatattaagattgttaagaagcttggtgggactgtggatgatacacatactgtgaaaggtttggtttttgataagaaggttagccgtgctgctggtggaccgactcgtgtggagaatgctaagattgctgtgattcagttccagatctcacctcctaagactgatatcgagcagagtattgttgtctctgattatactcagatggataggatcttgaaagaagagaggaattacatattggggatgattaagaagatcaaagcaactggttgcaatgtgttgttgattcagaagagtattttgagggatgcagtgactgatctatctcttcactatttggccaaagctaagattatggttattaaggatgttgagagagatgagattgaatttgtcaccaagacattgaactgcttgcctatcgccaatattgagcatttcagagctgagaagcttggccatgctgatcttgttgaggaggcctcccttggagatggaaagattttgaagatcactggtatcaaggacatggggagaactacatctgttctagttcgtggctccaaccagcttgttctagatgaagctgaaaggagtttacatgatgccttgtgtgtggttaggtgtctagtgagcaaaaggtttttgattgcaggaggtggtgcaccagagattgagctctcaaggcagctcggtgcttgggctaaggtgctacatgggatggaaggttactgtgtgaagtcttttgctgaagctctcgaagttattccttacacactagccgagaatgcagggttaaaccctatcgccattgtgactgaactcaggaacaagcatgctcaaggggaaatcaacgcagggatcaatgtgaggaaaggacagatcactaacatcttggaggaaaatgttgttcagcctctgcttgtgagtaccagtgcgatcactttagcaactgaatgcgttaggatgattttgaagattgatgacatcgtaactgtgaggtagtgtggtagtttctttcaaaacaggtcccagaacacttctattgctctatctaagcttttgtttcgtttttttcatgtgttgtgcttgcacaatggttttgaacttagactcccttttcttgcaacatgtgctattgcagttaagtggctttatttgtggtttagtgcgattgtatttctttctagtgacttgtgatatcaagatctctcagttttttttgtttt

SEQ ID NO: 27963 - protein, 536 aa, Arabidopsis thaliana
  peptide (1)..(536): Ceres Seq. ID no. 12371339
  misc_feature (40)..(536): Pfam Name: TCP-1/cpn60 chaperonin family Pfam Description: TCP-1/cpn60 chaperonin family
  misc_feature (1)..(536): Homolog of NCBI NO: 21595439 NR Description: chaperonin subunit, putative [Arabidopsis
  misc_feature (1)..(536): Homolog of NCBI NO: 15229595 NR Description: chaperonin subunit, putative
MAAVAAPMASKPRGSKAESFVDNKRREDIRFANINSARAVSDAVRTSLGPKGMDKMISTANGEVIITNDGATILNKMEVLQPAAKMLVELSKSQDSAAGDGTTTVVVIAGALLKECQSLLTNGIHPTVISDSLHKACGKAIDILTAMAVPVELTDRDSLVKSASTSLNSKVVSQYSTLLAPLAVDAVLSVIDPEKPEIVDLRDIKIVKKLGGTVDDTHTVKGLVFDKKVSRAAGGPTRVENAKIAVIQFQISPPKTDIEQSIVVSDYTQMDRILKEERNYILGMIKKIKATGCNVLLIQKSILRDAVTDLSLHYLAKAKIMVIKDVERDEIEFVTKTLNCLPIANIEHFRAEKLGHADLVEEASLGDGKILKITGIKDMGRTTSVLVRGSNQLVLDEAERSLHDALCVVRCLVSKRFLIAGGGAPEIELSRQLGAWAKVLHGMEGYCVKSFAEALEVIPYTLAENAGLNPIAIVTELRNKHAQGEINAGINVRKGQITNILEENVVQPLLVSTSAITLATECVRMILKIDDIVTVR

SEQ ID NO: 27964 - protein, 529 aa, Arabidopsis thaliana
  peptide (1)..(529): Ceres Seq. ID no. 12371340
  misc_feature (33)..(529): Pfam Name: TCP-1/cpn60 chaperonin family Pfam Description: TCP-1/cpn60 chaperonin family
  misc_feature (1)..(529): Homolog of NCBI NO: 21595439 NR Description: chaperonin subunit, putative [Arabidopsis
  misc_feature (1)..(529): Homolog of NCBI NO: 15229595 NR Description: chaperonin subunit, putative
MASKPRGSKAESFVDNKRREDIRFANINSARAVSDAVRTSLGPKGMDKMISTANGEVIITNDGATILNKMEVLQPAAKMLVELSKSQDSAAGDGTTTVVVIAGALLKECQSLLTNGIHPTVISDSLHKACGKAIDILTAMAVPVELTDRDSLVKSASTSLNSKVVSQYSTLLAPLAVDAVLSVIDPEKPEIVDLRDIKIVKKLGGTVDDTHTVKGLVFDKKVSRAAGGPTRVENAKIAVIQFQISPPKTDIEQSIVVSDYTQMDRILKEERNYILGMIKKIKATGCNVLLIQKSILRDAVTDLSLHYLAKAKIMVIKDVERDEIEFVTKTLNCLPIANIEHFRAEKLGHADLVEEASLGDGKILKITGIKDMGRTTSVLVRGSNQLVLDEAERSLHDALCVVRCLVSKRFLIAGGGAPEIELSRQLGAWAKVLHGMEGYCVKSFAEALEVIPYTLAENAGLNPIAIVTELRNKHAQGEINAGINVRKGQITNILEENVVQPLLVSTSAITLATECVRMILKIDDIVTVR

SEQ ID NO: 27965 - protein, 484 aa, Arabidopsis thaliana
  peptide (1)..(484): Ceres Seq. ID no. 12371341
  misc_feature (1)..(484): Pfam Name: TCP-1/cpn60 chaperonin family Pfam Description: TCP-1/cpn60 chaperonin family
  misc_feature (1)..(484): Homolog of NCBI NO: 21595439 NR Description: chaperonin subunit, putative [Arabidopsis
  misc_feature (1)..(484): Homolog of NCBI NO: 15229595 NR Description: chaperonin subunit, putative
MDKMISTANGEVIITNDGATILNKMEVLQPAAKMLVELSKSQDSAAGDGTTTVVVIAGALLKECQSLLTNGIHPTVISDSLHKACGKAIDILTAMAVPVELTDRDSLVKSASTSLNSKVVSQYSTLLAPLAVDAVLSVIDPEKPEIVDLRDIKIVKKLGGTVDDTHTVKGLVFDKKVSRAAGGPTRVENAKIAVIQFQISPPKTDIEQSIVVSDYTQMDRILKEERNYILGMIKKIKATGCNVLLIQKSILRDAVTDLSLHYLAKAKIMVIKDVERDEIEFVTKTLNCLPIANIEHFRAEKLGHADLVEEASLGDGKILKITGIKDMGRTTSVLVRGSNQLVLDEAERSLHDALCVVRCLVSKRFLIAGGGAPEIELSRQLGAWAKVLHGMEGYCVKSFAEALEVIPYTLAENAGLNPIAIVTELRNKHAQGEINAGINVRKGQITNILEENVVQPLLVSTSAITLATECVRMILKIDDIVTVR

SEQ ID NO: 27966 - DNA, 1032 bp, Arabidopsis thaliana
  misc_feature (1)..(1032): Ceres Seq. ID no. 12332963
  misc_feature: MA Experiment ID: 108434 Result: Down-regulated in Transcription
  misc_feature: MA Experiment 108434 PARAMETER Experiment Name: At_Root_Tips_cDNA_P Parameter: Tissue Value: Root Tips
  misc_feature: MA Experiment ID: 108462 Result: Up-regulated in Transcription
  misc_feature: MA Experiment 108462 PARAMETER Experiment Name: At_Germinating_Seeds_cDNA_P Parameter: Age (day) Value: 2 vs. 0
  misc_feature: MA Experiment 108462 PARAMETER Experiment Name: At_Germinating_Seeds_cDNA_P Parameter: Tissue Value: Germinating Seeds
  misc_feature: MA Experiment ID: 108463 Result: Up-regulated in Transcription
  misc_feature: MA Experiment 108463 PARAMETER Experiment Name: At_Germinating_Seeds_cDNA_P Parameter: Age (day) Value: 3 vs. 0
  misc_feature: MA Experiment 108463 PARAMETER Experiment Name: At_Germinating_Seeds_cDNA_P Parameter: Tissue Value: Germinating Seeds
  misc_feature: MA Experiment ID: 108464 Result: Up-regulated in Transcription
  misc_feature: MA Experiment 108464 PARAMETER Experiment Name: At_Germinating_Seeds_cDNA_P Parameter: Age (day) Value: 4 vs. 0
  misc_feature: MA Experiment 108464 PARAMETER Experiment Name: At_Germinating_Seeds_cDNA_P Parameter: Tissue Value: Germinating Seeds
  misc_feature: MA Experiment ID: 108573 Result: Up-regulated in Transcription
  misc_feature: MA Experiment 108573 PARAMETER Experiment Name: At_Drought_cDNA_P Parameter: Timepoint (hr) Value: 6
  misc_feature: MA Experiment 108573 PARAMETER Experiment Name: At_Drought_cDNA_P Parameter: Tissue Value: Aerial
  misc_feature: MA Experiment 108573 PARAMETER Experiment Name: At_Drought_cDNA_P Parameter: Treatment Value: Drought vs. No Drought
  misc_feature: MA Experiment ID: 108576 Result: Down-regulated in Transcription
  misc_feature: MA Experiment 108576 PARAMETER Experiment Name: At_42deg_Heat_cDNA_P Parameter: Temperature (deg C) Value: 42 vs. 22
  misc_feature: MA Experiment 108576 PARAMETER Experiment Name: At_42deg_Heat_cDNA_P Parameter: Timepoint (hr) Value: 1
  misc_feature: MA Experiment 108576 PARAMETER Experiment Name: At_42deg_Heat_cDNA_P Parameter: Tissue Value: Aerial
  misc_feature: MA Experiment ID: 108577 Result: Down-regulated in Transcription
  misc_feature: MA Experiment 108577 PARAMETER Experiment Name: At_42deg_Heat_cDNA_P Parameter: Temperature (deg C) Value: 42 vs. 22
  misc_feature: MA Experiment 108577 PARAMETER Experiment Name: At_42deg_Heat_cDNA_P Parameter: Timepoint (hr) Value: 6
  misc_feature: MA Experiment 108577 PARAMETER Experiment Name: At_42deg_Heat_cDNA_P Parameter: Tissue Value: Aerial
  misc_feature: MA Experiment ID: 108579 Result: Up-regulated in Transcription
  misc_feature: MA Experiment 108579 PARAMETER Experiment Name: At_4deg_Cold_cDNA_P Parameter: Temperature (deg C) Value: 4 vs. 22
  misc_feature: MA Experiment 108579 PARAMETER Experiment Name: At_4deg_Cold_cDNA_P Parameter: Timepoint (hr) Value: 6
  misc_feature: MA Experiment 108579 PARAMETER Experiment Name: At_4deg_Cold_cDNA_P Parameter: Tissue Value: Aerial
  misc_feature: MA Experiment ID: 20000111 Result: Down-regulated in Transcription
  misc_feature: MA Experiment 20000111 PARAMETER Experiment Name: At_42deg_Heat_cDNA_P Parameter: Temperature (deg C) Value: 42 vs. 22
  misc_feature: MA Experiment 20000111 PARAMETER Experiment Name: At_42deg_Heat_cDNA_P Parameter: Timepoint (hr) Value: 6
  misc_feature: MA Experiment 20000111 PARAMETER Experiment Name: At_42deg_Heat_cDNA_P Parameter: Tissue Value: Aerial
  misc_feature: MA Experiment ID: 20000113 Result: Down-regulated in Transcription
  misc_feature: MA Experiment 20000113 PARAMETER Experiment Name: At_42deg_Heat_cDNA_P Parameter: Temperature (deg C) Value: 42 vs. 22
  misc_feature: MA Experiment 20000113 PARAMETER Experiment Name: At_42deg_Heat_cDNA_P Parameter: Timepoint (hr) Value: 8
  misc_feature: MA Experiment 20000113 PARAMETER Experiment Name: At_42deg_Heat_cDNA_P Parameter: Tissue Value: Aerial
  misc_feature: MA Experiment ID: 20000173 Result: Down-regulated in Transcription
  misc_feature: MA Experiment 20000173 PARAMETER Experiment Name: At_42deg_Heat_P Parameter: Age (day) Value: 14
  misc_feature: MA Experiment 20000173 PARAMETER Experiment Name: At_42deg_Heat_P Parameter: Organism Value: A. thaliana
  misc_feature: MA Experiment 20000173 PARAMETER Experiment Name: At_42deg_Heat_P Parameter: Plant Line Value: WS
  misc_feature: MA Experiment 20000173 PARAMETER Experiment Name: At_42deg_Heat_P Parameter: Temperature (deg C) Value: 42 vs. 22
  misc_feature: MA Experiment 20000173 PARAMETER Experiment Name: At_42deg_Heat_P Parameter: Timepoint (hr) Value: 6
  misc_feature: MA Experiment 20000173 PARAMETER Experiment Name: At_42deg_Heat_P Parameter: Tissue Value: Aerial
  misc_feature: MA Experiment ID: 20000180 Result: Up-regulated in Transcription
  misc_feature: MA Experiment 20000180 PARAMETER Experiment Name: At_Germinating_Seeds_P Parameter: Age (hr) Value: 24 vs. 0
  misc_feature: MA Experiment 20000180 PARAMETER Experiment Name: At_Germinating_Seeds_P Parameter: Tissue Value: Germinating Seeds
  misc_feature: MA Experiment ID: 20000224 Result: Up-regulated in Transcription
  misc_feature: MA Experiment ID: 20000495 Result: Down-regulated in Transcription
  misc_feature: MA Experiment 20000495 PARAMETER Experiment Name: At_Guard_Cells_P Parameter: Harvest Date Value: 8/2/2002
  misc_feature: MA Experiment 20000495 PARAMETER Experiment Name: At_Guard_Cells_P Parameter: Organism Value: A. thaliana
  misc_feature: MA Experiment 20000495 PARAMETER Experiment Name: At_Guard_Cells_P Parameter: Tissue Value: Guard Cells vs. Leaves
  misc_feature: MA Experiment ID: 20001248 Result: Down-regulated in Transcription
  misc_feature: MA Experiment 20001248 PARAMETER Experiment Name: At_Far-red-induction_P Parameter: Age (day) Value: 7
  misc_feature: MA Experiment 20001248 PARAMETER Experiment Name: At_Far-red-induction_P Parameter: Light Value: Far-red vs. White
  misc_feature: MA Experiment 20001248 PARAMETER Experiment Name: At_Far-red-induction_P Parameter: Organism Value: A. thaliana
  misc_feature: MA Experiment 20001248 PARAMETER Experiment Name: At_Far-red-induction_P Parameter: Plant Line Value: Columbia
  misc_feature: MA Experiment 20001248 PARAMETER Experiment Name: At_Far-red-induction_P Parameter: Timepoint (hr) Value: 4
  misc_feature: MA Experiment 20001248 PARAMETER Experiment Name: At_Far-red-induction_P Parameter: Tissue Value: Whole Plant
  misc_feature: MA Experiment ID: 20001451 Result: Down-regulated in Transcription
  misc_feature: MA Experiment 20001451 PARAMETER Experiment Name: At_Far-red-induction_P Parameter: Age (day) Value: 7
  misc_feature: MA Experiment 20001451 PARAMETER Experiment Name: At_Far-red-induction_P Parameter: Light Value: Far-red vs. White
  misc_feature: MA Experiment 20001451 PARAMETER Experiment Name: At_Far-red-induction_P Parameter: Organism Value: A. thaliana
  misc_feature: MA Experiment 20001451 PARAMETER Experiment Name: At_Far-red-induction_P Parameter: Plant Line Value: Columbia
  misc_feature: MA Experiment 20001451 PARAMETER Experiment Name: At_Far-red-induction_P Parameter: Timepoint (hr) Value: 24
  misc_feature: MA Experiment 20001451 PARAMETER Experiment Name: At_Far-red-induction_P Parameter: Tissue Value: Whole Plant
  misc_feature: MA Experiment ID: 20001558 Result: Down-regulated in Transcription
  misc_feature: MA Experiment 20001558 PARAMETER Experiment Name: At_Drought_Soil_Dry_P Parameter: Age (day) Value: 27
  misc_feature: MA Experiment 20001558 PARAMETER Experiment Name: At_Drought_Soil_Dry_P Parameter: Organism Value: A. thaliana
  misc_feature: MA Experiment 20001558 PARAMETER Experiment Name: At_Drought_Soil_Dry_P Parameter: Plant Line Value: WS
  misc_feature: MA Experiment 20001558 PARAMETER Experiment Name: At_Drought_Soil_Dry_P Parameter: Post Timepoint (hr) Value: 6
  misc_feature: MA Experiment 20001558 PARAMETER Experiment Name: At_Drought_Soil_Dry_P Parameter: Post-Treatment Value: Re-Water vs. No Drought
  misc_feature: MA Experiment 20001558 PARAMETER Experiment Name: At_Drought_Soil_Dry_P Parameter: Timepoint (day) Value: 13
  misc_feature: MA Experiment 20001558 PARAMETER Experiment Name: At_Drought_Soil_Dry_P Parameter: Treatment Value: Drought vs. No Drought
accaagaaaaacacaatcgtttaatctcacccaagaagacaaaaacacagagagagaaagagagagaaatggcgacgacaacaacagaagcaacgaagacatcatcgaccaatggagaagatcagaagcagtctcagaatcttcgacatcaagaagttggtcacaagagtctcttacagagcgatgatctctaccagtatatactggagacaagtgtgtatcctagagaaccagaatcaatgaaggaactcagggaagtgacagcaaaacatccatggaacataatgaccacatcagctgatgaaggacagttcttaaacatgcttatcaagctcgttaacgccaagaacacaatggagatcggagtttacactggctactctcttctcgccaccgctcttgctctccctgaagacggcaaaattctggctatggatgtcaacagagagaattacgaattgggtttaccgatcattgagaaagccggcgttgctcacaagatcgacttcagggaaggccctgctcttcccgttcttgatgaaatcgttgctgacgagaagaaccatggaacatatgactttatattcgttgatgctgacaaagacaactacatcaactaccacaagcgtttgatcgatcttgtgaaaattggaggagtgattggctacgacaacactctgtggaatggttctgtcgtggctcctcctgatgcaccaatgaggaagtacgttcgttactacagagactttgttcttgagcttaacaaggctcttgctgctgaccctcggatcgagatctgtatgctccctgttggtgatggaatcactatctgccgtcggatcagttgatttgactcctccctactctgagtttgtccacagtggattactttccatcttcttatacctttcaatcgcattttcaccaaccactaaaatggacctttttatgtatttgtgttaagtaatatctccattgtccttgttttgctttcttctgaacaaagaaataatatgtaccttacttttcttc

SEQ ID NO: 27967 - protein, 281 aa, Arabidopsis thaliana
  peptide (1)..(281): Ceres Seq. ID no. 12332964
  misc_feature (68)..(280): Pfam Name: O-methyltransferase Pfam Description: O-methyltransferase
  misc_feature (35)..(280): Homolog of NCBI NO: 13249171 NR Description: caffeoyl-CoA 3-O-methyltransferase
  misc_feature (43)..(280): Homolog of NCBI NO: 7271916 NR Description: caffeoyl-CoA O-methyltransferase [Populus
  misc_feature (35)..(281): Homolog of NCBI NO: 30580381 NR Description: Caffeoyl-CoA O-methyltransferase 2
  misc_feature (47)..(281): Homolog of NCBI NO: 2511737 NR Description: caffeoyl-CoA 3-O-methyltransferase 5 [Nicotiana
  misc_feature (47)..(281): Homolog of NCBI NO: 30580324 NR Description: Caffeoyl-CoA O-methyltransferase 5
  misc_feature (35)..(280): Homolog of NCBI NO: 30580341 NR Description: Caffeoyl-CoA O-methyltransferase
  misc_feature (35)..(280): Homolog of NCBI NO: 30580333 NR Description: Caffeoyl-CoA O-methyltransferase 1
  misc_feature (35)..(280): Homolog of NCBI NO: 3023436 NR Description: Caffeoyl-CoA O-methyltransferase
  misc_feature (23)..(281): Homolog of NCBI NO: 21595512 NR Description: caffeoyl-CoA O-methyltransferase-like protein
  misc_feature (23)..(281): Homolog of NCBI NO: 15235213 NR Description: caffeoyl-CoA 3-O-methyltransferase
QEKHNRLISPKKTKTQREKEREMATTTTEATKTSSTNGEDQKQSQNLRHQEVGHKSLLQSDDLYQYILETSVYPREPESMKELREVTAKHPWNIMTTSADEGQFLNMLIKLVNAKNTMEIGVYTGYSLLATALALPEDGKILAMDVNRENYELGLPIIEKAGVAHKIDFREGPALPVLDEIVADEKNHGTYDFIFVDADKDNYINYHKRLIDLVKIGGVIGYDNTLWNGSVVAPPDAPMRKYVRYYRDFVLELNKALAADPRIEICMLPVGDGITICRRIS

SEQ ID NO: 27968 - protein, 259 aa, Arabidopsis thaliana
  peptide (1)..(259): Ceres Seq. ID no. 12332965
  misc_feature (46)..(258): Pfam Name: O-methyltransferase Pfam Description: O-methyltransferase
  misc_feature (13)..(258): Homolog of NCBI NO: 13249171 NR Description: caffeoyl-CoA 3-O-methyltransferase
  misc_feature (21)..(258): Homolog of NCBI NO: 7271916 NR Description: caffeoyl-CoA O-methyltransferase [Populus
  misc_feature (13)..(259): Homolog of NCBI NO: 30580381 NR Description: Caffeoyl-CoA O-methyltransferase 2
  misc_feature (25)..(259): Homolog of NCBI NO: 2511737 NR Description: caffeoyl-CoA 3-O-methyltransferase 5 [Nicotiana
  misc_feature (25)..(259): Homolog of NCBI NO: 30580324 NR Description: Caffeoyl-CoA O-methyltransferase 5
  misc_feature (13)..(258): Homolog of NCBI NO: 30580341 NR Description: Caffeoyl-CoA O-methyltransferase
  misc_feature (13)..(258): Homolog of NCBI NO: 30580333 NR Description: Caffeoyl-CoA O-methyltransferase 1
  misc_feature (13)..(258): Homolog of NCBI NO: 3023436 NR Description: Caffeoyl-CoA O-methyltransferase
  misc_feature (1)..(259): Homolog of NCBI NO: 21595512 NR Description: caffeoyl-CoA O-methyltransferase-like protein
  misc_feature (1)..(259): Homolog of NCBI NO: 15235213 NR Description: caffeoyl-CoA 3-O-methyltransferase
MATTTTEATKTSSTNGEDQKQSQNLRHQEVGHKSLLQSDDLYQYILETSVYPREPESMKELREVTAKHPWNIMTTSADEGQFLNMLIKLVNAKNTMEIGVYTGYSLLATALALPEDGKILAMDVNRENYELGLPIIEKAGVAHKIDFREGPALPVLDEIVADEKNHGTYDFIFVDADKDNYINYHKRLIDLVKIGGVIGYDNTLWNGSVVAPPDAPMRKYVRYYRDFVLELNKALAADPRIEICMLPVGDGITICRRIS

SEQ ID NO: 27969 - protein, 202 aa, Arabidopsis thaliana
  peptide (1)..(202): Ceres Seq. ID no. 12332966
  misc_feature (1)..(201): Pfam Name: O-methyltransferase Pfam Description: O-methyltransferase
  misc_feature (1)..(201): Homolog of NCBI NO: 13249171 NR Description: caffeoyl-CoA 3-O-methyltransferase
  misc_feature (1)..(201): Homolog of NCBI NO: 7271916 NR Description: caffeoyl-CoA O-methyltransferase [Populus
  misc_feature (1)..(202): Homolog of NCBI NO: 30580381 NR Description: Caffeoyl-CoA O-methyltransferase 2
  misc_feature (1)..(202): Homolog of NCBI NO: 2511737 NR Description: caffeoyl-CoA 3-O-methyltransferase 5 [Nicotiana
  misc_feature (1)..(202): Homolog of NCBI NO: 30580324 NR Description: Caffeoyl-CoA O-methyltransferase 5
  misc_feature (1)..(201): Homolog of NCBI NO: 30580341 NR Description: Caffeoyl-CoA O-methyltransferase
  misc_feature (1)..(201): Homolog of NCBI NO: 30580333 NR Description: Caffeoyl-CoA O-methyltransferase 1
  misc_feature (1)..(201): Homolog of NCBI NO: 3023436 NR Description: Caffeoyl-CoA O-methyltransferase
  misc_feature (1)..(202): Homolog of NCBI NO: 21595512 NR Description: caffeoyl-CoA O-methyltransferase-like protein
  misc_feature (1)..(202): Homolog of NCBI NO: 15235213 NR Description: caffeoyl-CoA 3-O-methyltransferase
MKELREVTAKHPWNIMTTSADEGQFLNMLIKLVNAKNTMEIGVYTGYSLLATALALPEDGKILAMDVNRENYELGLPIIEKAGVAHKIDFREGPALPVLDEIVADEKNHGTYDFIFVDADKDNYINYHKRLIDLVKIGGVIGYDNTLWNGSVVAPPDAPMRKYVRYYRDFVLELNKALAADPRIEICMLPVGDGITICRRIS

SEQ ID NO: 27970 - DNA, 998 bp, Arabidopsis thaliana
  misc_feature (1)..(998): Ceres Seq. ID no. 12325548
  misc_feature: MA Experiment ID: 108462 Result: Up-regulated in Transcription
  misc_feature: MA Experiment 108462 PARAMETER Experiment Name: At_Germinating_Seeds_cDNA_P Parameter: Age (day) Value: 2 vs. 0
  misc_feature: MA Experiment 108462 PARAMETER Experiment Name: At_Germinating_Seeds_cDNA_P Parameter: Tissue Value: Germinating Seeds
  misc_feature: MA Experiment ID: 108463 Result: Up-regulated in Transcription
  misc_feature: MA Experiment 108463 PARAMETER Experiment Name: At_Germinating_Seeds_cDNA_P Parameter: Age (day) Value: 3 vs. 0
  misc_feature: MA Experiment 108463 PARAMETER Experiment Name: At_Germinating_Seeds_cDNA_P Parameter: Tissue Value: Germinating Seeds
  misc_feature: MA Experiment ID: 108464 Result: Up-regulated in Transcription
  misc_feature: MA Experiment 108464 PARAMETER Experiment Name: At_Germinating_Seeds_cDNA_P Parameter: Age (day) Value: 4 vs. 0
  misc_feature: MA Experiment 108464 PARAMETER Experiment Name: At_Germinating_Seeds_cDNA_P Parameter: Tissue Value: Germinating Seeds
  misc_feature: MA Experiment ID: 108572 Result: Up-regulated in Transcription
  misc_feature: MA Experiment 108572 PARAMETER Experiment Name: At_Drought_cDNA_P Parameter: Timepoint (hr) Value: 1
  misc_feature: MA Experiment 108572 PARAMETER Experiment Name: At_Drought_cDNA_P Parameter: Tissue Value: Aerial
  misc_feature: MA Experiment 108572 PARAMETER Experiment Name: At_Drought_cDNA_P Parameter: Treatment Value: Drought vs. No Drought
  misc_feature: MA Experiment ID: 108579 Result: Up-regulated in Transcription
  misc_feature: MA Experiment 108579 PARAMETER Experiment Name: At_4deg_Cold_cDNA_P Parameter: Temperature (deg C) Value: 4 vs. 22
  misc_feature: MA Experiment 108579 PARAMETER Experiment Name: At_4deg_Cold_cDNA_P Parameter: Timepoint (hr) Value: 6
  misc_feature: MA Experiment 108579 PARAMETER Experiment Name: At_4deg_Cold_cDNA_P Parameter: Tissue Value: Aerial
  misc_feature: MA Experiment ID: 108607 Result: Up-regulated in Transcription
  misc_feature: MA Experiment 108607 PARAMETER Experiment Name: At_100uM_ABA_cDNA_P Parameter: Timepoint (hr) Value: 4
  misc_feature: MA Experiment 108607 PARAMETER Experiment Name: At_100uM_ABA_cDNA_P Parameter: Tissue Value: Aerial
  misc_feature: MA Experiment 108607 PARAMETER Experiment Name: At_100uM_ABA_cDNA_P Parameter: Treatment Value: 100uM ABA vs. No Treatment
  misc_feature: MA Experiment ID: 20000069 Result: Down-regulated in Transcription
  misc_feature: MA Experiment 20000069 PARAMETER Experiment Name: At_100uM_ABA_Mutants_cDNA_P Parameter: Plant Line Value: CS23
  misc_feature: MA Experiment 20000069 PARAMETER Experiment Name: At_100uM_ABA_Mutants_cDNA_P Parameter: Timepoint (hr) Value: 6
  misc_feature: MA Experiment 20000069 PARAMETER Experiment Name: At_100uM_ABA_Mutants_cDNA_P Parameter: Tissue Value: Aerial
  misc_feature: MA Experiment 20000069 PARAMETER Experiment Name: At_100uM_ABA_Mutants_cDNA_P Parameter: Treatment Value: 100uM ABA vs. No Treatment
  misc_feature: MA Experiment ID: 20000071 Result: Down-regulated in Transcription
  misc_feature: MA Experiment 20000071 PARAMETER Experiment Name: At_100uM_ABA_Mutants_cDNA_P Parameter: Plant Line Value: CS8104
  misc_feature: MA Experiment 20000071 PARAMETER Experiment Name: At_100uM_ABA_Mutants_cDNA_P Parameter: Timepoint (hr) Value: 6
  misc_feature: MA Experiment 20000071 PARAMETER Experiment Name: At_100uM_ABA_Mutants_cDNA_P Parameter: Tissue Value: Aerial
  misc_feature: MA Experiment 20000071 PARAMETER Experiment Name: At_100uM_ABA_Mutants_cDNA_P Parameter: Treatment Value: 100uM ABA vs. No Treatment
  misc_feature: MA Experiment ID: 20000087 Result: Down-regulated in Transcription
  misc_feature: MA Experiment 20000087 PARAMETER Experiment Name: At_100uM_ABA_Mutants_cDNA_P Parameter: Plant Line Value: WS
  misc_feature: MA Experiment 20000087 PARAMETER Experiment Name: At_100uM_ABA_Mutants_cDNA_P Parameter: Timepoint (hr) Value: 6
  misc_feature: MA Experiment 20000087 PARAMETER Experiment Name: At_100uM_ABA_Mutants_cDNA_P Parameter: Tissue Value: Aerial
  misc_feature: MA Experiment 20000087 PARAMETER Experiment Name: At_100uM_ABA_Mutants_cDNA_P Parameter: Treatment Value: 100uM ABA vs. No Treatment
  misc_feature: MA Experiment ID: 20000089 Result: Down-regulated in Transcription
  misc_feature: MA Experiment ID: 20000090 Result: Down-regulated in Transcription
  misc_feature: MA Experiment ID: 20000179 Result: Up-regulated in Transcription
  misc_feature: MA Experiment 20000179 PARAMETER Experiment Name: At_Germinating_Seeds_P Parameter: Age (hr) Value: 6 vs. 0
  misc_feature: MA Experiment 20000179 PARAMETER Experiment Name: At_Germinating_Seeds_P Parameter: Tissue Value: Germinating Seeds
  misc_feature: MA Experiment ID: 20000184 Result: Up-regulated in Transcription
  misc_feature: MA Experiment 20000184 PARAMETER Experiment Name: At_Shoots__P Parameter: Age (day) Value: 7
  misc_feature: MA Experiment 20000184 PARAMETER Experiment Name: At_Shoots__P Parameter: Tissue Value: Shoots vs. Whole Plant
  misc_feature: MA Experiment ID: 20000224 Result: Up-regulated in Transcription
  misc_feature: MA Experiment ID: 20000234 Result: Up-regulated in Transcription
  misc_feature: MA Experiment 20000234 PARAMETER Experiment Name: At_Siliques_P Parameter: Age (day) Value: 21
  misc_feature: MA Experiment 20000234 PARAMETER Experiment Name: At_Siliques_P Parameter: Organism Value: A. thaliana
  misc_feature: MA Experiment 20000234 PARAMETER Experiment Name: At_Siliques_P Parameter: Plant Line Value: WS
  misc_feature: MA Experiment 20000234 PARAMETER Experiment Name: At_Siliques_P Parameter: Tissue Value: Less Than 5mm Siliques vs. Whole Plant
  misc_feature: MA Experiment ID: 20000264 Result: Up-regulated in Transcription
  misc_feature: MA Experiment 20000264 PARAMETER Experiment Name: At_Open_Flower_P Parameter: Age (day) Value: 21
  misc_feature: MA Experiment 20000264 PARAMETER Experiment Name: At_Open_Flower_P Parameter: Plant Line Value: WS
  misc_feature: MA Experiment 20000264 PARAMETER Experiment Name: At_Open_Flower_P Parameter: Tissue Value: Open Flower vs. Whole Plant
  misc_feature: MA Experiment ID: 20000265 Result: Up-regulated in Transcription
  misc_feature: MA Experiment 20000265 PARAMETER Experiment Name: At_Open_Flower_P Parameter: Age (day) Value: 21
  misc_feature: MA Experiment 20000265 PARAMETER Experiment Name: At_Open_Flower_P Parameter: Plant Line Value: WS
  misc_feature: MA Experiment 20000265 PARAMETER Experiment Name: At_Open_Flower_P Parameter: Tissue Value: Closed Flower vs. Whole Plant
  misc_feature: MA Experiment ID: 20000286 Result: Up-regulated in Transcription
  misc_feature: MA Experiment 20000286 PARAMETER Experiment Name: At_Open_Flower_P Parameter: Age (day) Value: 21
  misc_feature: MA Experiment 20000286 PARAMETER Experiment Name: At_Open_Flower_P Parameter: Plant Line Value: WS
  misc_feature: MA Experiment 20000286 PARAMETER Experiment Name: At_Open_Flower_P Parameter: Tissue Value: Half Open vs. Whole Plant
  misc_feature: MA Experiment ID: 20000794 Result: Up-regulated in Transcription
  misc_feature: MA Experiment 20000794 PARAMETER Experiment Name: At_Petals_P Parameter: Age (day) Value: 23-25 days
  misc_feature: MA Experiment 20000794 PARAMETER Experiment Name: At_Petals_P Parameter: Plant Line Value: WS
  misc_feature: MA Experiment 20000794 PARAMETER Experiment Name: At_Petals_P Parameter: Tissue Value: Petals vs. Whole plant
  misc_feature: MA Experiment ID: 20001248 Result: Down-regulated in Transcription
  misc_feature: MA Experiment 20001248 PARAMETER Experiment Name: At_Far-red-induction_P Parameter: Age (day) Value: 7
  misc_feature: MA Experiment 20001248 PARAMETER Experiment Name: At_Far-red-induction_P Parameter: Light Value: Far-red vs. White
  misc_feature: MA Experiment 20001248 PARAMETER Experiment Name: At_Far-red-induction_P Parameter: Organism Value: A. thaliana
  misc_feature: MA Experiment 20001248 PARAMETER Experiment Name: At_Far-red-induction_P Parameter: Plant Line Value: Columbia
  misc_feature: MA Experiment 20001248 PARAMETER Experiment Name: At_Far-red-induction_P Parameter: Timepoint (hr) Value: 4
  misc_feature: MA Experiment 20001248 PARAMETER Experiment Name: At_Far-red-induction_P Parameter: Tissue Value: Whole Plant
  misc_feature: MA Experiment ID: 20001450 Result: Down-regulated in Transcription
  misc_feature: MA Experiment 20001450 PARAMETER Experiment Name: At_Far-red-induction_P Parameter: Age (day) Value: 7
  misc_feature: MA Experiment 20001450 PARAMETER Experiment Name: At_Far-red-induction_P Parameter: Light Value: Far-red vs. White
  misc_feature: MA Experiment 20001450 PARAMETER Experiment Name: At_Far-red-induction_P Parameter: Organism Value: A. thaliana
  misc_feature: MA Experiment 20001450 PARAMETER Experiment Name: At_Far-red-induction_P Parameter: Plant Line Value: Columbia
  misc_feature: MA Experiment 20001450 PARAMETER Experiment Name: At_Far-red-induction_P Parameter: Timepoint (hr) Value: 8
  misc_feature: MA Experiment 20001450 PARAMETER Experiment Name: At_Far-red-induction_P Parameter: Tissue Value: Whole Plant
  misc_feature: MA Experiment ID: 20001451 Result: Down-regulated in Transcription
  misc_feature: MA Experiment 20001451 PARAMETER Experiment Name: At_Far-red-induction_P Parameter: Age (day) Value: 7
  misc_feature: MA Experiment 20001451 PARAMETER Experiment Name: At_Far-red-induction_P Parameter: Light Value: Far-red vs. White
  misc_feature: MA Experiment 20001451 PARAMETER Experiment Name: At_Far-red-induction_P Parameter: Organism Value: A. thaliana
  misc_feature: MA Experiment 20001451 PARAMETER Experiment Name: At_Far-red-induction_P Parameter: Plant Line Value: Columbia
  misc_feature: MA Experiment 20001451 PARAMETER Experiment Name: At_Far-red-induction_P Parameter: Timepoint (hr) Value: 24
  misc_feature: MA Experiment 20001451 PARAMETER Experiment Name: At_Far-red-induction_P Parameter: Tissue Value: Whole Plant
aaaaactctactgtaactgcaaaatcttgttgttttcttaaacgaagagagaagaaagaaagaaaaaaacgttacggattctctgcttcggtttcgcgattgaagcttgagatttcatcttgaacatccgatatggctgaaatcaaggatgaaggaagcgccaagggctatgctttccctctcaggaaccctaatgttacgctgaatgagagaaactttgcagccttcactcacagatcagctgctgctcatccttggcatgacttggagattggtccagaagctcctactgttttcaactgtgttgttgaaattagcaaaggtggaaaggttaagtacgagctagacaagaacagtggccttattaaggttgatcgcgttctctactcatccattgtgtacccccacaactacggtttcatccctcgaactatctgtgaagacagtgatccaatggatgtcctggtactgatgcaggagcctgtgctaaccggatcattcctccgtgcccgtgctattggtctaatgcccatgattgatcagggtgagaaagacgacaagatcattgcagtatgtgctgatgatcccgagttccgtcactacagagacatcaaagagcttccccctcaccgtctagctgaaatccgtcgcttctttgaggactacaagaagaacgagaacaagaaagtcgacgttgaagctttccttcccgctcaagctgccatagacgctatcaaggactccatggatctttacgcagcttacatcaaagctggcctgcaacgctaatgaagaaaccagtccttttccgttcctcccggtttgcttagacatcactgaagccgccttctatactacatgcatgttagataaaatttcaattggtgcatttaatttcgtaatgctcatcagaaaacattgttgaacttaaagctttctgatgatgatgaaaaatttccagtacaatcataaaatttgaaatattagcttttcttttc

SEQ ID NO: 27971 - protein, 218 aa, Arabidopsis thaliana
  peptide (1)..(218): Ceres Seq. ID no. 12325549
  misc_feature (24)..(218): Homolog of NCBI NO: 40642617 NR Description: soluble pyrophosphatase [Beta vulgaris]
  misc_feature (17)..(218): Homolog of NCBI NO: 15223288 NR Description: soluble inorganic pyrophosphatase, putative
  misc_feature (5)..(218): Homolog of NCBI NO: 4033424 NR Description: Soluble inorganic pyrophosphatase (Pyrophosphate
  misc_feature (24)..(218): Homolog of NCBI NO: 2500047 NR Description: Soluble inorganic pyrophosphatase (Pyrophosphate
  misc_feature (1)..(218): Homolog of NCBI NO: 38345829 NR Description: OSJNBa0070M12.12 [Oryza sativa (japonica
  misc_feature (23)..(218): Homolog of NCBI NO: 21593570 NR Description: inorganic pyrophosphatase-like protein
  misc_feature (23)..(218): Homolog of NCBI NO: 15231849 NR Description: inorganic pyrophosphatase -like protein
  misc_feature (1)..(218): Homolog of NCBI NO: 21595532 NR Description: putative inorganic pyrophosphatase [Arabidopsis
  misc_feature (1)..(218): Homolog of NCBI NO: 15224134 NR Description: putative inorganic pyrophosphatase
  misc_feature (1)..(208): Homolog of NCBI NO: 81645 NR Description: inorganic diphosphatase (EC 3.6.1.1) -
MAEIKDEGSAKGYAFPLRNPNVTLNERNFAAFTHRSAAAHPWHDLEIGPEAPTVFNCVVEISKGGKVKYELDKNSGLIKVDRVLYSSIVYPHNYGFIPRTICEDSDPMDVLVLMQEPVLTGSFLRARAIGLMPMIDQGEKDDKIIAVCADDPEFRHYRDIKELPPHRLAEIRRFFEDYKKNENKKVDVEAFLPAQAAIDAIKDSMDLYAAYIKAGLQR

SEQ ID NO: 27972 - protein, 111 aa, Arabidopsis thaliana
  peptide (1)..(111): Ceres Seq. ID no. 12325550
  misc_feature (1)..(111): Homolog of NCBI NO: 40642617 NR Description: soluble pyrophosphatase [Beta vulgaris]
  misc_feature (1)..(111): Homolog of NCBI NO: 15223288 NR Description: soluble inorganic pyrophosphatase, putative
  misc_feature (1)..(111): Homolog of NCBI NO: 4033424 NR Description: Soluble inorganic pyrophosphatase (Pyrophosphate
  misc_feature (1)..(111): Homolog of NCBI NO: 2500047 NR Description: Soluble inorganic pyrophosphatase (Pyrophosphate
  misc_feature (1)..(111): Homolog of NCBI NO: 38345829 NR Description: OSJNBa0070M12.12 [Oryza sativa (japonica
  misc_feature (1)..(111): Homolog of NCBI NO: 21593570 NR Description: inorganic pyrophosphatase-like protein
  misc_feature (1)..(111): Homolog of NCBI NO: 15231849 NR Description: inorganic pyrophosphatase -like protein
  misc_feature (1)..(111): Homolog of NCBI NO: 21595532 NR Description: putative inorganic pyrophosphatase [Arabidopsis
  misc_feature (1)..(111): Homolog of NCBI NO: 15224134 NR Description: putative inorganic pyrophosphatase
  misc_feature (1)..(101): Homolog of NCBI NO: 81645 NR Description: inorganic diphosphatase (EC 3.6.1.1) -
MDVLVLMQEPVLTGSFLRARAIGLMPMIDQGEKDDKIIAVCADDPEFRHYRDIKELPPHRLAEIRRFFEDYKKNENKKVDVEAFLPAQAAIDAIKDSMDLYAAYIKAGLQR

SEQ ID NO: 27973 - DNA, 908 bp, Arabidopsis thaliana
  misc_feature (1)..(908): Ceres Seq. ID no. 12394059
  misc_feature: MA Experiment ID: 108488 Result: Down-regulated in Transcription
  misc_feature: MA Experiment ID: 108595 Result: Down-regulated in Transcription
  misc_feature: MA Experiment 108595 PARAMETER Experiment Name: At_Ler-pi_Ovule_cDNA_P Parameter: Plant Line Value: null
  misc_feature: MA Experiment ID: 20000227 Result: Down-regulated in Transcription
  misc_feature: MA Experiment 20000227 PARAMETER Experiment Name: At_Root-Tips-vs-Tops_P Parameter: Tissue Value: Root Tips vs. Root Tops
  misc_feature: MA Experiment ID: 20001559 Result: Down-regulated in Transcription
  misc_feature: MA Experiment 20001559 PARAMETER Experiment Name: At_Drought_Soil_Dry_P Parameter: Age (day) Value: 28
  misc_feature: MA Experiment 20001559 PARAMETER Experiment Name: At_Drought_Soil_Dry_P Parameter: Organism Value: A. thaliana
  misc_feature: MA Experiment 20001559 PARAMETER Experiment Name: At_Drought_Soil_Dry_P Parameter: Plant Line Value: WS
  misc_feature: MA Experiment 20001559 PARAMETER Experiment Name: At_Drought_Soil_Dry_P Parameter: Post Timepoint (hr) Value: 29
  misc_feature: MA Experiment 20001559 PARAMETER Experiment Name: At_Drought_Soil_Dry_P Parameter: Post-Treatment Value: Re-Water vs. No Drought
  misc_feature: MA Experiment 20001559 PARAMETER Experiment Name: At_Drought_Soil_Dry_P Parameter: Timepoint (day) Value: 14
  misc_feature: MA Experiment 20001559 PARAMETER Experiment Name: At_Drought_Soil_Dry_P Parameter: Treatment Value: Drought vs. No Drought
aaccatatcttccgatttctcttatctctctgaagccacaaatctccagattcattcgtcgtctcggttaaggttagacggagaagaagatacaacaaatatgggttagtatgaaacaaatgtcgttggtcgtctctgctttgggcgtcttatcctttgttttgggagttatcgccgagaacaagaagcctgcgtctgggactccaataagtggaaaaggagtagttatctgcaaatacccatctgatccaactgttgccttgggatacctttctgctgcttttctccttgcctgcactgtagcaggatacaaatccttgttcatctcttacaagggaaagtctgttcctaactctgtcttgttcaaaagcaccagcttctctgtgttcttcaacattgccttgataacatctggactggccttgtctctgttgctctggccaaccattacagaacaacttcacttgacccgtaatgttcaccgaaacttagaaaccagttgccccacggctaagaccggtctgcttggtggaggtgcctttgtgtctttggactcgtgccttttctggttggttgctctgatgctcgctgataacgcccgtgaagaccattttgatgaagttgaaagcagaagcatcgatgggaactcttcctccagggatgtgaatctcaagattgatgcttgagagaatgatatgcttttattggtattgggtataagaagggtttttcatttgttttctacttgtttgattaggaaaataataatttgtttcttctgttgttttttttttttttttaatgattggctagaatgttatgaaacccatctctgcaccttgatgcattgtgattcataagctgtatctgtgaaaaataatcttttggttatatctcttacatttgac

SEQ ID NO: 27974 - protein, 191 aa, Arabidopsis thaliana
  peptide (1)..(191): Ceres Seq. ID no. 12394060
  misc_feature (1)..(186): Homolog of NCBI NO: 8099143 NR Description: hypothetical protein [Oryza sativa]
  misc_feature (1)..(191): Homolog of NCBI NO: 15235839 NR Description: putative protein
MKQMSLVVSALGVLSFVLGVIAENKKPASGTPISGKGVVICKYPSDPTVALGYLSAAFLLACTVAGYKSLFISYKGKSVPNSVLFKSTSFSVFFNIALITSGLALSLLLWPTITEQLHLTRNVHRNLETSCPTAKTGLLGGGAFVSLDSCLFWLVALMLADNAREDHFDEVESRSIDGNSSSRDVNLKIDA

SEQ ID NO: 27975 - protein, 188 aa, Arabidopsis thaliana
  peptide (1)..(188): Ceres Seq. ID no. 12394061
  misc_feature (1)..(183): Homolog of NCBI NO: 8099143 NR Description: hypothetical protein [Oryza sativa]
  misc_feature (1)..(188): Homolog of NCBI NO: 15235839 NR Description: putative protein
MSLVVSALGVLSFVLGVIAENKKPASGTPISGKGVVICKYPSDPTVALGYLSAAFLLACTVAGYKSLFISYKGKSVPNSVLFKSTSFSVFFNIALITSGLALSLLLWPTITEQLHLTRNVHRNLETSCPTAKTGLLGGGAFVSLDSCLFWLVALMLADNAREDHFDEVESRSIDGNSSSRDVNLKIDA

SEQ ID NO: 27976 - DNA, 853 bp, Arabidopsis thaliana
  misc_feature (1)..(853): Ceres Seq. ID no. 12421660
  misc_feature: MA Experiment ID: 108434 Result: Down-regulated in Transcription
  misc_feature: MA Experiment 108434 PARAMETER Experiment Name: At_Root_Tips_cDNA_P Parameter: Tissue Value: Root Tips
  misc_feature: MA Experiment ID: 108573 Result: Up-regulated in Transcription
  misc_feature: MA Experiment 108573 PARAMETER Experiment Name: At_Drought_cDNA_P Parameter: Timepoint (hr) Value: 6
  misc_feature: MA Experiment 108573 PARAMETER Experiment Name: At_Drought_cDNA_P Parameter: Tissue Value: Aerial
  misc_feature: MA Experiment 108573 PARAMETER Experiment Name: At_Drought_cDNA_P Parameter: Treatment Value: Drought vs. No Drought
  misc_feature: MA Experiment ID: 108585 Result: Up-regulated in Transcription
  misc_feature: MA Experiment 108585 PARAMETER Experiment Name: At_5mM_NaNP_cDNA_P Parameter: Timepoint (hr) Value: 6
  misc_feature: MA Experiment 108585 PARAMETER Experiment Name: At_5mM_NaNP_cDNA_P Parameter: Tissue Value: Aerial
  misc_feature: MA Experiment 108585 PARAMETER Experiment Name: At_5mM_NaNP_cDNA_P Parameter: Treatment Value: null
  misc_feature: MA Experiment ID: 20000069 Result: Up-regulated in Transcription
  misc_feature: MA Experiment 20000069 PARAMETER Experiment Name: At_100uM_ABA_Mutants_cDNA_P Parameter: Plant Line Value: CS23
  misc_feature: MA Experiment 20000069 PARAMETER Experiment Name: At_100uM_ABA_Mutants_cDNA_P Parameter: Timepoint (hr) Value: 6
  misc_feature: MA Experiment 20000069 PARAMETER Experiment Name: At_100uM_ABA_Mutants_cDNA_P Parameter: Tissue Value: Aerial
  misc_feature: MA Experiment 20000069 PARAMETER Experiment Name: At_100uM_ABA_Mutants_cDNA_P Parameter: Treatment Value: 100uM ABA vs. No Treatment
  misc_feature: MA Experiment ID: 20000070 Result: Up-regulated in Transcription
  misc_feature: MA Experiment 20000070 PARAMETER Experiment Name: At_100uM_ABA_Mutants_cDNA_P Parameter: Plant Line Value: CS24
  misc_feature: MA Experiment 20000070 PARAMETER Experiment Name: At_100uM_ABA_Mutants_cDNA_P Parameter: Timepoint (hr) Value: 6
  misc_feature: MA Experiment 20000070 PARAMETER Experiment Name: At_100uM_ABA_Mutants_cDNA_P Parameter: Tissue Value: Aerial
  misc_feature: MA Experiment 20000070 PARAMETER Experiment Name: At_100uM_ABA_Mutants_cDNA_P Parameter: Treatment Value: 100uM ABA vs. No Treatment
  misc_feature: MA Experiment ID: 20000071 Result: Up-regulated in Transcription
  misc_feature: MA Experiment 20000071 PARAMETER Experiment Name: At_100uM_ABA_Mutants_cDNA_P Parameter: Plant Line Value: CS8104
  misc_feature: MA Experiment 20000071 PARAMETER Experiment Name: At_100uM_ABA_Mutants_cDNA_P Parameter: Timepoint (hr) Value: 6
  misc_feature: MA Experiment 20000071 PARAMETER Experiment Name: At_100uM_ABA_Mutants_cDNA_P Parameter: Tissue Value: Aerial
  misc_feature: MA Experiment 20000071 PARAMETER Experiment Name: At_100uM_ABA_Mutants_cDNA_P Parameter: Treatment Value: 100uM ABA vs. No Treatment
  misc_feature: MA Experiment ID: 20000117 Result: Up-regulated in Transcription
  misc_feature: MA Experiment 20000117 PARAMETER Experiment Name: At_100uM_ABA_Mutants_cDNA_P Parameter: Plant Line Value: Columbia
  misc_feature: MA Experiment 20000117 PARAMETER Experiment Name: At_100uM_ABA_Mutants_cDNA_P Parameter: Timepoint (hr) Value: 6
  misc_feature: MA Experiment 20000117 PARAMETER Experiment Name: At_100uM_ABA_Mutants_cDNA_P Parameter: Tissue Value: Aerial
  misc_feature: MA Experiment 20000117 PARAMETER Experiment Name: At_100uM_ABA_Mutants_cDNA_P Parameter: Treatment Value: 100uM ABA vs. No Treatment
  misc_feature: MA Experiment ID: 20000173 Result: Down-regulated in Transcription
  misc_feature: MA Experiment 20000173 PARAMETER Experiment Name: At_42deg_Heat_P Parameter: Age (day) Value: 14
  misc_feature: MA Experiment 20000173 PARAMETER Experiment Name: At_42deg_Heat_P Parameter: Organism Value: A. thaliana
  misc_feature: MA Experiment 20000173 PARAMETER Experiment Name: At_42deg_Heat_P Parameter: Plant Line Value: WS
  misc_feature: MA Experiment 20000173 PARAMETER Experiment Name: At_42deg_Heat_P Parameter: Temperature (deg C) Value: 42 vs. 22
  misc_feature: MA Experiment 20000173 PARAMETER Experiment Name: At_42deg_Heat_P Parameter: Timepoint (hr) Value: 6
  misc_feature: MA Experiment 20000173 PARAMETER Experiment Name: At_42deg_Heat_P Parameter: Tissue Value: Aerial
  misc_feature: MA Experiment ID: 20000224 Result: Down-regulated in Transcription
  misc_feature: MA Experiment ID: 20000227 Result: Down-regulated in Transcription
  misc_feature: MA Experiment 20000227 PARAMETER Experiment Name: At_Root-Tips-vs-Tops_P Parameter: Tissue Value: Root Tips vs. Root Tops
  misc_feature: MA Experiment ID: 20000234 Result: Down-regulated in Transcription
  misc_feature: MA Experiment 20000234 PARAMETER Experiment Name: At_Siliques_P Parameter: Age (day) Value: 21
  misc_feature: MA Experiment 20000234 PARAMETER Experiment Name: At_Siliques_P Parameter: Organism Value: A. thaliana
  misc_feature: MA Experiment 20000234 PARAMETER Experiment Name: At_Siliques_P Parameter: Plant Line Value: WS
  misc_feature: MA Experiment 20000234 PARAMETER Experiment Name: At_Siliques_P Parameter: Tissue Value: Less Than 5mm Siliques vs. Whole Plant
  misc_feature: MA Experiment ID: 20000235 Result: Down-regulated in Transcription
  misc_feature: MA Experiment 20000235 PARAMETER Experiment Name: At_Siliques_P Parameter: Age (day) Value: 21
  misc_feature: MA Experiment 20000235 PARAMETER Experiment Name: At_Siliques_P Parameter: Organism Value: A. thaliana
  misc_feature: MA Experiment 20000235 PARAMETER Experiment Name: At_Siliques_P Parameter: Plant Line Value: WS
  misc_feature: MA Experiment 20000235 PARAMETER Experiment Name: At_Siliques_P Parameter: Tissue Value: 5-10mm Siliques vs. Whole Plant
  misc_feature: MA Experiment ID: 20000264 Result: Down-regulated in Transcription
  misc_feature: MA Experiment 20000264 PARAMETER Experiment Name: At_Open_Flower_P Parameter: Age (day) Value: 21
  misc_feature: MA Experiment 20000264 PARAMETER Experiment Name: At_Open_Flower_P Parameter: Plant Line Value: WS
  misc_feature: MA Experiment 20000264 PARAMETER Experiment Name: At_Open_Flower_P Parameter: Tissue Value: Open Flower vs. Whole Plant
  misc_feature: MA Experiment ID: 20000437 Result: Up-regulated in Transcription
  misc_feature: MA Experiment 20000437 PARAMETER Experiment Name: At_Drought_P Parameter: Age (day) Value: 8
  misc_feature: MA Experiment 20000437 PARAMETER Experiment Name: At_Drought_P Parameter: Organism Value: A. thaliana
  misc_feature: MA Experiment 20000437 PARAMETER Experiment Name: At_Drought_P Parameter: Plant Line Value: WS
  misc_feature: MA Experiment 20000437 PARAMETER Experiment Name: At_Drought_P Parameter: Timepoint (hr) Value: 24
  misc_feature: MA Experiment 20000437 PARAMETER Experiment Name: At_Drought_P Parameter: Tissue Value: Whole Plant
  misc_feature: MA Experiment 20000437 PARAMETER Experiment Name: At_Drought_P Parameter: Treatment Value: Drought vs. No Drought
  misc_feature: MA Experiment ID: 20000794 Result: Down-regulated in Transcription
  misc_feature: MA Experiment 20000794 PARAMETER Experiment Name: At_Petals_P Parameter: Age (day) Value: 23-25 days
  misc_feature: MA Experiment 20000794 PARAMETER Experiment Name: At_Petals_P Parameter: Plant Line Value: WS
  misc_feature: MA Experiment 20000794 PARAMETER Experiment Name: At_Petals_P Parameter: Tissue Value: Petals vs. Whole plant
  misc_feature: MA Experiment ID: 20001247 Result: Up-regulated in Transcription
  misc_feature: MA Experiment 20001247 PARAMETER Experiment Name: At_Far-red-induction_P Parameter: Age (day) Value: 7
  misc_feature: MA Experiment 20001247 PARAMETER Experiment Name: At_Far-red-induction_P Parameter: Light Value: Far-red vs. White
  misc_feature: MA Experiment 20001247 PARAMETER Experiment Name: At_Far-red-induction_P Parameter: Organism Value: A. thaliana
  misc_feature: MA Experiment 20001247 PARAMETER Experiment Name: At_Far-red-induction_P Parameter: Plant Line Value: Columbia
  misc_feature: MA Experiment 20001247 PARAMETER Experiment Name: At_Far-red-induction_P Parameter: Timepoint (hr) Value: 1
  misc_feature: MA Experiment 20001247 PARAMETER Experiment Name: At_Far-red-induction_P Parameter: Tissue Value: Whole Plant
  misc_feature: MA Experiment ID: 20001248 Result: Up-regulated in Transcription
  misc_feature: MA Experiment 20001248 PARAMETER Experiment Name: At_Far-red-induction_P Parameter: Age (day) Value: 7
  misc_feature: MA Experiment 20001248 PARAMETER Experiment Name: At_Far-red-induction_P Parameter: Light Value: Far-red vs. White
  misc_feature: MA Experiment 20001248 PARAMETER Experiment Name: At_Far-red-induction_P Parameter: Organism Value: A. thaliana
  misc_feature: MA Experiment 20001248 PARAMETER Experiment Name: At_Far-red-induction_P Parameter: Plant Line Value: Columbia
  misc_feature: MA Experiment 20001248 PARAMETER Experiment Name: At_Far-red-induction_P Parameter: Timepoint (hr) Value: 4
  misc_feature: MA Experiment 20001248 PARAMETER Experiment Name: At_Far-red-induction_P Parameter: Tissue Value: Whole Plant
  misc_feature: MA Experiment ID: 20001450 Result: Up-regulated in Transcription
  misc_feature: MA Experiment 20001450 PARAMETER Experiment Name: At_Far-red-induction_P Parameter: Age (day) Value: 7
  misc_feature: MA Experiment 20001450 PARAMETER Experiment Name: At_Far-red-induction_P Parameter: Light Value: Far-red vs. White
  misc_feature: MA Experiment 20001450 PARAMETER Experiment Name: At_Far-red-induction_P Parameter: Organism Value: A. thaliana
  misc_feature: MA Experiment 20001450 PARAMETER Experiment Name: At_Far-red-induction_P Parameter: Plant Line Value: Columbia
  misc_feature: MA Experiment 20001450 PARAMETER Experiment Name: At_Far-red-induction_P Parameter: Timepoint (hr) Value: 8
  misc_feature: MA Experiment 20001450 PARAMETER Experiment Name: At_Far-red-induction_P Parameter: Tissue Value: Whole Plant
  misc_feature: Phenotype: ROSETTE LEAVES Curled-Curled 4
  misc_feature: Phenotype: WHOLE PLANT Size-Small
  misc_feature: Phenotype: INFLORESCENCE Height-Short
  misc_feature: Phenotype: FERTILITY Fertility-Reduced
  misc_feature: Phenotype: ROSETTE LEAVES Curled-Curled 4
  misc_feature: Phenotype: WHOLE PLANT Size-Small
  misc_feature: Phenotype: INFLORESCENCE Branching-Reduced Apical Dominance
  misc_feature: Phenotype: INFLORESCENCE Height-Short
  misc_feature: Phenotype: ROSETTE LEAVES Curled-Curled 4
  misc_feature: Phenotype: WHOLE PLANT Size-Small
cacgggagattttttcttcttctccacttttcgccaccatttcttctccttctctttctctctctctatctaaattcggtggaaggtccaacctcagactatgaccggcggagactggattcacgaggctatgggtgatgattcattagtggcggaggctctgatctgtctcctccatgccgagccgtcacttcctgacacgaagagcggcggcgcgtcggatctcaagctgaagtggagcgtgcgtcagcggaggaccaaggcggcgacgttaaggaagaagggagatcatgatacgcgtgctagtcccacgaccccactttcatggagcggcgcaacctcttttagcggcggtggaggcggtgctgctgctgccgttgatggatttgaggagtcaagtggcgttgtgaaactgtctgaggccgttagatctaagataactcaaacgagtgttacaacaagccctttcaagagatcaagaaagaaaaagacacttgctcaacttaaagaggaggagagtgtgctcttaaaggaaaggaatggcttgagaaatgaactcgcaactatgcaggatctgctcaagcaacaaagagcaagaaatgagtctttaaagaaactccaggctgagtcacaaaagaatgatgattcctccttcttgctccctgaccttaatatagctctggataacaactcgagccctgaaagtctctatggaaccagctgatatataactacgacacaattttcacatcaatattcttttgtcagtgacacgttctctagactacgcgtaactatgtaactatacgatttggataagaatttatagataggtaatagtcgtcccctttcc

SEQ ID NO: 27977 - protein, 207 aa, Arabidopsis thaliana
  peptide (1)..(207): Ceres Seq. ID no. 12421661
  misc_feature (5)..(176): Homolog of NCBI NO: 15236647 NR Description: putative protein
  misc_feature (1)..(113): Homolog of NCBI NO: 25406677 NR Description: hypothetical protein T21F11.6 [imported] -
  misc_feature (113)..(207): Homolog of NCBI NO: 15218326 NR Description: hypothetical protein; protein id: At1g15800.1
  misc_feature (1)..(191): Homolog of NCBI NO: 15218326 NR Description: hypothetical protein; protein id: At1g15800.1
  misc_feature (1)..(201): Homolog of NCBI NO: 22330774 NR Description: hypothetical protein
  misc_feature (113)..(207): Homolog of NCBI NO: 25402801 NR Description: protein F7H2.14 [imported] - Arabidopsis thaliana
  misc_feature (1)..(113): Homolog of NCBI NO: 25402801 NR Description: protein F7H2.14 [imported] - Arabidopsis thaliana
MTGGDWIHEAMGDDSLVAEALICLLHAEPSLPDTKSGGASDLKLKWSVRQRRTKAATLRKKGDHDTRASPTTPLSWSGATSFSGGGGGAAAAVDGFEESSGVVKLSEAVRSKITQTSVTTSPFKRSRKKKTLAQLKEEESVLLKERNGLRNELATMQDLLKQQRARNESLKKLQAESQKNDDSSFLLPDLNIALDNNSSPESLYGTS

SEQ ID NO: 27978 - protein, 197 aa, Arabidopsis thaliana
  peptide (1)..(197): Ceres Seq. ID no. 12421662
  misc_feature (1)..(166): Homolog of NCBI NO: 15236647 NR Description: putative protein
  misc_feature (1)..(103): Homolog of NCBI NO: 25406677 NR Description: hypothetical protein T21F11.6 [imported] -
  misc_feature (103)..(197): Homolog of NCBI NO: 15218326 NR Description: hypothetical protein; protein id: At1g15800.1
  misc_feature (1)..(181): Homolog of NCBI NO: 15218326 NR Description: hypothetical protein; protein id: At1g15800.1
  misc_feature (1)..(191): Homolog of NCBI NO: 22330774 NR Description: hypothetical protein
  misc_feature (103)..(197): Homolog of NCBI NO: 25402801 NR Description: protein F7H2.14 [imported] - Arabidopsis thaliana
  misc_feature (1)..(103): Homolog of NCBI NO: 25402801 NR Description: protein F7H2.14 [imported] - Arabidopsis thaliana
MGDDSLVAEALICLLHAEPSLPDTKSGGASDLKLKWSVRQRRTKAATLRKKGDHDTRASPTTPLSWSGATSFSGGGGGAAAAVDGFEESSGVVKLSEAVRSKITQTSVTTSPFKRSRKKKTLAQLKEEESVLLKERNGLRNELATMQDLLKQQRARNESLKKLQAESQKNDDSSFLLPDLNIALDNNSSPESLYGTS

SEQ ID NO: 27979 - DNA, 692 bp, Arabidopsis thaliana
  misc_feature (1)..(692): Ceres Seq. ID no. 12340023
  misc_feature: MA Experiment ID: 108434 Result: Down-regulated in Transcription
  misc_feature: MA Experiment 108434 PARAMETER Experiment Name: At_Root_Tips_cDNA_P Parameter: Tissue Value: Root Tips
  misc_feature: MA Experiment ID: 108435 Result: Down-regulated in Transcription
  misc_feature: MA Experiment 108435 PARAMETER Experiment Name: At_stm_Mutants_cDNA_P Parameter: Plant Line Value: wt Landsburg vs stm
  misc_feature: MA Experiment 108435 PARAMETER Experiment Name: At_stm_Mutants_cDNA_P Parameter: Tissue Value: Shoot Apical Meristem Region
  misc_feature: MA Experiment ID: 108461 Result: Up-regulated in Transcription
  misc_feature: MA Experiment 108461 PARAMETER Experiment Name: At_Germinating_Seeds_cDNA_P Parameter: Age (day) Value: 1 vs. 0
  misc_feature: MA Experiment 108461 PARAMETER Experiment Name: At_Germinating_Seeds_cDNA_P Parameter: Tissue Value: Germinating Seeds
  misc_feature: MA Experiment ID: 108462 Result: Up-regulated in Transcription
  misc_feature: MA Experiment 108462 PARAMETER Experiment Name: At_Germinating_Seeds_cDNA_P Parameter: Age (day) Value: 2 vs. 0
  misc_feature: MA Experiment 108462 PARAMETER Experiment Name: At_Germinating_Seeds_cDNA_P Parameter: Tissue Value: Germinating Seeds
  misc_feature: MA Experiment ID: 108464 Result: Up-regulated in Transcription
  misc_feature: MA Experiment 108464 PARAMETER Experiment Name: At_Germinating_Seeds_cDNA_P Parameter: Age (day) Value: 4 vs. 0
  misc_feature: MA Experiment 108464 PARAMETER Experiment Name: At_Germinating_Seeds_cDNA_P Parameter: Tissue Value: Germinating Seeds
  misc_feature: MA Experiment ID: 108488 Result: Up-regulated in Transcription
  misc_feature: MA Experiment ID: 20000180 Result: Up-regulated in Transcription
  misc_feature: MA Experiment 20000180 PARAMETER Experiment Name: At_Germinating_Seeds_P Parameter: Age (hr) Value: 24 vs. 0
  misc_feature: MA Experiment 20000180 PARAMETER Experiment Name: At_Germinating_Seeds_P Parameter: Tissue Value: Germinating Seeds
  misc_feature: MA Experiment ID: 20000185 Result: Down-regulated in Transcription
  misc_feature: MA Experiment 20000185 PARAMETER Experiment Name: At_Roots__P Parameter: Age (day) Value: 7 vs. 21
  misc_feature: MA Experiment 20000185 PARAMETER Experiment Name: At_Roots__P Parameter: Organism Value: A. thaliana
  misc_feature: MA Experiment 20000185 PARAMETER Experiment Name: At_Roots__P Parameter: Tissue Value: Roots vs. Whole Plant
  misc_feature: MA Experiment ID: 20000264 Result: Down-regulated in Transcription
  misc_feature: MA Experiment 20000264 PARAMETER Experiment Name: At_Open_Flower_P Parameter: Age (day) Value: 21
  misc_feature: MA Experiment 20000264 PARAMETER Experiment Name: At_Open_Flower_P Parameter: Plant Line Value: WS
  misc_feature: MA Experiment 20000264 PARAMETER Experiment Name: At_Open_Flower_P Parameter: Tissue Value: Open Flower vs. Whole Plant
  misc_feature: MA Experiment ID: 20000286 Result: Down-regulated in Transcription
  misc_feature: MA Experiment 20000286 PARAMETER Experiment Name: At_Open_Flower_P Parameter: Age (day) Value: 21
  misc_feature: MA Experiment 20000286 PARAMETER Experiment Name: At_Open_Flower_P Parameter: Plant Line Value: WS
  misc_feature: MA Experiment 20000286 PARAMETER Experiment Name: At_Open_Flower_P Parameter: Tissue Value: Half Open vs. Whole Plant
  misc_feature: MA Experiment ID: 20000438 Result: Up-regulated in Transcription
  misc_feature: MA Experiment 20000438 PARAMETER Experiment Name: At_Shoots__P Parameter: Age (day) Value: 14
  misc_feature: MA Experiment 20000438 PARAMETER Experiment Name: At_Shoots__P Parameter: Tissue Value: Shoots vs. Whole Plant
  misc_feature: MA Experiment ID: 20000439 Result: Down-regulated in Transcription
  misc_feature: MA Experiment 20000439 PARAMETER Experiment Name: At_Roots__P Parameter: Age (day) Value: 14 vs. 21
  misc_feature: MA Experiment 20000439 PARAMETER Experiment Name: At_Roots__P Parameter: Organism Value: A. thaliana
  misc_feature: MA Experiment 20000439 PARAMETER Experiment Name: At_Roots__P Parameter: Tissue Value: Roots vs. Whole Plant
  misc_feature: MA Experiment ID: 20000794 Result: Down-regulated in Transcription
  misc_feature: MA Experiment 20000794 PARAMETER Experiment Name: At_Petals_P Parameter: Age (day) Value: 23-25 days
  misc_feature: MA Experiment 20000794 PARAMETER Experiment Name: At_Petals_P Parameter: Plant Line Value: WS
  misc_feature: MA Experiment 20000794 PARAMETER Experiment Name: At_Petals_P Parameter: Tissue Value: Petals vs. Whole plant
  misc_feature: MA Experiment ID: 20001451 Result: Down-regulated in Transcription
  misc_feature: MA Experiment 20001451 PARAMETER Experiment Name: At_Far-red-induction_P Parameter: Age (day) Value: 7
  misc_feature: MA Experiment 20001451 PARAMETER Experiment Name: At_Far-red-induction_P Parameter: Light Value: Far-red vs. White
  misc_feature: MA Experiment 20001451 PARAMETER Experiment Name: At_Far-red-induction_P Parameter: Organism Value: A. thaliana
  misc_feature: MA Experiment 20001451 PARAMETER Experiment Name: At_Far-red-induction_P Parameter: Plant Line Value: Columbia
  misc_feature: MA Experiment 20001451 PARAMETER Experiment Name: At_Far-red-induction_P Parameter: Timepoint (hr) Value: 24
  misc_feature: MA Experiment 20001451 PARAMETER Experiment Name: At_Far-red-induction_P Parameter: Tissue Value: Whole Plant
  misc_feature: MA Experiment ID: 20001557 Result: Down-regulated in Transcription
  misc_feature: MA Experiment 20001557 PARAMETER Experiment Name: At_Drought_Soil_Dry_P Parameter: Age (day) Value: 27
  misc_feature: MA Experiment 20001557 PARAMETER Experiment Name: At_Drought_Soil_Dry_P Parameter: Organism Value: A. thaliana
  misc_feature: MA Experiment 20001557 PARAMETER Experiment Name: At_Drought_Soil_Dry_P Parameter: Plant Line Value: WS
  misc_feature: MA Experiment 20001557 PARAMETER Experiment Name: At_Drought_Soil_Dry_P Parameter: Post Timepoint (hr) Value: 3
  misc_feature: MA Experiment 20001557 PARAMETER Experiment Name: At_Drought_Soil_Dry_P Parameter: Post-Treatment Value: Re-Water vs. No Drought
  misc_feature: MA Experiment 20001557 PARAMETER Experiment Name: At_Drought_Soil_Dry_P Parameter: Timepoint (day) Value: 13
  misc_feature: MA Experiment 20001557 PARAMETER Experiment Name: At_Drought_Soil_Dry_P Parameter: Treatment Value: Drought vs. No Drought
  misc_feature: MA Experiment ID: 20001757 Result: Up-regulated in Transcription
  misc_feature: MA Experiment 20001757 PARAMETER Experiment Name: At_50mM_NH4NO3_L-to-H_P Parameter: Timepoint (hr) Value: 6
  misc_feature: MA Experiment 20001757 PARAMETER Experiment Name: At_50mM_NH4NO3_L-to-H_P Parameter: Tissue Value: Leaf
  misc_feature: MA Experiment 20001757 PARAMETER Experiment Name: At_50mM_NH4NO3_L-to-H_P Parameter: Treatment Value: 50mM NH4NO3 vs 100mM Mannitol
  misc_feature: MA Experiment ID: 20001905 Result: Down-regulated in Transcription
  misc_feature: MA Experiment 20001905 PARAMETER Experiment Name: At_Drought_Reproduction_P Parameter: Age (day) Value: 40
  misc_feature: MA Experiment 20001905 PARAMETER Experiment Name: At_Drought_Reproduction_P Parameter: Organism Value: A. thaliana
  misc_feature: MA Experiment 20001905 PARAMETER Experiment Name: At_Drought_Reproduction_P Parameter: Plant Line Value: WS
  misc_feature: MA Experiment 20001905 PARAMETER Experiment Name: At_Drought_Reproduction_P Parameter: Timepoint (day) Value: 10
  misc_feature: MA Experiment 20001905 PARAMETER Experiment Name: At_Drought_Reproduction_P Parameter: Tissue Value: Rosettes
  misc_feature: MA Experiment 20001905 PARAMETER Experiment Name: At_Drought_Reproduction_P Parameter: Treatment Value: Drought vs. No Drought
  misc_feature: MA Experiment ID: 20001906 Result: Down-regulated in Transcription
  misc_feature: MA Experiment 20001906 PARAMETER Experiment Name: At_Drought_Reproduction_P Parameter: Age (day) Value: 35
  misc_feature: MA Experiment 20001906 PARAMETER Experiment Name: At_Drought_Reproduction_P Parameter: Organism Value: A. thaliana
  misc_feature: MA Experiment 20001906 PARAMETER Experiment Name: At_Drought_Reproduction_P Parameter: Plant Line Value: WS
  misc_feature: MA Experiment 20001906 PARAMETER Experiment Name: At_Drought_Reproduction_P Parameter: Timepoint (day) Value: 5
  misc_feature: MA Experiment 20001906 PARAMETER Experiment Name: At_Drought_Reproduction_P Parameter: Tissue Value: Siliques
  misc_feature: MA Experiment 20001906 PARAMETER Experiment Name: At_Drought_Reproduction_P Parameter: Treatment Value: Drought vs. No Drought
  misc_feature: MA Experiment ID: 20001908 Result: Down-regulated in Transcription
  misc_feature: MA Experiment 20001908 PARAMETER Experiment Name: At_Drought_Reproduction_P Parameter: Age (day) Value: 40
  misc_feature: MA Experiment 20001908 PARAMETER Experiment Name: At_Drought_Reproduction_P Parameter: Organism Value: A. thaliana
  misc_feature: MA Experiment 20001908 PARAMETER Experiment Name: At_Drought_Reproduction_P Parameter: Plant Line Value: WS
  misc_feature: MA Experiment 20001908 PARAMETER Experiment Name: At_Drought_Reproduction_P Parameter: Timepoint (day) Value: 10
  misc_feature: MA Experiment 20001908 PARAMETER Experiment Name: At_Drought_Reproduction_P Parameter: Tissue Value: Siliques
  misc_feature: MA Experiment 20001908 PARAMETER Experiment Name: At_Drought_Reproduction_P Parameter: Treatment Value: Drought vs. No Drought
gaaatttttcttagagaagaagaagaagaggcaaaatggccacaagcgcatcagctttgctctcaccaaccacattctccactgcaatctcccacaaaaaccctaactccatctcattccatggccttcgtcccctccgtggctcctcctccgccctacccaaactatcaaccaccgggagaaaatcctcctccactgtcgtgagagctgagctaagcccttccatcgtcataagtctcagcacaggtctctccctcttcctcggtcgtttcgtcttcttcaacttccagagagagaacgtagcaaaacagggcttaccggagcagaacggaaaaacccatttcgaagctggagatgatcgtgctaaggagtacgtcagtctcttgaaatcgaacgatccaattggattcaacattgttgatgttcttgcttggggttctattggacacatcgttgcttactacatcttggctacttccagcaatggatacgacccaagcttctttggatgattcgtttcaatgtcaatctctcgtatatgtatatgtatatgtttgacttgtgttgcaagctatctaatctgttctctatctctgtttcttcttctgttgttgttgttgttgtctaagacttgtccctctttttgcaaatgttttatttctccatttacaaatattggtttgcagagtttt

SEQ ID NO: 27980 - protein, 158 aa, Arabidopsis thaliana
  peptide (1)..(158): Ceres Seq. ID no. 12340024
  misc_feature (59)..(154): Pfam Name: Photosystem I psaG / psaK Pfam Description: Photosystem I psaG / psaK
  misc_feature (59)..(97): Homolog of NCBI NO: 131193 NR Description: Photosystem I reaction center subunit V (PSI-G)
  misc_feature (32)..(149): Homolog of NCBI NO: 131191 NR Description: Photosystem I reaction center subunit V, precursor (PSI-G) (Light-harvesting complex I 10 kDa protein)
  misc_feature (50)..(153): Homolog of NCBI NO: 17369611 NR Description: Photosystem I reaction center subunit V,
  misc_feature (1)..(158): Homolog of NCBI NO: 131192 NR Description: Photosystem I reaction center subunit V,
  misc_feature (20)..(157): Homolog of NCBI NO: 131194 NR Description: Photosystem I reaction center subunit V,
  misc_feature (1)..(158): Homolog of NCBI NO: 15222757 NR Description: photosystem I subunit V precursor, putative
MATSASALLSPTTFSTAISHKNPNSISFHGLRPLRGSSSALPKLSTTGRKSSSTVVRAELSPSIVISLSTGLSLFLGRFVFFNFQRENVAKQGLPEQNGKTHFEAGDDRAKEYVSLLKSNDPIGFNIVDVLAWGSIGHIVAYYILATSSNGYDPSFFG

SEQ ID NO: 27981 - DNA, 837 bp, Arabidopsis thaliana
  misc_feature (1)..(837): Ceres Seq. ID no. 12423298
  misc_feature: MA Experiment ID: 20000173 Result: Up-regulated in Transcription
  misc_feature: MA Experiment 20000173 PARAMETER Experiment Name: At_42deg_Heat_P Parameter: Age (day) Value: 14
  misc_feature: MA Experiment 20000173 PARAMETER Experiment Name: At_42deg_Heat_P Parameter: Organism Value: A. thaliana
  misc_feature: MA Experiment 20000173 PARAMETER Experiment Name: At_42deg_Heat_P Parameter: Plant Line Value: WS
  misc_feature: MA Experiment 20000173 PARAMETER Experiment Name: At_42deg_Heat_P Parameter: Temperature (deg C) Value: 42 vs. 22
  misc_feature: MA Experiment 20000173 PARAMETER Experiment Name: At_42deg_Heat_P Parameter: Timepoint (hr) Value: 6
  misc_feature: MA Experiment 20000173 PARAMETER Experiment Name: At_42deg_Heat_P Parameter: Tissue Value: Aerial
accaaaatcagcggagcaaaagttacttccgaaaccctaaaaaaaacacgatgatgctcaagcaagctgcgaagaaggctctagggcttacgtcacgtcaatcaacaccgtggtctgttagtatcttccgaacctaccatgagaacgtcatcgaccactacgataatccccgcaacgttgggtctttcgataagaatgatcccaacgttggcacgggactcgtaggagctcccgcttgtggtgatgtgatgaagcttcaaatcaaggtcgatgagaagactggtcaaatcgttgatgctcgctttaagacttttggttgtggttcagctatcgcttcttcatctgttgccactgaatgggtgaaaggcaaagctatggaggatgttctgaccatcaaaaacaccgaaatcgcaaagcatctttctctcccaccagtcaagctccactgcagtatgttggcggaggacgctatcaaggcagctgtgaaagactacaaggagaagcgtgtgaagacaaatggtgctgcagcagcaggagaaaccacacaggcttgattccttttactagtgtgtataccataatgtgtatatgatggtgaaaacaggggagaagtagaagaggatgatacatacaacctatggtatgttgtaatgttcaagacttaaggagtattttagaataaactctgttcacagaaacgtgtaagaatgattttgctttggccctgtagtttttgctgttttatgcaccgatgtgatgtaatgttttctctcttctttgggaggtttataaattacaactttgacagacaaattttcaattttcaattttgacatt

SEQ ID NO: 27982 - protein, 183 aa, Arabidopsis thaliana
  peptide (1)..(183): Ceres Seq. ID no. 12423299
  misc_feature (44)..(171): Pfam Name: NifU-like N terminal domain Pfam Description: NifU-like N terminal domain
  misc_feature (45)..(177): Homolog of NCBI NO: 33592862 NR Description: [Fe-S] cluster formation/repair protein
  misc_feature (19)..(168): Homolog of NCBI NO: 21313484 NR Description: RIKEN cDNA 2310020H20 [Mus musculus]
  misc_feature (19)..(168): Homolog of NCBI NO: 20381021 NR Description: RIKEN cDNA 2310020H20 gene [Mus musculus]
  misc_feature (43)..(175): Homolog of NCBI NO: 11545707 NR Description: ISCU2 [Homo sapiens]
  misc_feature (43)..(176): Homolog of NCBI NO: 16798388 NR Description: iron-sulfur cluster assembly protein IscU
  misc_feature (18)..(170): Homolog of NCBI NO: 34912076 NR Description: putative nifU-like protein
  misc_feature (17)..(183): Homolog of NCBI NO: 15232028 NR Description: unknown protein; protein id: At3g01020.1
  misc_feature (18)..(183): Homolog of NCBI NO: 15233385 NR Description: putative NifU-like metallocluster assembly factor
  misc_feature (17)..(183): Homolog of NCBI NO: 15235569 NR Description: nifU-like protein
  misc_feature (18)..(183): Homolog of NCBI NO: 21595581 NR Description: nifU-like protein [Arabidopsis thaliana]
QNQRSKSYFRNPKKNTMMLKQAAKKALGLTSRQSTPWSVSIFRTYHENVIDHYDNPRNVGSFDKNDPNVGTGLVGAPACGDVMKLQIKVDEKTGQIVDARFKTFGCGSAIASSSVATEWVKGKAMEDVLTIKNTEIAKHLSLPPVKLHCSMLAEDAIKAAVKDYKEKRVKTNGAAAAGETTQA

SEQ ID NO: 27983 - protein, 167 aa, Arabidopsis thaliana
  peptide (1)..(167): Ceres Seq. ID no. 12423300
  misc_feature (28)..(155): Pfam Name: NifU-like N terminal domain Pfam Description: NifU-like N terminal domain
  misc_feature (29)..(161): Homolog of NCBI NO: 33592862 NR Description: [Fe-S] cluster formation/repair protein
  misc_feature (3)..(152): Homolog of NCBI NO: 21313484 NR Description: RIKEN cDNA 2310020H20 [Mus musculus]
  misc_feature (3)..(152): Homolog of NCBI NO: 20381021 NR Description: RIKEN cDNA 2310020H20 gene [Mus musculus]
  misc_feature (27)..(159): Homolog of NCBI NO: 11545707 NR Description: ISCU2 [Homo sapiens]
  misc_feature (27)..(160): Homolog of NCBI NO: 16798388 NR Description: iron-sulfur cluster assembly protein IscU
  misc_feature (2)..(154): Homolog of NCBI NO: 34912076 NR Description: putative nifU-like protein
  misc_feature (1)..(167): Homolog of NCBI NO: 15232028 NR Description: unknown protein; protein id: At3g01020.1
  misc_feature (2)..(167): Homolog of NCBI NO: 15233385 NR Description: putative NifU-like metallocluster assembly factor
  misc_feature (1)..(167): Homolog of NCBI NO: 15235569 NR Description: nifU-like protein
  misc_feature (2)..(167): Homolog of NCBI NO: 21595581 NR Description: nifU-like protein [Arabidopsis thaliana]
MMLKQAAKKALGLTSRQSTPWSVSIFRTYHENVIDHYDNPRNVGSFDKNDPNVGTGLVGAPACGDVMKLQIKVDEKTGQIVDARFKTFGCGSAIASSSVATEWVKGKAMEDVLTIKNTEIAKHLSLPPVKLHCSMLAEDAIKAAVKDYKEKRVKTNGAAAAGETTQA

SEQ ID NO: 27984 - protein, 166 aa, Arabidopsis thaliana
  peptide (1)..(166): Ceres Seq. ID no. 12423301
  misc_feature (27)..(154): Pfam Name: NifU-like N terminal domain Pfam Description: NifU-like N terminal domain
  misc_feature (28)..(160): Homolog of NCBI NO: 33592862 NR Description: [Fe-S] cluster formation/repair protein
  misc_feature (2)..(151): Homolog of NCBI NO: 21313484 NR Description: RIKEN cDNA 2310020H20 [Mus musculus]
  misc_feature (2)..(151): Homolog of NCBI NO: 20381021 NR Description: RIKEN cDNA 2310020H20 gene [Mus musculus]
  misc_feature (26)..(158): Homolog of NCBI NO: 11545707 NR Description: ISCU2 [Homo sapiens]
  misc_feature (26)..(159): Homolog of NCBI NO: 16798388 NR Description: iron-sulfur cluster assembly protein IscU
  misc_feature (1)..(153): Homolog of NCBI NO: 34912076 NR Description: putative nifU-like protein
  misc_feature (1)..(166): Homolog of NCBI NO: 15232028 NR Description: unknown protein; protein id: At3g01020.1
  misc_feature (1)..(166): Homolog of NCBI NO: 15233385 NR Description: putative NifU-like metallocluster assembly factor
  misc_feature (1)..(166): Homolog of NCBI NO: 15235569 NR Description: nifU-like protein
  misc_feature (1)..(166): Homolog of NCBI NO: 21595581 NR Description: nifU-like protein [Arabidopsis thaliana]
MLKQAAKKALGLTSRQSTPWSVSIFRTYHENVIDHYDNPRNVGSFDKNDPNVGTGLVGAPACGDVMKLQIKVDEKTGQIVDARFKTFGCGSAIASSSVATEWVKGKAMEDVLTIKNTEIAKHLSLPPVKLHCSMLAEDAIKAAVKDYKEKRVKTNGAAAAGETTQA

SEQ ID NO: 27985 - DNA, 911 bp, Arabidopsis thaliana
  misc_feature (1)..(911): Ceres Seq. ID no. 13486631
  misc_feature: MA Experiment ID: 108434 Result: Down-regulated in Transcription
  misc_feature: MA Experiment 108434 PARAMETER Experiment Name: At_Root_Tips_cDNA_P Parameter: Tissue Value: Root Tips
  misc_feature: MA Experiment ID: 108462 Result: Up-regulated in Transcription
  misc_feature: MA Experiment 108462 PARAMETER Experiment Name: At_Germinating_Seeds_cDNA_P Parameter: Age (day) Value: 2 vs. 0
  misc_feature: MA Experiment 108462 PARAMETER Experiment Name: At_Germinating_Seeds_cDNA_P Parameter: Tissue Value: Germinating Seeds
  misc_feature: MA Experiment ID: 108463 Result: Up-regulated in Transcription
  misc_feature: MA Experiment 108463 PARAMETER Experiment Name: At_Germinating_Seeds_cDNA_P Parameter: Age (day) Value: 3 vs. 0
  misc_feature: MA Experiment 108463 PARAMETER Experiment Name: At_Germinating_Seeds_cDNA_P Parameter: Tissue Value: Germinating Seeds
  misc_feature: MA Experiment ID: 108464 Result: Up-regulated in Transcription
  misc_feature: MA Experiment 108464 PARAMETER Experiment Name: At_Germinating_Seeds_cDNA_P Parameter: Age (day) Value: 4 vs. 0
  misc_feature: MA Experiment 108464 PARAMETER Experiment Name: At_Germinating_Seeds_cDNA_P Parameter: Tissue Value: Germinating Seeds
  misc_feature: MA Experiment ID: 108572 Result: Up-regulated in Transcription
  misc_feature: MA Experiment 108572 PARAMETER Experiment Name: At_Drought_cDNA_P Parameter: Timepoint (hr) Value: 1
  misc_feature: MA Experiment 108572 PARAMETER Experiment Name: At_Drought_cDNA_P Parameter: Tissue Value: Aerial
  misc_feature: MA Experiment 108572 PARAMETER Experiment Name: At_Drought_cDNA_P Parameter: Treatment Value: Drought vs. No Drought
  misc_feature: MA Experiment ID: 108573 Result: Up-regulated in Transcription
  misc_feature: MA Experiment 108573 PARAMETER Experiment Name: At_Drought_cDNA_P Parameter: Timepoint (hr) Value: 6
  misc_feature: MA Experiment 108573 PARAMETER Experiment Name: At_Drought_cDNA_P Parameter: Tissue Value: Aerial
  misc_feature: MA Experiment 108573 PARAMETER Experiment Name: At_Drought_cDNA_P Parameter: Treatment Value: Drought vs. No Drought
  misc_feature: MA Experiment ID: 20000224 Result: Up-regulated in Transcription
  misc_feature: MA Experiment ID: 20000227 Result: Down-regulated in Transcription
  misc_feature: MA Experiment 20000227 PARAMETER Experiment Name: At_Root-Tips-vs-Tops_P Parameter: Tissue Value: Root Tips vs. Root Tops
  misc_feature: MA Experiment ID: 20000265 Result: Down-regulated in Transcription
  misc_feature: MA Experiment 20000265 PARAMETER Experiment Name: At_Open_Flower_P Parameter: Age (day) Value: 21
  misc_feature: MA Experiment 20000265 PARAMETER Experiment Name: At_Open_Flower_P Parameter: Plant Line Value: WS
  misc_feature: MA Experiment 20000265 PARAMETER Experiment Name: At_Open_Flower_P Parameter: Tissue Value: Closed Flower vs. Whole Plant
  misc_feature: MA Experiment ID: 20000527 Result: Down-regulated in Transcription
  misc_feature: MA Experiment 20000527 PARAMETER Experiment Name: At_10percent_PEG_P Parameter: Age (day) Value: 20
  misc_feature: MA Experiment 20000527 PARAMETER Experiment Name: At_10percent_PEG_P Parameter: Organism Value: A. thaliana
  misc_feature: MA Experiment 20000527 PARAMETER Experiment Name: At_10percent_PEG_P Parameter: Plant Line Value: WS
  misc_feature: MA Experiment 20000527 PARAMETER Experiment Name: At_10percent_PEG_P Parameter: Timepoint (day) Value: 20
  misc_feature: MA Experiment 20000527 PARAMETER Experiment Name: At_10percent_PEG_P Parameter: Tissue Value: Whole Plant
  misc_feature: MA Experiment 20000527 PARAMETER Experiment Name: At_10percent_PEG_P Parameter: Treatment Value: 10percent PEG vs. No Treatment
  misc_feature: MA Experiment ID: 20000794 Result: Up-regulated in Transcription
  misc_feature: MA Experiment 20000794 PARAMETER Experiment Name: At_Petals_P Parameter: Age (day) Value: 23-25 days
  misc_feature: MA Experiment 20000794 PARAMETER Experiment Name: At_Petals_P Parameter: Plant Line Value: WS
  misc_feature: MA Experiment 20000794 PARAMETER Experiment Name: At_Petals_P Parameter: Tissue Value: Petals vs. Whole plant
  misc_feature: MA Experiment ID: 20001247 Result: Down-regulated in Transcription
  misc_feature: MA Experiment 20001247 PARAMETER Experiment Name: At_Far-red-induction_P Parameter: Age (day) Value: 7
  misc_feature: MA Experiment 20001247 PARAMETER Experiment Name: At_Far-red-induction_P Parameter: Light Value: Far-red vs. White
  misc_feature: MA Experiment 20001247 PARAMETER Experiment Name: At_Far-red-induction_P Parameter: Organism Value: A. thaliana
  misc_feature: MA Experiment 20001247 PARAMETER Experiment Name: At_Far-red-induction_P Parameter: Plant Line Value: Columbia
  misc_feature: MA Experiment 20001247 PARAMETER Experiment Name: At_Far-red-induction_P Parameter: Timepoint (hr) Value: 1
  misc_feature: MA Experiment 20001247 PARAMETER Experiment Name: At_Far-red-induction_P Parameter: Tissue Value: Whole Plant
  misc_feature: MA Experiment ID: 20001248 Result: Down-regulated in Transcription
  misc_feature: MA Experiment 20001248 PARAMETER Experiment Name: At_Far-red-induction_P Parameter: Age (day) Value: 7
  misc_feature: MA Experiment 20001248 PARAMETER Experiment Name: At_Far-red-induction_P Parameter: Light Value: Far-red vs. White
  misc_feature: MA Experiment 20001248 PARAMETER Experiment Name: At_Far-red-induction_P Parameter: Organism Value: A. thaliana
  misc_feature: MA Experiment 20001248 PARAMETER Experiment Name: At_Far-red-induction_P Parameter: Plant Line Value: Columbia
  misc_feature: MA Experiment 20001248 PARAMETER Experiment Name: At_Far-red-induction_P Parameter: Timepoint (hr) Value: 4
  misc_feature: MA Experiment 20001248 PARAMETER Experiment Name: At_Far-red-induction_P Parameter: Tissue Value: Whole Plant
  misc_feature: MA Experiment ID: 20001450 Result: Down-regulated in Transcription
  misc_feature: MA Experiment 20001450 PARAMETER Experiment Name: At_Far-red-induction_P Parameter: Age (day) Value: 7
  misc_feature: MA Experiment 20001450 PARAMETER Experiment Name: At_Far-red-induction_P Parameter: Light Value: Far-red vs. White
  misc_feature: MA Experiment 20001450 PARAMETER Experiment Name: At_Far-red-induction_P Parameter: Organism Value: A. thaliana
  misc_feature: MA Experiment 20001450 PARAMETER Experiment Name: At_Far-red-induction_P Parameter: Plant Line Value: Columbia
  misc_feature: MA Experiment 20001450 PARAMETER Experiment Name: At_Far-red-induction_P Parameter: Timepoint (hr) Value: 8
  misc_feature: MA Experiment 20001450 PARAMETER Experiment Name: At_Far-red-induction_P Parameter: Tissue Value: Whole Plant
  misc_feature: MA Experiment ID: 20001555 Result: Down-regulated in Transcription
  misc_feature: MA Experiment 20001555 PARAMETER Experiment Name: At_Drought_Soil_Dry_P Parameter: Age (day) Value: 24
  misc_feature: MA Experiment 20001555 PARAMETER Experiment Name: At_Drought_Soil_Dry_P Parameter: Organism Value: A. thaliana
  misc_feature: MA Experiment 20001555 PARAMETER Experiment Name: At_Drought_Soil_Dry_P Parameter: Plant Line Value: WS
  misc_feature: MA Experiment 20001555 PARAMETER Experiment Name: At_Drought_Soil_Dry_P Parameter: Post Timepoint (hr) Value: None
  misc_feature: MA Experiment 20001555 PARAMETER Experiment Name: At_Drought_Soil_Dry_P Parameter: Post-Treatment Value: None
  misc_feature: MA Experiment 20001555 PARAMETER Experiment Name: At_Drought_Soil_Dry_P Parameter: Timepoint (day) Value: 10
  misc_feature: MA Experiment 20001555 PARAMETER Experiment Name: At_Drought_Soil_Dry_P Parameter: Treatment Value: Drought vs. No Drought
  misc_feature: MA Experiment ID: 20001556 Result: Down-regulated in Transcription
  misc_feature: MA Experiment 20001556 PARAMETER Experiment Name: At_Drought_Soil_Dry_P Parameter: Age (day) Value: 26
  misc_feature: MA Experiment 20001556 PARAMETER Experiment Name: At_Drought_Soil_Dry_P Parameter: Organism Value: A. thaliana
  misc_feature: MA Experiment 20001556 PARAMETER Experiment Name: At_Drought_Soil_Dry_P Parameter: Plant Line Value: WS
  misc_feature: MA Experiment 20001556 PARAMETER Experiment Name: At_Drought_Soil_Dry_P Parameter: Post Timepoint (hr) Value: None
  misc_feature: MA Experiment 20001556 PARAMETER Experiment Name: At_Drought_Soil_Dry_P Parameter: Post-Treatment Value: None
  misc_feature: MA Experiment 20001556 PARAMETER Experiment Name: At_Drought_Soil_Dry_P Parameter: Timepoint (day) Value: 12
  misc_feature: MA Experiment 20001556 PARAMETER Experiment Name: At_Drought_Soil_Dry_P Parameter: Treatment Value: Drought vs. No Drought
  misc_feature: MA Experiment ID: 20001558 Result: Down-regulated in Transcription
  misc_feature: MA Experiment 20001558 PARAMETER Experiment Name: At_Drought_Soil_Dry_P Parameter: Age (day) Value: 27
  misc_feature: MA Experiment 20001558 PARAMETER Experiment Name: At_Drought_Soil_Dry_P Parameter: Organism Value: A. thaliana
  misc_feature: MA Experiment 20001558 PARAMETER Experiment Name: At_Drought_Soil_Dry_P Parameter: Plant Line Value: WS
  misc_feature: MA Experiment 20001558 PARAMETER Experiment Name: At_Drought_Soil_Dry_P Parameter: Post Timepoint (hr) Value: 6
  misc_feature: MA Experiment 20001558 PARAMETER Experiment Name: At_Drought_Soil_Dry_P Parameter: Post-Treatment Value: Re-Water vs. No Drought
  misc_feature: MA Experiment 20001558 PARAMETER Experiment Name: At_Drought_Soil_Dry_P Parameter: Timepoint (day) Value: 13
  misc_feature: MA Experiment 20001558 PARAMETER Experiment Name: At_Drought_Soil_Dry_P Parameter: Treatment Value: Drought vs. No Drought
  misc_feature: MA Experiment ID: 20001559 Result: Down-regulated in Transcription
  misc_feature: MA Experiment 20001559 PARAMETER Experiment Name: At_Drought_Soil_Dry_P Parameter: Age (day) Value: 28
  misc_feature: MA Experiment 20001559 PARAMETER Experiment Name: At_Drought_Soil_Dry_P Parameter: Organism Value: A. thaliana
  misc_feature: MA Experiment 20001559 PARAMETER Experiment Name: At_Drought_Soil_Dry_P Parameter: Plant Line Value: WS
  misc_feature: MA Experiment 20001559 PARAMETER Experiment Name: At_Drought_Soil_Dry_P Parameter: Post Timepoint (hr) Value: 29
  misc_feature: MA Experiment 20001559 PARAMETER Experiment Name: At_Drought_Soil_Dry_P Parameter: Post-Treatment Value: Re-Water vs. No Drought
  misc_feature: MA Experiment 20001559 PARAMETER Experiment Name: At_Drought_Soil_Dry_P Parameter: Timepoint (day) Value: 14
  misc_feature: MA Experiment 20001559 PARAMETER Experiment Name: At_Drought_Soil_Dry_P Parameter: Treatment Value: Drought vs. No Drought
  misc_feature: MA Experiment ID: 20001560 Result: Down-regulated in Transcription
  misc_feature: MA Experiment 20001560 PARAMETER Experiment Name: At_Drought_Soil_Dry_P Parameter: Age (day) Value: 28
  misc_feature: MA Experiment 20001560 PARAMETER Experiment Name: At_Drought_Soil_Dry_P Parameter: Organism Value: A. thaliana
  misc_feature: MA Experiment 20001560 PARAMETER Experiment Name: At_Drought_Soil_Dry_P Parameter: Plant Line Value: WS
  misc_feature: MA Experiment 20001560 PARAMETER Experiment Name: At_Drought_Soil_Dry_P Parameter: Post Timepoint (hr) Value: None
  misc_feature: MA Experiment 20001560 PARAMETER Experiment Name: At_Drought_Soil_Dry_P Parameter: Post-Treatment Value: None
  misc_feature: MA Experiment 20001560 PARAMETER Experiment Name: At_Drought_Soil_Dry_P Parameter: Timepoint (day) Value: 14
  misc_feature: MA Experiment 20001560 PARAMETER Experiment Name: At_Drought_Soil_Dry_P Parameter: Treatment Value: Drought vs. No Drought
  misc_feature: MA Experiment ID: 20001905 Result: Down-regulated in Transcription
  misc_feature: MA Experiment 20001905 PARAMETER Experiment Name: At_Drought_Reproduction_P Parameter: Age (day) Value: 40
  misc_feature: MA Experiment 20001905 PARAMETER Experiment Name: At_Drought_Reproduction_P Parameter: Organism Value: A. thaliana
  misc_feature: MA Experiment 20001905 PARAMETER Experiment Name: At_Drought_Reproduction_P Parameter: Plant Line Value: WS
  misc_feature: MA Experiment 20001905 PARAMETER Experiment Name: At_Drought_Reproduction_P Parameter: Timepoint (day) Value: 10
  misc_feature: MA Experiment 20001905 PARAMETER Experiment Name: At_Drought_Reproduction_P Parameter: Tissue Value: Rosettes
  misc_feature: MA Experiment 20001905 PARAMETER Experiment Name: At_Drought_Reproduction_P Parameter: Treatment Value: Drought vs. No Drought
  misc_feature: MA Experiment ID: 20001911 Result: Down-regulated in Transcription
  misc_feature: MA Experiment 20001911 PARAMETER Experiment Name: At_Drought_Reproduction_P Parameter: Age (day) Value: 40
  misc_feature: MA Experiment 20001911 PARAMETER Experiment Name: At_Drought_Reproduction_P Parameter: Organism Value: A. thaliana
  misc_feature: MA Experiment 20001911 PARAMETER Experiment Name: At_Drought_Reproduction_P Parameter: Plant Line Value: WS
  misc_feature: MA Experiment 20001911 PARAMETER Experiment Name: At_Drought_Reproduction_P Parameter: Timepoint (day) Value: 10
  misc_feature: MA Experiment 20001911 PARAMETER Experiment Name: At_Drought_Reproduction_P Parameter: Tissue Value: Flowers
  misc_feature: MA Experiment 20001911 PARAMETER Experiment Name: At_Drought_Reproduction_P Parameter: Treatment Value: Drought vs. No Drought
actaaaacaaaaaatctcttaacaacttctccaccttctccccaccaccaccactcaccgtcggagaaagaaaaaaaacaaccaccatgaaagactgtgaaaaccacggccactctcgccggaaactaataaggcgaatattttggtcaataatcttcgtcctcttcatcatcttcctaacaatcctcctcatttgggcaattctccaaccatcaaagccacgcttcatcctccaagacgccaccgtctacgccttcaacgtctccggcaatccaccgaacctcctcacctccaacttccaaatcactctctcttcccggaaccctaacaacaaaatcggcatttactacgaccggcttgacgtctacgctacttaccggagccaacaaatcactttcccaacatcaatccctcccacgtatcagggacacaaagatgtcgacatctggtcgccgtttgtttacggaacctccgttcccatcgctccttttaacggcgttagtcttgacaccgataaagataacggtgtcgttttgttgatcattcgtgctgatggtagagtgaggtggaaggttgggacttttatcaccgggaagtatcatcttcatgtgaagtgtccagcatatataaacttcggtaacaaagctaacggagttatcgtcggagacaacgccgttaagtatacgtttaccactagttgtagtgttagtgtgtgaaacggcgacgaagaaaaataaggtaactaaacgtcttcgttaagtaatctgtcttagtgatgtgaattgtacattttgcttatacgaatagcaaatattacagattcgtgatgttgtaacgaattttaagaatttcaatatgtatactttttttttattatagttgaattctaaattctattataagttgtgatg

SEQ ID NO: 27986 - protein, 209 aa, Arabidopsis thaliana
  peptide (1)..(209): Ceres Seq. ID no. 13486632
  misc_feature (1)..(209): Homolog of NCBI NO: 38637038 NR Description: harpin-induced protein 1 family (HIN1)-like
  misc_feature (1)..(209): Homolog of NCBI NO: 22326984 NR Description: harpin-induced protein 1 family (HIN1)
  misc_feature (1)..(209): Homolog of NCBI NO: 15229906 NR Description: harpin-induced protein 1 family (HIN1)
  misc_feature (1)..(208): Homolog of NCBI NO: 15227540 NR Description: harpin-induced protein 1 family (HIN1)
  misc_feature (1)..(208): Homolog of NCBI NO: 15233951 NR Description: harpin-induced protein 1 family (HIN1)
  misc_feature (1)..(209): Homolog of NCBI NO: 15227538 NR Description: harpin-induced protein 1 family (HIN1)
  misc_feature (1)..(209): Homolog of NCBI NO: 15240001 NR Description: harpin-induced protein, putative (HIN1)
  misc_feature (2)..(209): Homolog of NCBI NO: 15231227 NR Description: harpin-induced protein 1 family (HIN1)
  misc_feature (1)..(209): Homolog of NCBI NO: 28392929 NR Description: putative VAMP protein SEC22 [Arabidopsis thaliana]
  misc_feature (1)..(209): Homolog of NCBI NO: 18399308 NR Description: harpin-induced protein 1 family (HIN1)
MKDCENHGHSRRKLIRRIFWSIIFVLFIIFLTILLIWAILQPSKPRFILQDATVYAFNVSGNPPNLLTSNFQITLSSRNPNNKIGIYYDRLDVYATYRSQQITFPTSIPPTYQGHKDVDIWSPFVYGTSVPIAPFNGVSLDTDKDNGVVLLIIRADGRVRWKVGTFITGKYHLHVKCPAYINFGNKANGVIVGDNAVKYTFTTSCSVSV

SEQ ID NO: 27987 - DNA, 1368 bp, Arabidopsis thaliana
  misc_feature (1)..(1368): Ceres Seq. ID no. 12423294
  misc_feature: MA Experiment ID: 108573 Result: Up-regulated in Transcription
  misc_feature: MA Experiment 108573 PARAMETER Experiment Name: At_Drought_cDNA_P Parameter: Timepoint (hr) Value: 6
  misc_feature: MA Experiment 108573 PARAMETER Experiment Name: At_Drought_cDNA_P Parameter: Tissue Value: Aerial
  misc_feature: MA Experiment 108573 PARAMETER Experiment Name: At_Drought_cDNA_P Parameter: Treatment Value: Drought vs. No Drought
  misc_feature: MA Experiment ID: 108595 Result: Down-regulated in Transcription
  misc_feature: MA Experiment 108595 PARAMETER Experiment Name: At_Ler-pi_Ovule_cDNA_P Parameter: Plant Line Value: null
  misc_feature: MA Experiment ID: 20000184 Result: Down-regulated in Transcription
  misc_feature: MA Experiment 20000184 PARAMETER Experiment Name: At_Shoots__P Parameter: Age (day) Value: 7
  misc_feature: MA Experiment 20000184 PARAMETER Experiment Name: At_Shoots__P Parameter: Tissue Value: Shoots vs. Whole Plant
  misc_feature: MA Experiment ID: 20001757 Result: Down-regulated in Transcription
  misc_feature: MA Experiment 20001757 PARAMETER Experiment Name: At_50mM_NH4NO3_L-to-H_P Parameter: Timepoint (hr) Value: 6
  misc_feature: MA Experiment 20001757 PARAMETER Experiment Name: At_50mM_NH4NO3_L-to-H_P Parameter: Tissue Value: Leaf
  misc_feature: MA Experiment 20001757 PARAMETER Experiment Name: At_50mM_NH4NO3_L-to-H_P Parameter: Treatment Value: 50mM NH4NO3 vs 100mM Mannitol
aaaatttgacggaatctataagataattttctccctagggattagggctcacaatctcaaatctctgattcttcgatacgataaattcttcctcgatatagaaaccactgattagatcctaattcgtcgcctagctcaaaagatggtgctttcgcaaaagcttcatgaagcatttaaaggaacagttgagaggatcacaggtcctcgtacgatctcggcgttcaaggagaagggagttctcagcgtcagcgagttcgtacttgccggagataatctcgtctccaagtgtcccacctggtcttgggaatctggtgacgcaagcaaaaggaagccatacttgccctcggacaaacagtttttgattactagaaatgtaccttgtctacggagagctgcttctgtggcagaggattatgaagctgctggaggtgaagtgttggttgatgatgaagataatgatggttggctggctacacatgggaaaccgaaagataaaggcaaggaagaggataacttaccatccatggatgccttggatataaacgagaaaaatactatccaatcaatacctacgtattttggaggtgaggaggatgatgatattccagacatggaggagttcgatgaggctgacaatgtggtagaaaatgatccggcaactcttcagtcaacttatcttgtggctcatgaacctgatgacgataacattctccgaactcggacatatgatctcagcataacgtatgataagtattaccaaactcctcgtgtttggctgaccggttatgatgagtcaaggatgctgctgcaacctgaacttgtaatggaggatgttagccaagaccatgctcgtaaaacggtcacaatcgaagatcatccacacttgcctggtaaacatgcttcagttcatccatgtcggcatggagctgttatgaagaaaatcattgatgtattaatgtcgcgtggagtagaacctgaagtcgacaagtacctcttcctgttcttgaagttcatggcatcagttattccaacaattgagtacgattacacaatggactttgatctcggtagctcaagcacctaatatcagatttaaacaagtatgtgctcgtgaatccgggaaacaagtatggtctcatggatggctggatggctctgcactgtacataaaacagagtcctcactttcatttctctccaagataaactttaaggtgttgtggtttaatcactcgtttatctaaagtttacgctgatgaatagtaatttgtgacaaaactctgaaaacgggtatttgatcaaaactgattcggtgtggttcaaaaaacagaatgtgatttagtgtgtttaatacactcttgctttggag

SEQ ID NO: 27988 - protein, 313 aa, Arabidopsis thaliana
  peptide (1)..(313): Ceres Seq. ID no. 12423295
  misc_feature (6)..(156): Pfam Name: Autophagocytosis associated protein, N-terminal domain Pfam Description: Autophagocytosis associated protein, N-terminal
  misc_feature (25)..(308): Homolog of NCBI NO: 19705511 NR Description: preconditioning-inducible gene 1 protein [Rattus
  misc_feature (25)..(308): Homolog of NCBI NO: 13385890 NR Description: RIKEN cDNA 2610016C12 [Mus musculus]
  misc_feature (13)..(308): Homolog of NCBI NO: 34785406 NR Description: Unknown (protein for MGC:64156) [Danio rerio]
  misc_feature (149)..(307): Homolog of NCBI NO: 28828597 NR Description: hypothetical protein [Dictyostelium discoideum]
  misc_feature (5)..(174): Homolog of NCBI NO: 28828597 NR Description: hypothetical protein [Dictyostelium discoideum]
  misc_feature (1)..(233): Homolog of NCBI NO: 37536838 NR Description: autophagocytosis protein AUT1-like
  misc_feature (1)..(312): Homolog of NCBI NO: 34903638 NR Description: B1015E06.2 [Oryza sativa (japonica
  misc_feature (1)..(313): Homolog of NCBI NO: 21595613 NR Description: autophagocytosis protein-like [Arabidopsis
  misc_feature (1)..(313): Homolog of NCBI NO: 18424474 NR Description: autophagocytosis protein - like
  misc_feature (1)..(308): Homolog of NCBI NO: 9758466 NR Description: autophagocytosis protein AUT1-like [Arabidopsis
MVLSQKLHEAFKGTVERITGPRTISAFKEKGVLSVSEFVLAGDNLVSKCPTWSWESGDASKRKPYLPSDKQFLITRNVPCLRRAASVAEDYEAAGGEVLVDDEDNDGWLATHGKPKDKGKEEDNLPSMDALDINEKNTIQSIPTYFGGEEDDDIPDMEEFDEADNVVENDPATLQSTYLVAHEPDDDNILRTRTYDLSITYDKYYQTPRVWLTGYDESRMLLQPELVMEDVSQDHARKTVTIEDHPHLPGKHASVHPCRHGAVMKKIIDVLMSRGVEPEVDKYLFLFLKFMASVIPTIEYDYTMDFDLGSSST

SEQ ID NO: 27989 - protein, 186 aa, Arabidopsis thaliana
  peptide (1)..(186): Ceres Seq. ID no. 12423296
  misc_feature (60)..(177): Pfam Name: Autophagocytosis associated protein, C-terminal domain Pfam Description: Autophagocytosis associated protein, C-terminal
  misc_feature (1)..(181): Homolog of NCBI NO: 19705511 NR Description: preconditioning-inducible gene 1 protein [Rattus
  misc_feature (1)..(181): Homolog of NCBI NO: 13385890 NR Description: RIKEN cDNA 2610016C12 [Mus musculus]
  misc_feature (1)..(181): Homolog of NCBI NO: 34785406 NR Description: Unknown (protein for MGC:64156) [Danio rerio]
  misc_feature (22)..(180): Homolog of NCBI NO: 28828597 NR Description: hypothetical protein [Dictyostelium discoideum]
  misc_feature (1)..(47): Homolog of NCBI NO: 28828597 NR Description: hypothetical protein [Dictyostelium discoideum]
  misc_feature (1)..(106): Homolog of NCBI NO: 37536838 NR Description: autophagocytosis protein AUT1-like
  misc_feature (1)..(185): Homolog of NCBI NO: 34903638 NR Description: B1015E06.2 [Oryza sativa (japonica
  misc_feature (1)..(186): Homolog of NCBI NO: 21595613 NR Description: autophagocytosis protein-like [Arabidopsis
  misc_feature (1)..(186): Homolog of NCBI NO: 18424474 NR Description: autophagocytosis protein - like
  misc_feature (1)..(181): Homolog of NCBI NO: 9758466 NR Description: autophagocytosis protein AUT1-like [Arabidopsis
MDALDINEKNTIQSIPTYFGGEEDDDIPDMEEFDEADNVVENDPATLQSTYLVAHEPDDDNILRTRTYDLSITYDKYYQTPRVWLTGYDESRMLLQPELVMEDVSQDHARKTVTIEDHPHLPGKHASVHPCRHGAVMKKIIDVLMSRGVEPEVDKYLFLFLKFMASVIPTIEYDYTMDFDLGSSST

SEQ ID NO: 27990 - protein, 157 aa, Arabidopsis thaliana
  peptide (1)..(157): Ceres Seq. ID no. 12423297
  misc_feature (31)..(148): Pfam Name: Autophagocytosis associated protein, C-terminal domain Pfam Description: Autophagocytosis associated protein, C-terminal
  misc_feature (1)..(152): Homolog of NCBI NO: 19705511 NR Description: preconditioning-inducible gene 1 protein [Rattus
  misc_feature (1)..(152): Homolog of NCBI NO: 13385890 NR Description: RIKEN cDNA 2610016C12 [Mus musculus]
  misc_feature (1)..(152): Homolog of NCBI NO: 34785406 NR Description: Unknown (protein for MGC:64156) [Danio rerio]
  misc_feature (1)..(151): Homolog of NCBI NO: 28828597 NR Description: hypothetical protein [Dictyostelium discoideum]
  misc_feature (1)..(18): Homolog of NCBI NO: 28828597 NR Description: hypothetical protein [Dictyostelium discoideum]
  misc_feature (1)..(77): Homolog of NCBI NO: 37536838 NR Description: autophagocytosis protein AUT1-like
  misc_feature (1)..(156): Homolog of NCBI NO: 34903638 NR Description: B1015E06.2 [Oryza sativa (japonica
  misc_feature (1)..(157): Homolog of NCBI NO: 21595613 NR Description: autophagocytosis protein-like [Arabidopsis
  misc_feature (1)..(157): Homolog of NCBI NO: 18424474 NR Description: autophagocytosis protein - like
  misc_feature (1)..(152): Homolog of NCBI NO: 9758466 NR Description: autophagocytosis protein AUT1-like [Arabidopsis
MEEFDEADNVVENDPATLQSTYLVAHEPDDDNILRTRTYDLSITYDKYYQTPRVWLTGYDESRMLLQPELVMEDVSQDHARKTVTIEDHPHLPGKHASVHPCRHGAVMKKIIDVLMSRGVEPEVDKYLFLFLKFMASVIPTIEYDYTMDFDLGSSST

SEQ ID NO: 27991 - DNA, 919 bp, Arabidopsis thaliana
  misc_feature (1)..(919): Ceres Seq. ID no. 13488627
  misc_feature: MA Experiment ID: 108434 Result: Down-regulated in Transcription
  misc_feature: MA Experiment 108434 PARAMETER Experiment Name: At_Root_Tips_cDNA_P Parameter: Tissue Value: Root Tips
  misc_feature: MA Experiment ID: 108462 Result: Up-regulated in Transcription
  misc_feature: MA Experiment 108462 PARAMETER Experiment Name: At_Germinating_Seeds_cDNA_P Parameter: Age (day) Value: 2 vs. 0
  misc_feature: MA Experiment 108462 PARAMETER Experiment Name: At_Germinating_Seeds_cDNA_P Parameter: Tissue Value: Germinating Seeds
  misc_feature: MA Experiment ID: 108463 Result: Up-regulated in Transcription
  misc_feature: MA Experiment 108463 PARAMETER Experiment Name: At_Germinating_Seeds_cDNA_P Parameter: Age (day) Value: 3 vs. 0
  misc_feature: MA Experiment 108463 PARAMETER Experiment Name: At_Germinating_Seeds_cDNA_P Parameter: Tissue Value: Germinating Seeds
  misc_feature: MA Experiment ID: 108573 Result: Up-regulated in Transcription
  misc_feature: MA Experiment 108573 PARAMETER Experiment Name: At_Drought_cDNA_P Parameter: Timepoint (hr) Value: 6
  misc_feature: MA Experiment 108573 PARAMETER Experiment Name: At_Drought_cDNA_P Parameter: Tissue Value: Aerial
  misc_feature: MA Experiment 108573 PARAMETER Experiment Name: At_Drought_cDNA_P Parameter: Treatment Value: Drought vs. No Drought
  misc_feature: MA Experiment ID: 108579 Result: Up-regulated in Transcription
  misc_feature: MA Experiment 108579 PARAMETER Experiment Name: At_4deg_Cold_cDNA_P Parameter: Temperature (deg C) Value: 4 vs. 22
  misc_feature: MA Experiment 108579 PARAMETER Experiment Name: At_4deg_Cold_cDNA_P Parameter: Timepoint (hr) Value: 6
  misc_feature: MA Experiment 108579 PARAMETER Experiment Name: At_4deg_Cold_cDNA_P Parameter: Tissue Value: Aerial
  misc_feature: MA Experiment ID: 20000113 Result: Up-regulated in Transcription
  misc_feature: MA Experiment 20000113 PARAMETER Experiment Name: At_42deg_Heat_cDNA_P Parameter: Temperature (deg C) Value: 42 vs. 22
  misc_feature: MA Experiment 20000113 PARAMETER Experiment Name: At_42deg_Heat_cDNA_P Parameter: Timepoint (hr) Value: 8
  misc_feature: MA Experiment 20000113 PARAMETER Experiment Name: At_42deg_Heat_cDNA_P Parameter: Tissue Value: Aerial
  misc_feature: MA Experiment ID: 20000180 Result: Up-regulated in Transcription
  misc_feature: MA Experiment 20000180 PARAMETER Experiment Name: At_Germinating_Seeds_P Parameter: Age (hr) Value: 24 vs. 0
  misc_feature: MA Experiment 20000180 PARAMETER Experiment Name: At_Germinating_Seeds_P Parameter: Tissue Value: Germinating Seeds
  misc_feature: MA Experiment ID: 20000185 Result: Down-regulated in Transcription
  misc_feature: MA Experiment 20000185 PARAMETER Experiment Name: At_Roots__P Parameter: Age (day) Value: 7 vs. 21
  misc_feature: MA Experiment 20000185 PARAMETER Experiment Name: At_Roots__P Parameter: Organism Value: A. thaliana
  misc_feature: MA Experiment 20000185 PARAMETER Experiment Name: At_Roots__P Parameter: Tissue Value: Roots vs. Whole Plant
  misc_feature: MA Experiment ID: 20000224 Result: Down-regulated in Transcription
  misc_feature: MA Experiment ID: 20000286 Result: Down-regulated in Transcription
  misc_feature: MA Experiment 20000286 PARAMETER Experiment Name: At_Open_Flower_P Parameter: Age (day) Value: 21
  misc_feature: MA Experiment 20000286 PARAMETER Experiment Name: At_Open_Flower_P Parameter: Plant Line Value: WS
  misc_feature: MA Experiment 20000286 PARAMETER Experiment Name: At_Open_Flower_P Parameter: Tissue Value: Half Open vs. Whole Plant
  misc_feature: MA Experiment ID: 20000438 Result: Down-regulated in Transcription
  misc_feature: MA Experiment 20000438 PARAMETER Experiment Name: At_Shoots__P Parameter: Age (day) Value: 14
  misc_feature: MA Experiment 20000438 PARAMETER Experiment Name: At_Shoots__P Parameter: Tissue Value: Shoots vs. Whole Plant
  misc_feature: MA Experiment ID: 20000439 Result: Down-regulated in Transcription
  misc_feature: MA Experiment 20000439 PARAMETER Experiment Name: At_Roots__P Parameter: Age (day) Value: 14 vs. 21
  misc_feature: MA Experiment 20000439 PARAMETER Experiment Name: At_Roots__P Parameter: Organism Value: A. thaliana
  misc_feature: MA Experiment 20000439 PARAMETER Experiment Name: At_Roots__P Parameter: Tissue Value: Roots vs. Whole Plant
  misc_feature: MA Experiment ID: 20001248 Result: Up-regulated in Transcription
  misc_feature: MA Experiment 20001248 PARAMETER Experiment Name: At_Far-red-induction_P Parameter: Age (day) Value: 7
  misc_feature: MA Experiment 20001248 PARAMETER Experiment Name: At_Far-red-induction_P Parameter: Light Value: Far-red vs. White
  misc_feature: MA Experiment 20001248 PARAMETER Experiment Name: At_Far-red-induction_P Parameter: Organism Value: A. thaliana
  misc_feature: MA Experiment 20001248 PARAMETER Experiment Name: At_Far-red-induction_P Parameter: Plant Line Value: Columbia
  misc_feature: MA Experiment 20001248 PARAMETER Experiment Name: At_Far-red-induction_P Parameter: Timepoint (hr) Value: 4
  misc_feature: MA Experiment 20001248 PARAMETER Experiment Name: At_Far-red-induction_P Parameter: Tissue Value: Whole Plant
  misc_feature: MA Experiment ID: 20001558 Result: Down-regulated in Transcription
  misc_feature: MA Experiment 20001558 PARAMETER Experiment Name: At_Drought_Soil_Dry_P Parameter: Age (day) Value: 27
  misc_feature: MA Experiment 20001558 PARAMETER Experiment Name: At_Drought_Soil_Dry_P Parameter: Organism Value: A. thaliana
  misc_feature: MA Experiment 20001558 PARAMETER Experiment Name: At_Drought_Soil_Dry_P Parameter: Plant Line Value: WS
  misc_feature: MA Experiment 20001558 PARAMETER Experiment Name: At_Drought_Soil_Dry_P Parameter: Post Timepoint (hr) Value: 6
  misc_feature: MA Experiment 20001558 PARAMETER Experiment Name: At_Drought_Soil_Dry_P Parameter: Post-Treatment Value: Re-Water vs. No Drought
  misc_feature: MA Experiment 20001558 PARAMETER Experiment Name: At_Drought_Soil_Dry_P Parameter: Timepoint (day) Value: 13
  misc_feature: MA Experiment 20001558 PARAMETER Experiment Name: At_Drought_Soil_Dry_P Parameter: Treatment Value: Drought vs. No Drought
  misc_feature: MA Experiment ID: 20001560 Result: Down-regulated in Transcription
  misc_feature: MA Experiment 20001560 PARAMETER Experiment Name: At_Drought_Soil_Dry_P Parameter: Age (day) Value: 28
  misc_feature: MA Experiment 20001560 PARAMETER Experiment Name: At_Drought_Soil_Dry_P Parameter: Organism Value: A. thaliana
  misc_feature: MA Experiment 20001560 PARAMETER Experiment Name: At_Drought_Soil_Dry_P Parameter: Plant Line Value: WS
  misc_feature: MA Experiment 20001560 PARAMETER Experiment Name: At_Drought_Soil_Dry_P Parameter: Post Timepoint (hr) Value: None
  misc_feature: MA Experiment 20001560 PARAMETER Experiment Name: At_Drought_Soil_Dry_P Parameter: Post-Treatment Value: None
  misc_feature: MA Experiment 20001560 PARAMETER Experiment Name: At_Drought_Soil_Dry_P Parameter: Timepoint (day) Value: 14
  misc_feature: MA Experiment 20001560 PARAMETER Experiment Name: At_Drought_Soil_Dry_P Parameter: Treatment Value: Drought vs. No Drought
aatccatatatatccttctccattagcttttgttcttctgttccaattccaattccttctgaaatattcatcgcaattcgtatcggtttaaagtaaaaaagcaatgggaggtggtaaagacaagcatcatgatgagcaagagaaaggatttcatggttttccaggaggtggacattacccacctgctcaaggaggttaccctcctcaaggttacccaccacaacaagggtatcctccagctggaggctacccacctgccggatatcctcctggtgcttaccctgctgcgcccggtggttatcctcctgcacctggaggttaccctcctgctggctatcctgcacctggagctcaccattcaggacattctggtggtggactcggaggcatgatagcaggtgcagctggtgcagccgcagcagcttatggagctcaccatgttggtcacgcctctcacaacccttacgggcatgctgtaggacatggagggtatggccatgcccctgctcatggctttggccatggtggtcatggtaaattcaagcacggaaagcatggaggcaaattcaagcacggaaagcatggaaagcacgggaaacatggcatgtttggaggaggaggcaaattcaagaagtggaagtaatctcaaaaaccccacctttgatcctctcctccagtatagtctcattacctgaccgatgtttctaataatcccccttcaaacatatttcattttaactatgtcggtttagagattactggttgaggaaataattggagagtgctagtataaaccttatggtatctgcagcagaggtttctttaatctctcaatagtagatgctttgaaacttatctataatttggtattgtaatgacagtttgtgtttggttttttcttcagtatcttctttgtttg

SEQ ID NO: 27992 - protein, 179 aa, Arabidopsis thaliana
  peptide (1)..(179): Ceres Seq. ID no. 13488628
  misc_feature (82)..(179): Pfam Name: Dehydrin Pfam Description: Dehydrin
  misc_feature (1)..(137): Homolog of NCBI NO: 585217 NR Description: GLYCINE RICH PROTEIN A3
  misc_feature (4)..(179): Homolog of NCBI NO: 15238005 NR Description: glycine/proline-rich protein [Arabidopsis
  misc_feature (4)..(179): Homolog of NCBI NO: 21553447 NR Description: putative glycine and proline-rich protein
  misc_feature (4)..(179): Homolog of NCBI NO: 18398103 NR Description: proline-rich protein family [Arabidopsis
  misc_feature (1)..(179): Homolog of NCBI NO: 13543234 NR Description: Unknown (protein for MGC:12025) [Mus musculus]
  misc_feature (17)..(179): Homolog of NCBI NO: 33668156 NR Description: GPRP [Oryza sativa (indica cultivar-group)]
  misc_feature (1)..(179): Homolog of NCBI NO: 6478148 NR Description: putative glycine and proline-rich protein
  misc_feature (1)..(179): Homolog of NCBI NO: 18422542 NR Description: proline-rich protein family [Arabidopsis
  misc_feature (1)..(150): Homolog of NCBI NO: 7487135 NR Description: hypothetical protein T18B16.170 - Arabidopsis
  misc_feature (1)..(179): Homolog of NCBI NO: 15234178 NR Description: glycine/proline-rich protein [Arabidopsis
MGGGKDKHHDEQEKGFHGFPGGGHYPPAQGGYPPQGYPPQQGYPPAGGYPPAGYPPGAYPAAPGGYPPAPGGYPPAGYPAPGAHHSGHSGGGLGGMIAGAAGAAAAAYGAHHVGHASHNPYGHAVGHGGYGHAPAHGFGHGGHGKFKHGKHGGKFKHGKHGKHGKHGMFGGGGKFKKWK

SEQ ID NO: 27993 - DNA, 1792 bp, Arabidopsis thaliana; identical to SEQ ID NO: 22471
  misc_feature (1)..(1792): Ceres Seq. ID no. 13490532
  misc_feature: MA Experiment ID: 20000169 Result: Up-regulated in Transcription
  misc_feature: MA Experiment 20000169 PARAMETER Experiment Name: At_100uM_ABA_P Parameter: Age (day) Value: 14
  misc_feature: MA Experiment 20000169 PARAMETER Experiment Name: At_100uM_ABA_P Parameter: Organism Value: A. thaliana
  misc_feature: MA Experiment 20000169 PARAMETER Experiment Name: At_100uM_ABA_P Parameter: Plant Line Value: WS
  misc_feature: MA Experiment 20000169 PARAMETER Experiment Name: At_100uM_ABA_P Parameter: Timepoint (hr) Value: 6
  misc_feature: MA Experiment 20000169 PARAMETER Experiment Name: At_100uM_ABA_P Parameter: Tissue Value: Aerial
  misc_feature: MA Experiment 20000169 PARAMETER Experiment Name: At_100uM_ABA_P Parameter: Treatment Value: 100uM ABA vs. No Treatment
  misc_feature: MA Experiment ID: 20000173 Result: Down-regulated in Transcription
  misc_feature: MA Experiment 20000173 PARAMETER Experiment Name: At_42deg_Heat_P Parameter: Age (day) Value: 14
  misc_feature: MA Experiment 20000173 PARAMETER Experiment Name: At_42deg_Heat_P Parameter: Organism Value: A. thaliana
  misc_feature: MA Experiment 20000173 PARAMETER Experiment Name: At_42deg_Heat_P Parameter: Plant Line Value: WS
  misc_feature: MA Experiment 20000173 PARAMETER Experiment Name: At_42deg_Heat_P Parameter: Temperature (deg C) Value: 42 vs. 22
  misc_feature: MA Experiment 20000173 PARAMETER Experiment Name: At_42deg_Heat_P Parameter: Timepoint (hr) Value: 6
  misc_feature: MA Experiment 20000173 PARAMETER Experiment Name: At_42deg_Heat_P Parameter: Tissue Value: Aerial
  misc_feature: MA Experiment ID: 20000179 Result: Up-regulated in Transcription
  misc_feature: MA Experiment 20000179 PARAMETER Experiment Name: At_Germinating_Seeds_P Parameter: Age (hr) Value: 6 vs. 0
  misc_feature: MA Experiment 20000179 PARAMETER Experiment Name: At_Germinating_Seeds_P Parameter: Tissue Value: Germinating Seeds
  misc_feature: MA Experiment ID: 20000180 Result: Up-regulated in Transcription
  misc_feature: MA Experiment 20000180 PARAMETER Experiment Name: At_Germinating_Seeds_P Parameter: Age (hr) Value: 24 vs. 0
  misc_feature: MA Experiment 20000180 PARAMETER Experiment Name: At_Germinating_Seeds_P Parameter: Tissue Value: Germinating Seeds
  misc_feature: MA Experiment ID: 20000184 Result: Up-regulated in Transcription
  misc_feature: MA Experiment 20000184 PARAMETER Experiment Name: At_Shoots__P Parameter: Age (day) Value: 7
  misc_feature: MA Experiment 20000184 PARAMETER Experiment Name: At_Shoots__P Parameter: Tissue Value: Shoots vs. Whole Plant
  misc_feature: MA Experiment ID: 20000185 Result: Up-regulated in Transcription
  misc_feature: MA Experiment 20000185 PARAMETER Experiment Name: At_Roots__P Parameter: Age (day) Value: 7 vs. 21
  misc_feature: MA Experiment 20000185 PARAMETER Experiment Name: At_Roots__P Parameter: Organism Value: A. thaliana
  misc_feature: MA Experiment 20000185 PARAMETER Experiment Name: At_Roots__P Parameter: Tissue Value: Roots vs. Whole Plant
  misc_feature: MA Experiment ID: 20000235 Result: Down-regulated in Transcription
  misc_feature: MA Experiment 20000235 PARAMETER Experiment Name: At_Siliques_P Parameter: Age (day) Value: 21
  misc_feature: MA Experiment 20000235 PARAMETER Experiment Name: At_Siliques_P Parameter: Organism Value: A. thaliana
  misc_feature: MA Experiment 20000235 PARAMETER Experiment Name: At_Siliques_P Parameter: Plant Line Value: WS
  misc_feature: MA Experiment 20000235 PARAMETER Experiment Name: At_Siliques_P Parameter: Tissue Value: 5-10mm Siliques vs. Whole Plant
  misc_feature: MA Experiment ID: 20000264 Result: Down-regulated in Transcription
  misc_feature: MA Experiment 20000264 PARAMETER Experiment Name: At_Open_Flower_P Parameter: Age (day) Value: 21
  misc_feature: MA Experiment 20000264 PARAMETER Experiment Name: At_Open_Flower_P Parameter: Plant Line Value: WS
  misc_feature: MA Experiment 20000264 PARAMETER Experiment Name: At_Open_Flower_P Parameter: Tissue Value: Open Flower vs. Whole Plant
  misc_feature: MA Experiment ID: 20000286 Result: Down-regulated in Transcription
  misc_feature: MA Experiment 20000286 PARAMETER Experiment Name: At_Open_Flower_P Parameter: Age (day) Value: 21
  misc_feature: MA Experiment 20000286 PARAMETER Experiment Name: At_Open_Flower_P Parameter: Plant Line Value: WS
  misc_feature: MA Experiment 20000286 PARAMETER Experiment Name: At_Open_Flower_P Parameter: Tissue Value: Half Open vs. Whole Plant
  misc_feature: MA Experiment ID: 20000438 Result: Up-regulated in Transcription
  misc_feature: MA Experiment 20000438 PARAMETER Experiment Name: At_Shoots__P Parameter: Age (day) Value: 14
  misc_feature: MA Experiment 20000438 PARAMETER Experiment Name: At_Shoots__P Parameter: Tissue Value: Shoots vs. Whole Plant
  misc_feature: MA Experiment ID: 20000439 Result: Up-regulated in Transcription
  misc_feature: MA Experiment 20000439 PARAMETER Experiment Name: At_Roots__P Parameter: Age (day) Value: 14 vs. 21
  misc_feature: MA Experiment 20000439 PARAMETER Experiment Name: At_Roots__P Parameter: Organism Value: A. thaliana
  misc_feature: MA Experiment 20000439 PARAMETER Experiment Name: At_Roots__P Parameter: Tissue Value: Roots vs. Whole Plant
  misc_feature: MA Experiment ID: 20000445 Result: Down-regulated in Transcription
  misc_feature: MA Experiment 20000445 PARAMETER Experiment Name: At_100uM_NAA__P Parameter: Age (day) Value: 14
  misc_feature: MA Experiment 20000445 PARAMETER Experiment Name: At_100uM_NAA__P Parameter: Organism Value: A. thaliana
  misc_feature: MA Experiment 20000445 PARAMETER Experiment Name: At_100uM_NAA__P Parameter: Plant Line Value: WS
  misc_feature: MA Experiment 20000445 PARAMETER Experiment Name: At_100uM_NAA__P Parameter: Timepoint (hr) Value: 6
  misc_feature: MA Experiment 20000445 PARAMETER Experiment Name: At_100uM_NAA__P Parameter: Tissue Value: Aerial
  misc_feature: MA Experiment 20000445 PARAMETER Experiment Name: At_100uM_NAA__P Parameter: Treatment Value: 100uM NAA vs. No Treatment
  misc_feature: MA Experiment ID: 20000452 Result: Up-regulated in Transcription
  misc_feature: MA Experiment 20000452 PARAMETER Experiment Name: At_CS6879_Shoots-Roots_P Parameter: Age (day) Value: 14
  misc_feature: MA Experiment 20000452 PARAMETER Experiment Name: At_CS6879_Shoots-Roots_P Parameter: Organism Value: A. thaliana
  misc_feature: MA Experiment 20000452 PARAMETER Experiment Name: At_CS6879_Shoots-Roots_P Parameter: Plant Line Value: CS6879 vs. WS
  misc_feature: MA Experiment 20000452 PARAMETER Experiment Name: At_CS6879_Shoots-Roots_P Parameter: Tissue Value: Shoots
  misc_feature: MA Experiment ID: 20000453 Result: Up-regulated in Transcription
  misc_feature: MA Experiment 20000453 PARAMETER Experiment Name: At_100uM_ABA_P Parameter: Age (day) Value: 15
  misc_feature: MA Experiment 20000453 PARAMETER Experiment Name: At_100uM_ABA_P Parameter: Organism Value: A. thaliana
  misc_feature: MA Experiment 20000453 PARAMETER Experiment Name: At_100uM_ABA_P Parameter: Plant Line Value: WS
  misc_feature: MA Experiment 20000453 PARAMETER Experiment Name: At_100uM_ABA_P Parameter: Timepoint (hr) Value: 24
  misc_feature: MA Experiment 20000453 PARAMETER Experiment Name: At_100uM_ABA_P Parameter: Tissue Value: Aerial
  misc_feature: MA Experiment 20000453 PARAMETER Experiment Name: At_100uM_ABA_P Parameter: Treatment Value: 100uM ABA vs. No Treatment
  misc_feature: MA Experiment ID: 20000455 Result: Up-regulated in Transcription
  misc_feature: MA Experiment 20000455 PARAMETER Experiment Name: At_100uM_ABA_P Parameter: Age (day) Value: 16
  misc_feature: MA Experiment 20000455 PARAMETER Experiment Name: At_100uM_ABA_P Parameter: Organism Value: A. thaliana
  misc_feature: MA Experiment 20000455 PARAMETER Experiment Name: At_100uM_ABA_P Parameter: Plant Line Value: WS
  misc_feature: MA Experiment 20000455 PARAMETER Experiment Name: At_100uM_ABA_P Parameter: Timepoint (hr) Value: 48
  misc_feature: MA Experiment 20000455 PARAMETER Experiment Name: At_100uM_ABA_P Parameter: Tissue Value: Aerial
  misc_feature: MA Experiment 20000455 PARAMETER Experiment Name: At_100uM_ABA_P Parameter: Treatment Value: 100uM ABA vs. No Treatment
  misc_feature: MA Experiment ID: 20000495 Result: Up-regulated in Transcription
  misc_feature: MA Experiment 20000495 PARAMETER Experiment Name: At_Guard_Cells_P Parameter: Harvest Date Value: 8/2/2002
  misc_feature: MA Experiment 20000495 PARAMETER Experiment Name: At_Guard_Cells_P Parameter: Organism Value: A. thaliana
  misc_feature: MA Experiment 20000495 PARAMETER Experiment Name: At_Guard_Cells_P Parameter: Tissue Value: Guard Cells vs. Leaves
  misc_feature: MA Experiment ID: 20000794 Result: Down-regulated in Transcription
  misc_feature: MA Experiment 20000794 PARAMETER Experiment Name: At_Petals_P Parameter: Age (day) Value: 23-25 days
  misc_feature: MA Experiment 20000794 PARAMETER Experiment Name: At_Petals_P Parameter: Plant Line Value: WS
  misc_feature: MA Experiment 20000794 PARAMETER Experiment Name: At_Petals_P Parameter: Tissue Value: Petals vs. Whole plant
  misc_feature: MA Experiment ID: 20001450 Result: Down-regulated in Transcription
  misc_feature: MA Experiment 20001450 PARAMETER Experiment Name: At_Far-red-induction_P Parameter: Age (day) Value: 7
  misc_feature: MA Experiment 20001450 PARAMETER Experiment Name: At_Far-red-induction_P Parameter: Light Value: Far-red vs. White
  misc_feature: MA Experiment 20001450 PARAMETER Experiment Name: At_Far-red-induction_P Parameter: Organism Value: A. thaliana
  misc_feature: MA Experiment 20001450 PARAMETER Experiment Name: At_Far-red-induction_P Parameter: Plant Line Value: Columbia
  misc_feature: MA Experiment 20001450 PARAMETER Experiment Name: At_Far-red-induction_P Parameter: Timepoint (hr) Value: 8
  misc_feature: MA Experiment 20001450 PARAMETER Experiment Name: At_Far-red-induction_P Parameter: Tissue Value: Whole Plant
  misc_feature: MA Experiment ID: 20001451 Result: Down-regulated in Transcription
  misc_feature: MA Experiment 20001451 PARAMETER Experiment Name: At_Far-red-induction_P Parameter: Age (day) Value: 7
  misc_feature: MA Experiment 20001451 PARAMETER Experiment Name: At_Far-red-induction_P Parameter: Light Value: Far-red vs. White
  misc_feature: MA Experiment 20001451 PARAMETER Experiment Name: At_Far-red-induction_P Parameter: Organism Value: A. thaliana
  misc_feature: MA Experiment 20001451 PARAMETER Experiment Name: At_Far-red-induction_P Parameter: Plant Line Value: Columbia
  misc_feature: MA Experiment 20001451 PARAMETER Experiment Name: At_Far-red-induction_P Parameter: Timepoint (hr) Value: 24
  misc_feature: MA Experiment 20001451 PARAMETER Experiment Name: At_Far-red-induction_P Parameter: Tissue Value: Whole Plant
  misc_feature: MA Experiment ID: 20001558 Result: Down-regulated in Transcription
  misc_feature: MA Experiment 20001558 PARAMETER Experiment Name: At_Drought_Soil_Dry_P Parameter: Age (day) Value: 27
  misc_feature: MA Experiment 20001558 PARAMETER Experiment Name: At_Drought_Soil_Dry_P Parameter: Organism Value: A. thaliana
  misc_feature: MA Experiment 20001558 PARAMETER Experiment Name: At_Drought_Soil_Dry_P Parameter: Plant Line Value: WS
  misc_feature: MA Experiment 20001558 PARAMETER Experiment Name: At_Drought_Soil_Dry_P Parameter: Post Timepoint (hr) Value: 6
  misc_feature: MA Experiment 20001558 PARAMETER Experiment Name: At_Drought_Soil_Dry_P Parameter: Post-Treatment Value: Re-Water vs. No Drought
  misc_feature: MA Experiment 20001558 PARAMETER Experiment Name: At_Drought_Soil_Dry_P Parameter: Timepoint (day) Value: 13
  misc_feature: MA Experiment 20001558 PARAMETER Experiment Name: At_Drought_Soil_Dry_P Parameter: Treatment Value: Drought vs. No Drought
  misc_feature: MA Experiment ID: 20001768 Result: Down-regulated in Transcription
  misc_feature: MA Experiment 20001768 PARAMETER Experiment Name: At_Far-red-enriched-adult_P Parameter: Age (day) Value: 28
  misc_feature: MA Experiment 20001768 PARAMETER Experiment Name: At_Far-red-enriched-adult_P Parameter: Light Value: Far-red enriched vs. White
  misc_feature: MA Experiment 20001768 PARAMETER Experiment Name: At_Far-red-enriched-adult_P Parameter: Organism Value: A. thaliana
  misc_feature: MA Experiment 20001768 PARAMETER Experiment Name: At_Far-red-enriched-adult_P Parameter: Plant Line Value: Columbia
  misc_feature: MA Experiment 20001768 PARAMETER Experiment Name: At_Far-red-enriched-adult_P Parameter: Timepoint (hr) Value: 1
  misc_feature: MA Experiment 20001768 PARAMETER Experiment Name: At_Far-red-enriched-adult_P Parameter: Tissue Value: Aerial

SEQ ID NO: 27994 - protein, 524 aa, Arabidopsis thaliana; identical to SEQ ID NO: 22472
  peptide (1)..(524): Ceres Seq. ID no. 13490533
  misc_feature (4)..(522): Homolog of NCBI NO: 12043529 NR Description: beta-glucosidase 1 [Arabidopsis thaliana]
  misc_feature (89)..(524): Homolog of NCBI NO: 1732572 NR Description: beta-glucosidase [Brassica nigra]
  misc_feature (1)..(524): Homolog of NCBI NO: 15241841 NR Description: glycosyl hydrolase family 1 [Arabidopsis thaliana]
  misc_feature (1)..(524): Homolog of NCBI NO: 30697327 NR Description: glycosyl hydrolase family 1, beta-glucosidase
  misc_feature (1)..(524): Homolog of NCBI NO: 2286069 NR Description: beta-glucosidase [Arabidopsis thaliana]
  misc_feature (1)..(524): Homolog of NCBI NO: 15219605 NR Description: glycosyl hydrolase family 1, beta-glucosidase
  misc_feature (1)..(524): Homolog of NCBI NO: 15219623 NR Description: glycosyl hydrolase family 1 [Arabidopsis
  misc_feature (1)..(524): Homolog of NCBI NO: 1732570 NR Description: beta-glucosidase [Arabidopsis thaliana]
  misc_feature (1)..(524): Homolog of NCBI NO: 1363489 NR Description: thioglucosidase (EC 3.2.1.147) 3D precursor -
  misc_feature (1)..(524): Homolog of NCBI NO: 15232626 NR Description: glycosyl hydrolase family 1 [Arabidopsis
  misc_feature (4)..(522): Homolog of NCBI NO: 12043529 NR Description: beta-glucosidase 1 [Arabidopsis thaliana]
  misc_feature (89)..(524): Homolog of NCBI NO: 1732572 NR Description: beta-glucosidase [Brassica nigra]
  misc_feature (1)..(524): Homolog of NCBI NO: 15241841 NR Description: glycosyl hydrolase family 1 [Arabidopsis thaliana]
  misc_feature (1)..(524): Homolog of NCBI NO: 30697327 NR Description: glycosyl hydrolase family 1, beta-glucosidase
  misc_feature (1)..(524): Homolog of NCBI NO: 2286069 NR Description: beta-glucosidase [Arabidopsis thaliana]
  misc_feature (1)..(524): Homolog of NCBI NO: 15219605 NR Description: glycosyl hydrolase family 1, beta-glucosidase
  misc_feature (1)..(524): Homolog of NCBI NO: 15219623 NR Description: glycosyl hydrolase family 1 [Arabidopsis
  misc_feature (1)..(524): Homolog of NCBI NO: 1732570 NR Description: beta-glucosidase [Arabidopsis thaliana]
  misc_feature (1)..(524): Homolog of NCBI NO: 1363489 NR Description: thioglucosidase (EC 3.2.1.147) 3D precursor -
  misc_feature (1)..(524): Homolog of NCBI NO: 15232626 NR Description: glycosyl hydrolase family 1 [Arabidopsis

SEQ ID NO: 27995 - protein, 423 aa, Arabidopsis thaliana; identical to SEQ ID NO: 22473
  peptide (1)..(423): Ceres Seq. ID no. 13490534
  misc_feature (1)..(421): Homolog of NCBI NO: 12043529 NR Description: beta-glucosidase 1 [Arabidopsis thaliana]
  misc_feature (1)..(423): Homolog of NCBI NO: 1732572 NR Description: beta-glucosidase [Brassica nigra]
  misc_feature (1)..(423): Homolog of NCBI NO: 15241841 NR Description: glycosyl hydrolase family 1 [Arabidopsis thaliana]
  misc_feature (1)..(423): Homolog of NCBI NO: 30697327 NR Description: glycosyl hydrolase family 1, beta-glucosidase
  misc_feature (1)..(423): Homolog of NCBI NO: 2286069 NR Description: beta-glucosidase [Arabidopsis thaliana]
  misc_feature (1)..(423): Homolog of NCBI NO: 15219605 NR Description: glycosyl hydrolase family 1, beta-glucosidase
  misc_feature (1)..(423): Homolog of NCBI NO: 15219623 NR Description: glycosyl hydrolase family 1 [Arabidopsis
  misc_feature (1)..(423): Homolog of NCBI NO: 1732570 NR Description: beta-glucosidase [Arabidopsis thaliana]
  misc_feature (1)..(423): Homolog of NCBI NO: 1363489 NR Description: thioglucosidase (EC 3.2.1.147) 3D precursor -
  misc_feature (1)..(423): Homolog of NCBI NO: 15232626 NR Description: glycosyl hydrolase family 1 [Arabidopsis
  misc_feature (1)..(421): Homolog of NCBI NO: 12043529 NR Description: beta-glucosidase 1 [Arabidopsis thaliana]
  misc_feature (1)..(423): Homolog of NCBI NO: 1732572 NR Description: beta-glucosidase [Brassica nigra]
  misc_feature (1)..(423): Homolog of NCBI NO: 15241841 NR Description: glycosyl hydrolase family 1 [Arabidopsis thaliana]
  misc_feature (1)..(423): Homolog of NCBI NO: 30697327 NR Description: glycosyl hydrolase family 1, beta-glucosidase
  misc_feature (1)..(423): Homolog of NCBI NO: 2286069 NR Description: beta-glucosidase [Arabidopsis thaliana]
  misc_feature (1)..(423): Homolog of NCBI NO: 15219605 NR Description: glycosyl hydrolase family 1, beta-glucosidase
  misc_feature (1)..(423): Homolog of NCBI NO: 15219623 NR Description: glycosyl hydrolase family 1 [Arabidopsis
  misc_feature (1)..(423): Homolog of NCBI NO: 1732570 NR Description: beta-glucosidase [Arabidopsis thaliana]
  misc_feature (1)..(423): Homolog of NCBI NO: 1363489 NR Description: thioglucosidase (EC 3.2.1.147) 3D precursor -
  misc_feature (1)..(423): Homolog of NCBI NO: 15232626 NR Description: glycosyl hydrolase family 1 [Arabidopsis

SEQ ID NO: 27996 - protein, 413 aa, Arabidopsis thaliana; identical to SEQ ID NO: 22474
  peptide (1)..(413): Ceres Seq. ID no. 13490535
  misc_feature (1)..(411): Homolog of NCBI NO: 12043529 NR Description: beta-glucosidase 1 [Arabidopsis thaliana]
  misc_feature (1)..(413): Homolog of NCBI NO: 1732572 NR Description: beta-glucosidase [Brassica nigra]
  misc_feature (1)..(413): Homolog of NCBI NO: 15241841 NR Description: glycosyl hydrolase family 1 [Arabidopsis thaliana]
  misc_feature (1)..(413): Homolog of NCBI NO: 30697327 NR Description: glycosyl hydrolase family 1, beta-glucosidase
  misc_feature (1)..(413): Homolog of NCBI NO: 2286069 NR Description: beta-glucosidase [Arabidopsis thaliana]
  misc_feature (1)..(413): Homolog of NCBI NO: 15219605 NR Description: glycosyl hydrolase family 1, beta-glucosidase
  misc_feature (1)..(413): Homolog of NCBI NO: 15219623 NR Description: glycosyl hydrolase family 1 [Arabidopsis
  misc_feature (1)..(413): Homolog of NCBI NO: 1732570 NR Description: beta-glucosidase [Arabidopsis thaliana]
  misc_feature (1)..(413): Homolog of NCBI NO: 1363489 NR Description: thioglucosidase (EC 3.2.1.147) 3D precursor -
  misc_feature (1)..(413): Homolog of NCBI NO: 15232626 NR Description: glycosyl hydrolase family 1 [Arabidopsis
  misc_feature (1)..(411): Homolog of NCBI NO: 12043529 NR Description: beta-glucosidase 1 [Arabidopsis thaliana]
  misc_feature (1)..(413): Homolog of NCBI NO: 1732572 NR Description: beta-glucosidase [Brassica nigra]
  misc_feature (1)..(413): Homolog of NCBI NO: 15241841 NR Description: glycosyl hydrolase family 1 [Arabidopsis thaliana]
  misc_feature (1)..(413): Homolog of NCBI NO: 30697327 NR Description: glycosyl hydrolase family 1, beta-glucosidase
  misc_feature (1)..(413): Homolog of NCBI NO: 2286069 NR Description: beta-glucosidase [Arabidopsis thaliana]
  misc_feature (1)..(413): Homolog of NCBI NO: 15219605 NR Description: glycosyl hydrolase family 1, beta-glucosidase
  misc_feature (1)..(413): Homolog of NCBI NO: 15219623 NR Description: glycosyl hydrolase family 1 [Arabidopsis
  misc_feature (1)..(413): Homolog of NCBI NO: 1732570 NR Description: beta-glucosidase [Arabidopsis thaliana]
  misc_feature (1)..(413): Homolog of NCBI NO: 1363489 NR Description: thioglucosidase (EC 3.2.1.147) 3D precursor -
  misc_feature (1)..(413): Homolog of NCBI NO: 15232626 NR Description: glycosyl hydrolase family 1 [Arabidopsis

SEQ ID NO: 27997 - DNA, 970 bp, Arabidopsis thaliana
  misc_feature (1)..(970): Ceres Seq. ID no. 13504892
  misc_feature: MA Experiment ID: 20001757 Result: Up-regulated in Transcription
  misc_feature: MA Experiment 20001757 PARAMETER Experiment Name: At_50mM_NH4NO3_L-to-H_P Parameter: Timepoint (hr) Value: 6
  misc_feature: MA Experiment 20001757 PARAMETER Experiment Name: At_50mM_NH4NO3_L-to-H_P Parameter: Tissue Value: Leaf
  misc_feature: MA Experiment 20001757 PARAMETER Experiment Name: At_50mM_NH4NO3_L-to-H_P Parameter: Treatment Value: 50mM NH4NO3 vs 100mM Mannitol
tctacgggagctaaaaaggaactgggaagagtttgtttcttcgattcgtagatcaattctcagctgacattgaggtttatctcagatcgaaatcgagaagaagatgtttctcactaggactgagtatgacagaggagtcaatacattttctcctgaaggtcgtctctttcaggttgagtatgccattgaagctatcaagcttggttctactgctattggtgtaaagacgaaagagggagttgttcttgcagtcgagaagcgtattacttcgcctttactggagccgagtagtgttgagaagattatggaaattgatgaccatataggttgtgctatgagtggtctgattgctgacgcgcgaacacttgttgagcatgcacgagtagagacccagaaccacaggttctcgtatggtgagccaatgactgtagaatctacaacacaagctttgtgtgatcttgctttacggtttggtgaaggagaggaagagtcaatgtctcgtccatttggagtatcccttctcattgctgggcatgatgaaaatggaccgagcctgtactacacagatccatcgggaacattctggcaatgcaatgcaaaggcaattgggtctggctcagaaggagctgatagttctctccaagagcaattcaacaaggatataactcttcaagaagctgaaacaatagctgtatctatcctaaagcaagtaatggaagaaaaggtgactccaaacaatgtcgacattgccaaagtcgcaccagcttatcacctctacactcctcaggaggttgaagccgtcatcagtcgtctatgaagaaataaaccgccattctcttcctgttatcttaccttgtctgttcggtaatttatcaggcttctgtctgcttccggttctctaaaccaaaaattagtttcgtttaatcagataatggattttatcgagttgagttttattgagctttctatc

SEQ ID NO: 27998 - protein, 237 aa, Arabidopsis thaliana
  peptide (1)..(237): Ceres Seq. ID no. 13504893
  misc_feature (31)..(218): Pfam Name: Proteasome A-type and B-type Pfam Description: Proteasome A-type and B-type
  misc_feature (1)..(237): Homolog of NCBI NO: 15220961 NR Description: 20S proteasome alpha subunit E1 (PAE1)
  misc_feature (1)..(237): Homolog of NCBI NO: 15231824 NR Description: 20S proteasome alpha subunit E2 (PAE2)
MFLTRTEYDRGVNTFSPEGRLFQVEYAIEAIKLGSTAIGVKTKEGVVLAVEKRITSPLLEPSSVEKIMEIDDHIGCAMSGLIADARTLVEHARVETQNHRFSYGEPMTVESTTQALCDLALRFGEGEEESMSRPFGVSLLIAGHDENGPSLYYTDPSGTFWQCNAKAIGSGSEGADSSLQEQFNKDITLQEAETIAVSILKQVMEEKVTPNNVDIAKVAPAYHLYTPQEVEAVISRL

SEQ ID NO: 27999 - protein, 170 aa, Arabidopsis thaliana
  peptide (1)..(170): Ceres Seq. ID no. 13504894
  misc_feature (1)..(151): Pfam Name: Proteasome A-type and B-type Pfam Description: Proteasome A-type and B-type
  misc_feature (1)..(170): Homolog of NCBI NO: 15220961 NR Description: 20S proteasome alpha subunit E1 (PAE1)
  misc_feature (1)..(170): Homolog of NCBI NO: 15231824 NR Description: 20S proteasome alpha subunit E2 (PAE2)
MEIDDHIGCAMSGLIADARTLVEHARVETQNHRFSYGEPMTVESTTQALCDLALRFGEGEEESMSRPFGVSLLIAGHDENGPSLYYTDPSGTFWQCNAKAIGSGSEGADSSLQEQFNKDITLQEAETIAVSILKQVMEEKVTPNNVDIAKVAPAYHLYTPQEVEAVISRL

SEQ ID NO: 28000 - protein, 160 aa, Arabidopsis thaliana
  peptide (1)..(160): Ceres Seq. ID no. 13504895
  misc_feature (1)..(141): Pfam Name: Proteasome A-type and B-type Pfam Description: Proteasome A-type and B-type
  misc_feature (1)..(160): Homolog of NCBI NO: 15220961 NR Description: 20S proteasome alpha subunit E1 (PAE1)
  misc_feature (1)..(160): Homolog of NCBI NO: 15231824 NR Description: 20S proteasome alpha subunit E2 (PAE2)
MSGLIADARTLVEHARVETQNHRFSYGEPMTVESTTQALCDLALRFGEGEEESMSRPFGVSLLIAGHDENGPSLYYTDPSGTFWQCNAKAIGSGSEGADSSLQEQFNKDITLQEAETIAVSILKQVMEEKVTPNNVDIAKVAPAYHLYTPQEVEAVISRL

SEQ ID NO: 28001 - DNA, 1153 bp, Arabidopsis thaliana
  misc_feature (1)..(1153): Ceres Seq. ID no. 12334239
  misc_feature: MA Experiment ID: 108488 Result: Down-regulated in Transcription
  misc_feature: MA Experiment ID: 20000224 Result: Down-regulated in Transcription
aaaagctaaatcgggaactggcgcattttagtcgtccgccataaccttcgctcttcgctctctgattcttccgattacatcggttttcttctctctccggtacttgtgttctcgtgatcttcttcttccccgcagccgattcattcgatttctctctcttttgtttgatctaattcgatttcgatgaaactcagattttgatctttgagtttttgtttcctttagattcaatggctgctccacctgctagagccagagctgattacgattatctcattaagcttcttttgattggagatagcggtgttggtaaaagttgtcttctactacgtttctctgatggatctttcaccactagcttcattaccactattggcattgactttaagataagaacgattgagcttgacggtaaacgtatcaagcttcagatttgggatacagctggtcaagagcgatttcggactatcaccactgcttattaccgtggggcaatgggcattttgctggtgtatgatgtcacagacgagtcatccttcaacaacattaggaactggattcgtaatatcgaacagcatgcttcggataatgttaacaagatcttggtggaacaaggctgacatggatgaaagcaagagggcagtacctacagcaaagggtcaggctcttgctgatgagtacggaattaagttcttcgaaacaagtgccaagacaaacctaaacgtggaagaagttttcttctcaatagggagggacattaagcagaggctttcagacaccgactcgagggcagagcctgcaacgatcaagataagccaaacggaccaagcagctggagcagggcaggccacacagaaatctgcatgctgtggaacttaaaaaagttttaaaagtgaagtttaagtcgaaaaaagtttgggggtgaagtgaaaaactaagatatcgttgggtgcttatgtaatttttttgttttatgccaacaattctgattcgttcttctaaattgtccttcctatttgtacgaaggtttaatcgaaacttgtatttttcttttctattactgattttttatgacggtgactgaattgtttatgttggtcatcacttctctctatatatcctctgttcttaatttttctcttgcttcctcttt

SEQ ID NO: 28002 - protein, 129 aa, Arabidopsis thaliana
  peptide (1)..(129): Ceres Seq. ID no. 12334240
  misc_feature (17)..(126): Pfam Name: Ras family Pfam Description: Ras family
  misc_feature (1)..(126): Homolog of NCBI NO: 18447915 NR Description: ras-related protein RAB8-2 [Nicotiana tabacum]
  misc_feature (1)..(126): Homolog of NCBI NO: 5669640 NR Description: ethylene-responsive small GTP-binding protein
  misc_feature (1)..(126): Homolog of NCBI NO: 479442 NR Description: GTP-binding protein ypt2 - tomato
  misc_feature (1)..(126): Homolog of NCBI NO: 18447921 NR Description: ras-related protein RAB8-5 [Nicotiana tabacum]
  misc_feature (1)..(126): Homolog of NCBI NO: 18447913 NR Description: ras-related protein RAB8-1 [Nicotiana tabacum]
  misc_feature (1)..(126): Homolog of NCBI NO: 1362066 NR Description: GTP-binding protein GTP6 - garden pea
  misc_feature (1)..(126): Homolog of NCBI NO: 18447917 NR Description: ras-related protein RAB8-3 [Nicotiana tabacum]
  misc_feature (1)..(126): Homolog of NCBI NO: 15231847 NR Description: Ras-related GTP-binding protein, putative
  misc_feature (1)..(126): Homolog of NCBI NO: 15238542 NR Description: GTP-binding protein ara-3; protein id:
  misc_feature (1)..(126): Homolog of NCBI NO: 15231322 NR Description: GTP-binding protein ara-3
MAAPPARARADYDYLIKLLLIGDSGVGKSCLLLRFSDGSFTTSFITTIGIDFKIRTIELDGKRIKLQIWDTAGQERFRTITTAYYRGAMGILLVYDVTDESSFNNIRNWIRNIEQHASDNVNKILVEQG

SEQ ID NO: 28003 - protein, 121 aa, Arabidopsis thaliana
  peptide (1)..(121): Ceres Seq. ID no. 12334241
  misc_feature (33)..(84): Pfam Name: Ras family Pfam Description: Ras family
  misc_feature (33)..(121): Homolog of NCBI NO: 18447915 NR Description: ras-related protein RAB8-2 [Nicotiana tabacum]
  misc_feature (33)..(121): Homolog of NCBI NO: 5669640 NR Description: ethylene-responsive small GTP-binding protein
  misc_feature (33)..(121): Homolog of NCBI NO: 479442 NR Description: GTP-binding protein ypt2 - tomato
  misc_feature (33)..(121): Homolog of NCBI NO: 18447921 NR Description: ras-related protein RAB8-5 [Nicotiana tabacum]
  misc_feature (33)..(121): Homolog of NCBI NO: 18447913 NR Description: ras-related protein RAB8-1 [Nicotiana tabacum]
  misc_feature (33)..(121): Homolog of NCBI NO: 1362066 NR Description: GTP-binding protein GTP6 - garden pea
  misc_feature (33)..(121): Homolog of NCBI NO: 18447917 NR Description: ras-related protein RAB8-3 [Nicotiana tabacum]
  misc_feature (33)..(121): Homolog of NCBI NO: 15231847 NR Description: Ras-related GTP-binding protein, putative
  misc_feature (33)..(121): Homolog of NCBI NO: 15238542 NR Description: GTP-binding protein ara-3; protein id:
  misc_feature (33)..(121): Homolog of NCBI NO: 15231322 NR Description: GTP-binding protein ara-3
MMSQTSHPSTTLGTGFVISNSMLRIMLTRSWWNKADMDESKRAVPTAKGQALADEYGIKFFETSAKTNLNVEEVFFSIGRDIKQRLSDTDSRAEPATIKISQTDQAAGAGQATQKSACCGT

SEQ ID NO: 28004 - protein, 120 aa, Arabidopsis thaliana
  peptide (1)..(120): Ceres Seq. ID no. 12334242
  misc_feature (32)..(83): Pfam Name: Ras family Pfam Description: Ras family
  misc_feature (32)..(120): Homolog of NCBI NO: 18447915 NR Description: ras-related protein RAB8-2 [Nicotiana tabacum]
  misc_feature (32)..(120): Homolog of NCBI NO: 5669640 NR Description: ethylene-responsive small GTP-binding protein
  misc_feature (32)..(120): Homolog of NCBI NO: 479442 NR Description: GTP-binding protein ypt2 - tomato
  misc_feature (32)..(120): Homolog of NCBI NO: 18447921 NR Description: ras-related protein RAB8-5 [Nicotiana tabacum]
  misc_feature (32)..(120): Homolog of NCBI NO: 18447913 NR Description: ras-related protein RAB8-1 [Nicotiana tabacum]
  misc_feature (32)..(120): Homolog of NCBI NO: 1362066 NR Description: GTP-binding protein GTP6 - garden pea
  misc_feature (32)..(120): Homolog of NCBI NO: 18447917 NR Description: ras-related protein RAB8-3 [Nicotiana tabacum]
  misc_feature (32)..(120): Homolog of NCBI NO: 15231847 NR Description: Ras-related GTP-binding protein, putative
  misc_feature (32)..(120): Homolog of NCBI NO: 15238542 NR Description: GTP-binding protein ara-3; protein id:
  misc_feature (32)..(120): Homolog of NCBI NO: 15231322 NR Description: GTP-binding protein ara-3
MSQTSHPSTTLGTGFVISNSMLRIMLTRSWWNKADMDESKRAVPTAKGQALADEYGIKFFETSAKTNLNVEEVFFSIGRDIKQRLSDTDSRAEPATIKISQTDQAAGAGQATQKSACCGT

SEQ ID NO: 28005 - DNA, 1203 bp, Arabidopsis thaliana
  misc_feature (1)..(1203): Ceres Seq. ID no. 12371326
  misc_feature: MA Experiment ID: 108434 Result: Down-regulated in Transcription
  misc_feature: MA Experiment 108434 PARAMETER Experiment Name: At_Root_Tips_cDNA_P Parameter: Tissue Value: Root Tips
  misc_feature: MA Experiment ID: 108462 Result: Up-regulated in Transcription
  misc_feature: MA Experiment 108462 PARAMETER Experiment Name: At_Germinating_Seeds_cDNA_P Parameter: Age (day) Value: 2 vs. 0
  misc_feature: MA Experiment 108462 PARAMETER Experiment Name: At_Germinating_Seeds_cDNA_P Parameter: Tissue Value: Germinating Seeds
  misc_feature: MA Experiment ID: 108463 Result: Up-regulated in Transcription
  misc_feature: MA Experiment 108463 PARAMETER Experiment Name: At_Germinating_Seeds_cDNA_P Parameter: Age (day) Value: 3 vs. 0
  misc_feature: MA Experiment 108463 PARAMETER Experiment Name: At_Germinating_Seeds_cDNA_P Parameter: Tissue Value: Germinating Seeds
  misc_feature: MA Experiment ID: 108464 Result: Up-regulated in Transcription
  misc_feature: MA Experiment 108464 PARAMETER Experiment Name: At_Germinating_Seeds_cDNA_P Parameter: Age (day) Value: 4 vs. 0
  misc_feature: MA Experiment 108464 PARAMETER Experiment Name: At_Germinating_Seeds_cDNA_P Parameter: Tissue Value: Germinating Seeds
  misc_feature: MA Experiment ID: 108488 Result: Down-regulated in Transcription
  misc_feature: MA Experiment ID: 108573 Result: Down-regulated in Transcription
  misc_feature: MA Experiment 108573 PARAMETER Experiment Name: At_Drought_cDNA_P Parameter: Timepoint (hr) Value: 6
  misc_feature: MA Experiment 108573 PARAMETER Experiment Name: At_Drought_cDNA_P Parameter: Tissue Value: Aerial
  misc_feature: MA Experiment 108573 PARAMETER Experiment Name: At_Drought_cDNA_P Parameter: Treatment Value: Drought vs. No Drought
  misc_feature: MA Experiment ID: 108577 Result: Down-regulated in Transcription
  misc_feature: MA Experiment 108577 PARAMETER Experiment Name: At_42deg_Heat_cDNA_P Parameter: Temperature (deg C) Value: 42 vs. 22
  misc_feature: MA Experiment 108577 PARAMETER Experiment Name: At_42deg_Heat_cDNA_P Parameter: Timepoint (hr) Value: 6
  misc_feature: MA Experiment 108577 PARAMETER Experiment Name: At_42deg_Heat_cDNA_P Parameter: Tissue Value: Aerial
  misc_feature: MA Experiment ID: 108668 Result: Up-regulated in Transcription
  misc_feature: MA Experiment 108668 PARAMETER Experiment Name: At_2mM_SA_cDNA_P Parameter: Plant Line Value: WS
  misc_feature: MA Experiment 108668 PARAMETER Experiment Name: At_2mM_SA_cDNA_P Parameter: Timepoint (hr) Value: 6
  misc_feature: MA Experiment 108668 PARAMETER Experiment Name: At_2mM_SA_cDNA_P Parameter: Treatment Value: 2mM SA vs. No Treatment
  misc_feature: MA Experiment ID: 20000087 Result: Down-regulated in Transcription
  misc_feature: MA Experiment 20000087 PARAMETER Experiment Name: At_100uM_ABA_Mutants_cDNA_P Parameter: Plant Line Value: WS
  misc_feature: MA Experiment 20000087 PARAMETER Experiment Name: At_100uM_ABA_Mutants_cDNA_P Parameter: Timepoint (hr) Value: 6
  misc_feature: MA Experiment 20000087 PARAMETER Experiment Name: At_100uM_ABA_Mutants_cDNA_P Parameter: Tissue Value: Aerial
  misc_feature: MA Experiment 20000087 PARAMETER Experiment Name: At_100uM_ABA_Mutants_cDNA_P Parameter: Treatment Value: 100uM ABA vs. No Treatment
  misc_feature: MA Experiment ID: 20000093 Result: Down-regulated in Transcription
  misc_feature: MA Experiment 20000093 PARAMETER Experiment Name: At_42deg_Heat_cDNA_P Parameter: Temperature (deg C) Value: 42 vs. 22
  misc_feature: MA Experiment 20000093 PARAMETER Experiment Name: At_42deg_Heat_cDNA_P Parameter: Timepoint (hr) Value: 0.5
  misc_feature: MA Experiment 20000093 PARAMETER Experiment Name: At_42deg_Heat_cDNA_P Parameter: Tissue Value: Aerial
  misc_feature: MA Experiment ID: 20000111 Result: Down-regulated in Transcription
  misc_feature: MA Experiment 20000111 PARAMETER Experiment Name: At_42deg_Heat_cDNA_P Parameter: Temperature (deg C) Value: 42 vs. 22
  misc_feature: MA Experiment 20000111 PARAMETER Experiment Name: At_42deg_Heat_cDNA_P Parameter: Timepoint (hr) Value: 6
  misc_feature: MA Experiment 20000111 PARAMETER Experiment Name: At_42deg_Heat_cDNA_P Parameter: Tissue Value: Aerial
  misc_feature: MA Experiment ID: 20000113 Result: Down-regulated in Transcription
  misc_feature: MA Experiment 20000113 PARAMETER Experiment Name: At_42deg_Heat_cDNA_P Parameter: Temperature (deg C) Value: 42 vs. 22
  misc_feature: MA Experiment 20000113 PARAMETER Experiment Name: At_42deg_Heat_cDNA_P Parameter: Timepoint (hr) Value: 8
  misc_feature: MA Experiment 20000113 PARAMETER Experiment Name: At_42deg_Heat_cDNA_P Parameter: Tissue Value: Aerial
  misc_feature: MA Experiment ID: 20000144 Result: Down-regulated in Transcription
  misc_feature: MA Experiment 20000144 PARAMETER Experiment Name: At_42deg_Heat_cDNA_P Parameter: Temperature (deg C) Value: 42 vs. 22
  misc_feature: MA Experiment 20000144 PARAMETER Experiment Name: At_42deg_Heat_cDNA_P Parameter: Timepoint (hr) Value: 1
  misc_feature: MA Experiment 20000144 PARAMETER Experiment Name: At_42deg_Heat_cDNA_P Parameter: Tissue Value: Aerial
  misc_feature: MA Experiment ID: 20000171 Result: Down-regulated in Transcription
  misc_feature: MA Experiment 20000171 PARAMETER Experiment Name: At_42deg_Heat_P Parameter: Age (day) Value: 14
  misc_feature: MA Experiment 20000171 PARAMETER Experiment Name: At_42deg_Heat_P Parameter: Organism Value: A. thaliana
  misc_feature: MA Experiment 20000171 PARAMETER Experiment Name: At_42deg_Heat_P Parameter: Plant Line Value: WS
  misc_feature: MA Experiment 20000171 PARAMETER Experiment Name: At_42deg_Heat_P Parameter: Temperature (deg C) Value: 42 vs. 22
  misc_feature: MA Experiment 20000171 PARAMETER Experiment Name: At_42deg_Heat_P Parameter: Timepoint (hr) Value: 1
  misc_feature: MA Experiment 20000171 PARAMETER Experiment Name: At_42deg_Heat_P Parameter: Tissue Value: Aerial
  misc_feature: MA Experiment ID: 20000173 Result: Down-regulated in Transcription
  misc_feature: MA Experiment 20000173 PARAMETER Experiment Name: At_42deg_Heat_P Parameter: Age (day) Value: 14
  misc_feature: MA Experiment 20000173 PARAMETER Experiment Name: At_42deg_Heat_P Parameter: Organism Value: A. thaliana
  misc_feature: MA Experiment 20000173 PARAMETER Experiment Name: At_42deg_Heat_P Parameter: Plant Line Value: WS
  misc_feature: MA Experiment 20000173 PARAMETER Experiment Name: At_42deg_Heat_P Parameter: Temperature (deg C) Value: 42 vs. 22
  misc_feature: MA Experiment 20000173 PARAMETER Experiment Name: At_42deg_Heat_P Parameter: Timepoint (hr) Value: 6
  misc_feature: MA Experiment 20000173 PARAMETER Experiment Name: At_42deg_Heat_P Parameter: Tissue Value: Aerial
  misc_feature: MA Experiment ID: 20000179 Result: Up-regulated in Transcription
  misc_feature: MA Experiment 20000179 PARAMETER Experiment Name: At_Germinating_Seeds_P Parameter: Age (hr) Value: 6 vs. 0
  misc_feature: MA Experiment 20000179 PARAMETER Experiment Name: At_Germinating_Seeds_P Parameter: Tissue Value: Germinating Seeds
  misc_feature: MA Experiment ID: 20000182 Result: Up-regulated in Transcription
  misc_feature: MA Experiment 20000182 PARAMETER Experiment Name: At_2mM_SA_P Parameter: Age (day) Value: 14
  misc_feature: MA Experiment 20000182 PARAMETER Experiment Name: At_2mM_SA_P Parameter: Organism Value: A. thaliana
  misc_feature: MA Experiment 20000182 PARAMETER Experiment Name: At_2mM_SA_P Parameter: Plant Line Value: WS
  misc_feature: MA Experiment 20000182 PARAMETER Experiment Name: At_2mM_SA_P Parameter: Timepoint (hr) Value: 6
  misc_feature: MA Experiment 20000182 PARAMETER Experiment Name: At_2mM_SA_P Parameter: Tissue Value: Aerial
  misc_feature: MA Experiment 20000182 PARAMETER Experiment Name: At_2mM_SA_P Parameter: Treatment Value: 2mM SA vs. No Treatment
  misc_feature: MA Experiment ID: 20000184 Result: Down-regulated in Transcription
  misc_feature: MA Experiment 20000184 PARAMETER Experiment Name: At_Shoots__P Parameter: Age (day) Value: 7
  misc_feature: MA Experiment 20000184 PARAMETER Experiment Name: At_Shoots__P Parameter: Tissue Value: Shoots vs. Whole Plant
  misc_feature: MA Experiment ID: 20000185 Result: Down-regulated in Transcription
  misc_feature: MA Experiment 20000185 PARAMETER Experiment Name: At_Roots__P Parameter: Age (day) Value: 7 vs. 21
  misc_feature: MA Experiment 20000185 PARAMETER Experiment Name: At_Roots__P Parameter: Organism Value: A. thaliana
  misc_feature: MA Experiment 20000185 PARAMETER Experiment Name: At_Roots__P Parameter: Tissue Value: Roots vs. Whole Plant
  misc_feature: MA Experiment ID: 20000227 Result: Down-regulated in Transcription
  misc_feature: MA Experiment 20000227 PARAMETER Experiment Name: At_Root-Tips-vs-Tops_P Parameter: Tissue Value: Root Tips vs. Root Tops
  misc_feature: MA Experiment ID: 20000234 Result: Down-regulated in Transcription
  misc_feature: MA Experiment 20000234 PARAMETER Experiment Name: At_Siliques_P Parameter: Age (day) Value: 21
  misc_feature: MA Experiment 20000234 PARAMETER Experiment Name: At_Siliques_P Parameter: Organism Value: A. thaliana
  misc_feature: MA Experiment 20000234 PARAMETER Experiment Name: At_Siliques_P Parameter: Plant Line Value: WS
  misc_feature: MA Experiment 20000234 PARAMETER Experiment Name: At_Siliques_P Parameter: Tissue Value: Less Than 5mm Siliques vs. Whole Plant
  misc_feature: MA Experiment ID: 20000264 Result: Down-regulated in Transcription
  misc_feature: MA Experiment 20000264 PARAMETER Experiment Name: At_Open_Flower_P Parameter: Age (day) Value: 21
  misc_feature: MA Experiment 20000264 PARAMETER Experiment Name: At_Open_Flower_P Parameter: Plant Line Value: WS
  misc_feature: MA Experiment 20000264 PARAMETER Experiment Name: At_Open_Flower_P Parameter: Tissue Value: Open Flower vs. Whole Plant
  misc_feature: MA Experiment ID: 20000265 Result: Down-regulated in Transcription
  misc_feature: MA Experiment 20000265 PARAMETER Experiment Name: At_Open_Flower_P Parameter: Age (day) Value: 21
  misc_feature: MA Experiment 20000265 PARAMETER Experiment Name: At_Open_Flower_P Parameter: Plant Line Value: WS
  misc_feature: MA Experiment 20000265 PARAMETER Experiment Name: At_Open_Flower_P Parameter: Tissue Value: Closed Flower vs. Whole Plant
  misc_feature: MA Experiment ID: 20000286 Result: Down-regulated in Transcription
  misc_feature: MA Experiment 20000286 PARAMETER Experiment Name: At_Open_Flower_P Parameter: Age (day) Value: 21
  misc_feature: MA Experiment 20000286 PARAMETER Experiment Name: At_Open_Flower_P Parameter: Plant Line Value: WS
  misc_feature: MA Experiment 20000286 PARAMETER Experiment Name: At_Open_Flower_P Parameter: Tissue Value: Half Open vs. Whole Plant
  misc_feature: MA Experiment ID: 20000437 Result: Down-regulated in Transcription
  misc_feature: MA Experiment 20000437 PARAMETER Experiment Name: At_Drought_P Parameter: Age (day) Value: 8
  misc_feature: MA Experiment 20000437 PARAMETER Experiment Name: At_Drought_P Parameter: Organism Value: A. thaliana
  misc_feature: MA Experiment 20000437 PARAMETER Experiment Name: At_Drought_P Parameter: Plant Line Value: WS
  misc_feature: MA Experiment 20000437 PARAMETER Experiment Name: At_Drought_P Parameter: Timepoint (hr) Value: 24
  misc_feature: MA Experiment 20000437 PARAMETER Experiment Name: At_Drought_P Parameter: Tissue Value: Whole Plant
  misc_feature: MA Experiment 20000437 PARAMETER Experiment Name: At_Drought_P Parameter: Treatment Value: Drought vs. No Drought
  misc_feature: MA Experiment ID: 20000495 Result: Down-regulated in Transcription
  misc_feature: MA Experiment 20000495 PARAMETER Experiment Name: At_Guard_Cells_P Parameter: Harvest Date Value: 8/2/2002
  misc_feature: MA Experiment 20000495 PARAMETER Experiment Name: At_Guard_Cells_P Parameter: Organism Value: A. thaliana
  misc_feature: MA Experiment 20000495 PARAMETER Experiment Name: At_Guard_Cells_P Parameter: Tissue Value: Guard Cells vs. Leaves
  misc_feature: MA Experiment ID: 20000709 Result: Down-regulated in Transcription
  misc_feature: MA Experiment 20000709 PARAMETER Experiment Name: At_15mM_NH4NO3_L-to-H_P Parameter: Age (hr) Value: 14
  misc_feature: MA Experiment 20000709 PARAMETER Experiment Name: At_15mM_NH4NO3_L-to-H_P Parameter: Organism Value: A. thaliana
  misc_feature: MA Experiment 20000709 PARAMETER Experiment Name: At_15mM_NH4NO3_L-to-H_P Parameter: Plant Line Value: WS
  misc_feature: MA Experiment 20000709 PARAMETER Experiment Name: At_15mM_NH4NO3_L-to-H_P Parameter: Timepoint (hr) Value: 4
  misc_feature: MA Experiment 20000709 PARAMETER Experiment Name: At_15mM_NH4NO3_L-to-H_P Parameter: Tissue Value: Aerial
  misc_feature: MA Experiment 20000709 PARAMETER Experiment Name: At_15mM_NH4NO3_L-to-H_P Parameter: Treatment Value: 15mM NH4NO3 vs. 30mM Mannitol
  misc_feature: MA Experiment ID: 20000794 Result: Down-regulated in Transcription
  misc_feature: MA Experiment 20000794 PARAMETER Experiment Name: At_Petals_P Parameter: Age (day) Value: 23-25 days
  misc_feature: MA Experiment 20000794 PARAMETER Experiment Name: At_Petals_P Parameter: Plant Line Value: WS
  misc_feature: MA Experiment 20000794 PARAMETER Experiment Name: At_Petals_P Parameter: Tissue Value: Petals vs. Whole plant
  misc_feature: MA Experiment ID: 20001905 Result: Down-regulated in Transcription
  misc_feature: MA Experiment 20001905 PARAMETER Experiment Name: At_Drought_Reproduction_P Parameter: Age (day) Value: 40
  misc_feature: MA Experiment 20001905 PARAMETER Experiment Name: At_Drought_Reproduction_P Parameter: Organism Value: A. thaliana
  misc_feature: MA Experiment 20001905 PARAMETER Experiment Name: At_Drought_Reproduction_P Parameter: Plant Line Value: WS
  misc_feature: MA Experiment 20001905 PARAMETER Experiment Name: At_Drought_Reproduction_P Parameter: Timepoint (day) Value: 10
  misc_feature: MA Experiment 20001905 PARAMETER Experiment Name: At_Drought_Reproduction_P Parameter: Tissue Value: Rosettes
  misc_feature: MA Experiment 20001905 PARAMETER Experiment Name: At_Drought_Reproduction_P Parameter: Treatment Value: Drought vs. No Drought
acaacgctttttgtctcatctccttcttcttctccttctcaaatcttttttttcaggcgtaacgaatcgaatcataaacacttacgcagaaacaaaaactaaactttggatcttttaaccgaccatagagattcgtgggttcttcttagtttcgacagattcttgatccgttttagttgttacgctcatctttgcttttatacatcagacccttctcttctcttccttctttatctaagaaacattagggttctttgaaatcttgctaaaaaaaaatgggtgttgagaaaatggtgtgtttagcttctcgtacgggtcgtcagtttcagagatacaacaaaggtcgtcgtcaagtcgttggatgtgttccttacagattcaagctatctaatgatggtaaaataagtgatgaagtagaagttcttgttatctcttcccaaaaaggccacgccttaatgttccccaagggtggttgggagcttgatgaatctgtagaagaagctgcatcaagagaatgtcttgaagaagctggagttcttggcaacgttgagcaccaacttggaaaatgggattttttaagcaaaagcagaggaacatactatgaaggactaatgttccctatgcttgttacagaacaacttgagctttggcctgaacaacatgttaggcaaagaatctggatgaatgtaaccgaagcaagagaagcttgtagagattggtggatgaaagaagcattagatgttttggttgagagactttcatcaccaatgaatcaaccaaaggaagagaagactatgtcaatctctattgaaacaatgtgttgatgatgaagctgatgattgctaaattgctgattgttgatgggagtttttatgagctaatatggatctctgtaggtattaaatagatgggtctcaattagttattgagacggctaaaaaaatctatttcgaaaagccgatgcagagagcatggacaaagaaaaagatggtagagttttaagttttggatcagaaagattaacatcatgtgatttaagaagtcttgtgtttgtgtttataatgtttctgcaagaacttcttaagatatgattaagagggaagatgataaacttagagtgcaagcaaaacctgtataattgtgtttccctctgtttatttttcctctctctttgaatttgcaatggagacatttgatttcatc

SEQ ID NO: 28006 - protein, 182 aa, Arabidopsis thaliana
  peptide (1)..(182): Ceres Seq. ID no. 12371327
  misc_feature (24)..(160): Pfam Name: NUDIX domain Pfam Description: NUDIX domain
  misc_feature (6)..(174): Homolog of NCBI NO: 18391450 NR Description: expressed protein
  misc_feature (7)..(154): Homolog of NCBI NO: 34900054 NR Description: MutT-like protein~contains ESTs
  misc_feature (7)..(154): Homolog of NCBI NO: 38175436 NR Description: MutT-like protein [Oryza sativa (japonica
  misc_feature (4)..(160): Homolog of NCBI NO: 25367539 NR Description: unknown protein [imported] - Arabidopsis thaliana
  misc_feature (4)..(160): Homolog of NCBI NO: 22330598 NR Description: unknown protein
  misc_feature (3)..(158): Homolog of NCBI NO: 15221055 NR Description: unknown protein; protein id: At1g18300.1
  misc_feature (27)..(167): Homolog of NCBI NO: 31747031 NR Description: MutT-like protein [Cucumis sativus]
  misc_feature (6)..(171): Homolog of NCBI NO: 15223919 NR Description: hypothetical protein; protein id: At1g14860.1
  misc_feature (6)..(182): Homolog of NCBI NO: 21595695 NR Description: unknown [Arabidopsis thaliana]
  misc_feature (1)..(182): Homolog of NCBI NO: 18379275 NR Description: expressed protein
MGVEKMVCLASRTGRQFQRYNKGRRQVVGCVPYRFKLSNDGKISDEVEVLVISSQKGHALMFPKGGWELDESVEEAASRECLEEAGVLGNVEHQLGKWDFLSKSRGTYYEGLMFPMLVTEQLELWPEQHVRQRIWMNVTEAREACRDWWMKEALDVLVERLSSPMNQPKEEKTMSISIETMC

SEQ ID NO: 28007 - protein, 177 aa, Arabidopsis thaliana
  peptide (1)..(177): Ceres Seq. ID no. 12371328
  misc_feature (19)..(155): Pfam Name: NUDIX domain Pfam Description: NUDIX domain
  misc_feature (1)..(169): Homolog of NCBI NO: 18391450 NR Description: expressed protein
  misc_feature (2)..(149): Homolog of NCBI NO: 34900054 NR Description: MutT-like protein~contains ESTs
  misc_feature (2)..(149): Homolog of NCBI NO: 38175436 NR Description: MutT-like protein [Oryza sativa (japonica
  misc_feature (1)..(155): Homolog of NCBI NO: 25367539 NR Description: unknown protein [imported] - Arabidopsis thaliana
  misc_feature (1)..(155): Homolog of NCBI NO: 22330598 NR Description: unknown protein
  misc_feature (1)..(153): Homolog of NCBI NO: 15221055 NR Description: unknown protein; protein id: At1g18300.1
  misc_feature (22)..(162): Homolog of NCBI NO: 31747031 NR Description: MutT-like protein [Cucumis sativus]
  misc_feature (1)..(166): Homolog of NCBI NO: 15223919 NR Description: hypothetical protein; protein id: At1g14860.1
  misc_feature (1)..(177): Homolog of NCBI NO: 21595695 NR Description: unknown [Arabidopsis thaliana]
  misc_feature (1)..(177): Homolog of NCBI NO: 18379275 NR Description: expressed protein
MVCLASRTGRQFQRYNKGRRQVVGCVPYRFKLSNDGKISDEVEVLVISSQKGHALMFPKGGWELDESVEEAASRECLEEAGVLGNVEHQLGKWDFLSKSRGTYYEGLMFPMLVTEQLELWPEQHVRQRIWMNVTEAREACRDWWMKEALDVLVERLSSPMNQPKEEKTMSISIETMC

SEQ ID NO: 28008 - protein, 122 aa, Arabidopsis thaliana
  peptide (1)..(122): Ceres Seq. ID no. 12371329
  misc_feature (1)..(100): Pfam Name: NUDIX domain Pfam Description: NUDIX domain
  misc_feature (1)..(114): Homolog of NCBI NO: 18391450 NR Description: expressed protein
  misc_feature (1)..(94): Homolog of NCBI NO: 34900054 NR Description: MutT-like protein~contains ESTs
  misc_feature (1)..(94): Homolog of NCBI NO: 38175436 NR Description: MutT-like protein [Oryza sativa (japonica
  misc_feature (1)..(100): Homolog of NCBI NO: 25367539 NR Description: unknown protein [imported] - Arabidopsis thaliana
  misc_feature (1)..(100): Homolog of NCBI NO: 22330598 NR Description: unknown protein
  misc_feature (1)..(98): Homolog of NCBI NO: 15221055 NR Description: unknown protein; protein id: At1g18300.1
  misc_feature (1)..(107): Homolog of NCBI NO: 31747031 NR Description: MutT-like protein [Cucumis sativus]
  misc_feature (1)..(111): Homolog of NCBI NO: 15223919 NR Description: hypothetical protein; protein id: At1g14860.1
  misc_feature (1)..(122): Homolog of NCBI NO: 21595695 NR Description: unknown [Arabidopsis thaliana]
  misc_feature (1)..(122): Homolog of NCBI NO: 18379275 NR Description: expressed protein
MFPKGGWELDESVEEAASRECLEEAGVLGNVEHQLGKWDFLSKSRGTYYEGLMFPMLVTEQLELWPEQHVRQRIWMNVTEAREACRDWWMKEALDVLVERLSSPMNQPKEEKTMSISIETMC

SEQ ID NO: 28009 - DNA, 1271 bp, Arabidopsis thaliana
  misc_feature (1)..(1271): Ceres Seq. ID no. 13490305
  misc_feature: MA Experiment ID: 20000180 Result: Up-regulated in Transcription
  misc_feature: MA Experiment 20000180 PARAMETER Experiment Name: At_Germinating_Seeds_P Parameter: Age (hr) Value: 24 vs. 0
  misc_feature: MA Experiment 20000180 PARAMETER Experiment Name: At_Germinating_Seeds_P Parameter: Tissue Value: Germinating Seeds
  misc_feature: MA Experiment ID: 20000185 Result: Down-regulated in Transcription
  misc_feature: MA Experiment 20000185 PARAMETER Experiment Name: At_Roots__P Parameter: Age (day) Value: 7 vs. 21
  misc_feature: MA Experiment 20000185 PARAMETER Experiment Name: At_Roots__P Parameter: Organism Value: A. thaliana
  misc_feature: MA Experiment 20000185 PARAMETER Experiment Name: At_Roots__P Parameter: Tissue Value: Roots vs. Whole Plant
  misc_feature: MA Experiment ID: 20000227 Result: Down-regulated in Transcription
  misc_feature: MA Experiment 20000227 PARAMETER Experiment Name: At_Root-Tips-vs-Tops_P Parameter: Tissue Value: Root Tips vs. Root Tops
  misc_feature: MA Experiment ID: 20000264 Result: Down-regulated in Transcription
  misc_feature: MA Experiment 20000264 PARAMETER Experiment Name: At_Open_Flower_P Parameter: Age (day) Value: 21
  misc_feature: MA Experiment 20000264 PARAMETER Experiment Name: At_Open_Flower_P Parameter: Plant Line Value: WS
  misc_feature: MA Experiment 20000264 PARAMETER Experiment Name: At_Open_Flower_P Parameter: Tissue Value: Open Flower vs. Whole Plant
  misc_feature: MA Experiment ID: 20000269 Result: Down-regulated in Transcription
  misc_feature: MA Experiment 20000269 PARAMETER Experiment Name: At_1mM_KNO3_L-vs-H_Roots_P Parameter: Age (day) Value: 7,10,12
  misc_feature: MA Experiment 20000269 PARAMETER Experiment Name: At_1mM_KNO3_L-vs-H_Roots_P Parameter: Organism Value: A. thaliana
  misc_feature: MA Experiment 20000269 PARAMETER Experiment Name: At_1mM_KNO3_L-vs-H_Roots_P Parameter: Plant Line Value: WS
  misc_feature: MA Experiment 20000269 PARAMETER Experiment Name: At_1mM_KNO3_L-vs-H_Roots_P Parameter: Timepoint (day) Value: 7,10,12
  misc_feature: MA Experiment 20000269 PARAMETER Experiment Name: At_1mM_KNO3_L-vs-H_Roots_P Parameter: Tissue Value: Roots
  misc_feature: MA Experiment 20000269 PARAMETER Experiment Name: At_1mM_KNO3_L-vs-H_Roots_P Parameter: Treatment Value: 1mM KNO3 vs. 50mM KNO3
  misc_feature: MA Experiment ID: 20000286 Result: Down-regulated in Transcription
  misc_feature: MA Experiment 20000286 PARAMETER Experiment Name: At_Open_Flower_P Parameter: Age (day) Value: 21
  misc_feature: MA Experiment 20000286 PARAMETER Experiment Name: At_Open_Flower_P Parameter: Plant Line Value: WS
  misc_feature: MA Experiment 20000286 PARAMETER Experiment Name: At_Open_Flower_P Parameter: Tissue Value: Half Open vs. Whole Plant
  misc_feature: MA Experiment ID: 20000436 Result: Down-regulated in Transcription
  misc_feature: MA Experiment 20000436 PARAMETER Experiment Name: At_Drought_P Parameter: Age (day) Value: 7
  misc_feature: MA Experiment 20000436 PARAMETER Experiment Name: At_Drought_P Parameter: Organism Value: A. thaliana
  misc_feature: MA Experiment 20000436 PARAMETER Experiment Name: At_Drought_P Parameter: Plant Line Value: WS
  misc_feature: MA Experiment 20000436 PARAMETER Experiment Name: At_Drought_P Parameter: Timepoint (hr) Value: 12
  misc_feature: MA Experiment 20000436 PARAMETER Experiment Name: At_Drought_P Parameter: Tissue Value: Whole Plant
  misc_feature: MA Experiment 20000436 PARAMETER Experiment Name: At_Drought_P Parameter: Treatment Value: Drought vs. No Drought
  misc_feature: MA Experiment ID: 20000437 Result: Down-regulated in Transcription
  misc_feature: MA Experiment 20000437 PARAMETER Experiment Name: At_Drought_P Parameter: Age (day) Value: 8
  misc_feature: MA Experiment 20000437 PARAMETER Experiment Name: At_Drought_P Parameter: Organism Value: A. thaliana
  misc_feature: MA Experiment 20000437 PARAMETER Experiment Name: At_Drought_P Parameter: Plant Line Value: WS
  misc_feature: MA Experiment 20000437 PARAMETER Experiment Name: At_Drought_P Parameter: Timepoint (hr) Value: 24
  misc_feature: MA Experiment 20000437 PARAMETER Experiment Name: At_Drought_P Parameter: Tissue Value: Whole Plant
  misc_feature: MA Experiment 20000437 PARAMETER Experiment Name: At_Drought_P Parameter: Treatment Value: Drought vs. No Drought
  misc_feature: MA Experiment ID: 20000438 Result: Up-regulated in Transcription
  misc_feature: MA Experiment 20000438 PARAMETER Experiment Name: At_Shoots__P Parameter: Age (day) Value: 14
  misc_feature: MA Experiment 20000438 PARAMETER Experiment Name: At_Shoots__P Parameter: Tissue Value: Shoots vs. Whole Plant
  misc_feature: MA Experiment ID: 20000439 Result: Down-regulated in Transcription
  misc_feature: MA Experiment 20000439 PARAMETER Experiment Name: At_Roots__P Parameter: Age (day) Value: 14 vs. 21
  misc_feature: MA Experiment 20000439 PARAMETER Experiment Name: At_Roots__P Parameter: Organism Value: A. thaliana
  misc_feature: MA Experiment 20000439 PARAMETER Experiment Name: At_Roots__P Parameter: Tissue Value: Roots vs. Whole Plant
  misc_feature: MA Experiment ID: 20000794 Result: Down-regulated in Transcription
  misc_feature: MA Experiment 20000794 PARAMETER Experiment Name: At_Petals_P Parameter: Age (day) Value: 23-25 days
  misc_feature: MA Experiment 20000794 PARAMETER Experiment Name: At_Petals_P Parameter: Plant Line Value: WS
  misc_feature: MA Experiment 20000794 PARAMETER Experiment Name: At_Petals_P Parameter: Tissue Value: Petals vs. Whole plant
  misc_feature: MA Experiment ID: 20001557 Result: Down-regulated in Transcription
  misc_feature: MA Experiment 20001557 PARAMETER Experiment Name: At_Drought_Soil_Dry_P Parameter: Age (day) Value: 27
  misc_feature: MA Experiment 20001557 PARAMETER Experiment Name: At_Drought_Soil_Dry_P Parameter: Organism Value: A. thaliana
  misc_feature: MA Experiment 20001557 PARAMETER Experiment Name: At_Drought_Soil_Dry_P Parameter: Plant Line Value: WS
  misc_feature: MA Experiment 20001557 PARAMETER Experiment Name: At_Drought_Soil_Dry_P Parameter: Post Timepoint (hr) Value: 3
  misc_feature: MA Experiment 20001557 PARAMETER Experiment Name: At_Drought_Soil_Dry_P Parameter: Post-Treatment Value: Re-Water vs. No Drought
  misc_feature: MA Experiment 20001557 PARAMETER Experiment Name: At_Drought_Soil_Dry_P Parameter: Timepoint (day) Value: 13
  misc_feature: MA Experiment 20001557 PARAMETER Experiment Name: At_Drought_Soil_Dry_P Parameter: Treatment Value: Drought vs. No Drought
  misc_feature: MA Experiment ID: 20001559 Result: Down-regulated in Transcription
  misc_feature: MA Experiment 20001559 PARAMETER Experiment Name: At_Drought_Soil_Dry_P Parameter: Age (day) Value: 28
  misc_feature: MA Experiment 20001559 PARAMETER Experiment Name: At_Drought_Soil_Dry_P Parameter: Organism Value: A. thaliana
  misc_feature: MA Experiment 20001559 PARAMETER Experiment Name: At_Drought_Soil_Dry_P Parameter: Plant Line Value: WS
  misc_feature: MA Experiment 20001559 PARAMETER Experiment Name: At_Drought_Soil_Dry_P Parameter: Post Timepoint (hr) Value: 29
  misc_feature: MA Experiment 20001559 PARAMETER Experiment Name: At_Drought_Soil_Dry_P Parameter: Post-Treatment Value: Re-Water vs. No Drought
  misc_feature: MA Experiment 20001559 PARAMETER Experiment Name: At_Drought_Soil_Dry_P Parameter: Timepoint (day) Value: 14
  misc_feature: MA Experiment 20001559 PARAMETER Experiment Name: At_Drought_Soil_Dry_P Parameter: Treatment Value: Drought vs. No Drought
  misc_feature: MA Experiment ID: 20001757 Result: Up-regulated in Transcription
  misc_feature: MA Experiment 20001757 PARAMETER Experiment Name: At_50mM_NH4NO3_L-to-H_P Parameter: Timepoint (hr) Value: 6
  misc_feature: MA Experiment 20001757 PARAMETER Experiment Name: At_50mM_NH4NO3_L-to-H_P Parameter: Tissue Value: Leaf
  misc_feature: MA Experiment 20001757 PARAMETER Experiment Name: At_50mM_NH4NO3_L-to-H_P Parameter: Treatment Value: 50mM NH4NO3 vs 100mM Mannitol
  misc_feature: MA Experiment ID: 20001904 Result: Down-regulated in Transcription
  misc_feature: MA Experiment 20001904 PARAMETER Experiment Name: At_Drought_Reproduction_P Parameter: Age (day) Value: 37
  misc_feature: MA Experiment 20001904 PARAMETER Experiment Name: At_Drought_Reproduction_P Parameter: Organism Value: A. thaliana
  misc_feature: MA Experiment 20001904 PARAMETER Experiment Name: At_Drought_Reproduction_P Parameter: Plant Line Value: WS
  misc_feature: MA Experiment 20001904 PARAMETER Experiment Name: At_Drought_Reproduction_P Parameter: Timepoint (day) Value: 7
  misc_feature: MA Experiment 20001904 PARAMETER Experiment Name: At_Drought_Reproduction_P Parameter: Tissue Value: Rosettes
  misc_feature: MA Experiment 20001904 PARAMETER Experiment Name: At_Drought_Reproduction_P Parameter: Treatment Value: Drought vs. No Drought
  misc_feature: MA Experiment ID: 20001905 Result: Down-regulated in Transcription
  misc_feature: MA Experiment 20001905 PARAMETER Experiment Name: At_Drought_Reproduction_P Parameter: Age (day) Value: 40
  misc_feature: MA Experiment 20001905 PARAMETER Experiment Name: At_Drought_Reproduction_P Parameter: Organism Value: A. thaliana
  misc_feature: MA Experiment 20001905 PARAMETER Experiment Name: At_Drought_Reproduction_P Parameter: Plant Line Value: WS
  misc_feature: MA Experiment 20001905 PARAMETER Experiment Name: At_Drought_Reproduction_P Parameter: Timepoint (day) Value: 10
  misc_feature: MA Experiment 20001905 PARAMETER Experiment Name: At_Drought_Reproduction_P Parameter: Tissue Value: Rosettes
  misc_feature: MA Experiment 20001905 PARAMETER Experiment Name: At_Drought_Reproduction_P Parameter: Treatment Value: Drought vs. No Drought
  misc_feature: MA Experiment ID: 20001906 Result: Down-regulated in Transcription
  misc_feature: MA Experiment 20001906 PARAMETER Experiment Name: At_Drought_Reproduction_P Parameter: Age (day) Value: 35
  misc_feature: MA Experiment 20001906 PARAMETER Experiment Name: At_Drought_Reproduction_P Parameter: Organism Value: A. thaliana
  misc_feature: MA Experiment 20001906 PARAMETER Experiment Name: At_Drought_Reproduction_P Parameter: Plant Line Value: WS
  misc_feature: MA Experiment 20001906 PARAMETER Experiment Name: At_Drought_Reproduction_P Parameter: Timepoint (day) Value: 5
  misc_feature: MA Experiment 20001906 PARAMETER Experiment Name: At_Drought_Reproduction_P Parameter: Tissue Value: Siliques
  misc_feature: MA Experiment 20001906 PARAMETER Experiment Name: At_Drought_Reproduction_P Parameter: Treatment Value: Drought vs. No Drought
  misc_feature: MA Experiment ID: 20001908 Result: Down-regulated in Transcription
  misc_feature: MA Experiment 20001908 PARAMETER Experiment Name: At_Drought_Reproduction_P Parameter: Age (day) Value: 40
  misc_feature: MA Experiment 20001908 PARAMETER Experiment Name: At_Drought_Reproduction_P Parameter: Organism Value: A. thaliana
  misc_feature: MA Experiment 20001908 PARAMETER Experiment Name: At_Drought_Reproduction_P Parameter: Plant Line Value: WS
  misc_feature: MA Experiment 20001908 PARAMETER Experiment Name: At_Drought_Reproduction_P Parameter: Timepoint (day) Value: 10
  misc_feature: MA Experiment 20001908 PARAMETER Experiment Name: At_Drought_Reproduction_P Parameter: Tissue Value: Siliques
  misc_feature: MA Experiment 20001908 PARAMETER Experiment Name: At_Drought_Reproduction_P Parameter: Treatment Value: Drought vs. No Drought
  misc_feature: MA Experiment ID: 20001911 Result: Down-regulated in Transcription
  misc_feature: MA Experiment 20001911 PARAMETER Experiment Name: At_Drought_Reproduction_P Parameter: Age (day) Value: 40
  misc_feature: MA Experiment 20001911 PARAMETER Experiment Name: At_Drought_Reproduction_P Parameter: Organism Value: A. thaliana
  misc_feature: MA Experiment 20001911 PARAMETER Experiment Name: At_Drought_Reproduction_P Parameter: Plant Line Value: WS
  misc_feature: MA Experiment 20001911 PARAMETER Experiment Name: At_Drought_Reproduction_P Parameter: Timepoint (day) Value: 10
  misc_feature: MA Experiment 20001911 PARAMETER Experiment Name: At_Drought_Reproduction_P Parameter: Tissue Value: Flowers
  misc_feature: MA Experiment 20001911 PARAMETER Experiment Name: At_Drought_Reproduction_P Parameter: Treatment Value: Drought vs. No Drought
ctctcactgcaagagcgcgaaacagagtaaggctcactttgttttagctttctcctctacttcgataatgccgtttgctccttccttgttgtcatcgtcttcctcagtctctcaatttcttcccagattccccaacgcgactagattcaatgtaactccacggagcagagccgccaccgtcgtcgcggcatccgtcaccgacctagccggggtcgacagtacaacaatcgccgtactcggtggaggatccgtagcagcactcgcggcgatggtttccttaacggatccggagaggaggcggaaattgcaggcggaggaagttggcggaggcgataaggaggttgtgagggagtatttcaatagcacggggttcgagaggtggaggaagatctacggtgagactgatgaagtgaatcgagtacagaaggatattcgactcggtcatgctaagacggtggagaacacgatgcttatgctgactgaagatagatccttggccggtgtcacggtttgcgacgccggttgtggaaccggtttgctctcgattccacttgctaaggaaggagcaatcgtctctgcttccgatatttctgctgctatggttgctgaagctgagatgaaggcaaaggcacaactaccatcagagaatttaccaaaatttgaggtgaatgatttggagagcctaactgggaagtatgataccgttgtatgtctcgacgtgttgatacattacccgcagaacaaagcagacggaatgatcgcacatcttgcttctttagcagagaagagagtgattctgagttttgctccaaagactttttactatgatatcttaaagagaattggagagcttttcccagggccatcaaaagctacaagggcgtatctacactcggaggcggatgtggaaagagcgttgggtaaagtcggctggaaaatcagcaagagaggactcactaccacacagttctacttctctaggctcatcgaagctgttccaatgtagaccaatttgaaaactagtagatctctgtatagcatattccgagaaggattttcgtggaagacatgcagattctcctaaattcgctgaagagattctcataaactcttcttatatactaggaggacggtctgtacaaacttgcacttctgcagaccctaattgataattggccaaaatgttcaatgtaatcaacgttatttgttgtgctgcttaactgtgtccaaaaacatgtctatacttttctacccattcttgtgcatagttt

SEQ ID NO: 28010 - protein, 334 aa, Arabidopsis thaliana
  peptide (1)..(334): Ceres Seq. ID no. 13490306
  misc_feature (111)..(329): Homolog of NCBI NO: 37523971 NR Description: Mg-protoporphyrin IX methyl transferase
  misc_feature (111)..(332): Homolog of NCBI NO: 23040051 NR Description: hypothetical protein [Trichodesmium erythraeum
  misc_feature (111)..(331): Homolog of NCBI NO: 17230693 NR Description: Mg-protoporphyrin IX methyl transferase [Nostoc
  misc_feature (95)..(333): Homolog of NCBI NO: 22297994 NR Description: Mg-protoporphyrin IX methyl transferase
  misc_feature (111)..(331): Homolog of NCBI NO: 23130334 NR Description: hypothetical protein [Nostoc punctiforme]
  misc_feature (111)..(332): Homolog of NCBI NO: 7470730 NR Description: magnesium-protoporphyrin IX methyltransferase (EC
  misc_feature (111)..(332): Homolog of NCBI NO: 16332013 NR Description: Mg-protoporphyrin IX methyl transferase
  misc_feature (30)..(334): Homolog of NCBI NO: 6006382 NR Description: Similar to magnesium-protoporphyrin IX
  misc_feature (15)..(333): Homolog of NCBI NO: 7839365 NR Description: S-adenosyl-L-methionine Mg-protoporphyrin IX
  misc_feature (23)..(334): Homolog of NCBI NO: 15234905 NR Description: magnesium-protoporphyrin O-methyltransferase
SHCKSAKQSKAHFVLAFSSTSIMPFAPSLLSSSSSVSQFLPRFPNATRFNVTPRSRAATVVAASVTDLAGVDSTTIAVLGGGSVAALAAMVSLTDPERRRKLQAEEVGGGDKEVVREYFNSTGFERWRKIYGETDEVNRVQKDIRLGHAKTVENTMLMLTEDRSLAGVTVCDAGCGTGLLSIPLAKEGAIVSASDISAAMVAEAEMKAKAQLPSENLPKFEVNDLESLTGKYDTVVCLDVLIHYPQNKADGMIAHLASLAEKRVILSFAPKTFYYDILKRIGELFPGPSKATRAYLHSEADVERALGKVGWKISKRGLTTTQFYFSRLIEAVPM

SEQ ID NO: 28011 - protein, 312 aa, Arabidopsis thaliana
  peptide (1)..(312): Ceres Seq. ID no. 13490307
  misc_feature (89)..(307): Homolog of NCBI NO: 37523971 NR Description: Mg-protoporphyrin IX methyl transferase
  misc_feature (89)..(310): Homolog of NCBI NO: 23040051 NR Description: hypothetical protein [Trichodesmium erythraeum
  misc_feature (89)..(309): Homolog of NCBI NO: 17230693 NR Description: Mg-protoporphyrin IX methyl transferase [Nostoc
  misc_feature (73)..(311): Homolog of NCBI NO: 22297994 NR Description: Mg-protoporphyrin IX methyl transferase
  misc_feature (89)..(309): Homolog of NCBI NO: 23130334 NR Description: hypothetical protein [Nostoc punctiforme]
  misc_feature (89)..(310): Homolog of NCBI NO: 7470730 NR Description: magnesium-protoporphyrin IX methyltransferase (EC
  misc_feature (89)..(310): Homolog of NCBI NO: 16332013 NR Description: Mg-protoporphyrin IX methyl transferase
  misc_feature (8)..(312): Homolog of NCBI NO: 6006382 NR Description: Similar to magnesium-protoporphyrin IX
  misc_feature (1)..(311): Homolog of NCBI NO: 7839365 NR Description: S-adenosyl-L-methionine Mg-protoporphyrin IX
  misc_feature (1)..(312): Homolog of NCBI NO: 15234905 NR Description: magnesium-protoporphyrin O-methyltransferase
MPFAPSLLSSSSSVSQFLPRFPNATRFNVTPRSRAATVVAASVTDLAGVDSTTIAVLGGGSVAALAAMVSLTDPERRRKLQAEEVGGGDKEVVREYFNSTGFERWRKIYGETDEVNRVQKDIRLGHAKTVENTMLMLTEDRSLAGVTVCDAGCGTGLLSIPLAKEGAIVSASDISAAMVAEAEMKAKAQLPSENLPKFEVNDLESLTGKYDTVVCLDVLIHYPQNKADGMIAHLASLAEKRVILSFAPKTFYYDILKRIGELFPGPSKATRAYLHSEADVERALGKVGWKISKRGLTTTQFYFSRLIEAVPM

SEQ ID NO: 28012 - protein, 245 aa, Arabidopsis thaliana
  peptide (1)..(245): Ceres Seq. ID no. 13490308
  misc_feature (22)..(240): Homolog of NCBI NO: 37523971 NR Description: Mg-protoporphyrin IX methyl transferase
  misc_feature (22)..(243): Homolog of NCBI NO: 23040051 NR Description: hypothetical protein [Trichodesmium erythraeum
  misc_feature (22)..(242): Homolog of NCBI NO: 17230693 NR Description: Mg-protoporphyrin IX methyl transferase [Nostoc
  misc_feature (6)..(244): Homolog of NCBI NO: 22297994 NR Description: Mg-protoporphyrin IX methyl transferase
  misc_feature (22)..(242): Homolog of NCBI NO: 23130334 NR Description: hypothetical protein [Nostoc punctiforme]
  misc_feature (22)..(243): Homolog of NCBI NO: 7470730 NR Description: magnesium-protoporphyrin IX methyltransferase (EC
  misc_feature (22)..(243): Homolog of NCBI NO: 16332013 NR Description: Mg-protoporphyrin IX methyl transferase
  misc_feature (1)..(245): Homolog of NCBI NO: 6006382 NR Description: Similar to magnesium-protoporphyrin IX
  misc_feature (1)..(244): Homolog of NCBI NO: 7839365 NR Description: S-adenosyl-L-methionine Mg-protoporphyrin IX
  misc_feature (1)..(245): Homolog of NCBI NO: 15234905 NR Description: magnesium-protoporphyrin O-methyltransferase
MVSLTDPERRRKLQAEEVGGGDKEVVREYFNSTGFERWRKIYGETDEVNRVQKDIRLGHAKTVENTMLMLTEDRSLAGVTVCDAGCGTGLLSIPLAKEGAIVSASDISAAMVAEAEMKAKAQLPSENLPKFEVNDLESLTGKYDTVVCLDVLIHYPQNKADGMIAHLASLAEKRVILSFAPKTFYYDILKRIGELFPGPSKATRAYLHSEADVERALGKVGWKISKRGLTTTQFYFSRLIEAVPM

SEQ ID NO: 28013 - DNA, 1479 bp, Arabidopsis thaliana
  misc_feature (1)..(1479): Ceres Seq. ID no. 13499756
  misc_feature: MA Experiment ID: 108464 Result: Down-regulated in Transcription
  misc_feature: MA Experiment 108464 PARAMETER Experiment Name: At_Germinating_Seeds_cDNA_P Parameter: Age (day) Value: 4 vs. 0
  misc_feature: MA Experiment 108464 PARAMETER Experiment Name: At_Germinating_Seeds_cDNA_P Parameter: Tissue Value: Germinating Seeds
gttttcccccaaattctcataattttcacaaacaacctctcgtcttctaggttaatccaatttcgtcgattcatgaagttcacaattctcccatcggaaaattcttcgtaatcgacgacgaagagatcatgagtaccgtcggaggtatagagcagttgatacctgattccgtttcaacgtcgttcatcgaaacggtgaacggttcgcaccagttcacgattcaaggttactctctagccaaaggcatgagccctgggaagtttatacagagcgatatcttctccgttggtggatacgattgggcgatttacttctatcctgatgggaagaacccggaggaccagtcctcgtatatctctttgttcatcgctttagcgagtgattctaatgatattagggctttgtttgagcttacgcttatggatcagagtgggaaagggaaacataaggtgcatagtcactttgatcgggcgcttgaaggtggtccttatacacttaagtataaaggaagcatgtggggttacaaacgctttttcaaacgatcagctttagaaacctctgactacttaaaggatgattgtcttgtcatcaattgtactgttggcgttgttagagcccgactcgagggtccaaaacagtatggcattgtgctacccctgtcgaatatgggtcagggattgaaagacttgttagattctgaagttggttgtgacatagctttccaagtcggagatgaaacatacaaagctcacaaactgattctcgcggcacgctccccagtttttagagctcagttttttggaccaattgggaataacaatgtggatagaatagtgatagacgacatcgaaccttctatcttcaaggctatgcttagcttcatttacaccgatgtacttcctaatgtgcatgaaattaccgggtcaacttctgccagttcgtttacaaacatgatacaacatctcttggcagctgctgacctctatgaccttgcaaggttaaagatattatgtgaagttttgctatgcgaaaaacttgatgttgataatgtggcaacaacacttgcgttggctgaacagcaccaattcttacagctcaaagcgttctgcttagaatttgttgcatctccagcaaacttgggagctgtaatgaagtccgaagggttcaagcacttgaaacagagctgtcccactttgttatctgagttgctgaacactgttgcagcagcagataagagctcgacgagtggacaatcaaacaagaaaagaagtgcgagcagtgtattagggtgtgacactacaaatgtgaggcaattgaggaggagaacacgaaaagaagtgcgagcagtgtcttaggatcattacataccgtatgcaaaattctagaattatgcattgtgtttcaagcagagtttatgaattccaagtcatcccgtgaacttttttaccagtgagaattatagaggcctgaactctgaac

SEQ ID NO: 28014 - protein, 408 aa, Arabidopsis thaliana
  peptide (1)..(408): Ceres Seq. ID no. 13499757
  misc_feature (184)..(303): Pfam Name: BTB/POZ domain Pfam Description: BTB/POZ domain
  misc_feature (12)..(395): Homolog of NCBI NO: 30678912 NR Description: expressed protein [Arabidopsis thaliana]
  misc_feature (12)..(395): Homolog of NCBI NO: 21536509 NR Description: unknown [Arabidopsis thaliana]
  misc_feature (10)..(400): Homolog of NCBI NO: 15242126 NR Description: expressed protein [Arabidopsis thaliana]
  misc_feature (12)..(400): Homolog of NCBI NO: 34900034 NR Description: OJ1641_C04.24 [Oryza sativa (japonica
  misc_feature (1)..(399): Homolog of NCBI NO: 18397497 NR Description: expressed protein [Arabidopsis thaliana]
  misc_feature (13)..(373): Homolog of NCBI NO: 23617108 NR Description: contains ESTs
  misc_feature (14)..(399): Homolog of NCBI NO: 22531225 NR Description: putative protein [Arabidopsis thaliana]
  misc_feature (14)..(404): Homolog of NCBI NO: 34394164 NR Description: putative speckle-type POZ protein
  misc_feature (1)..(408): Homolog of NCBI NO: 21595740 NR Description: unknown [Arabidopsis thaliana]
  misc_feature (1)..(408): Homolog of NCBI NO: 18405153 NR Description: expressed protein [Arabidopsis thaliana]
MSTVGGIEQLIPDSVSTSFIETVNGSHQFTIQGYSLAKGMSPGKFIQSDIFSVGGYDWAIYFYPDGKNPEDQSSYISLFIALASDSNDIRALFELTLMDQSGKGKHKVHSHFDRALEGGPYTLKYKGSMWGYKRFFKRSALETSDYLKDDCLVINCTVGVVRARLEGPKQYGIVLPLSNMGQGLKDLLDSEVGCDIAFQVGDETYKAHKLILAARSPVFRAQFFGPIGNNNVDRIVIDDIEPSIFKAMLSFIYTDVLPNVHEITGSTSASSFTNMIQHLLAAADLYDLARLKILCEVLLCEKLDVDNVATTLALAEQHQFLQLKAFCLEFVASPANLGAVMKSEGFKHLKQSCPTLLSELLNTVAAADKSSTSGQSNKKRSASSVLGCDTTNVRQLRRRTRKEVRAVS

SEQ ID NO: 28015 - protein, 369 aa, Arabidopsis thaliana
  peptide (1)..(369): Ceres Seq. ID no. 13499758
  misc_feature (145)..(264): Pfam Name: BTB/POZ domain Pfam Description: BTB/POZ domain
  misc_feature (1)..(356): Homolog of NCBI NO: 30678912 NR Description: expressed protein [Arabidopsis thaliana]
  misc_feature (1)..(356): Homolog of NCBI NO: 21536509 NR Description: unknown [Arabidopsis thaliana]
  misc_feature (1)..(361): Homolog of NCBI NO: 15242126 NR Description: expressed protein [Arabidopsis thaliana]
  misc_feature (1)..(361): Homolog of NCBI NO: 34900034 NR Description: OJ1641_C04.24 [Oryza sativa (japonica
  misc_feature (1)..(360): Homolog of NCBI NO: 18397497 NR Description: expressed protein [Arabidopsis thaliana]
  misc_feature (1)..(334): Homolog of NCBI NO: 23617108 NR Description: contains ESTs
  misc_feature (1)..(360): Homolog of NCBI NO: 22531225 NR Description: putative protein [Arabidopsis thaliana]
  misc_feature (1)..(365): Homolog of NCBI NO: 34394164 NR Description: putative speckle-type POZ protein
  misc_feature (1)..(369): Homolog of NCBI NO: 21595740 NR Description: unknown [Arabidopsis thaliana]
  misc_feature (1)..(369): Homolog of NCBI NO: 18405153 NR Description: expressed protein [Arabidopsis thaliana]
MSPGKFIQSDIFSVGGYDWAIYFYPDGKNPEDQSSYISLFIALASDSNDIRALFELTLMDQSGKGKHKVHSHFDRALEGGPYTLKYKGSMWGYKRFFKRSALETSDYLKDDCLVINCTVGVVRARLEGPKQYGIVLPLSNMGQGLKDLLDSEVGCDIAFQVGDETYKAHKLILAARSPVFRAQFFGPIGNNNVDRIVIDDIEPSIFKAMLSFIYTDVLPNVHEITGSTSASSFTNMIQHLLAAADLYDLARLKILCEVLLCEKLDVDNVATTLALAEQHQFLQLKAFCLEFVASPANLGAVMKSEGFKHLKQSCPTLLSELLNTVAAADKSSTSGQSNKKRSASSVLGCDTTNVRQLRRRTRKEVRAVS

SEQ ID NO: 28016 - protein, 311 aa, Arabidopsis thaliana
  peptide (1)..(311): Ceres Seq. ID no. 13499759
  misc_feature (87)..(206): Pfam Name: BTB/POZ domain Pfam Description: BTB/POZ domain
  misc_feature (1)..(298): Homolog of NCBI NO: 30678912 NR Description: expressed protein [Arabidopsis thaliana]
  misc_feature (1)..(298): Homolog of NCBI NO: 21536509 NR Description: unknown [Arabidopsis thaliana]
  misc_feature (1)..(303): Homolog of NCBI NO: 15242126 NR Description: expressed protein [Arabidopsis thaliana]
  misc_feature (1)..(303): Homolog of NCBI NO: 34900034 NR Description: OJ1641_C04.24 [Oryza sativa (japonica
  misc_feature (1)..(302): Homolog of NCBI NO: 18397497 NR Description: expressed protein [Arabidopsis thaliana]
  misc_feature (1)..(276): Homolog of NCBI NO: 23617108 NR Description: contains ESTs
  misc_feature (1)..(302): Homolog of NCBI NO: 22531225 NR Description: putative protein [Arabidopsis thaliana]
  misc_feature (1)..(307): Homolog of NCBI NO: 34394164 NR Description: putative speckle-type POZ protein
  misc_feature (1)..(311): Homolog of NCBI NO: 21595740 NR Description: unknown [Arabidopsis thaliana]
  misc_feature (1)..(311): Homolog of NCBI NO: 18405153 NR Description: expressed protein [Arabidopsis thaliana]
MDQSGKGKHKVHSHFDRALEGGPYTLKYKGSMWGYKRFFKRSALETSDYLKDDCLVINCTVGVVRARLEGPKQYGIVLPLSNMGQGLKDLLDSEVGCDIAFQVGDETYKAHKLILAARSPVFRAQFFGPIGNNNVDRIVIDDIEPSIFKAMLSFIYTDVLPNVHEITGSTSASSFTNMIQHLLAAADLYDLARLKILCEVLLCEKLDVDNVATTLALAEQHQFLQLKAFCLEFVASPANLGAVMKSEGFKHLKQSCPTLLSELLNTVAAADKSSTSGQSNKKRSASSVLGCDTTNVRQLRRRTRKEVRAVS

SEQ ID NO: 28017 - DNA, 1174 bp, Arabidopsis thaliana
  misc_feature (1)..(1174): Ceres Seq. ID no. 13500049
  misc_feature: MA Experiment ID: 108434 Result: Down-regulated in Transcription
  misc_feature: MA Experiment 108434 PARAMETER Experiment Name: At_Root_Tips_cDNA_P Parameter: Tissue Value: Root Tips
  misc_feature: MA Experiment ID: 108488 Result: Down-regulated in Transcription
  misc_feature: MA Experiment ID: 108576 Result: Up-regulated in Transcription
  misc_feature: MA Experiment 108576 PARAMETER Experiment Name: At_42deg_Heat_cDNA_P Parameter: Temperature (deg C) Value: 42 vs. 22
  misc_feature: MA Experiment 108576 PARAMETER Experiment Name: At_42deg_Heat_cDNA_P Parameter: Timepoint (hr) Value: 1
  misc_feature: MA Experiment 108576 PARAMETER Experiment Name: At_42deg_Heat_cDNA_P Parameter: Tissue Value: Aerial
  misc_feature: MA Experiment ID: 108605 Result: Up-regulated in Transcription
  misc_feature: MA Experiment 108605 PARAMETER Experiment Name: At_100uM_ABA_cDNA_P Parameter: Timepoint (hr) Value: 6
  misc_feature: MA Experiment 108605 PARAMETER Experiment Name: At_100uM_ABA_cDNA_P Parameter: Tissue Value: Aerial
  misc_feature: MA Experiment 108605 PARAMETER Experiment Name: At_100uM_ABA_cDNA_P Parameter: Treatment Value: 100uM ABA vs. No Treatment
  misc_feature: MA Experiment ID: 108607 Result: Up-regulated in Transcription
  misc_feature: MA Experiment 108607 PARAMETER Experiment Name: At_100uM_ABA_cDNA_P Parameter: Timepoint (hr) Value: 4
  misc_feature: MA Experiment 108607 PARAMETER Experiment Name: At_100uM_ABA_cDNA_P Parameter: Tissue Value: Aerial
  misc_feature: MA Experiment 108607 PARAMETER Experiment Name: At_100uM_ABA_cDNA_P Parameter: Treatment Value: 100uM ABA vs. No Treatment
  misc_feature: MA Experiment ID: 20000111 Result: Up-regulated in Transcription
  misc_feature: MA Experiment 20000111 PARAMETER Experiment Name: At_42deg_Heat_cDNA_P Parameter: Temperature (deg C) Value: 42 vs. 22
  misc_feature: MA Experiment 20000111 PARAMETER Experiment Name: At_42deg_Heat_cDNA_P Parameter: Timepoint (hr) Value: 6
  misc_feature: MA Experiment 20000111 PARAMETER Experiment Name: At_42deg_Heat_cDNA_P Parameter: Tissue Value: Aerial
  misc_feature: MA Experiment ID: 20000112 Result: Up-regulated in Transcription
  misc_feature: MA Experiment 20000112 PARAMETER Experiment Name: At_42deg_Heat_cDNA_P Parameter: Temperature (deg C) Value: 42 vs. 22
  misc_feature: MA Experiment 20000112 PARAMETER Experiment Name: At_42deg_Heat_cDNA_P Parameter: Timepoint (hr) Value: 2
  misc_feature: MA Experiment 20000112 PARAMETER Experiment Name: At_42deg_Heat_cDNA_P Parameter: Tissue Value: Aerial
  misc_feature: MA Experiment ID: 20000113 Result: Up-regulated in Transcription
  misc_feature: MA Experiment 20000113 PARAMETER Experiment Name: At_42deg_Heat_cDNA_P Parameter: Temperature (deg C) Value: 42 vs. 22
  misc_feature: MA Experiment 20000113 PARAMETER Experiment Name: At_42deg_Heat_cDNA_P Parameter: Timepoint (hr) Value: 8
  misc_feature: MA Experiment 20000113 PARAMETER Experiment Name: At_42deg_Heat_cDNA_P Parameter: Tissue Value: Aerial
  misc_feature: MA Experiment ID: 20000173 Result: Up-regulated in Transcription
  misc_feature: MA Experiment 20000173 PARAMETER Experiment Name: At_42deg_Heat_P Parameter: Age (day) Value: 14
  misc_feature: MA Experiment 20000173 PARAMETER Experiment Name: At_42deg_Heat_P Parameter: Organism Value: A. thaliana
  misc_feature: MA Experiment 20000173 PARAMETER Experiment Name: At_42deg_Heat_P Parameter: Plant Line Value: WS
  misc_feature: MA Experiment 20000173 PARAMETER Experiment Name: At_42deg_Heat_P Parameter: Temperature (deg C) Value: 42 vs. 22
  misc_feature: MA Experiment 20000173 PARAMETER Experiment Name: At_42deg_Heat_P Parameter: Timepoint (hr) Value: 6
  misc_feature: MA Experiment 20000173 PARAMETER Experiment Name: At_42deg_Heat_P Parameter: Tissue Value: Aerial
  misc_feature: MA Experiment ID: 20000224 Result: Up-regulated in Transcription
  misc_feature: MA Experiment ID: 20000437 Result: Up-regulated in Transcription
  misc_feature: MA Experiment 20000437 PARAMETER Experiment Name: At_Drought_P Parameter: Age (day) Value: 8
  misc_feature: MA Experiment 20000437 PARAMETER Experiment Name: At_Drought_P Parameter: Organism Value: A. thaliana
  misc_feature: MA Experiment 20000437 PARAMETER Experiment Name: At_Drought_P Parameter: Plant Line Value: WS
  misc_feature: MA Experiment 20000437 PARAMETER Experiment Name: At_Drought_P Parameter: Timepoint (hr) Value: 24
  misc_feature: MA Experiment 20000437 PARAMETER Experiment Name: At_Drought_P Parameter: Tissue Value: Whole Plant
  misc_feature: MA Experiment 20000437 PARAMETER Experiment Name: At_Drought_P Parameter: Treatment Value: Drought vs. No Drought
  misc_feature: MA Experiment ID: 20000495 Result: Down-regulated in Transcription
  misc_feature: MA Experiment 20000495 PARAMETER Experiment Name: At_Guard_Cells_P Parameter: Harvest Date Value: 8/2/2002
  misc_feature: MA Experiment 20000495 PARAMETER Experiment Name: At_Guard_Cells_P Parameter: Organism Value: A. thaliana
  misc_feature: MA Experiment 20000495 PARAMETER Experiment Name: At_Guard_Cells_P Parameter: Tissue Value: Guard Cells vs. Leaves
  misc_feature: MA Experiment ID: 20001905 Result: Up-regulated in Transcription
  misc_feature: MA Experiment 20001905 PARAMETER Experiment Name: At_Drought_Reproduction_P Parameter: Age (day) Value: 40
  misc_feature: MA Experiment 20001905 PARAMETER Experiment Name: At_Drought_Reproduction_P Parameter: Organism Value: A. thaliana
  misc_feature: MA Experiment 20001905 PARAMETER Experiment Name: At_Drought_Reproduction_P Parameter: Plant Line Value: WS
  misc_feature: MA Experiment 20001905 PARAMETER Experiment Name: At_Drought_Reproduction_P Parameter: Timepoint (day) Value: 10
  misc_feature: MA Experiment 20001905 PARAMETER Experiment Name: At_Drought_Reproduction_P Parameter: Tissue Value: Rosettes
  misc_feature: MA Experiment 20001905 PARAMETER Experiment Name: At_Drought_Reproduction_P Parameter: Treatment Value: Drought vs. No Drought
ggaattcctcgagctacgtcagggctcatttccatcatcttcgtcttcgtttgttcccctgagatagagataagagaatttcgagagattcgagagaagagacgatgagtttccaagatctcgaagctggtactcgatctccggcgccgaatcgttttaccggtgggagacaacagagaccttcgtctcgtggggatccatctcaggaggtcgccgccgggattttcaggatcagcacggctgtcaattccttcttccgcctcgttaattcgatcggaacacctaaagatactcttgaattacgagataagctgcaaaagacaaggttacagatatccgaattggtgaagaatacttcagctaaacttaaggaagctagcgaagccgaccttcatggatcagctagtcaaattaagaagatagctgatgctaaactggcaaaagatttccaatcagttctcaaagagtttcagaaagctcagagacttgcagctgaaagagaaataacatatactcctgtggtcacaaaagaaatacctaccagttataatgcacctgaactggatactgaatctttaaggatctcccagcagcaagctcttcttctacaatcaagaaggcaagaagtggtgtttttagataacgagataacattcaatgaagcaattattgaggaaagagagcaagggattcgagaaattgaagaccagattcgtgatgtgaatggcatgttcaaagatctagctcttatggtgaaccatcaaggaaatattgtcgatgacatcagctctaaccttgacaactcacatgctgcaactacacaagccactgttcaactcagaaaagcagctaaaactcaaagatcaaactcctctttgacatgcctacttattctcatttttgggattgttctactcattgtcatcatcgttgtcttggtctaagcatcaaacatataactccaagcttcaatcttcaagcatcaagcgaatctatggaaactatacaaagacccattaaagatatatatctaatgtacagattctttatactccatcttccccattcaaccaaattgatcttaacttctcatcgtgtgaatgtttaatcaatgtattactccatcataaggatcttcatgatcaaaagaaataaacataagaaaataatctag

SEQ ID NO: 28018 - protein, 279 aa, Arabidopsis thaliana
  peptide (1)..(279): Ceres Seq. ID no. 13500050
  misc_feature (191)..(253): Pfam Name: SNARE domain Pfam Description: SNARE domain
  misc_feature (1)..(279): Homolog of NCBI NO: 21595750 NR Description: syntaxin homologue [Arabidopsis thaliana]
  misc_feature (1)..(279): Homolog of NCBI NO: 15237418 NR Description: syntaxin of plants SYP21 (PEP12) [Arabidopsis
MSFQDLEAGTRSPAPNRFTGGRQQRPSSRGDPSQEVAAGIFRISTAVNSFFRLVNSIGTPKDTLELRDKLQKTRLQISELVKNTSAKLKEASEADLHGSASQIKKIADAKLAKDFQSVLKEFQKAQRLAAEREITYTPVVTKEIPTSYNAPELDTESLRISQQQALLLQSRRQEVVFLDNEITFNEAIIEEREQGIREIEDQIRDVNGMFKDLALMVNHQGNIVDDISSNLDNSHAATTQATVQLRKAAKTQRSNSSLTCLLILIFGIVLLIVIIVVLV

SEQ ID NO: 28019 - DNA, 914 bp, Arabidopsis thaliana
  misc_feature (1)..(914): Ceres Seq. ID no. 12393250
  misc_feature: MA Experiment ID: 108434 Result: Up-regulated in Transcription
  misc_feature: MA Experiment 108434 PARAMETER Experiment Name: At_Root_Tips_cDNA_P Parameter: Tissue Value: Root Tips
  misc_feature: MA Experiment ID: 108435 Result: Up-regulated in Transcription
  misc_feature: MA Experiment 108435 PARAMETER Experiment Name: At_stm_Mutants_cDNA_P Parameter: Plant Line Value: wt Landsburg vs stm
  misc_feature: MA Experiment 108435 PARAMETER Experiment Name: At_stm_Mutants_cDNA_P Parameter: Tissue Value: Shoot Apical Meristem Region
  misc_feature: MA Experiment ID: 108464 Result: Down-regulated in Transcription
  misc_feature: MA Experiment 108464 PARAMETER Experiment Name: At_Germinating_Seeds_cDNA_P Parameter: Age (day) Value: 4 vs. 0
  misc_feature: MA Experiment 108464 PARAMETER Experiment Name: At_Germinating_Seeds_cDNA_P Parameter: Tissue Value: Germinating Seeds
  misc_feature: MA Experiment ID: 108576 Result: Down-regulated in Transcription
  misc_feature: MA Experiment 108576 PARAMETER Experiment Name: At_42deg_Heat_cDNA_P Parameter: Temperature (deg C) Value: 42 vs. 22
  misc_feature: MA Experiment 108576 PARAMETER Experiment Name: At_42deg_Heat_cDNA_P Parameter: Timepoint (hr) Value: 1
  misc_feature: MA Experiment 108576 PARAMETER Experiment Name: At_42deg_Heat_cDNA_P Parameter: Tissue Value: Aerial
  misc_feature: MA Experiment ID: 108577 Result: Down-regulated in Transcription
  misc_feature: MA Experiment 108577 PARAMETER Experiment Name: At_42deg_Heat_cDNA_P Parameter: Temperature (deg C) Value: 42 vs. 22
  misc_feature: MA Experiment 108577 PARAMETER Experiment Name: At_42deg_Heat_cDNA_P Parameter: Timepoint (hr) Value: 6
  misc_feature: MA Experiment 108577 PARAMETER Experiment Name: At_42deg_Heat_cDNA_P Parameter: Tissue Value: Aerial
  misc_feature: MA Experiment ID: 108594 Result: Down-regulated in Transcription
  misc_feature: MA Experiment 108594 PARAMETER Experiment Name: At_Ler-rhl_Root_cDNA_P Parameter: Plant Line Value: null
  misc_feature: MA Experiment ID: 108668 Result: Down-regulated in Transcription
  misc_feature: MA Experiment 108668 PARAMETER Experiment Name: At_2mM_SA_cDNA_P Parameter: Plant Line Value: WS
  misc_feature: MA Experiment 108668 PARAMETER Experiment Name: At_2mM_SA_cDNA_P Parameter: Timepoint (hr) Value: 6
  misc_feature: MA Experiment 108668 PARAMETER Experiment Name: At_2mM_SA_cDNA_P Parameter: Treatment Value: 2mM SA vs. No Treatment
  misc_feature: MA Experiment ID: 20000069 Result: Down-regulated in Transcription
  misc_feature: MA Experiment 20000069 PARAMETER Experiment Name: At_100uM_ABA_Mutants_cDNA_P Parameter: Plant Line Value: CS23
  misc_feature: MA Experiment 20000069 PARAMETER Experiment Name: At_100uM_ABA_Mutants_cDNA_P Parameter: Timepoint (hr) Value: 6
  misc_feature: MA Experiment 20000069 PARAMETER Experiment Name: At_100uM_ABA_Mutants_cDNA_P Parameter: Tissue Value: Aerial
  misc_feature: MA Experiment 20000069 PARAMETER Experiment Name: At_100uM_ABA_Mutants_cDNA_P Parameter: Treatment Value: 100uM ABA vs. No Treatment
  misc_feature: MA Experiment ID: 20000093 Result: Down-regulated in Transcription
  misc_feature: MA Experiment 20000093 PARAMETER Experiment Name: At_42deg_Heat_cDNA_P Parameter: Temperature (deg C) Value: 42 vs. 22
  misc_feature: MA Experiment 20000093 PARAMETER Experiment Name: At_42deg_Heat_cDNA_P Parameter: Timepoint (hr) Value: 0.5
  misc_feature: MA Experiment 20000093 PARAMETER Experiment Name: At_42deg_Heat_cDNA_P Parameter: Tissue Value: Aerial
  misc_feature: MA Experiment ID: 20000111 Result: Down-regulated in Transcription
  misc_feature: MA Experiment 20000111 PARAMETER Experiment Name: At_42deg_Heat_cDNA_P Parameter: Temperature (deg C) Value: 42 vs. 22
  misc_feature: MA Experiment 20000111 PARAMETER Experiment Name: At_42deg_Heat_cDNA_P Parameter: Timepoint (hr) Value: 6
  misc_feature: MA Experiment 20000111 PARAMETER Experiment Name: At_42deg_Heat_cDNA_P Parameter: Tissue Value: Aerial
  misc_feature: MA Experiment ID: 20000113 Result: Down-regulated in Transcription
  misc_feature: MA Experiment 20000113 PARAMETER Experiment Name: At_42deg_Heat_cDNA_P Parameter: Temperature (deg C) Value: 42 vs. 22
  misc_feature: MA Experiment 20000113 PARAMETER Experiment Name: At_42deg_Heat_cDNA_P Parameter: Timepoint (hr) Value: 8
  misc_feature: MA Experiment 20000113 PARAMETER Experiment Name: At_42deg_Heat_cDNA_P Parameter: Tissue Value: Aerial
  misc_feature: MA Experiment ID: 20000144 Result: Down-regulated in Transcription
  misc_feature: MA Experiment 20000144 PARAMETER Experiment Name: At_42deg_Heat_cDNA_P Parameter: Temperature (deg C) Value: 42 vs. 22
  misc_feature: MA Experiment 20000144 PARAMETER Experiment Name: At_42deg_Heat_cDNA_P Parameter: Timepoint (hr) Value: 1
  misc_feature: MA Experiment 20000144 PARAMETER Experiment Name: At_42deg_Heat_cDNA_P Parameter: Tissue Value: Aerial
  misc_feature: MA Experiment ID: 20000173 Result: Down-regulated in Transcription
  misc_feature: MA Experiment 20000173 PARAMETER Experiment Name: At_42deg_Heat_P Parameter: Age (day) Value: 14
  misc_feature: MA Experiment 20000173 PARAMETER Experiment Name: At_42deg_Heat_P Parameter: Organism Value: A. thaliana
  misc_feature: MA Experiment 20000173 PARAMETER Experiment Name: At_42deg_Heat_P Parameter: Plant Line Value: WS
  misc_feature: MA Experiment 20000173 PARAMETER Experiment Name: At_42deg_Heat_P Parameter: Temperature (deg C) Value: 42 vs. 22
  misc_feature: MA Experiment 20000173 PARAMETER Experiment Name: At_42deg_Heat_P Parameter: Timepoint (hr) Value: 6
  misc_feature: MA Experiment 20000173 PARAMETER Experiment Name: At_42deg_Heat_P Parameter: Tissue Value: Aerial
  misc_feature: MA Experiment ID: 20000182 Result: Down-regulated in Transcription
  misc_feature: MA Experiment 20000182 PARAMETER Experiment Name: At_2mM_SA_P Parameter: Age (day) Value: 14
  misc_feature: MA Experiment 20000182 PARAMETER Experiment Name: At_2mM_SA_P Parameter: Organism Value: A. thaliana
  misc_feature: MA Experiment 20000182 PARAMETER Experiment Name: At_2mM_SA_P Parameter: Plant Line Value: WS
  misc_feature: MA Experiment 20000182 PARAMETER Experiment Name: At_2mM_SA_P Parameter: Timepoint (hr) Value: 6
  misc_feature: MA Experiment 20000182 PARAMETER Experiment Name: At_2mM_SA_P Parameter: Tissue Value: Aerial
  misc_feature: MA Experiment 20000182 PARAMETER Experiment Name: At_2mM_SA_P Parameter: Treatment Value: 2mM SA vs. No Treatment
  misc_feature: MA Experiment ID: 20000234 Result: Up-regulated in Transcription
  misc_feature: MA Experiment 20000234 PARAMETER Experiment Name: At_Siliques_P Parameter: Age (day) Value: 21
  misc_feature: MA Experiment 20000234 PARAMETER Experiment Name: At_Siliques_P Parameter: Organism Value: A. thaliana
  misc_feature: MA Experiment 20000234 PARAMETER Experiment Name: At_Siliques_P Parameter: Plant Line Value: WS
  misc_feature: MA Experiment 20000234 PARAMETER Experiment Name: At_Siliques_P Parameter: Tissue Value: Less Than 5mm Siliques vs. Whole Plant
  misc_feature: MA Experiment ID: 20000265 Result: Up-regulated in Transcription
  misc_feature: MA Experiment 20000265 PARAMETER Experiment Name: At_Open_Flower_P Parameter: Age (day) Value: 21
  misc_feature: MA Experiment 20000265 PARAMETER Experiment Name: At_Open_Flower_P Parameter: Plant Line Value: WS
  misc_feature: MA Experiment 20000265 PARAMETER Experiment Name: At_Open_Flower_P Parameter: Tissue Value: Closed Flower vs. Whole Plant
  misc_feature: MA Experiment ID: 20000495 Result: Up-regulated in Transcription
  misc_feature: MA Experiment 20000495 PARAMETER Experiment Name: At_Guard_Cells_P Parameter: Harvest Date Value: 8/2/2002
  misc_feature: MA Experiment 20000495 PARAMETER Experiment Name: At_Guard_Cells_P Parameter: Organism Value: A. thaliana
  misc_feature: MA Experiment 20000495 PARAMETER Experiment Name: At_Guard_Cells_P Parameter: Tissue Value: Guard Cells vs. Leaves
  misc_feature: MA Experiment ID: 20000496 Result: Up-regulated in Transcription
  misc_feature: MA Experiment 20000496 PARAMETER Experiment Name: At_Guard_Cells_P Parameter: Harvest Date Value: 7/19/2002
  misc_feature: MA Experiment 20000496 PARAMETER Experiment Name: At_Guard_Cells_P Parameter: Organism Value: Canola
  misc_feature: MA Experiment 20000496 PARAMETER Experiment Name: At_Guard_Cells_P Parameter: Tissue Value: Guard Cells vs. Leaves
  misc_feature: MA Experiment ID: 20000794 Result: Down-regulated in Transcription
  misc_feature: MA Experiment 20000794 PARAMETER Experiment Name: At_Petals_P Parameter: Age (day) Value: 23-25 days
  misc_feature: MA Experiment 20000794 PARAMETER Experiment Name: At_Petals_P Parameter: Plant Line Value: WS
  misc_feature: MA Experiment 20000794 PARAMETER Experiment Name: At_Petals_P Parameter: Tissue Value: Petals vs. Whole plant
  misc_feature: MA Experiment ID: 20001248 Result: Down-regulated in Transcription
  misc_feature: MA Experiment 20001248 PARAMETER Experiment Name: At_Far-red-induction_P Parameter: Age (day) Value: 7
  misc_feature: MA Experiment 20001248 PARAMETER Experiment Name: At_Far-red-induction_P Parameter: Light Value: Far-red vs. White
  misc_feature: MA Experiment 20001248 PARAMETER Experiment Name: At_Far-red-induction_P Parameter: Organism Value: A. thaliana
  misc_feature: MA Experiment 20001248 PARAMETER Experiment Name: At_Far-red-induction_P Parameter: Plant Line Value: Columbia
  misc_feature: MA Experiment 20001248 PARAMETER Experiment Name: At_Far-red-induction_P Parameter: Timepoint (hr) Value: 4
  misc_feature: MA Experiment 20001248 PARAMETER Experiment Name: At_Far-red-induction_P Parameter: Tissue Value: Whole Plant
  misc_feature: MA Experiment ID: 20001450 Result: Down-regulated in Transcription
  misc_feature: MA Experiment 20001450 PARAMETER Experiment Name: At_Far-red-induction_P Parameter: Age (day) Value: 7
  misc_feature: MA Experiment 20001450 PARAMETER Experiment Name: At_Far-red-induction_P Parameter: Light Value: Far-red vs. White
  misc_feature: MA Experiment 20001450 PARAMETER Experiment Name: At_Far-red-induction_P Parameter: Organism Value: A. thaliana
  misc_feature: MA Experiment 20001450 PARAMETER Experiment Name: At_Far-red-induction_P Parameter: Plant Line Value: Columbia
  misc_feature: MA Experiment 20001450 PARAMETER Experiment Name: At_Far-red-induction_P Parameter: Timepoint (hr) Value: 8
  misc_feature: MA Experiment 20001450 PARAMETER Experiment Name: At_Far-red-induction_P Parameter: Tissue Value: Whole Plant
  misc_feature: MA Experiment ID: 20001451 Result: Down-regulated in Transcription
  misc_feature: MA Experiment 20001451 PARAMETER Experiment Name: At_Far-red-induction_P Parameter: Age (day) Value: 7
  misc_feature: MA Experiment 20001451 PARAMETER Experiment Name: At_Far-red-induction_P Parameter: Light Value: Far-red vs. White
  misc_feature: MA Experiment 20001451 PARAMETER Experiment Name: At_Far-red-induction_P Parameter: Organism Value: A. thaliana
  misc_feature: MA Experiment 20001451 PARAMETER Experiment Name: At_Far-red-induction_P Parameter: Plant Line Value: Columbia
  misc_feature: MA Experiment 20001451 PARAMETER Experiment Name: At_Far-red-induction_P Parameter: Timepoint (hr) Value: 24
  misc_feature: MA Experiment 20001451 PARAMETER Experiment Name: At_Far-red-induction_P Parameter: Tissue Value: Whole Plant
  misc_feature: MA Experiment ID: 20001555 Result: Down-regulated in Transcription
  misc_feature: MA Experiment 20001555 PARAMETER Experiment Name: At_Drought_Soil_Dry_P Parameter: Age (day) Value: 24
  misc_feature: MA Experiment 20001555 PARAMETER Experiment Name: At_Drought_Soil_Dry_P Parameter: Organism Value: A. thaliana
  misc_feature: MA Experiment 20001555 PARAMETER Experiment Name: At_Drought_Soil_Dry_P Parameter: Plant Line Value: WS
  misc_feature: MA Experiment 20001555 PARAMETER Experiment Name: At_Drought_Soil_Dry_P Parameter: Post Timepoint (hr) Value: None
  misc_feature: MA Experiment 20001555 PARAMETER Experiment Name: At_Drought_Soil_Dry_P Parameter: Post-Treatment Value: None
  misc_feature: MA Experiment 20001555 PARAMETER Experiment Name: At_Drought_Soil_Dry_P Parameter: Timepoint (day) Value: 10
  misc_feature: MA Experiment 20001555 PARAMETER Experiment Name: At_Drought_Soil_Dry_P Parameter: Treatment Value: Drought vs. No Drought
  misc_feature: MA Experiment ID: 20001556 Result: Down-regulated in Transcription
  misc_feature: MA Experiment 20001556 PARAMETER Experiment Name: At_Drought_Soil_Dry_P Parameter: Age (day) Value: 26
  misc_feature: MA Experiment 20001556 PARAMETER Experiment Name: At_Drought_Soil_Dry_P Parameter: Organism Value: A. thaliana
  misc_feature: MA Experiment 20001556 PARAMETER Experiment Name: At_Drought_Soil_Dry_P Parameter: Plant Line Value: WS
  misc_feature: MA Experiment 20001556 PARAMETER Experiment Name: At_Drought_Soil_Dry_P Parameter: Post Timepoint (hr) Value: None
  misc_feature: MA Experiment 20001556 PARAMETER Experiment Name: At_Drought_Soil_Dry_P Parameter: Post-Treatment Value: None
  misc_feature: MA Experiment 20001556 PARAMETER Experiment Name: At_Drought_Soil_Dry_P Parameter: Timepoint (day) Value: 12
  misc_feature: MA Experiment 20001556 PARAMETER Experiment Name: At_Drought_Soil_Dry_P Parameter: Treatment Value: Drought vs. No Drought
  misc_feature: MA Experiment ID: 20001560 Result: Up-regulated in Transcription
  misc_feature: MA Experiment 20001560 PARAMETER Experiment Name: At_Drought_Soil_Dry_P Parameter: Age (day) Value: 28
  misc_feature: MA Experiment 20001560 PARAMETER Experiment Name: At_Drought_Soil_Dry_P Parameter: Organism Value: A. thaliana
  misc_feature: MA Experiment 20001560 PARAMETER Experiment Name: At_Drought_Soil_Dry_P Parameter: Plant Line Value: WS
  misc_feature: MA Experiment 20001560 PARAMETER Experiment Name: At_Drought_Soil_Dry_P Parameter: Post Timepoint (hr) Value: None
  misc_feature: MA Experiment 20001560 PARAMETER Experiment Name: At_Drought_Soil_Dry_P Parameter: Post-Treatment Value: None
  misc_feature: MA Experiment 20001560 PARAMETER Experiment Name: At_Drought_Soil_Dry_P Parameter: Timepoint (day) Value: 14
  misc_feature: MA Experiment 20001560 PARAMETER Experiment Name: At_Drought_Soil_Dry_P Parameter: Treatment Value: Drought vs. No Drought
  misc_feature: MA Experiment ID: 20001911 Result: Down-regulated in Transcription
  misc_feature: MA Experiment 20001911 PARAMETER Experiment Name: At_Drought_Reproduction_P Parameter: Age (day) Value: 40
  misc_feature: MA Experiment 20001911 PARAMETER Experiment Name: At_Drought_Reproduction_P Parameter: Organism Value: A. thaliana
  misc_feature: MA Experiment 20001911 PARAMETER Experiment Name: At_Drought_Reproduction_P Parameter: Plant Line Value: WS
  misc_feature: MA Experiment 20001911 PARAMETER Experiment Name: At_Drought_Reproduction_P Parameter: Timepoint (day) Value: 10
  misc_feature: MA Experiment 20001911 PARAMETER Experiment Name: At_Drought_Reproduction_P Parameter: Tissue Value: Flowers
  misc_feature: MA Experiment 20001911 PARAMETER Experiment Name: At_Drought_Reproduction_P Parameter: Treatment Value: Drought vs. No Drought
  misc_feature: Phenotype: ROSETTE LEAVES Shape-Oval
  misc_feature: Phenotype: WHOLE PLANT Color-Dark Green
  misc_feature: Phenotype: WHOLE PLANT Size-Small
  misc_feature: Phenotype: WHOLE PLANT Size-Small
  misc_feature: Phenotype: INFLORESCENCE Flowering Time-Late Flowering
  misc_feature: Phenotype: FERTILITY Fertility-Reduced
  misc_feature: Phenotype: ROSETTE LEAVES Shape-Serrate
  misc_feature: Phenotype: ROSETTE LEAVES Other
  misc_feature: Phenotype: WHOLE PLANT Size-Large
  misc_feature: Phenotype: INFLORESCENCE Height-Short
  misc_feature: Phenotype: INFLORESCENCE Strength-Strong
  misc_feature: Phenotype: FERTILITY Fertility-Reduced
  misc_feature: Phenotype: ROSETTE LEAVES Shape-Serrate
  misc_feature: Phenotype: WHOLE PLANT Color-Dark Green
  misc_feature: Phenotype: WHOLE PLANT Size-Small
  misc_feature: Phenotype: INFLORESCENCE Flowering Time-Late Flowering
  misc_feature: Phenotype: INFLORESCENCE Height-Short
  misc_feature: Phenotype: INFLORESCENCE Strength-Strong
  misc_feature: Phenotype: INFLORESCENCE Other
  misc_feature: Phenotype: FERTILITY Fertility-Reduced
  misc_feature: Phenotype: WHOLE PLANT Color-Dark Green
  misc_feature: Phenotype: WHOLE PLANT Size-Small
  misc_feature: Phenotype: WHOLE PLANT Color-Dark Green
  misc_feature: Phenotype: WHOLE PLANT Size-Small
  misc_feature: Phenotype: INFLORESCENCE Other
  misc_feature: Phenotype: ROSETTE LEAVES Shape-Oval
  misc_feature: Phenotype: WHOLE PLANT Color-Dark Green
  misc_feature: Phenotype: WHOLE PLANT Size-Small
  misc_feature: Phenotype: WHOLE PLANT Size-Small
  misc_feature: Phenotype: FERTILITY Fertility-Reduced
tcgcatcactctttcaaagcctcgtgtcttgatttctttcaccaaactcatataatcacatatctctccaagttcatcaagaaaataatataaacacacacatacaagaactgaagaatgagcagacccggagattggaactgcaggtcatgcagccatctcaacttccagcgccgtgactcttgccagcgatgcggtgactctcgttccggccccggtggagttggtggcttagactttggtaatttcggtggcagagccatgtctgttttcggattcaccaccggctccgacgttcgtcccggtgattggtactgcaccgtgggaaactgcgggacacacaacttcgccagtcgctccacctgcttcaaatgcggcactttcaaggacgagaccggcgctggaggcggaggtggtggcatcggcggtccggccatgtttgacgccgacattatgcggtctagagtccccggtaacggtggtcgctctagctggaaatccggcgactggatttgcactaggattggttgcaatgagcataactttgcaagcagaatggaatgcttcaggtgcaatgcaccaagggacttcagcaacagaacctctttctaagttatacaaactgcttttgaagtagccttgtctccaatttcttaggcaccgtttcgatcaatggaaaggagaagcaggagcaaaagagagaattaaaagatgataattttgttagatgttgcaatgagagccaatattgtaactttagctgtcgtgcttttggatgtattatccatttttattaagatttcttttcattttctccttaattcgtaatttttcttttgcagtttctttttaagagttttattattctaatcattgtacgctgcatgtctttcttaaaagaagattctcttcgc

SEQ ID NO: 28020 - protein, 164 aa, Arabidopsis thaliana
  peptide (1)..(164): Ceres Seq. ID no. 12393251
  misc_feature (61)..(92): Pfam Name: Zn-finger in Ran binding protein and others Pfam Description: Zn-finger in Ran binding protein and others
  misc_feature (41)..(158): Homolog of NCBI NO: 15225776 NR Description: putative second messenger-dependent protein kinase
  misc_feature (1)..(65): Homolog of NCBI NO: 27368046 NR Description: zinc finger protein [Gossypium hirsutum]
  misc_feature (3)..(104): Homolog of NCBI NO: 5679336 NR Description: putative zinc finger protein [Oryza sativa]
  misc_feature (3)..(104): Homolog of NCBI NO: 5803246 NR Description: ESTs AU077984(C62969),D41648(S4289), correspond to a region of the predicted gene.~Similar to putative
  misc_feature (53)..(160): Homolog of NCBI NO: 5679336 NR Description: putative zinc finger protein [Oryza sativa]
  misc_feature (53)..(160): Homolog of NCBI NO: 5803246 NR Description: ESTs AU077984(C62969),D41648(S4289), correspond to a region of the predicted gene.~Similar to putative
  misc_feature (1)..(164): Homolog of NCBI NO: 15239445 NR Description: putative protein; protein id: At5g25490.1
  misc_feature (3)..(157): Homolog of NCBI NO: 28849863 NR Description: zinc finger transcription factor ZFP30
  misc_feature (1)..(164): Homolog of NCBI NO: 15232662 NR Description: putative zinc finger protein
  misc_feature (1)..(164): Homolog of NCBI NO: 21595771 NR Description: putative zinc finger protein [Arabidopsis
MSRPGDWNCRSCSHLNFQRRDSCQRCGDSRSGPGGVGGLDFGNFGGRAMSVFGFTTGSDVRPGDWYCTVGNCGTHNFASRSTCFKCGTFKDETGAGGGGGGIGGPAMFDADIMRSRVPGNGGRSSWKSGDWICTRIGCNEHNFASRMECFRCNAPRDFSNRTSF

SEQ ID NO: 28021 - protein, 116 aa, Arabidopsis thaliana
  peptide (1)..(116): Ceres Seq. ID no. 12393252
  misc_feature (13)..(44): Pfam Name: Zn-finger in Ran binding protein and others Pfam Description: Zn-finger in Ran binding protein and others
  misc_feature (1)..(110): Homolog of NCBI NO: 15225776 NR Description: putative second messenger-dependent protein kinase
  misc_feature (1)..(17): Homolog of NCBI NO: 27368046 NR Description: zinc finger protein [Gossypium hirsutum]
  misc_feature (1)..(56): Homolog of NCBI NO: 5679336 NR Description: putative zinc finger protein [Oryza sativa]
  misc_feature (1)..(56): Homolog of NCBI NO: 5803246 NR Description: ESTs AU077984(C62969),D41648(S4289), correspond to a region of the predicted gene.~Similar to putative
  misc_feature (5)..(112): Homolog of NCBI NO: 5679336 NR Description: putative zinc finger protein [Oryza sativa]
  misc_feature (5)..(112): Homolog of NCBI NO: 5803246 NR Description: ESTs AU077984(C62969),D41648(S4289), correspond to a region of the predicted gene.~Similar to putative
  misc_feature (1)..(116): Homolog of NCBI NO: 15239445 NR Description: putative protein; protein id: At5g25490.1
  misc_feature (1)..(109): Homolog of NCBI NO: 28849863 NR Description: zinc finger transcription factor ZFP30
  misc_feature (1)..(116): Homolog of NCBI NO: 15232662 NR Description: putative zinc finger protein
  misc_feature (1)..(116): Homolog of NCBI NO: 21595771 NR Description: putative zinc finger protein [Arabidopsis
MSVFGFTTGSDVRPGDWYCTVGNCGTHNFASRSTCFKCGTFKDETGAGGGGGGIGGPAMFDADIMRSRVPGNGGRSSWKSGDWICTRIGCNEHNFASRMECFRCNAPRDFSNRTSF

SEQ ID NO: 28022 - DNA, 662 bp, Arabidopsis thaliana
  misc_feature (1)..(662): Ceres Seq. ID no. 12333587
  misc_feature: MA Experiment ID: 108461 Result: Down-regulated in Transcription
  misc_feature: MA Experiment 108461 PARAMETER Experiment Name: At_Germinating_Seeds_cDNA_P Parameter: Age (day) Value: 1 vs. 0
  misc_feature: MA Experiment 108461 PARAMETER Experiment Name: At_Germinating_Seeds_cDNA_P Parameter: Tissue Value: Germinating Seeds
  misc_feature: MA Experiment ID: 108462 Result: Down-regulated in Transcription
  misc_feature: MA Experiment 108462 PARAMETER Experiment Name: At_Germinating_Seeds_cDNA_P Parameter: Age (day) Value: 2 vs. 0
  misc_feature: MA Experiment 108462 PARAMETER Experiment Name: At_Germinating_Seeds_cDNA_P Parameter: Tissue Value: Germinating Seeds
  misc_feature: MA Experiment ID: 108463 Result: Down-regulated in Transcription
  misc_feature: MA Experiment 108463 PARAMETER Experiment Name: At_Germinating_Seeds_cDNA_P Parameter: Age (day) Value: 3 vs. 0
  misc_feature: MA Experiment 108463 PARAMETER Experiment Name: At_Germinating_Seeds_cDNA_P Parameter: Tissue Value: Germinating Seeds
  misc_feature: MA Experiment ID: 20000180 Result: Down-regulated in Transcription
  misc_feature: MA Experiment 20000180 PARAMETER Experiment Name: At_Germinating_Seeds_P Parameter: Age (hr) Value: 24 vs. 0
  misc_feature: MA Experiment 20000180 PARAMETER Experiment Name: At_Germinating_Seeds_P Parameter: Tissue Value: Germinating Seeds
  misc_feature: MA Experiment ID: 20000224 Result: Up-regulated in Transcription
gattcattctgcgtcgttcggaactctgcaacgagagttagggtttatacagagcaaagagaaggagaaagcgaaaccaaaaatcgacattaatggctgacgaagattacaacgacgtcgatgacttgggatatgaggatgagccagcagagcctgagattgaagaaggagtagaggaagatgttgaaatgaaggagaatgatgatgtcaatggtgagcctattgaagctgaagataaagtcgaaacagaacctgtgcaacgtccacgcaaaacgtcaaagtttatgaccaagtatgagcgtgctcgtatcctcggcactcgcgctttgcagattagcatgaatgctcctgtcatggttgagctagagggtgagactgatccacttgagattgcgatgaaggagcttaggcagcggaagataccattcactattagacgctatctacctgatgggagtttcgaggaatggggagttgatgaactgatcgtggaagactcatggaaacgtcaagttggtggtgattgataatctgaccagagacaaatcgacaaatacgtatgtaacttgcaagctttcctctcttatggatgataaattttctgatgttgtaatggaactaaaaatcagtgaaacttatggataatactagactcatattcc

SEQ ID NO: 28023 - protein, 144 aa, Arabidopsis thaliana
  peptide (1)..(144): Ceres Seq. ID no. 12333588
  misc_feature (63)..(116): Pfam Name: RNA polymerase Rpb6 Pfam Description: RNA polymerase Rpb6
  misc_feature (29)..(135): Homolog of NCBI NO: 13786166 NR Description: polymerase II [Rattus norvegicus]
  misc_feature (1)..(135): Homolog of NCBI NO: 6522686 NR Description: RNA polymerase common subunit RPB6 [Gallus gallus]
  misc_feature (1)..(135): Homolog of NCBI NO: 31214787 NR Description: ENSANGP00000017467 [Anopheles gambiae]
  misc_feature (3)..(137): Homolog of NCBI NO: 39597419 NR Description: Hypothetical protein CBG03063 [Caenorhabditis
  misc_feature (1)..(136): Homolog of NCBI NO: 17864588 NR Description: RNA polymerase II 18kD subunit CG1163-PA
  misc_feature (1)..(137): Homolog of NCBI NO: 17531543 NR Description: Dna-directed RNA polymerase Iib [Caenorhabditis
  misc_feature (1)..(143): Homolog of NCBI NO: 4960150 NR Description: DNA-directed RNA polymerase IIa [Nicotiana
  misc_feature (1)..(143): Homolog of NCBI NO: 22093730 NR Description: putative DNA-directed RNA polymerase Iib
  misc_feature (1)..(144): Homolog of NCBI NO: 15224039 NR Description: putative DNA-directed RNA polymerase II subunit
  misc_feature (1)..(144): Homolog of NCBI NO: 15242235 NR Description: DNA-directed RNA polymerase II subunit-like
MADEDYNDVDDLGYEDEPAEPEIEEGVEEDVEMKENDDVNGEPIEAEDKVETEPVQRPRKTSKFMTKYERARILGTRALQISMNAPVMVELEGETDPLEIAMKELRQRKIPFTIRRYLPDGSFEEWGVDELIVEDSWKRQVGGD
